United States Patent Application Publication US 2024/0141434 A1 - sequence listing, part 2

SEQ ID NO: 8791 - DNA, 122 bp, Homo sapiens
  misc_feature (61)..(62): /note="This region represents a CpG dinucleotide"
  misc_feature (61)..(61): /note="Nucleotide may be methylated to form 5-methylcytosine"
ggcaaccgtgttgcatgagtcccacgtggtggcaggtcttccatgcatgagccatatttacggtgaacggcggcaactccatgcccaggaacagggctcagacccgcactgagactttagcg

SEQ ID NO: 8792 - DNA, 122 bp, Homo sapiens
  misc_feature (61)..(62): /note="This region represents a CpG dinucleotide"
  misc_feature (61)..(61): /note="Nucleotide may be methylated to form 5-methylcytosine"
ccttccacatcataacgccttctagggctaagtgtctgactcattttgtctccagtgatgcgtgtgttagtccattctcacgctgctataaagaactacctgagactggataatttatgaag

SEQ ID NO: 8793 - DNA, 122 bp, Homo sapiens
  misc_feature (61)..(62): /note="This region represents a CpG dinucleotide"
  misc_feature (61)..(61): /note="Nucleotide may be methylated to form 5-methylcytosine"
tgtaccattgcactccagccttggcaacaagagcgaaactttgtccacaccacccccccacgcccccacaaaaaaagaccgtgatggataagacagtgaattcataattttgttttagcttc

SEQ ID NO: 8794 - DNA, 122 bp, Homo sapiens
  misc_feature (61)..(62): /note="This region represents a CpG dinucleotide"
  misc_feature (61)..(61): /note="Nucleotide may be methylated to form 5-methylcytosine"
tatggctttaaaaaaatctgataaagtttctcataaaggctcacccaggaaaataaataacgcaatgttacaaatacatgtccaagttgatgaagtatttatggatgtggctgaggacagaa

SEQ ID NO: 8795 - DNA, 122 bp, Homo sapiens
  misc_feature (61)..(62): /note="This region represents a CpG dinucleotide"
  misc_feature (61)..(61): /note="Nucleotide may be methylated to form 5-methylcytosine"
aaacaacagccgcccgcagctgtctgtctctaacacgtatcagactttgaaaaacatatccggaggcaaaacaacctgcctcagagaagcccggcaaacacccacggagtctctagcccgtc

SEQ ID NO: 8796 - DNA, 122 bp, Homo sapiens
  misc_feature (61)..(62): /note="This region represents a CpG dinucleotide"
  misc_feature (61)..(61): /note="Nucleotide may be methylated to form 5-methylcytosine"
cattgtaaaaaaaaccacaatgataagtgaactaacagagatatgcctagagccttgcaacggcaaaaggacatgaccacacattgcctagagaagtcatagggaacttaactgaggaagta

SEQ ID NO: 8797 - DNA, 122 bp, Homo sapiens
  misc_feature (61)..(62): /note="This region represents a CpG dinucleotide"
  misc_feature (61)..(61): /note="Nucleotide may be methylated to form 5-methylcytosine"
tgccttccttccttccttctttcttttcctctagttaactctcatgtatcaagaagtaaccgagtgccgggcactcttctaagtattgtgaaatagtgttgagcaatgaacctatttttctc

SEQ ID NO: 8798 - DNA, 122 bp, Homo sapiens
  misc_feature (61)..(62): /note="This region represents a CpG dinucleotide"
  misc_feature (61)..(61): /note="Nucleotide may be methylated to form 5-methylcytosine"
cacaggatttagtcgcagtttattgctaagttattattagaatagtccattgaatcagagcgagtcacaggatgaagatagatcctttgggaaatctagataaagtggaaaaacttgattag

SEQ ID NO: 8799 - DNA, 122 bp, Homo sapiens
  misc_feature (61)..(62): /note="This region represents a CpG dinucleotide"
  misc_feature (61)..(61): /note="Nucleotide may be methylated to form 5-methylcytosine"
tcaagctaccagcacccataagagaactagcatagggtgttgtgcctggagacatgcccacggctgcacagatggaaaaacctctggcccatttggataaaagcttgcacaaaacttcagct

SEQ ID NO: 8800 - DNA, 122 bp, Homo sapiens
  misc_feature (61)..(62): /note="This region represents a CpG dinucleotide"
  misc_feature (61)..(61): /note="Nucleotide may be methylated to form 5-methylcytosine"
cgaggatgtcctgagtcacccaagatgccatctggaaatgtggtggagaaatggttgggacggcctttgccagcactcaggccacagtgcctcttcctagaagattaacctttcattatttt

SEQ ID NO: 8801 - DNA, 122 bp, Homo sapiens
  misc_feature (61)..(62): /note="This region represents a CpG dinucleotide"
  misc_feature (61)..(61): /note="Nucleotide may be methylated to form 5-methylcytosine"
cgctgacccacaggatgtgactcaaatttctaaagctctcacaactctcccctccttccccgtgacactgctctaatcccacctctgggtgtaccagatacctctcgctcctgccttggccc

SEQ ID NO: 8802 - DNA, 122 bp, Homo sapiens
  misc_feature (61)..(62): /note="This region represents a CpG dinucleotide"
  misc_feature (61)..(61): /note="Nucleotide may be methylated to form 5-methylcytosine"
ggatttctcaatcatcactgttttctggaagcaccaggctcaggtagatttcaccattgtcgctggaaacctgattcagaccaggggcaacagtggacagatagggagatgtgatgtgaccc

SEQ ID NO: 8803 - DNA, 122 bp, Homo sapiens
  misc_feature (61)..(62): /note="This region represents a CpG dinucleotide"
  misc_feature (61)..(61): /note="Nucleotide may be methylated to form 5-methylcytosine"
caatataatcccttttaccatctctttgagccccttttacagagtacaaagagttatgtgcgactcccacatgaggcttcttagagggaagactgttcttcagcagagattcagaactactt

SEQ ID NO: 8804 - DNA, 122 bp, Homo sapiens
  misc_feature (61)..(62): /note="This region represents a CpG dinucleotide"
  misc_feature (61)..(61): /note="Nucleotide may be methylated to form 5-methylcytosine"
accacaccctgcaggctggcttcagctctcgctctcagggcctgagtggggacaagacctcggtgagcgatgggcccagcccgagggggacgatctgagctctgcagtctggagagtgggag

SEQ ID NO: 8805 - DNA, 122 bp, Homo sapiens
  misc_feature (61)..(62): /note="This region represents a CpG dinucleotide"
  misc_feature (61)..(61): /note="Nucleotide may be methylated to form 5-methylcytosine"
agccaccacacccgaccaacacacacctttttaacgtatcattgaatgacatgggaagcacgcatgaagccctcctgcacacgaaataccacagtcgtctagagaaaaatcactcttgtgag

SEQ ID NO: 8806 - DNA, 122 bp, Homo sapiens
  misc_feature (61)..(62): /note="This region represents a CpG dinucleotide"
  misc_feature (61)..(61): /note="Nucleotide may be methylated to form 5-methylcytosine"
cctggcagggcccgccacctcacaggctggttctccatctgggggcctgcttgtctgcggcgactctttagttcacaggaggggacggccggcgctgacagcttcccctttgctttccccac

SEQ ID NO: 8807 - DNA, 122 bp, Homo sapiens
  misc_feature (61)..(62): /note="This region represents a CpG dinucleotide"
  misc_feature (61)..(61): /note="Nucleotide may be methylated to form 5-methylcytosine"
ggtccctatatcagttgccttaaagcagcggttctgaaacctgagtgtgtatcagagtcacgtttagggcttgttaaaacacatttcactagacccctcccccagagcttctcattcagaaa

SEQ ID NO: 8808 - DNA, 122 bp, Homo sapiens
  misc_feature (61)..(62): /note="This region represents a CpG dinucleotide"
  misc_feature (61)..(61): /note="Nucleotide may be methylated to form 5-methylcytosine"
gacagcatgttttctatgatttgccacccacaaaagcaatgacttcctaaatatcctacacgatacaaggatctaaatgtggtgcctggaaaagtgagatcttatgaggaagtgtacatgcc

SEQ ID NO: 8809 - DNA, 122 bp, Homo sapiens
  misc_feature (61)..(62): /note="This region represents a CpG dinucleotide"
  misc_feature (61)..(61): /note="Nucleotide may be methylated to form 5-methylcytosine"
gttaggcttcacatttccctacattcaaaagtgcctggagtaaggatcatgttctgatggcggcatgtaaatgcctctttcaagagaggaaattgctttgaagttactgtttccctggcttt

SEQ ID NO: 8810 - DNA, 122 bp, Homo sapiens
  misc_feature (61)..(62): /note="This region represents a CpG dinucleotide"
  misc_feature (61)..(61): /note="Nucleotide may be methylated to form 5-methylcytosine"
aggaaaaatgaaaatccacgaacttggcgatgctccagagaggaaaccagcaagtgttgacgctaaactggcagaaacatcaatacttcctggctcccccactgggtgcatcaatttaccac

SEQ ID NO: 8811 - DNA, 122 bp, Homo sapiens
  misc_feature (61)..(62): /note="This region represents a CpG dinucleotide"
  misc_feature (61)..(61): /note="Nucleotide may be methylated to form 5-methylcytosine"
aaaagaactgtgcttcattttttcccactctctgctccccttgcccacctctgctggaagcggtcattgatggagacccaaatatcaaagtagatctggggctcagtgacattatacttggg

SEQ ID NO: 8812 - DNA, 122 bp, Homo sapiens
  misc_feature (61)..(62): /note="This region represents a CpG dinucleotide"
  misc_feature (61)..(61): /note="Nucleotide may be methylated to form 5-methylcytosine"
cagagcttcagcttcatcattatgaacataaattctctttgtaccaggaaattgtggaaacgatagctcatagacagctcatattgagagaatgttaatgagccactacatactctctgagg

SEQ ID NO: 8813 - DNA, 122 bp, Homo sapiens
  misc_feature (61)..(62): /note="This region represents a CpG dinucleotide"
  misc_feature (61)..(61): /note="Nucleotide may be methylated to form 5-methylcytosine"
ggcagcctggctctggaaccccagtgccggggcttgcctgggaaagtgagatgcaaaccgcggccattgcccaacacacccaccctgccagccctgggtcaggaaggagccagggccaggcc

SEQ ID NO: 8814 - DNA, 122 bp, Homo sapiens
  misc_feature (61)..(62): /note="This region represents a CpG dinucleotide"
  misc_feature (61)..(61): /note="Nucleotide may be methylated to form 5-methylcytosine"
tcaaggatgggcttcgggaaggcctctggccggatgatctggtgacgtaatcccatctgacgctcagccttggactttgaaaaggcacgactgtcctgtctgatggacaggatgcagaagcc

SEQ ID NO: 8815 - DNA, 122 bp, Homo sapiens
  misc_feature (61)..(62): /note="This region represents a CpG dinucleotide"
  misc_feature (61)..(61): /note="Nucleotide may be methylated to form 5-methylcytosine"
gttaaataaggtcacacaagaactgctaagataaacatcaaattcatgtcatttggtaaacgagaaagccatctgtgcaattcactgtgggtaaactgcagactgactggggctagacattt

SEQ ID NO: 8816 - DNA, 122 bp, Homo sapiens
  misc_feature (61)..(62): /note="This region represents a CpG dinucleotide"
  misc_feature (61)..(61): /note="Nucleotide may be methylated to form 5-methylcytosine"
tggcacatacagtgtggaaacactggacaaaggatgattcacatcccaggcaggtaagagcgggacagcgcaagacttcatcatgtgactcaggatgttacacaatttaaaacttacaaatt

SEQ ID NO: 8817 - DNA, 122 bp, Homo sapiens
  misc_feature (61)..(62): /note="This region represents a CpG dinucleotide"
  misc_feature (61)..(61): /note="Nucleotide may be methylated to form 5-methylcytosine"
agtggtgagtaacagcctggcctgagacacaggctcacgcatctgacactggctgagccgcgcactagctgagtggccttgggcatgttttgtaacctccttgactgttcccttatctgtga

SEQ ID NO: 8818 - DNA, 122 bp, Homo sapiens
  misc_feature (61)..(62): /note="This region represents a CpG dinucleotide"
  misc_feature (61)..(61): /note="Nucleotide may be methylated to form 5-methylcytosine"
ccagcacccacagggttcattgcacaatgtccttgtttatacaactccagagctgccctccgtttcccctgaagttgcaaggtttcactaatgcaatagttaggaggaatgagagacaatat

SEQ ID NO: 8819 - DNA, 122 bp, Homo sapiens
  misc_feature (61)..(62): /note="This region represents a CpG dinucleotide"
  misc_feature (61)..(61): /note="Nucleotide may be methylated to form 5-methylcytosine"
agggattaaataacttggcagaggtctcacagtcagtaactgatttgccttccaggggttcgaatcctggctctgccatttggtagctgtctggacttgggtaagccattcaacctctctgt

SEQ ID NO: 8820 - DNA, 122 bp, Homo sapiens
  misc_feature (61)..(62): /note="This region represents a CpG dinucleotide"
  misc_feature (61)..(61): /note="Nucleotide may be methylated to form 5-methylcytosine"
tattgaaaaacgcctctggagattcttcaggcactccttccattatttaataatctttgccgcaaataagctctgccttatagctgacctaaatccctcgggttatctcctgtagataaggg

SEQ ID NO: 8821 - DNA, 122 bp, Homo sapiens
  misc_feature (61)..(62): /note="This region represents a CpG dinucleotide"
  misc_feature (61)..(61): /note="Nucleotide may be methylated to form 5-methylcytosine"
gttgcatagggcctcaacaaggagaaacaagtgtccattctgtcatcacaggtggtatcacgatctgtctgtgcagacagaattgtgagtttctggttctggggattctagtagagaaccat

SEQ ID NO: 8822 - DNA, 122 bp, Homo sapiens
  misc_feature (61)..(62): /note="This region represents a CpG dinucleotide"
  misc_feature (61)..(61): /note="Nucleotide may be methylated to form 5-methylcytosine"
tggggcttcttggctgtttgtatatcttctttgggaaaatgttgatccaagtcctttgtccgtgtttgaattgttgtcagagtgtttttctcttaactcctgtgttatgattacattgattg

SEQ ID NO: 8823 - DNA, 122 bp, Homo sapiens
  misc_feature (61)..(62): /note="This region represents a CpG dinucleotide"
  misc_feature (61)..(61): /note="Nucleotide may be methylated to form 5-methylcytosine"
ggccttggaaaggcttgatgtagaccgctctttcagaaaacttgaccgagaagggaagtacgcttctagggtagcatcagagcagaacatggggaaagggagacatttcacaagaagggaga

SEQ ID NO: 8824 - DNA, 122 bp, Homo sapiens
  misc_feature (61)..(62): /note="This region represents a CpG dinucleotide"
  misc_feature (61)..(61): /note="Nucleotide may be methylated to form 5-methylcytosine"
tttaatcttattcctgaagcaaaacaaataactcatcatggctgagttatttatgagtgtcggaagtcactctggaaaagataaaggtgtgtttactactactaatttgtcttgaggatctg

SEQ ID NO: 8825 - DNA, 122 bp, Homo sapiens
  misc_feature (61)..(62): /note="This region represents a CpG dinucleotide"
  misc_feature (61)..(61): /note="Nucleotide may be methylated to form 5-methylcytosine"
atgaaggaggccctgccttctccatggacaaatccccagctttcaggacagtgtctgggacgtggtaagtactcaagaaatatttattaaataaacaaatgaaggaaagaggtacttctccc

SEQ ID NO: 8826 - DNA, 122 bp, Homo sapiens
  misc_feature (61)..(62): /note="This region represents a CpG dinucleotide"
  misc_feature (61)..(61): /note="Nucleotide may be methylated to form 5-methylcytosine"
tctccaaaactcaccacttccaggaagaaatccacatggggcctcttatgtacaaaaaaccggacaggatgtttgtctattaccacctacagaggaacaagatgggctgggggatgtcatga

SEQ ID NO: 8827 - DNA, 122 bp, Homo sapiens
  misc_feature (61)..(62): /note="This region represents a CpG dinucleotide"
  misc_feature (61)..(61): /note="Nucleotide may be methylated to form 5-methylcytosine"
cctgcaagtccagtgtcaatatttgctttgctttcaagttccacacaaaatcaaagacagcgttctgtataattatactgtagtattaacgggatagttgtgtcttaggtgccttggttagc

SEQ ID NO: 8828 - DNA, 122 bp, Homo sapiens
  misc_feature (61)..(62): /note="This region represents a CpG dinucleotide"
  misc_feature (61)..(61): /note="Nucleotide may be methylated to form 5-methylcytosine"
tcgaactcctggcctccagcgatcacccaatttcagcctcccaaagtgctgggattaccgcgcccagcgtgaactgctttgaaccatattgtctacttgactttcagacagccagatggtgc

SEQ ID NO: 8829 - DNA, 122 bp, Homo sapiens
  misc_feature (61)..(62): /note="This region represents a CpG dinucleotide"
  misc_feature (61)..(61): /note="Nucleotide may be methylated to form 5-methylcytosine"
catttaaaatatgtctcttgtgttctccataacaaaggccagctctccagaggaaactaccggagccttatctgacctggaggaagggcaattagtcaactcccaccccctacagatttcct

SEQ ID NO: 8830 - DNA, 122 bp, Homo sapiens
  misc_feature (61)..(62): /note="This region represents a CpG dinucleotide"
  misc_feature (61)..(61): /note="Nucleotide may be methylated to form 5-methylcytosine"
ctacagaactcacacacctaactgctatgccacctctcagccatgctgatgtcaggtagacgttaggtagcatgacaactatcatcaaaacactcccaggggatcttgatttctggaattcc

SEQ ID NO: 8831 - DNA, 122 bp, Homo sapiens
  misc_feature (61)..(62): /note="This region represents a CpG dinucleotide"
  misc_feature (61)..(61): /note="Nucleotide may be methylated to form 5-methylcytosine"
tatacacagaaatccgacggaatgctttttattcccattcaagcagttactacttatctgcgtgactaaggtatggaagatctaaaaagaaactaagtgctagtctggcctctactccttca

SEQ ID NO: 8832 - DNA, 122 bp, Homo sapiens
  misc_feature (61)..(62): /note="This region represents a CpG dinucleotide"
  misc_feature (61)..(61): /note="Nucleotide may be methylated to form 5-methylcytosine"
gtatgtctcaaaagcacatagatccccagttatttttctgtattgtggttctcatatacacgtacctccatagctcagtatatgtttctgtactatacacctgttcctgagggagtgatagg

SEQ ID NO: 8833 - DNA, 122 bp, Homo sapiens
  misc_feature (61)..(62): /note="This region represents a CpG dinucleotide"
  misc_feature (61)..(61): /note="Nucleotide may be methylated to form 5-methylcytosine"
agtgttattctgctttgtaggcttctggcttttcttcttcaaggcacacttctggctaaacgttttctgaacatggccttctcttagtaatctgtttgaaaagtctgtgatttcccaccctc

SEQ ID NO: 8834 - DNA, 122 bp, Homo sapiens
  misc_feature (61)..(62): /note="This region represents a CpG dinucleotide"
  misc_feature (61)..(61): /note="Nucleotide may be methylated to form 5-methylcytosine"
catacgtttcaactgccaagcagcagtacatgaagagttcttgtttctgcacttccttaccgatgaaaataataccactaccccacatgacacttactatgtgccaggcatctttctaaaca

SEQ ID NO: 8835 - DNA, 122 bp, Homo sapiens
  misc_feature (61)..(62): /note="This region represents a CpG dinucleotide"
  misc_feature (61)..(61): /note="Nucleotide may be methylated to form 5-methylcytosine"
tacgggtagaggccagtgactgagactctcattgcgggagggggcgattagtcgcaaagccgcccattccaggatttggagatgcagctccagcacacccttctttctctgtctgcccttag

SEQ ID NO: 8836 - DNA, 122 bp, Homo sapiens
  misc_feature (61)..(62): /note="This region represents a CpG dinucleotide"
  misc_feature (61)..(61): /note="Nucleotide may be methylated to form 5-methylcytosine"
ttttggcacctccaggaatctgtgggctccgatatccttatcagcagtggcaacaagaaacgctccagccacaaaactccaagtgaaggcttgtgggctagggtgatcacagcttctacata

SEQ ID NO: 8837 - DNA, 122 bp, Homo sapiens
  misc_feature (61)..(62): /note="This region represents a CpG dinucleotide"
  misc_feature (61)..(61): /note="Nucleotide may be methylated to form 5-methylcytosine"
ggggacgcagcgtccgcaggacggcagggccgtatcctgcggagcagggttctgatgcagcgggtgagcactgggtgtgtgagcactgggggagggcggcagagaaggcggagggccgaggc

SEQ ID NO: 8838 - DNA, 122 bp, Homo sapiens
  misc_feature (61)..(62): /note="This region represents a CpG dinucleotide"
  misc_feature (61)..(61): /note="Nucleotide may be methylated to form 5-methylcytosine"
gacgaaaagaggggcaagtcactcttcatctctgtgtgtatatagatacatctttgccctcgtagaatttactgcctcaggaaattttcaataaaatgttaagattcaaatggtagataaat

SEQ ID NO: 8839 - DNA, 122 bp, Homo sapiens
  misc_feature (61)..(62): /note="This region represents a CpG dinucleotide"
  misc_feature (61)..(61): /note="Nucleotide may be methylated to form 5-methylcytosine"
taatttccagaagatcaccagggaaacccctagaaaaactaagctcatttaacttaaatccgaaagagcacccagcagtctaaggaaaaacatttagatgtttgttctggcctatttctatg

SEQ ID NO: 8840 - DNA, 122 bp, Homo sapiens
  misc_feature (61)..(62): /note="This region represents a CpG dinucleotide"
  misc_feature (61)..(61): /note="Nucleotide may be methylated to form 5-methylcytosine"
aaggcacaaaatttaaaaagtaactgctgtattgcccggcgactgctcaaatgcagtcagcgctttgctggctggcattttcctgaaactatatgccataaactgatggcatcaggaggaat

SEQ ID NO: 8841 - DNA, 122 bp, Homo sapiens
  misc_feature (61)..(62): /note="This region represents a CpG dinucleotide"
  misc_feature (61)..(61): /note="Nucleotide may be methylated to form 5-methylcytosine"
aaagcacatagtagaccctcaatacatggttgaaatcattgttaggaaaaagagaaggaacgttcctcactactggctggaaacagggtaaatcccatgtaggaaatggccacagcctatga

SEQ ID NO: 8842 - DNA, 122 bp, Homo sapiens
  misc_feature (61)..(62): /note="This region represents a CpG dinucleotide"
  misc_feature (61)..(61): /note="Nucleotide may be methylated to form 5-methylcytosine"
ctactgaatcaagcagaccttcatttccaactttgtagaccattgtgccctgtgggtcggcgtcttttctaggcagggacttgtgatcacatagacgtgtgtctgataagaggggagcggga

SEQ ID NO: 8843 - DNA, 122 bp, Homo sapiens
  misc_feature (61)..(62): /note="This region represents a CpG dinucleotide"
  misc_feature (61)..(61): /note="Nucleotide may be methylated to form 5-methylcytosine"
gcataggtgaacattctcaaatgccagctctaagaatctgccagatgagggcttaaccgccgcctctggtcctcagcttgagccctgcagtgaatgttttctgagcctatttcctgagtctg

SEQ ID NO: 8844 - DNA, 122 bp, Homo sapiens
  misc_feature (61)..(62): /note="This region represents a CpG dinucleotide"
  misc_feature (61)..(61): /note="Nucleotide may be methylated to form 5-methylcytosine"
agaaacgggaaatcaaatccttaagtcaactagttaaattttactgtatgcagccgggcacgctggcccatgcctgtaatcccagcacttcaggaggccaaggcaggtggatcacctgaggt

SEQ ID NO: 8845 - DNA, 122 bp, Homo sapiens
  misc_feature (61)..(62): /note="This region represents a CpG dinucleotide"
  misc_feature (61)..(61): /note="Nucleotide may be methylated to form 5-methylcytosine"
cttaaaatagacatctgtacacaggatggatgtcacatcttttaatagtcgtgccaggcacgttgttagatgcagggacacagcatggaggaatcggtggaggttgctgccctcaagtttcc

SEQ ID NO: 8846 - DNA, 122 bp, Homo sapiens
  misc_feature (61)..(62): /note="This region represents a CpG dinucleotide"
  misc_feature (61)..(61): /note="Nucleotide may be methylated to form 5-methylcytosine"
gagaatttgtgcaattcttgtcactgtcatcttctgagcttagtgctatttaatgcccatcgctcacagggagcagctgaggcccagagaaaagggagtagaaggcattgtctagtccaagg

SEQ ID NO: 8847 - DNA, 122 bp, Homo sapiens
  misc_feature (61)..(62): /note="This region represents a CpG dinucleotide"
  misc_feature (61)..(61): /note="Nucleotide may be methylated to form 5-methylcytosine"
tggatttcaatgagtacatctagtatttcaattgtaacaattaactacagtcatgtgttacgtaacaatgtggatacatttcgagacatgctttgttaggtgatttcatcattatgtgaaca

SEQ ID NO: 8848 - DNA, 122 bp, Homo sapiens
  misc_feature (61)..(62): /note="This region represents a CpG dinucleotide"
  misc_feature (61)..(61): /note="Nucleotide may be methylated to form 5-methylcytosine"
aggtttgcatcagtcactgcactgtcagggactctagtgaccaaacaagcccgggccagccggcccccaccttgccacctcccgccactcgcacccgtgtggacggaggcggccagcatcgg

SEQ ID NO: 8849 - DNA, 122 bp, Homo sapiens
  misc_feature (61)..(62): /note="This region represents a CpG dinucleotide"
  misc_feature (61)..(61): /note="Nucleotide may be methylated to form 5-methylcytosine"
aaaaaaagaaagaaagaaagaaaaagaaaaaaaaaaaaaagcccgctactaagacggagccggctctggaatagataccattagaaccacagtgtttctggaataaagatatctaatttcct

SEQ ID NO: 8850 - DNA, 122 bp, Homo sapiens
  misc_feature (61)..(62): /note="This region represents a CpG dinucleotide"
  misc_feature (61)..(61): /note="Nucleotide may be methylated to form 5-methylcytosine"
gtcccctggtctagcatttaataggtaatccacaatttttgctgaatgtcaatagctaaacgttagtgacctcttaagactgtctggcagagtaaatcttcggctttatatcacattctccg

SEQ ID NO: 8851 - DNA, 122 bp, Homo sapiens
  misc_feature (61)..(62): /note="This region represents a CpG dinucleotide"
  misc_feature (61)..(61): /note="Nucleotide may be methylated to form 5-methylcytosine"
ttccagtgtcacctgcaggatgccatgggatacccatgagcccaggcaaatctcccaagacgctgccaagccactctgcagagctgctctgggtcctgccccaggtgctgtgtgagggagct

SEQ ID NO: 8852 - DNA, 122 bp, Homo sapiens
  misc_feature (61)..(62): /note="This region represents a CpG dinucleotide"
  misc_feature (61)..(61): /note="Nucleotide may be methylated to form 5-methylcytosine"
taacaattagagctgcttgaacatgggatgaatagctttgaagtatggtgagtttctcaccgctgaagatgttgaaatagcctgaatgggtaacttccttgagcaggctgaacaagggctta

SEQ ID NO: 8853 - DNA, 122 bp, Homo sapiens
  misc_feature (61)..(62): /note="This region represents a CpG dinucleotide"
  misc_feature (61)..(61): /note="Nucleotide may be methylated to form 5-methylcytosine"
cttgagcaggacaacagccaaagagtattattgcatagttcctgtcccctatctgggctacgattgtgtctgagagtaatagcacttatttattaactggaagaaattttacaggcacctat

SEQ ID NO: 8854 - DNA, 122 bp, Homo sapiens
  misc_feature (61)..(62): /note="This region represents a CpG dinucleotide"
  misc_feature (61)..(61): /note="Nucleotide may be methylated to form 5-methylcytosine"
ttgaatcctgtactttcaatgttgacttctgagctttatcttgactttctttgattggcacgcccttcccaaggagctggttgtctaggtgatgaatactgcatgtcataataaaacaaaat

SEQ ID NO: 8855 - DNA, 122 bp, Homo sapiens
  misc_feature (61)..(62): /note="This region represents a CpG dinucleotide"
  misc_feature (61)..(61): /note="Nucleotide may be methylated to form 5-methylcytosine"
atttcaaaatatattttttgagaagttctaagttaaacagctcttaaaatgtattatgtacgtggttgtggagggaagggagatgtttcattatgagatcccaggcaaatggcaatatgttt

SEQ ID NO: 8856 - DNA, 122 bp, Homo sapiens
  misc_feature (61)..(62): /note="This region represents a CpG dinucleotide"
  misc_feature (61)..(61): /note="Nucleotide may be methylated to form 5-methylcytosine"
aaaaagagtgaaaagatggggaagaagaaggaagagaggagtgagatgccagaattccttcgtgtgcctccagaattcccaggaaatgctcatgatgttagctcatatttgctgaagtccag

SEQ ID NO: 8857 - DNA, 122 bp, Homo sapiens
  misc_feature (61)..(62): /note="This region represents a CpG dinucleotide"
  misc_feature (61)..(61): /note="Nucleotide may be methylated to form 5-methylcytosine"
ctagtgcaaggatcagatagcacctgcttggaagttcactgattaatgatttaacaagggcggtcacatgggacaactgctgcttttctctgccctcatttttcttactaacaggtctgaaa

SEQ ID NO: 8858 - DNA, 122 bp, Homo sapiens
  misc_feature (61)..(62): /note="This region represents a CpG dinucleotide"
  misc_feature (61)..(61): /note="Nucleotide may be methylated to form 5-methylcytosine"
cctctatgaaatctagaacacagatcagggaaacagattctttctacagctcaggtgcagcgtgaagattatgtgattgggacaagtatgtgtttcatgttctcagggttcccactgggtag

SEQ ID NO: 8859 - DNA, 122 bp, Homo sapiens
  misc_feature (61)..(62): /note="This region represents a CpG dinucleotide"
  misc_feature (61)..(61): /note="Nucleotide may be methylated to form 5-methylcytosine"
tttgcatggagcagcagtgcattagctactttcaaaacatctgactgatcccagattacacgagacaaaggcctggatcctttgcctttagacaggtgcataatagtgtgaattttctgaaa

SEQ ID NO: 8860 - DNA, 122 bp, Homo sapiens
  misc_feature (61)..(62): /note="This region represents a CpG dinucleotide"
  misc_feature (61)..(61): /note="Nucleotide may be methylated to form 5-methylcytosine"
ctaatcgcttggcttcttttaactccttttatttttgacaatgtgagaaccaggcctggccggctggagtcggagagagggacagactgctctctggaaggctggccagacacgggaagata

SEQ ID NO: 8861 - DNA, 122 bp, Homo sapiens
  misc_feature (61)..(62): /note="This region represents a CpG dinucleotide"
  misc_feature (61)..(61): /note="Nucleotide may be methylated to form 5-methylcytosine"
ttatgagctgtgtgatcttaggcaaactgcttagcctctctaatcctggatgtcctcatccgcaaaatggtgccagtaatgtcacccatctatatagctcacagagctacagtaaggataaa

SEQ ID NO: 8862 - DNA, 122 bp, Homo sapiens
  misc_feature (61)..(62): /note="This region represents a CpG dinucleotide"
  misc_feature (61)..(61): /note="Nucleotide may be methylated to form 5-methylcytosine"
ttaaggaagcatcttgccaggagacacaaagctaacaagagtggagcctgcagctggagccgcagagcctaatcactacacccgcccatctctgctagggtttcatgacttcgtatcgggga

SEQ ID NO: 8863 - DNA, 122 bp, Homo sapiens
  misc_feature (61)..(62): /note="This region represents a CpG dinucleotide"
  misc_feature (61)..(61): /note="Nucleotide may be methylated to form 5-methylcytosine"
gccgactggctcctctcagggtgttgttgatgaaatttggtctcttgtcacatcatcttccgagctttgcagcagctactccctcatggtttctcatgcatgatcatgaatttatggataga

SEQ ID NO: 8864 - DNA, 122 bp, Homo sapiens
  misc_feature (61)..(62): /note="This region represents a CpG dinucleotide"
  misc_feature (61)..(61): /note="Nucleotide may be methylated to form 5-methylcytosine"
agctgaagactcagtgatcttgctaagcagtgtccaacacaagccctcttctattggagtcgttggatgtaaaatattttcttaagtcataatctatattgacagttaaatgggatattcaa

SEQ ID NO: 8865 - DNA, 122 bp, Homo sapiens
  misc_feature (61)..(62): /note="This region represents a CpG dinucleotide"
  misc_feature (61)..(61): /note="Nucleotide may be methylated to form 5-methylcytosine"
tacgaggccactgtagttcaatggtgataggctggttgaagtggagtgacatttaggatacgatattgtaagaaaatgacacaaaagggcaaagaacagaagaatggggaatgagtccatat

SEQ ID NO: 8866 - DNA, 122 bp, Homo sapiens
  misc_feature (61)..(62): /note="This region represents a CpG dinucleotide"
  misc_feature (61)..(61): /note="Nucleotide may be methylated to form 5-methylcytosine"
ctggtcccaggtgcctccgttttacaaataggaggataacagctgtggaaataaagcccacgcaaatgagaacaaaagacgatttattcaggacttgctgtacaagggagtcgccgtcctct

SEQ ID NO: 8867 - DNA, 122 bp, Homo sapiens
  misc_feature (61)..(62): /note="This region represents a CpG dinucleotide"
  misc_feature (61)..(61): /note="Nucleotide may be methylated to form 5-methylcytosine"
acagcaggctgggcagctggggcagctctgtttcactgcagggcaacctcctctccatcacgggttctgctaggatgtgctcttctcacagcgatggctgcagggcaagagggcaaggctgc

SEQ ID NO: 8868 - DNA, 122 bp, Homo sapiens
  misc_feature (61)..(62): /note="This region represents a CpG dinucleotide"
  misc_feature (61)..(61): /note="Nucleotide may be methylated to form 5-methylcytosine"
aataaggaagtgaatggtgaataagccataaaactgccaccacccagaggtagccaggatcgaagcaaggggtcacggtcatcagaggaagcacagaatatcaatagctcaagacattgcag

SEQ ID NO: 8869 - DNA, 122 bp, Homo sapiens
  misc_feature (61)..(62): /note="This region represents a CpG dinucleotide"
  misc_feature (61)..(61): /note="Nucleotide may be methylated to form 5-methylcytosine"
ccgccctcgtgcgcattctggttctagacgtaaatgacaacgcccctgattttgtgcggtcgctctacaaggtgcaggtgcccgaaaatagccccgttggttccatggttgtctccgtgtca

SEQ ID NO: 8870 - DNA, 122 bp, Homo sapiens
  misc_feature (61)..(62): /note="This region represents a CpG dinucleotide"
  misc_feature (61)..(61): /note="Nucleotide may be methylated to form 5-methylcytosine"
caccttgataatcccaggcttcttggctaatcttagcgccttggcccagagcagtcacatcggcaaaaaattcccgcccacttctcctcccagttccacccctcacagcagctgctcacatc

SEQ ID NO: 8871 - DNA, 122 bp, Homo sapiens
  misc_feature (61)..(62): /note="This region represents a CpG dinucleotide"
  misc_feature (61)..(61): /note="Nucleotide may be methylated to form 5-methylcytosine"
gactgcaccgtgtttattcatgtgtctgacgcctgagcaaagtggagttccttaaagtcccggagctgtgacactcatctccatagcagcagccccaggtccttcaagacagccgtgcctct

SEQ ID NO: 8872 - DNA, 122 bp, Homo sapiens
  misc_feature (61)..(62): /note="This region represents a CpG dinucleotide"
  misc_feature (61)..(61): /note="Nucleotide may be methylated to form 5-methylcytosine"
ggacaaattgaccatgtgtagactccaacagctgtgggtgagaaccgggcaagatgacgacgctgccatgtgcccaatacacctggcccagaggcattcagcagaggacggaggtgtccaag

SEQ ID NO: 8873 - DNA, 122 bp, Homo sapiens
  misc_feature (61)..(62): /note="This region represents a CpG dinucleotide"
  misc_feature (61)..(61): /note="Nucleotide may be methylated to form 5-methylcytosine"
agaaaaccacagcagctgataagccatggcttttccaggacgtggccagagatggcttctcgctttacatatctgcagaccataaagtaggtcaagaatccggggtgagggcttggccagcc

SEQ ID NO: 8874 - DNA, 122 bp, Homo sapiens
  misc_feature (61)..(62): /note="This region represents a CpG dinucleotide"
  misc_feature (61)..(61): /note="Nucleotide may be methylated to form 5-methylcytosine"
taacataaaatgcaagtcaatctgcagagccccattcagctccatgccttcagtagagaacgtgtgtgtgtaacactgggctatactgccccaagtgagagttctcccctatgatgggtagg

SEQ ID NO: 8875 - DNA, 122 bp, Homo sapiens
  misc_feature (61)..(62): /note="This region represents a CpG dinucleotide"
  misc_feature (61)..(61): /note="Nucleotide may be methylated to form 5-methylcytosine"
agaaacagaaaagcgagtgctaaaacataggcccattaaaaaagtgtgtgtgtagccgggcgcggtggctcacgcctgtaatcccagcactttgggagggtgaggcgggtggatcgcctgag

SEQ ID NO: 8876 - DNA, 122 bp, Homo sapiens
  misc_feature (61)..(62): /note="This region represents a CpG dinucleotide"
  misc_feature (61)..(61): /note="Nucleotide may be methylated to form 5-methylcytosine"
gaacggattctgggcttcagactctctgtccagtgcattgccaatggtccttttgtgaggcgtgtcctgcaagatgaccttggggcctgagccacatctatgtgccatccagcctggctctc

SEQ ID NO: 8877 - DNA, 122 bp, Homo sapiens
  misc_feature (61)..(62): /note="This region represents a CpG dinucleotide"
  misc_feature (61)..(61): /note="Nucleotide may be methylated to form 5-methylcytosine"
ctgttgatatgggtctcaatatgcatgacttgccctggcctgtgagggctgatggacatgcgtcaaggatacacatgacaagtatgtacactggggtttgctcttgctcctctgccatcacc

SEQ ID NO: 8878 - DNA, 122 bp, Homo sapiens
  misc_feature (61)..(62): /note="This region represents a CpG dinucleotide"
  misc_feature (61)..(61): /note="Nucleotide may be methylated to form 5-methylcytosine"
attatgttccagtggttactggaagatgtctctctacctggttacccacactggacttgacgctggctttaaatgactgctctcccttctcaagtgctatggaagtacgactggcaggactg

SEQ ID NO: 8879 - DNA, 122 bp, Homo sapiens
  misc_feature (61)..(62): /note="This region represents a CpG dinucleotide"
  misc_feature (61)..(61): /note="Nucleotide may be methylated to form 5-methylcytosine"
tctggaaaacaatttggcagtgtttcacaaagttaaacatacacttacctatagccctgtcgtcccacatcggtatttacctgagagaaattaaaacttaaattcacacaaaaacctgtaca

SEQ ID NO: 8880 - DNA, 122 bp, Homo sapiens
  misc_feature (61)..(62): /note="This region represents a CpG dinucleotide"
  misc_feature (61)..(61): /note="Nucleotide may be methylated to form 5-methylcytosine"
agaaactgctcctggggtcctccttgactgggtttgaggcagtgccctggcctgggagagcgggcactgggtcatcgggatccctttgtttatttgggtgttttctcttccctatatgaagc

SEQ ID NO: 8881 - DNA, 122 bp, Homo sapiens
  misc_feature (61)..(62): /note="This region represents a CpG dinucleotide"
  misc_feature (61)..(61): /note="Nucleotide may be methylated to form 5-methylcytosine"
ttgtaaatatgacttattctagctgatggtcaaaatccgcagtgttagcagttagtatgacgtcataccttctgatacatcttctttaatgccacagctccaatagggataatattgaaaca

SEQ ID NO: 8882 - DNA, 122 bp, Homo sapiens
  misc_feature (61)..(62): /note="This region represents a CpG dinucleotide"
  misc_feature (61)..(61): /note="Nucleotide may be methylated to form 5-methylcytosine"
taagttactattgcacaatttagagttagactgtcagtgctttgggatgtggatggtaatcgttacaagagattttgctaaaagtaagctttgaaataaataggttctgcttcagataccta

SEQ ID NO: 8883 - DNA, 122 bp, Homo sapiens
  misc_feature (61)..(62): /note="This region represents a CpG dinucleotide"
  misc_feature (61)..(61): /note="Nucleotide may be methylated to form 5-methylcytosine"
tttccctttaaaagtgcatcaagctatttttaggagggcagggtggctggttttgggggacgaatgaaagcatgacatcaccatgctattttggtagcgcaagaagagaaacatgccaggct

SEQ ID NO: 8884 - DNA, 122 bp, Homo sapiens
  misc_feature (61)..(62): /note="This region represents a CpG dinucleotide"
  misc_feature (61)..(61): /note="Nucleotide may be methylated to form 5-methylcytosine"
gtgacaatgcgggtgtttcaggaaatggtgtgactacagtctagtgggtggggaagtgaccgaaaatgagactgagtctggactgaaaagtgacctgagtgacacacataaaggaactgaaa

SEQ ID NO: 8885 - DNA, 122 bp, Homo sapiens
  misc_feature (61)..(62): /note="This region represents a CpG dinucleotide"
  misc_feature (61)..(61): /note="Nucleotide may be methylated to form 5-methylcytosine"
gaacaggagatgtccctcctgggacatcaactcttccacaacagggctgggcacgcaggacgctcagaagaaggagcatgtgcctgccttcagcttgtactgttcttgttgaggggaacagg

SEQ ID NO: 8886 - DNA, 122 bp, Homo sapiens
  misc_feature (61)..(62): /note="This region represents a CpG dinucleotide"
  misc_feature (61)..(61): /note="Nucleotide may be methylated to form 5-methylcytosine"
ttgtactgtctccttctccttttgctgcaagacttggatctgctcttgaatctgcccctgcggaaagagggccgtttggacaggctgtgcctggagatttctggcctcataaaatcctcctg

SEQ ID NO: 8887 - DNA, 122 bp, Homo sapiens
  misc_feature (61)..(62): /note="This region represents a CpG dinucleotide"
  misc_feature (61)..(61): /note="Nucleotide may be methylated to form 5-methylcytosine"
ggatacttgtgatgggagaggtggtgcgggctccgaattctttccaatagtctgcaaacccgcagagccatgaagcattgtctgtaggccagcactcatcctccacccctctgcctgcttct

SEQ ID NO: 8888 - DNA, 122 bp, Homo sapiens
  misc_feature (61)..(62): /note="This region represents a CpG dinucleotide"
  misc_feature (61)..(61): /note="Nucleotide may be methylated to form 5-methylcytosine"
gtcattttgtgtgtgcctattggtgttttgcagagaccccctaaaatgttttaagccactcgctgagggtagccctgcatatagaggtttctgtgtggtatcaaattactgaggactggagt

SEQ ID NO: 8889 - DNA, 122 bp, Homo sapiens
  misc_feature (61)..(62): /note="This region represents a CpG dinucleotide"
  misc_feature (61)..(61): /note="Nucleotide may be methylated to form 5-methylcytosine"
aatgaactacagatgaggaagtgaagctcggagtggtcacatgacctgtccaaggttccacgtgtagaatgtgctatagctaaagttttgaggtttgaccttagatcatctaactacagagc

SEQ ID NO: 8890 - DNA, 122 bp, Homo sapiens
  misc_feature (61)..(62): /note="This region represents a CpG dinucleotide"
  misc_feature (61)..(61): /note="Nucleotide may be methylated to form 5-methylcytosine"
gcaacagaagccagtctgctgggaggaggcagggacagagaagggtctctctctggagtacgaaagcagctgtcaacaagggattgaagtagatgactaagccagcttcagtagctagatcc

SEQ ID NO: 8891 - DNA, 122 bp, Homo sapiens
  misc_feature (61)..(62): /note="This region represents a CpG dinucleotide"
  misc_feature (61)..(61): /note="Nucleotide may be methylated to form 5-methylcytosine"
tgctgggactgtccttgagtctagcagatgcgtcagcctctttacttcctcccagaaagtcgacctcctgtgctcgctctgtggagatcaggcaccggccactgtgcgctgatcccagctca

SEQ ID NO: 8892 - DNA, 122 bp, Homo sapiens
  misc_feature (61)..(62): /note="This region represents a CpG dinucleotide"
  misc_feature (61)..(61): /note="Nucleotide may be methylated to form 5-methylcytosine"
tcagatgtacaaaaacaggcattcatcatgaatcgcactgttagcatgaatcatctggcacggcccaaggccccaggtataccaaggcacttgggccgaatgttccaagggattaaatgtca

SEQ ID NO: 8893 - DNA, 122 bp, Homo sapiens
  misc_feature (61)..(62): /note="This region represents a CpG dinucleotide"
  misc_feature (61)..(61): /note="Nucleotide may be methylated to form 5-methylcytosine"
gtcttttggttgagctcgtttttctggagctctctttcaggccagatcctggccacatcccggggttgtgacccacgtgccttggtttcttgccaggtcgtttgctaagcccccgaagcagg

SEQ ID NO: 8894 - DNA, 122 bp, Homo sapiens
  misc_feature (61)..(62): /note="This region represents a CpG dinucleotide"
  misc_feature (61)..(61): /note="Nucleotide may be methylated to form 5-methylcytosine"
tgtaacatgaccccaaagtctcatttacatcacagcaattaaaatatattccacattacacgtttactaccacatactgtagaaataatccaatgaaatgtggctattttccaaaaataata

SEQ ID NO: 8895 - DNA, 122 bp, Homo sapiens
  misc_feature (61)..(62): /note="This region represents a CpG dinucleotide"
  misc_feature (61)..(61): /note="Nucleotide may be methylated to form 5-methylcytosine"
gcactgccacttacctgctagctatgtgaccttaggcaagttgcttaacatctctatgtccgttcttcacttgccaaatggataagaatagtgcctcccccttagggctgttctgagagcta

SEQ ID NO: 8896 - DNA, 122 bp, Homo sapiens
  misc_feature (61)..(62): /note="This region represents a CpG dinucleotide"
  misc_feature (61)..(61): /note="Nucleotide may be methylated to form 5-methylcytosine"
agacgttggtttacagcccttattcctgggagctcttatgtatttgagctacatataactcgttcttctctagccttggccatagtgatcaagggcccctggaacttgaatgcatatagtca

SEQ ID NO: 8897 - DNA, 122 bp, Homo sapiens
  misc_feature (61)..(62): /note="This region represents a CpG dinucleotide"
  misc_feature (61)..(61): /note="Nucleotide may be methylated to form 5-methylcytosine"
cggtagtgttaaaagtcatagagtggtcaagcgtccaggacatttggcaacaaggagcagcgtttgttattttagagagagctggcttagcagagggtggaggcaaagccagatgatgaagg

SEQ ID NO: 8898 - DNA, 122 bp, Homo sapiens
  misc_feature (61)..(62): /note="This region represents a CpG dinucleotide"
  misc_feature (61)..(61): /note="Nucleotide may be methylated to form 5-methylcytosine"
caggcaatttattttgagccagaaaaataaaatataatcttaggccatctggttctgtaacgcactgtatttgtttagaaaggtcactgttgtcaagttattgaatgttatctctggaattg

SEQ ID NO: 8899 - DNA, 122 bp, Homo sapiens
  misc_feature (61)..(62): /note="This region represents a CpG dinucleotide"
  misc_feature (61)..(61): /note="Nucleotide may be methylated to form 5-methylcytosine"
gtcagtgtgtggctcgactcaagacctaagcattggaaatgtgttccaccagagtagctacgggaagaaagggttcaccgctcttgtgacataggtcagagtaactcagagagagtttcagt

SEQ ID NO: 8900 - DNA, 122 bp, Homo sapiens
  misc_feature (61)..(62): /note="This region represents a CpG dinucleotide"
  misc_feature (61)..(61): /note="Nucleotide may be methylated to form 5-methylcytosine"
tcattgtaaaatatctttctttctagtcatacttcctgatgtgtagtttttaaataaacccgctcctgctttcctgtgcttacatatgtatgttatctcatttttcatccttttactattat

SEQ ID NO: 8901 - DNA, 122 bp, Homo sapiens
  misc_feature (61)..(62): /note="This region represents a CpG dinucleotide"
  misc_feature (61)..(61): /note="Nucleotide may be methylated to form 5-methylcytosine"
taaactatttaacagaagtccagagtagcgctcctcttcaagaacacagataaactctttcgttagttactcttgttaataaagaggcctgataagtatcaaaagtaaatttcctcaatctg

SEQ ID NO: 8902 - DNA, 122 bp, Homo sapiens
  misc_feature (61)..(62): /note="This region represents a CpG dinucleotide"
  misc_feature (61)..(61): /note="Nucleotide may be methylated to form 5-methylcytosine"
tttgttcattcattcattctgtcaacacacttacggtaaactcctgtgtgtaacatgttacgcttgtgtctaggtctgcaaataaccccatgtttagaagttcatggtcagcaggttcctca

SEQ ID NO: 8903 - DNA, 122 bp, Homo sapiens
  misc_feature (61)..(62): /note="This region represents a CpG dinucleotide"
  misc_feature (61)..(61): /note="Nucleotide may be methylated to form 5-methylcytosine"
ttctcaaagactgtggtgtgttgacaaaataaaaaaatgaatcaagcctttcaggcactacggtggatgcaggtgtcttgaaagatctgctttactgctacaagtgcatagaaaatcttagg

SEQ ID NO: 8904 - DNA, 122 bp, Homo sapiens
  misc_feature (61)..(62): /note="This region represents a CpG dinucleotide"
  misc_feature (61)..(61): /note="Nucleotide may be methylated to form 5-methylcytosine"
tatcctgcatgtggcaggcagctcagtgatccaggcagtagaatgtcatggcccttctaccgcagtggtcagggtggggtggggaggaaggcgtggctcttaatgctcctccctgaaagtga

SEQ ID NO: 8905 - DNA, 122 bp, Homo sapiens
  misc_feature (61)..(62): /note="This region represents a CpG dinucleotide"
  misc_feature (61)..(61): /note="Nucleotide may be methylated to form 5-methylcytosine"
ctttttataatattagaatcatagtttacctacattacagggcttttatgaagattaaatcgagcatcgtgggtagtgttttttcagcccctgtgactaagtaggttataaatggtcctcag

SEQ ID NO: 8906 - DNA, 122 bp, Homo sapiens
  misc_feature (61)..(62): /note="This region represents a CpG dinucleotide"
  misc_feature (61)..(61): /note="Nucleotide may be methylated to form 5-methylcytosine"
cacatgcacacacacataatcctatactttcttcctatgataggcaccacagggtgtactcgtgtgagtatacaccagccctgcagctacacagcccatcaccacatgagtcagcatggtga

SEQ ID NO: 8907 - DNA, 122 bp, Homo sapiens
  misc_feature (61)..(62): /note="This region represents a CpG dinucleotide"
  misc_feature (61)..(61): /note="Nucleotide may be methylated to form 5-methylcytosine"
tggactctaagaggctatgaattgaattggcctcatcattttggctgctgagatgggagccgtgtgccctgatcctcacaccatttcccatcaccctgccttgctctgccccaccgacaccc

SEQ ID NO: 8908 - DNA, 122 bp, Homo sapiens
  misc_feature (61)..(62): /note="This region represents a CpG dinucleotide"
  misc_feature (61)..(61): /note="Nucleotide may be methylated to form 5-methylcytosine"
gtacaaagagctactccataaattacatcttgccaaggtgggagattgcatgggagactccggtgacaaacccttaaggcgcaataatagctatacttcctataccatggcaatatgtggca

SEQ ID NO: 8909 - DNA, 122 bp, Homo sapiens
  misc_feature (61)..(62): /note="This region represents a CpG dinucleotide"
  misc_feature (61)..(61): /note="Nucleotide may be methylated to form 5-methylcytosine"
gaggaaaccaagacccttacaggttaactggctaagatcatcagcttgcagtgacagaaccggaggtggatccagttctgtctgcctccaaagcttatgctgtttacattatgtgatgcaga

SEQ ID NO: 8910 - DNA, 122 bp, Homo sapiens
  misc_feature (61)..(62): /note="This region represents a CpG dinucleotide"
  misc_feature (61)..(61): /note="Nucleotide may be methylated to form 5-methylcytosine"
agatgccagtgagttcccagaaagcaagcttagtgagtattcccagaggtgatcacatgtcgcaaatccttcactttaggcattatgtaatttaaccactagatgctgtctatcctaccttc

SEQ ID NO: 8911 - DNA, 122 bp, Homo sapiens
  misc_feature (61)..(62): /note="This region represents a CpG dinucleotide"
  misc_feature (61)..(61): /note="Nucleotide may be methylated to form 5-methylcytosine"
tgtgatgtaaacacatttgcatgttgaagagaagtcaaaagacaaaaaaaatacatcagacgagtaattattgacaaaacaagttaaaagaggaagtgataaaggaaaaaggaagtagcttc

SEQ ID NO: 8912 - DNA, 122 bp, Homo sapiens
  misc_feature (61)..(62): /note="This region represents a CpG dinucleotide"
  misc_feature (61)..(61): /note="Nucleotide may be methylated to form 5-methylcytosine"
ggctgtgattacaaatagccccaaatcttagtggtttattacacaatggcttatttctcacgcatatgacttgtctgtcgcaagacatctgggggctctgctacatatctcctctctcaggg

SEQ ID NO: 8913 - DNA, 122 bp, Homo sapiens
  misc_feature (61)..(62): /note="This region represents a CpG dinucleotide"
  misc_feature (61)..(61): /note="Nucleotide may be methylated to form 5-methylcytosine"
ttctatggaaagaatgggacagctacccagtgaagaatgtggctgagtgtgggagaggaccgaatatataatttgcagcaatgtctcgggaaagctgagaggacccagatcttgtgtgtctg

SEQ ID NO: 8914 - DNA, 122 bp, Homo sapiens
  misc_feature (61)..(62): /note="This region represents a CpG dinucleotide"
  misc_feature (61)..(61): /note="Nucleotide may be methylated to form 5-methylcytosine"
gaaaaggaaggggatgttgagtgtgggagctgttcattctttccagcttctctcctttcccgccatcccaccccacctgtggacctgtgtttggcattagggcactcctctgtgctttgctg

SEQ ID NO: 8915 - DNA, 122 bp, Homo sapiens
  misc_feature (61)..(62): /note="This region represents a CpG dinucleotide"
  misc_feature (61)..(61): /note="Nucleotide may be methylated to form 5-methylcytosine"
cgggggtgtggctctcctgtctctggctttgctgtcaacaggcgagattggcaagtagggcgaccaaccggcctggtttgctcgggaccggggtttcctggaaggtgggactttcaatgcta

SEQ ID NO: 8916 - DNA, 122 bp, Homo sapiens
  misc_feature (61)..(62): /note="This region represents a CpG dinucleotide"
  misc_feature (61)..(61): /note="Nucleotide may be methylated to form 5-methylcytosine"
tattgttattataagcaaaactgcaacacatatccacactcatacatcaatttgcatgtgcgcgagtgtatttgtatggtaaattcctagaagtggaaatgctgggttaaagggtatgcgga

SEQ ID NO: 8917 - DNA, 122 bp, Homo sapiens
  misc_feature (61)..(62): /note="This region represents a CpG dinucleotide"
  misc_feature (61)..(61): /note="Nucleotide may be methylated to form 5-methylcytosine"
actcactcagagtcctggcttttccagtgtcagcagcatatgactccactccattcttttcgctaatcaagattatcaggaagcaattaagagtgaaatctgcataaggttaaccttgaatt

SEQ ID NO: 8918 - DNA, 122 bp, Homo sapiens
  misc_feature (61)..(62): /note="This region represents a CpG dinucleotide"
  misc_feature (61)..(61): /note="Nucleotide may be methylated to form 5-methylcytosine"
ggctattctagtcttcttccttgccaagcaccactgtttcagagaggctaattccgtcagcgtgaggaacagaaggagtcactcgagaagccatctccaccaaagtaaacacatccttctgg

SEQ ID NO: 8919 - DNA, 122 bp, Homo sapiens
  misc_feature (61)..(62): /note="This region represents a CpG dinucleotide"
  misc_feature (61)..(61): /note="Nucleotide may be methylated to form 5-methylcytosine"
aggaaaaggaacaaattaacctgggtgggacagtcattaaatgccaagcctagagttgggcgtgtcttatcattcctctcaatatcccttagaagatagacattatttttcctattttacag

SEQ ID NO: 8920 - DNA, 122 bp, Homo sapiens
  misc_feature (61)..(62): /note="This region represents a CpG dinucleotide"
  misc_feature (61)..(61): /note="Nucleotide may be methylated to form 5-methylcytosine"
agagatgggaggttcagtggttagtgctagcaggtcacttcctctgagtcaagtgctgtgcgtggctccttttaaggagtgtctcattcagcccttgagtcagggagccataccctcctgct

SEQ ID NO: 8921 - DNA, 122 bp, Homo sapiens
  misc_feature (61)..(62): /note="This region represents a CpG dinucleotide"
  misc_feature (61)..(61): /note="Nucleotide may be methylated to form 5-methylcytosine"
caccccaaaacatcctaatttctctccccggtgtccagccagagagcacccagaggatgacgacccacagcagggagtgacaaagctggctcagtttctgtgatgaccccttcccctgctca

SEQ ID NO: 8922 - DNA, 122 bp, Homo sapiens
  misc_feature (61)..(62): /note="This region represents a CpG dinucleotide"
  misc_feature (61)..(61): /note="Nucleotide may be methylated to form 5-methylcytosine"
acacgctcactattgtatctacaacttgtttctcctgcttttgtcttatctggtcttctacgggtttatcagaatatagcacataaatattaacaatggaagcagagttgaagatcattctg

SEQ ID NO: 8923 - DNA, 122 bp, Homo sapiens
  misc_feature (61)..(62): /note="This region represents a CpG dinucleotide"
  misc_feature (61)..(61): /note="Nucleotide may be methylated to form 5-methylcytosine"
gcaccaggctcgatgctgcatctcaggctctgtttcataaacaggaggattatttcagaccgatcagaggcggctgcattctgcaaattaccgtgtgctgtggctgcgctcacacattgcca

SEQ ID NO: 8924 - DNA, 122 bp, Homo sapiens
  misc_feature (61)..(62): /note="This region represents a CpG dinucleotide"
  misc_feature (61)..(61): /note="Nucleotide may be methylated to form 5-methylcytosine"
agagcctgccctatgccaagcattcttcttgggagatacaaagatgataaaacaagaccacggaactcaaggagctcaaatcctagatggagtggcagataagtaaacatggaatcatgatg

SEQ ID NO: 8925 - DNA, 122 bp, Homo sapiens
  misc_feature (61)..(62): /note="This region represents a CpG dinucleotide"
  misc_feature (61)..(61): /note="Nucleotide may be methylated to form 5-methylcytosine"
tacatggatcactcactttcccccagccatgtgtgcaatccctcctccaccttcaaaccccggactttcctacaagagaataacgtgcaagaactagctgtttgtcttgcccacttcctagt

SEQ ID NO: 8926 - DNA, 122 bp, Homo sapiens
  misc_feature (61)..(62): /note="This region represents a CpG dinucleotide"
  misc_feature (61)..(61): /note="Nucleotide may be methylated to form 5-methylcytosine"
catgtggcttgatttttagtgaaataccatagtgtcacaactagtgctgtctctgccccacgccaaaaggaaaagtcaagtgaaataggctgggtagaattcccccagggtaggcaaaatgc

SEQ ID NO: 8927 - DNA, 122 bp, Homo sapiens
  misc_feature (61)..(62): /note="This region represents a CpG dinucleotide"
  misc_feature (61)..(61): /note="Nucleotide may be methylated to form 5-methylcytosine"
gttcagtgcttctggagtttaaagagcccggcgagggtcatgtcagatgacgccggtccacgagaaggagggtggattatatccttagagacgccatagagtgaggatataatggctctgta

SEQ ID NO: 8928 - DNA, 122 bp, Homo sapiens
  misc_feature (61)..(62): /note="This region represents a CpG dinucleotide"
  misc_feature (61)..(61): /note="Nucleotide may be methylated to form 5-methylcytosine"
gccagtgtggctggagttcacgggagctgaagtgggaggcgtatgaaagactcaggtaggcggcaggagccaagtcacattgagccttgtcttgcaggttttatgagaggccatggaatgat

SEQ ID NO: 8929 - DNA, 122 bp, Homo sapiens
  misc_feature (61)..(62): /note="This region represents a CpG dinucleotide"
  misc_feature (61)..(61): /note="Nucleotide may be methylated to form 5-methylcytosine"
gctaatcccagaaaccacaagagctctgggttgaaacaatgatgttgcaagaaatactgacgtatcagaagcagaagaagagcattatcaaatttggagaaggaaagagactgtcagagcaa

SEQ ID NO: 8930 - DNA, 122 bp, Homo sapiens
  misc_feature (61)..(62): /note="This region represents a CpG dinucleotide"
  misc_feature (61)..(61): /note="Nucleotide may be methylated to form 5-methylcytosine"
tttcctctctctctggggctcgattgcctaatatggtaaggtatttcccagacaagattgcgctgtggagttagaacaacagtttgtctaagtttaaagacatggtaggtgagctatctaat

SEQ ID NO: 8931 - DNA, 122 bp, Homo sapiens
  misc_feature (61)..(62): /note="This region represents a CpG dinucleotide"
  misc_feature (61)..(61): /note="Nucleotide may be methylated to form 5-methylcytosine"
ggtggtttatttgcttacccttatcacctctgagcagtggtgttgtttgcatagagttctcggtttctggcatgttaaatttagaggtaccccaggcttctcggagggatcagagtgttgag

SEQ ID NO: 8932 - DNA, 122 bp, Homo sapiens
  misc_feature (61)..(62): /note="This region represents a CpG dinucleotide"
  misc_feature (61)..(61): /note="Nucleotide may be methylated to form 5-methylcytosine"
tttttacccagatcatggggggactcattgtgagtcacaggaagcctgatagacctaagccgtgatctatttgagcagagttcatcacagtcaaaatatctacagaagagctgaaaggaagg

SEQ ID NO: 8933 - DNA, 122 bp, Homo sapiens
  misc_feature (61)..(62): /note="This region represents a CpG dinucleotide"
  misc_feature (61)..(61): /note="Nucleotide may be methylated to form 5-methylcytosine"
actgcacccggcctgtagagctttaaacaaagcacaggctgcttctgagcacagggccctcgtcacatggctatgaagccagccctgcctggacccagaaccctggtgtgggcactttatag

SEQ ID NO: 8934 - DNA, 122 bp, Homo sapiens
  misc_feature (61)..(62): /note="This region represents a CpG dinucleotide"
  misc_feature (61)..(61): /note="Nucleotide may be methylated to form 5-methylcytosine"
aaaacctcaaaggattgctcttatgatcagatgagtcaatatacactaaggctcctggaacggtacctggtagttagtggcaaaaccaactatgataatgatgaagtgattcatggaactct

SEQ ID NO: 8935 - DNA, 122 bp, Homo sapiens
  misc_feature (61)..(62): /note="This region represents a CpG dinucleotide"
  misc_feature (61)..(61): /note="Nucleotide may be methylated to form 5-methylcytosine"
catcttccatcagcaatgaggacaagctgctcctctgcattgctaacccatctacccccacggcctgaggcagtgttcacacctacactgttcacagagttaacaaaggtaagagcaggtct

SEQ ID NO: 8936 - DNA, 122 bp, Homo sapiens
  misc_feature (61)..(62): /note="This region represents a CpG dinucleotide"
  misc_feature (61)..(61): /note="Nucleotide may be methylated to form 5-methylcytosine"
gaggaatgtgaagctcagacagatgactcaatttgtcaaggtcacataatcagtaactagcgtttgtaagatccaggtttgctgactgtcaagccagtgcccttcattgtttctagctcttc

SEQ ID NO: 8937 - DNA, 122 bp, Homo sapiens
  misc_feature (61)..(62): /note="This region represents a CpG dinucleotide"
  misc_feature (61)..(61): /note="Nucleotide may be methylated to form 5-methylcytosine"
gtaaattgatctaataaataaatactgacacatggaaggtttttatctgcgcagatcacacgaactacaagggatgggaaaaccaggcagagtgaaccaaaccactgtttcagacttcctcc

SEQ ID NO: 8938 - DNA, 122 bp, Homo sapiens
  misc_feature (61)..(62): /note="This region represents a CpG dinucleotide"
  misc_feature (61)..(61): /note="Nucleotide may be methylated to form 5-methylcytosine"
tgagtcgcaggaattacccagcatcccacttacttcagcctcatcctaggcattaatatgcgtgaaatcccaggttggctgtgcgagtcacattgtcctcatgcctgttaagtaaatatatc

SEQ ID NO: 8939 - DNA, 122 bp, Homo sapiens
  misc_feature (61)..(62): /note="This region represents a CpG dinucleotide"
  misc_feature (61)..(61): /note="Nucleotide may be methylated to form 5-methylcytosine"
gcttcatttggagtcaggcctggctgttgctcaggtgaccagcttgtgtctctgggagggcgctgctttccccggccacccggcgcgatgatccagaatgtcggaaatcacctgcgacgggt

SEQ ID NO: 8940 - DNA, 122 bp, Homo sapiens
  misc_feature (61)..(62): /note="This region represents a CpG dinucleotide"
  misc_feature (61)..(61): /note="Nucleotide may be methylated to form 5-methylcytosine"
gcaggtgcagagggtggggcactgagccacagaagagcattcacgggccttgaaaccccacggaatttgccctgctggatttcagacttgcttgggactggcaacccctttattcctttata

SEQ ID NO: 8941 - DNA, 122 bp, Homo sapiens
  misc_feature (61)..(62): /note="This region represents a CpG dinucleotide"
  misc_feature (61)..(61): /note="Nucleotide may be methylated to form 5-methylcytosine"
cttcctggcctcagcgtggggtggcccggccgcttctggaagacccctggcgctgtcccccgcctccccgggctgtcactgccgactcgggcctgcccatctcccgcaggggcgctcgggcc

SEQ ID NO: 8942 - DNA, 122 bp, Homo sapiens
  misc_feature (61)..(62): /note="This region represents a CpG dinucleotide"
  misc_feature (61)..(61): /note="Nucleotide may be methylated to form 5-methylcytosine"
caggtcaccattacaaccagatttgctgcaatagcctcctcactaccttctgcattcactcgctctcctctactccattctccacgtctgctcacagtgatctctccaaaaacacaacctga

SEQ ID NO: 8943 - DNA, 122 bp, Homo sapiens
  misc_feature (61)..(62): /note="This region represents a CpG dinucleotide"
  misc_feature (61)..(61): /note="Nucleotide may be methylated to form 5-methylcytosine"
ggctggcggcacggagcgcttggctttctgtgggggcgccggcttttccctggggccctgcgcgcccagggccacctcggcgcggcccaggctgcgagtcttgccgcgcacgtcagcggcca

SEQ ID NO: 8944 - DNA, 122 bp, Homo sapiens
  misc_feature (61)..(62): /note="This region represents a CpG dinucleotide"
  misc_feature (61)..(61): /note="Nucleotide may be methylated to form 5-methylcytosine"
gagggaggtgggggggtcagccccccgcccggccagccgcccggtccgggaggtgaggggcgcctctcctcagccgcccctactgggacgtgaggagcccctctgcccggccaccaccccgt

SEQ ID NO: 8945 - DNA, 122 bp, Homo sapiens
  misc_feature (61)..(62): /note="This region represents a CpG dinucleotide"
  misc_feature (61)..(61): /note="Nucleotide may be methylated to form 5-methylcytosine"
aactgtctttttgtcttgaaaaatctttttttctgtaatctggttaaatcaacatagaaccgatgagtttgatcctcagataatccagatgactcttcaagataattctgtaacaagactac

SEQ ID NO: 8946 - DNA, 122 bp, Homo sapiens
  misc_feature (61)..(62): /note="This region represents a CpG dinucleotide"
  misc_feature (61)..(61): /note="Nucleotide may be methylated to form 5-methylcytosine"
attatgcaaaatattctcgtggtttctcatcacatttgtcactaactccaagttcctggccgtggtggcctagaaggccctgcatgctctggcctcttccatctctctgatctcctttcctg

SEQ ID NO: 8947 - DNA, 122 bp, Homo sapiens
  misc_feature (61)..(62): /note="This region represents a CpG dinucleotide"
  misc_feature (61)..(61): /note="Nucleotide may be methylated to form 5-methylcytosine"
taggcaatgctaatcacatgaccaaacccaaaggcatcatgggaggggtttcccaggctgcgaatgctgggagatgcacttctttgggggttgccaaagcacagcctcccatagcaggtaaa

SEQ ID NO: 8948 - DNA, 122 bp, Homo sapiens
  misc_feature (61)..(62): /note="This region represents a CpG dinucleotide"
  misc_feature (61)..(61): /note="Nucleotide may be methylated to form 5-methylcytosine"
gcacgaagagggcttctcagtcacactagccggtgaggaggagctggtcaggatgagtcccgacctgcaggcaccagctcccatggtgagtgtgagtcacacttgcccagcttcccctctgc

SEQ ID NO: 8949 - DNA, 122 bp, Homo sapiens
  misc_feature (61)..(62): /note="This region represents a CpG dinucleotide"
  misc_feature (61)..(61): /note="Nucleotide may be methylated to form 5-methylcytosine"
gggcgaatcccacagtaattgcgcatttctctccctttagtgctttggaaatttagaaagcgcgctttcatttgtacatcgcctgccgacagcccctttgctgattagagaagccttgttcc

SEQ ID NO: 8950 - DNA, 122 bp, Homo sapiens
  misc_feature (61)..(62): /note="This region represents a CpG dinucleotide"
  misc_feature (61)..(61): /note="Nucleotide may be methylated to form 5-methylcytosine"
tatggcttatttacatctctctttctcgccctatatccttccaaaatatttgtatctcaacgttttattaaattcactgtttttattattaggaatgatataagcattactcactgctgaga

SEQ ID NO: 8951 - DNA, 122 bp, Homo sapiens
  misc_feature (61)..(62): /note="This region represents a CpG dinucleotide"
  misc_feature (61)..(61): /note="Nucleotide may be methylated to form 5-methylcytosine"
tggtatgattaacttcgaagtccactgcagacacaaatgaactttccctaaaatgcaacacgagagtactaactacagtcagtaaagatgagagggggttattttgtagctcttcctgcagg

SEQ ID NO: 8952 - DNA, 122 bp, Homo sapiens
  misc_feature (61)..(62): /note="This region represents a CpG dinucleotide"
  misc_feature (61)..(61): /note="Nucleotide may be methylated to form 5-methylcytosine"
tcagtaattgagtacagatcagccatattttgtacatatccacttgatggcttagcttttcgtatatttaatcagtcatagtggctttcattacatatctagacataacatttctataaatg

SEQ ID NO: 8953 - DNA, 122 bp, Homo sapiens
  misc_feature (61)..(62): /note="This region represents a CpG dinucleotide"
  misc_feature (61)..(61): /note="Nucleotide may be methylated to form 5-methylcytosine"
accttctgctttctagaaacatcattgctaatattacatttggccttttttcacttctctcgccttctgcttgttttattgacttttctttccttcctactaagaaagcacttccttggggg

SEQ ID NO: 8954 - DNA, 122 bp, Homo sapiens
  misc_feature (61)..(62): /note="This region represents a CpG dinucleotide"
  misc_feature (61)..(61): /note="Nucleotide may be methylated to form 5-methylcytosine"
agcttcaggtgacccgacacactttggtatcaaaagagaatctgaaatgtacaagaactgcggatttcaaatggaaaaggtgcataattgtgctatttgttcctgggtgagtgtgggacgga

SEQ ID NO: 8955 - DNA, 122 bp, Homo sapiens
  misc_feature (61)..(62): /note="This region represents a CpG dinucleotide"
  misc_feature (61)..(61): /note="Nucleotide may be methylated to form 5-methylcytosine"
gtacaatggcgcagtctcggctcacggcaacctctcccaatttttgagctgaaaaaaaaccgaggctcagaggtgtcaacttcccgaagctcacaaagttaatgatcaatgtccatataaag

SEQ ID NO: 8956 - DNA, 122 bp, Homo sapiens
  misc_feature (61)..(62): /note="This region represents a CpG dinucleotide"
  misc_feature (61)..(61): /note="Nucleotide may be methylated to form 5-methylcytosine"
agacagacatgtcgagcggcagtgacacctgagggtacctcagtctgagtcacccctctgcgctaagggagcccatatatgagacacctgacccagaccctgagggtcaggaagatgctcag

SEQ ID NO: 8957 - DNA, 122 bp, Homo sapiens
  misc_feature (61)..(62): /note="This region represents a CpG dinucleotide"
  misc_feature (61)..(61): /note="Nucleotide may be methylated to form 5-methylcytosine"
ctcaagtgatccacccacttcggcctcccaaagagctgggattacaggcatgagccactgcgcccggccacatcctcgaattttaagcctcagctaaggaatgattgatttctctccaagca

SEQ ID NO: 8958 - DNA, 122 bp, Homo sapiens
  misc_feature (61)..(62): /note="This region represents a CpG dinucleotide"
  misc_feature (61)..(61): /note="Nucleotide may be methylated to form 5-methylcytosine"
atcaggcaaaacacctcagtcatcttcagcctgcagagtgcgagttccgagttagattatcgtaattaatgggaagtgaattttatgaaagggcccagctgtgagggagaaaaaccctcaag

SEQ ID NO: 8959 - DNA, 122 bp, Homo sapiens
  misc_feature (61)..(62): /note="This region represents a CpG dinucleotide"
  misc_feature (61)..(61): /note="Nucleotide may be methylated to form 5-methylcytosine"
tcagcctatgggctcttctaggtctcaattctttatctgtaaaattaagagattgggctacgcacattttacggccctttttagttctaacatcccatcagcttgtgattttacagaaaata

SEQ ID NO: 8960 - DNA, 122 bp, Homo sapiens
  misc_feature (61)..(62): /note="This region represents a CpG dinucleotide"
  misc_feature (61)..(61): /note="Nucleotide may be methylated to form 5-methylcytosine"
ccacttctgcaacaggaagtggcctagttggagatttccagagaaagctcatcaggtgcccggtaatttcaatgtaagacacatacttagggatcctagccagttgattcaatgtcgtttca

SEQ ID NO: 8961 - DNA, 122 bp, Homo sapiens
  misc_feature (61)..(62): /note="This region represents a CpG dinucleotide"
  misc_feature (61)..(61): /note="Nucleotide may be methylated to form 5-methylcytosine"
cctggatgggaaggattgtgccaggcatgggttcccgcagtgtgttcccctggctggcagcgtcgcggcacctgggagtcattaggcagcaagggagggaattgcgattctgggcggggctc

SEQ ID NO: 8962 - DNA, 122 bp, Homo sapiens
  misc_feature (61)..(62): /note="This region represents a CpG dinucleotide"
  misc_feature (61)..(61): /note="Nucleotide may be methylated to form 5-methylcytosine"
tcactcatttacagctgcaggtcctaaactaccaacatctctaaccatctgattagtttccgtgagcaacgtcttagatagtccatgaatcatgacctttaggtcaatgtagcaacagggat

SEQ ID NO: 8963 - DNA, 122 bp, Homo sapiens
  misc_feature (61)..(62): /note="This region represents a CpG dinucleotide"
  misc_feature (61)..(61): /note="Nucleotide may be methylated to form 5-methylcytosine"
tgggggtggggtggggcctcccagcctgctaggagctgtcaactgagcagggcctgggagcgggagacaaattctaactcgtggttttaatcagcctgagcttgtccagccttacaaataag

SEQ ID NO: 8964 - DNA, 122 bp, Homo sapiens
  misc_feature (61)..(62): /note="This region represents a CpG dinucleotide"
  misc_feature (61)..(61): /note="Nucleotide may be methylated to form 5-methylcytosine"
ccgactcgacacgtgagactgagtcatcggtccaggaggaggtggcccgctcaggccatgcggtcactcactggccacagccagccagagctgagtggttcactgtgccctgtgatttctgg

SEQ ID NO: 8965 - DNA, 122 bp, Homo sapiens
  misc_feature (61)..(62): /note="This region represents a CpG dinucleotide"
  misc_feature (61)..(61): /note="Nucleotide may be methylated to form 5-methylcytosine"
ggaacagaagtcagttaccttctgatcaggcccaggcagtggggcccaaggagctctttgcgtgcgaatgctttgctttctcaggctaagtagcaatggagaggaaagccagaatactgtgt

SEQ ID NO: 8966 - DNA, 122 bp, Homo sapiens
  misc_feature (61)..(62): /note="This region represents a CpG dinucleotide"
  misc_feature (61)..(61): /note="Nucleotide may be methylated to form 5-methylcytosine"
ctttagtctgcctgactctttaaggaaatctaaatttattgagcactttccatgtgccaacgcctgtgataagcactatgtatgttgcctgatttagacattcaatgaggaaatgagctcag

SEQ ID NO: 8967 - DNA, 122 bp, Homo sapiens
  misc_feature (61)..(62): /note="This region represents a CpG dinucleotide"
  misc_feature (61)..(61): /note="Nucleotide may be methylated to form 5-methylcytosine"
gttcgcacaaaagggaggttgcataagaaattcattgtgtttctatccaaatttccccctcgaattgccacagatcagcatgtacttcactctttgccaccaattaaaatcataaatagatg

SEQ ID NO: 8968 - DNA, 122 bp, Homo sapiens
  misc_feature (61)..(62): /note="This region represents a CpG dinucleotide"
  misc_feature (61)..(61): /note="Nucleotide may be methylated to form 5-methylcytosine"
tgtttattagaaaaatacacagggcgtcaccaaagccaagttcaagttgcttgtagtcttcgtgcagagttatgccatgcttggcacgtgaatgtagcacacacacacagacacacacgcct

SEQ ID NO: 8969 - DNA, 122 bp, Homo sapiens
  misc_feature (61)..(62): /note="This region represents a CpG dinucleotide"
  misc_feature (61)..(61): /note="Nucleotide may be methylated to form 5-methylcytosine"
actccagtgccagcaggaagctgtgggcattggagaggcagggctgaagcctcaggccctcgaattcgtttgcagtccctctcccctctccacccagcatggtcccctccctgcctggattt

SEQ ID NO: 8970 - DNA, 122 bp, Homo sapiens
  misc_feature (61)..(62): /note="This region represents a CpG dinucleotide"
  misc_feature (61)..(61): /note="Nucleotide may be methylated to form 5-methylcytosine"
atcggagtgagggacatttgccagggtcaagtgcagacttgctcagctctggtttgagcacgggttgctcaacacatatttgctcatctcctatctgtgttttcatcaggtacaattccgta

SEQ ID NO: 8971 - DNA, 122 bp, Homo sapiens
  misc_feature (61)..(62): /note="This region represents a CpG dinucleotide"
  misc_feature (61)..(61): /note="Nucleotide may be methylated to form 5-methylcytosine"
aagaaacccctcacacccactctggtacaccttggtgtttgccattattagaacagcaaacgaaatactattgattcagagggtttgtggtttaccgacctagtgcagttaagttcctcttc

SEQ ID NO: 8972 - DNA, 122 bp, Homo sapiens
  misc_feature (61)..(62): /note="This region represents a CpG dinucleotide"
  misc_feature (61)..(61): /note="Nucleotide may be methylated to form 5-methylcytosine"
gatctttttgctaaggtgtaggacgtcttaatgagcagttgaaaaaacaaacaaaaacctcgaagagttacatggcttagggattggggtataattgaaaaatagccagagttgagaagttt

SEQ ID NO: 8973 - DNA, 122 bp, Homo sapiens
  misc_feature (61)..(62): /note="This region represents a CpG dinucleotide"
  misc_feature (61)..(61): /note="Nucleotide may be methylated to form 5-methylcytosine"
gatttggccttcaggatcttattctctctcagaaataacaaatttttcatgacttaatcacgactacaagtcatgtaggagaaggagtctgtggtttgtggttttgactttcatgttctgtt

SEQ ID NO: 8974 - DNA, 122 bp, Homo sapiens
  misc_feature (61)..(62): /note="This region represents a CpG dinucleotide"
  misc_feature (61)..(61): /note="Nucleotide may be methylated to form 5-methylcytosine"
caaatactggtctcagaccatggtgaggatgcgggtgcagggtgaggactacatagggtgcggtaggtcagtggatcagatccagttagccggggctcagccttgtgcccaggaggctaaag

SEQ ID NO: 8975 - DNA, 122 bp, Homo sapiens
  misc_feature (61)..(62): /note="This region represents a CpG dinucleotide"
  misc_feature (61)..(61): /note="Nucleotide may be methylated to form 5-methylcytosine"
gtgtggtggggggggtggttgtcaggctagtaaggaagaaagggaagaaatgtctggcagcgacatcaagaacctctgaaacagtgtaggggagtgtctgtgaatttactgggccccactgg

SEQ ID NO: 8976 - DNA, 122 bp, Homo sapiens
  misc_feature (61)..(62): /note="This region represents a CpG dinucleotide"
  misc_feature (61)..(61): /note="Nucleotide may be methylated to form 5-methylcytosine"
cggcagtccacttctcctagatcctgtaatttatctaatcttattcatctgtatctacttcgtggacttccttacatcttcacctgaacaccaggaatcttcaggtcatgcccatatgccct

SEQ ID NO: 8977 - DNA, 122 bp, Homo sapiens
  misc_feature (61)..(62): /note="This region represents a CpG dinucleotide"
  misc_feature (61)..(61): /note="Nucleotide may be methylated to form 5-methylcytosine"
acccgggcgcgagccccgcgtgcaggcgccgggcctgggcccctgtggccgtcccgccagcggccgtcttctgtccctgcatttagagaagggggatggcaaagggacccgccagcggatcc

SEQ ID NO: 8978 - DNA, 122 bp, Homo sapiens
  misc_feature (61)..(62): /note="This region represents a CpG dinucleotide"
  misc_feature (61)..(61): /note="Nucleotide may be methylated to form 5-methylcytosine"
gatcagggagttgactgcccaaaggtaggatgatcctgcttggaatgaacataacagaggcggcagatgacaaggcaggaggggttaacgacttttccttttatagaaggcggatccagggt

SEQ ID NO: 8979 - DNA, 122 bp, Homo sapiens
  misc_feature (61)..(62): /note="This region represents a CpG dinucleotide"
  misc_feature (61)..(61): /note="Nucleotide may be methylated to form 5-methylcytosine"
aaggcggggaaggacctcgaagaaacggagggcgccgggctggcagttcaggctcagggccgctggggggagtttgcgcaaggctgggagccccgaggccccgggggaggtggggaggcaga

SEQ ID NO: 8980 - DNA, 122 bp, Homo sapiens
  misc_feature (61)..(62): /note="This region represents a CpG dinucleotide"
  misc_feature (61)..(61): /note="Nucleotide may be methylated to form 5-methylcytosine"
tccagttctccttgtactttaaatctcactgacttcccttctgcctccagttagtggaaacgccctgcttttaaagggctcacctgactgagtcaggtccacctgcactttctctccatatg

SEQ ID NO: 8981 - DNA, 122 bp, Homo sapiens
  misc_feature (61)..(62): /note="This region represents a CpG dinucleotide"
  misc_feature (61)..(61): /note="Nucleotide may be methylated to form 5-methylcytosine"
accaggttatatgtttaattatcttgtttatggcctgcctccctactactctagactggccgctccccaaggggaaggaatctatcttgttcactgctgtgtcctcagtatttacaataggg

SEQ ID NO: 8982 - DNA, 122 bp, Homo sapiens
  misc_feature (61)..(62): /note="This region represents a CpG dinucleotide"
  misc_feature (61)..(61): /note="Nucleotide may be methylated to form 5-methylcytosine"
aagttctacctggctttcgagaactcgcagcacctggattatatcaccgagaagctctggcgcaacgcgttgctcgctggggcggtgccggtggtgctgggcccagaccgtgccaactacga

SEQ ID NO: 8983 - DNA, 122 bp, Homo sapiens
  misc_feature (61)..(62): /note="This region represents a CpG dinucleotide"
  misc_feature (61)..(61): /note="Nucleotide may be methylated to form 5-methylcytosine"
atcaaaaggtctgaatatcattcacacagaaaactctgactaatcgtgtgactaatgcatcgcctcaaccatcacatcagaagtcaggaatagaaataggattatccagaaaagatcatgtg

SEQ ID NO: 8984 - DNA, 122 bp, Homo sapiens
  misc_feature (61)..(62): /note="This region represents a CpG dinucleotide"
  misc_feature (61)..(61): /note="Nucleotide may be methylated to form 5-methylcytosine"
tctggtggatggttttcctgttcttttgtctttagtttttggtctttttgtgagtatctacgtacactcaattgtgagttcttgtcattttatattatgtggttcatttacttatttaattt

SEQ ID NO: 8985 - DNA, 122 bp, Homo sapiens
  misc_feature (61)..(62): /note="This region represents a CpG dinucleotide"
  misc_feature (61)..(61): /note="Nucleotide may be methylated to form 5-methylcytosine"
ctctcgtggtgcgctggacgaacctgtgctgctgcagctggtggcgggtgtacttctgggcgtgaacttcacgctcactgggagcagcccatgcaccggccccctcggtgcgctcaggtctc

SEQ ID NO: 8986 - DNA, 122 bp, Homo sapiens
  misc_feature (61)..(62): /note="This region represents a CpG dinucleotide"
  misc_feature (61)..(61): /note="Nucleotide may be methylated to form 5-methylcytosine"
atctgcctaaagtaatagatcactagtgacaaagacaatgctggaatttcagtttctaggcgtcaaacatttttggtgttttgttttccatcccacgtgtaataaaagaatgatctttggag

SEQ ID NO: 8987 - DNA, 122 bp, Homo sapiens
  misc_feature (61)..(62): /note="This region represents a CpG dinucleotide"
  misc_feature (61)..(61): /note="Nucleotide may be methylated to form 5-methylcytosine"
tatataaaagtcctgtttcacataatgttgtggataggcacgccaattattataggcaaacgtgaccagggaatgtgtgaatgatatttctgtacatttcgatggagctttgttcatttcgg

SEQ ID NO: 8988 - DNA, 122 bp, Homo sapiens
  misc_feature (61)..(62): /note="This region represents a CpG dinucleotide"
  misc_feature (61)..(61): /note="Nucleotide may be methylated to form 5-methylcytosine"
accacagtcttgcccttccagaagtttccaattaaaaagcagaacatagcgcttgacctacgacagctttgctaaataaatggatgaaagaacaagtgattggagtcctaggacttcttagg

SEQ ID NO: 8989 - DNA, 122 bp, Homo sapiens
  misc_feature (61)..(62): /note="This region represents a CpG dinucleotide"
  misc_feature (61)..(61): /note="Nucleotide may be methylated to form 5-methylcytosine"
atccaaatgccattattgcacaattgtactattacgtgatcctgctgagcaacctttctacgccatagtcaccacccagtggactaactgggaataggagtttacaaccttattaataaaga

SEQ ID NO: 8990 - DNA, 122 bp, Homo sapiens
  misc_feature (61)..(62): /note="This region represents a CpG dinucleotide"
  misc_feature (61)..(61): /note="Nucleotide may be methylated to form 5-methylcytosine"
ggtactaaggttagcgaaaacactgcattccaacacgcgagagccacccaggcagggatgcgtcgcggaaaacacctctcacagcgctctgcagtgacaaggagcatctctgtgtggaaatg

SEQ ID NO: 8991 - DNA, 122 bp, Homo sapiens
  misc_feature (61)..(62): /note="This region represents a CpG dinucleotide"
  misc_feature (61)..(61): /note="Nucleotide may be methylated to form 5-methylcytosine"
ggctgaggcctgggccctgggaagtgacagcagccctgtgtagtgttttcaaagatcaggcgtggggacccacaccttggcctccaggcctaaggaggagtgttacgtgcagtagcacccgt

SEQ ID NO: 8992 - DNA, 122 bp, Homo sapiens
  misc_feature (61)..(62): /note="This region represents a CpG dinucleotide"
  misc_feature (61)..(61): /note="Nucleotide may be methylated to form 5-methylcytosine"
tgcctaagtctccagcctcatccctccctggccctgcgcagcagcctcactgcagttgcccggctcctcagccggggctttgcttgtgccattccttcatcctggagcaccctttcctccct

SEQ ID NO: 8993 - DNA, 122 bp, Homo sapiens
  misc_feature (61)..(62): /note="This region represents a CpG dinucleotide"
  misc_feature (61)..(61): /note="Nucleotide may be methylated to form 5-methylcytosine"
agcaacattttaaaataggcaaatattgtgtttggtacccctctcctactctgtacctctcgtccgtccttctgggccaccaaatttccactgccttctcagacctccatcaccctcttctg

SEQ ID NO: 8994 - DNA, 122 bp, Homo sapiens
  misc_feature (61)..(62): /note="This region represents a CpG dinucleotide"
  misc_feature (61)..(61): /note="Nucleotide may be methylated to form 5-methylcytosine"
cgagggcgagggcgagggagagcctggtttctcacttctgcttcctccttgtggctcccacgctgtgccgagccattcagcctgcacaatccagacaatggatttgcctctgaagtaggggc

SEQ ID NO: 8995 - DNA, 122 bp, Homo sapiens
  misc_feature (61)..(62): /note="This region represents a CpG dinucleotide"
  misc_feature (61)..(61): /note="Nucleotide may be methylated to form 5-methylcytosine"
aagctgttactaatacaaacgtaactatttagttcaacagaatcatgcatttaccaacttcgtttttacttcatttttaaaaatagttcaagctgaactttttttgctctttcacatacaaa

SEQ ID NO: 8996 - DNA, 122 bp, Homo sapiens
  misc_feature (61)..(62): /note="This region represents a CpG dinucleotide"
  misc_feature (61)..(61): /note="Nucleotide may be methylated to form 5-methylcytosine"
ttgaatcactgacagacttcaagttaagggagttttcgtggctgaggttagtaagtcacacgcacagctctccaaaggcatgtatggggaacgccagccttggctaaaagactgattcaagt

SEQ ID NO: 8997 - DNA, 122 bp, Homo sapiens
  misc_feature (61)..(62): /note="This region represents a CpG dinucleotide"
  misc_feature (61)..(61): /note="Nucleotide may be methylated to form 5-methylcytosine"
aatattaaaacaatctgctggcaaaatctggaaaaaaaaaacacttttaaaagccagatgcgtgatggctttactagaattgaaagtctgttgtcctatgattaagcatgccatgcagattt

SEQ ID NO: 8998 - DNA, 122 bp, Homo sapiens
  misc_feature (61)..(62): /note="This region represents a CpG dinucleotide"
  misc_feature (61)..(61): /note="Nucleotide may be methylated to form 5-methylcytosine"
tacacacaggcaaactagatcctgtgaggacaaattgcaacctgcatctgtatttccttgcgtccaacctcagtgatgtgagggacttataggattaggtagtacctttggcaacactgctg

SEQ ID NO: 8999 - DNA, 122 bp, Homo sapiens
  misc_feature (61)..(62): /note="This region represents a CpG dinucleotide"
  misc_feature (61)..(61): /note="Nucleotide may be methylated to form 5-methylcytosine"
ctggaatttctgggctcaagtgatcctgtttgagcccaggattacagctgagattacaggcggtcaccaccacagttggcctcattccagttttaaagatgaggaaactaattcagagaggt

SEQ ID NO: 9000 - DNA, 122 bp, Homo sapiens
  misc_feature (61)..(62): /note="This region represents a CpG dinucleotide"
  misc_feature (61)..(61): /note="Nucleotide may be methylated to form 5-methylcytosine"
aaatgatgggaatttggcctataggtgaatcaccaggcttgtggctcagctcaaagcatacgccctgctgaacggaggagtggcattatgtgcacacagagaaggcagcaccgttccctgtc

SEQ ID NO: 9001 - DNA, 122 bp, Homo sapiens
  misc_feature (61)..(62): /note="This region represents a CpG dinucleotide"
  misc_feature (61)..(61): /note="Nucleotide may be methylated to form 5-methylcytosine"
gtggtcattgcactctagcacacatgactgctttaagttaataattaaactttagcacatcgagagggaattaggaggtgtcagcaatggtgatgaatctcaccccaactcatgttacccag

SEQ ID NO: 9002 - DNA, 122 bp, Homo sapiens
  misc_feature (61)..(62): /note="This region represents a CpG dinucleotide"
  misc_feature (61)..(61): /note="Nucleotide may be methylated to form 5-methylcytosine"
caaggtatctgtcacagagtcaccattactcgaccaggcctctgtttcacacagtcgggtcgtttttagtcagtgatccaagggggccgggcggtgaaccaagtctaacggaggcagtcaca

SEQ ID NO: 9003 - DNA, 122 bp, Homo sapiens
  misc_feature (61)..(62): /note="This region represents a CpG dinucleotide"
  misc_feature (61)..(61): /note="Nucleotide may be methylated to form 5-methylcytosine"
gcaggtcttgacaagcatcatattcctgatgactgacctgaaccatttccggaggggagccgctggatagctggaaatcttgctgagcagtttcaggaaatacagcgtcatcatctttcaga

SEQ ID NO: 9004 - DNA, 122 bp, Homo sapiens
  misc_feature (61)..(62): /note="This region represents a CpG dinucleotide"
  misc_feature (61)..(61): /note="Nucleotide may be methylated to form 5-methylcytosine"
gtggagagttagccaccttttctctgtttcttttttctttttttttaatcgagatgaagtcgtatgcttgttgcccaggctggagtgcaatggtgcgatctcggctcactgcaacctccgcc

SEQ ID NO: 9005 - DNA, 122 bp, Homo sapiens
  misc_feature (61)..(62): /note="This region represents a CpG dinucleotide"
  misc_feature (61)..(61): /note="Nucleotide may be methylated to form 5-methylcytosine"
cctactgtcctggccctcaatgtgcagtggcagcagctgaccgtgactcgcttgcccagacgtgacccccatcctaatggcatgactcagtgcaaatggctggatttccatagcagagaagt

SEQ ID NO: 9006 - DNA, 122 bp, Homo sapiens
  misc_feature (61)..(62): /note="This region represents a CpG dinucleotide"
  misc_feature (61)..(61): /note="Nucleotide may be methylated to form 5-methylcytosine"
ggtcttggtggctacagtgaacatgtcttccgtgagaggcagcagtagataagctggtgacgtaaatagatgagaaatcaaaggacccagataaaggcctggaatctgtcatcactttgcta

SEQ ID NO: 9007 - DNA, 122 bp, Homo sapiens
  misc_feature (61)..(62): /note="This region represents a CpG dinucleotide"
  misc_feature (61)..(61): /note="Nucleotide may be methylated to form 5-methylcytosine"
ggagcagggggtggttttcctgtgccggctgtgcgggagacaaggccgggagccggtgctcgggtgcccgcagcctccaagggagtgccttcggcagggtcacgtgcaacacgagaggagtt

SEQ ID NO: 9008 - DNA, 122 bp, Homo sapiens
  misc_feature (61)..(62): /note="This region represents a CpG dinucleotide"
  misc_feature (61)..(61): /note="Nucleotide may be methylated to form 5-methylcytosine"
caggccaccagggcatgggcaggactcagcccgccatgggcgcctgctcagcgggaaatgcgattcccaggggtcactggttctcaactgggaggaaacacctgtcatctcttcaagcctca

SEQ ID NO: 9009 - DNA, 122 bp, Homo sapiens
  misc_feature (61)..(62): /note="This region represents a CpG dinucleotide"
  misc_feature (61)..(61): /note="Nucleotide may be methylated to form 5-methylcytosine"
tgcagacaaacagaggtctggctctttgttcttaccagcaggttcatcagctgttttctccgcaaaagaaagttctgagaaagtgaaggcaaacattttctttccactgaaatgaacacaaa

SEQ ID NO: 9010 - DNA, 122 bp, Homo sapiens
  misc_feature (61)..(62): /note="This region represents a CpG dinucleotide"
  misc_feature (61)..(61): /note="Nucleotide may be methylated to form 5-methylcytosine"
gcctccctaggagacaatctgcatgtcctaaataacctcttccagatccagcagctcccccgcctcctccccaggctccttctgaggcgggacagaaccggtgactttcctgcccggcctga

SEQ ID NO: 9011 - DNA, 122 bp, Homo sapiens
  misc_feature (61)..(62): /note="This region represents a CpG dinucleotide"
  misc_feature (61)..(61): /note="Nucleotide may be methylated to form 5-methylcytosine"
aaaaaagaaagtctctttttacaacttttttgaggtataacttacatatcagaaaatcaccggttttaaatatacatttcaatgacttttagtaaatttcccaagttgtgcaaccatcatca

SEQ ID NO: 9012 - DNA, 122 bp, Homo sapiens
  misc_feature (61)..(62): /note="This region represents a CpG dinucleotide"
  misc_feature (61)..(61): /note="Nucleotide may be methylated to form 5-methylcytosine"
atacatttttggtttttttttcccctcttgcttcagtgcaataaatcacagcagttcaggcgtaaaattacctgcaatttgtgagcaggtcttagacgcatgctgttgagagcagtgcccag

SEQ ID NO: 9013 - DNA, 122 bp, Homo sapiens
  misc_feature (61)..(62): /note="This region represents a CpG dinucleotide"
  misc_feature (61)..(61): /note="Nucleotide may be methylated to form 5-methylcytosine"
atcataaagggaggtagtttcatgacagagagagacatcaaatttgctgccacctctttgcgttctttatggtccaggccttgctattaatattagaggtgtaatatatgtactacatggca

SEQ ID NO: 9014 - DNA, 122 bp, Homo sapiens
  misc_feature (61)..(62): /note="This region represents a CpG dinucleotide"
  misc_feature (61)..(61): /note="Nucleotide may be methylated to form 5-methylcytosine"
tctttcttttgcttctcgaaactccaagcaacaaaactgccaattttaatctagaccactcggtggcagtaaaacagaaatgtctgcaaagaaagcagaaatcccttcagaattataataag

SEQ ID NO: 9015 - DNA, 122 bp, Homo sapiens
  misc_feature (61)..(62): /note="This region represents a CpG dinucleotide"
  misc_feature (61)..(61): /note="Nucleotide may be methylated to form 5-methylcytosine"
acatgaacctctgcagcgtgggcagatgctgctgcaaccctggccatgtcctcctagggacggtatttcccccatgactgtagcaagggtcccgggagtgccctgaccacacagatatgagt

SEQ ID NO: 9016 - DNA, 122 bp, Homo sapiens
  misc_feature (61)..(62): /note="This region represents a CpG dinucleotide"
  misc_feature (61)..(61): /note="Nucleotide may be methylated to form 5-methylcytosine"
taacttctctatatttgttcctgtgagaagttaagtaggatccctgattttataaatctacgacatggcaaaggctaggtggaaagacaggaacattctgtatatatcttaaagtgtcaggt

SEQ ID NO: 9017 - DNA, 122 bp, Homo sapiens
  misc_feature (61)..(62): /note="This region represents a CpG dinucleotide"
  misc_feature (61)..(61): /note="Nucleotide may be methylated to form 5-methylcytosine"
ccgaggtttgctccagtttgactctctgaggatactctctccctgcattactgaaagtgtcgtggttctacgaattaaagttatataagaagcatgtgagatgctggttaacccttcagaga

SEQ ID NO: 9018 - DNA, 122 bp, Homo sapiens
  misc_feature (61)..(62): /note="This region represents a CpG dinucleotide"
  misc_feature (61)..(61): /note="Nucleotide may be methylated to form 5-methylcytosine"
ttgtggctgtcttgatagttccaggagataaggcagaaaacccaaagcatgaacaagagacggttatgttgcaataaggacaggaagtctatctgtccactagcctctgagcctggcatatg

SEQ ID NO: 9019 - DNA, 122 bp, Homo sapiens
  misc_feature (61)..(62): /note="This region represents a CpG dinucleotide"
  misc_feature (61)..(61): /note="Nucleotide may be methylated to form 5-methylcytosine"
agctttctctacccagcctcatccttcctgaatgtggtgatgatactaaataaactcatgcgatgtttttcttccagctcgataatgatcctcattccatgccagttacaacatctgatgaa

SEQ ID NO: 9020 - DNA, 122 bp, Homo sapiens
  misc_feature (61)..(62): /note="This region represents a CpG dinucleotide"
  misc_feature (61)..(61): /note="Nucleotide may be methylated to form 5-methylcytosine"
tagaggagaggggaagaaaaaaaggaagtgttacttcagtgaccaggtgacattgcaccacgtaaggagaattccttatgtggtctggaagtcctaactagtcctgtctggctgagaccaaa

SEQ ID NO: 9021 - DNA, 122 bp, Homo sapiens
  misc_feature (61)..(62): /note="This region represents a CpG dinucleotide"
  misc_feature (61)..(61): /note="Nucleotide may be methylated to form 5-methylcytosine"
aggggagtaaactggttctggggtataacattgataggccttactaggcagtgggaaatacggttttggaactcaggtggggttgggcataagaaaatactggcataagaaaagttgttagg

SEQ ID NO: 9022 - DNA, 122 bp, Homo sapiens
  misc_feature (61)..(62): /note="This region represents a CpG dinucleotide"
  misc_feature (61)..(61): /note="Nucleotide may be methylated to form 5-methylcytosine"
cccaaaacaaaagacaaaacaaaacaaaacaaaacaaaaaaagacatgggcagagggagacgggcaaagacacacacacaggagaaagcaatgtgaagacagaggcagagactggaatgatg

SEQ ID NO: 9023 - DNA, 122 bp, Homo sapiens
  misc_feature (61)..(62): /note="This region represents a CpG dinucleotide"
  misc_feature (61)..(61): /note="Nucleotide may be methylated to form 5-methylcytosine"
tacaactcaatgagccagtattttccagatgaccaacataagatgatacaaaatcaagcacgggctaaagatccagtcaaagtataatacaagacagaccaatggattttaatgtagcagaa

SEQ ID NO: 9024 - DNA, 122 bp, Homo sapiens
  misc_feature (61)..(62): /note="This region represents a CpG dinucleotide"
  misc_feature (61)..(61): /note="Nucleotide may be methylated to form 5-methylcytosine"
tgaaaggcagcatggtaacatgcaagggaaaaaagcgttgcttcctcatctgtaaattggcgataataaaatctaccttagaggactgataagaggactaaagatcatataagtaaataaag

SEQ ID NO: 9025 - DNA, 122 bp, Homo sapiens
  misc_feature (61)..(62): /note="This region represents a CpG dinucleotide"
  misc_feature (61)..(61): /note="Nucleotide may be methylated to form 5-methylcytosine"
ttccctcccttctactactcctcagatcccatgactgttccttccttccttccacaattacgtgtcaggcatggttctaaggaacaataatgggtaagagcaactatggacggtcccgccca

SEQ ID NO: 9026 - DNA, 122 bp, Homo sapiens
  misc_feature (61)..(62): /note="This region represents a CpG dinucleotide"
  misc_feature (61)..(61): /note="Nucleotide may be methylated to form 5-methylcytosine"
tagatcctttcatatccaaaccactatcaaactgagttcttccaagactaacattaggaacgttagagttaacccaagacactgcttcacagtgccatgcagacctagccgagtctgataac

SEQ ID NO: 9027 - DNA, 122 bp, Homo sapiens
  misc_feature (61)..(62): /note="This region represents a CpG dinucleotide"
  misc_feature (61)..(61): /note="Nucleotide may be methylated to form 5-methylcytosine"
ttagtatcaattagcctatggccaaattggtttccttatacatcgttttgcttgaagttgcgtttccaagattttattgacaatgttaagtgaggacttactgtacagcgtgggggtcaggt

SEQ ID NO: 9028 - DNA, 122 bp, Homo sapiens
  misc_feature (61)..(62): /note="This region represents a CpG dinucleotide"
  misc_feature (61)..(61): /note="Nucleotide may be methylated to form 5-methylcytosine"
ggtgacactctccaggtgagtccttgtgtaattattaaggactcgcctttctcaagctggcggggaaaggggttgctgagaagggagaaatctggagcctaagtgacctaaatgaccagaac

SEQ ID NO: 9029 - DNA, 122 bp, Homo sapiens
  misc_feature (61)..(62): /note="This region represents a CpG dinucleotide"
  misc_feature (61)..(61): /note="Nucleotide may be methylated to form 5-methylcytosine"
gctaaccatatgccttccacaaaaatagaaatcgttaataaccatctcaactgagttactcgtggtgagtcatcatttatgttggcctaatgtagtctgagatagtctcactcatgtttata

SEQ ID NO: 9030 - DNA, 122 bp, Homo sapiens
  misc_feature (61)..(62): /note="This region represents a CpG dinucleotide"
  misc_feature (61)..(61): /note="Nucleotide may be methylated to form 5-methylcytosine"
catcattttctcttgtgcttgatttaatctcatgctgttttgttcctcacggtccctaagcgtacagaatccatggctaatgttgccaaagagaagccacattgagtgattgtattagtcca

SEQ ID NO: 9031 - DNA, 122 bp, Homo sapiens
  misc_feature (61)..(62): /note="This region represents a CpG dinucleotide"
  misc_feature (61)..(61): /note="Nucleotide may be methylated to form 5-methylcytosine"
actgggatcaactgtcaggcctccagccccagaacacattaatgactagaaactcagaagcgatactccagtgatgttccctgtagtccaagcagtttccttgagtgtggccagtttataac

SEQ ID NO: 9032 - DNA, 122 bp, Homo sapiens
  misc_feature (61)..(62): /note="This region represents a CpG dinucleotide"
  misc_feature (61)..(61): /note="Nucleotide may be methylated to form 5-methylcytosine"
ttgaagtgtccattgcagcacctggcatatagcaaagcaatgtgaagtgagccctggttgcgctctttctagcttacctaacctcacagagtcacaactttctcaatggcaaatgtaaatag

SEQ ID NO: 9033 - DNA, 122 bp, Homo sapiens
  misc_feature (61)..(62): /note="This region represents a CpG dinucleotide"
  misc_feature (61)..(61): /note="Nucleotide may be methylated to form 5-methylcytosine"
gaaaaacagacccaaaacagagctggggaactgccgacaagcttcccaaagccccagaaacgccccagggcagcaggagacaaatgctttcaggcctgaaaatctccacggcctcagacttc

SEQ ID NO: 9034 - DNA, 122 bp, Homo sapiens
  misc_feature (61)..(62): /note="This region represents a CpG dinucleotide"
  misc_feature (61)..(61): /note="Nucleotide may be methylated to form 5-methylcytosine"
tgaatcatcctaactaatttaatttttctgagccagattccttttaactcacctgctcggcgctagcctgtggagtttggagtctccccttttcaaaccattcgtcacacacttctgccaga

SEQ ID NO: 9035 - DNA, 122 bp, Homo sapiens
  misc_feature (61)..(62): /note="This region represents a CpG dinucleotide"
  misc_feature (61)..(61): /note="Nucleotide may be methylated to form 5-methylcytosine"
gccagagcaggtcccctgaagtgcaggacttagaccagagctctactcaggcttaagggtcgtgccaaaatcaagagacaaggtcccggtcacagggcttacataacagtgtttcacaactt

SEQ ID NO: 9036 - DNA, 122 bp, Homo sapiens
  misc_feature (61)..(62): /note="This region represents a CpG dinucleotide"
  misc_feature (61)..(61): /note="Nucleotide may be methylated to form 5-methylcytosine"
ttggtaagagcaatgccagggtggcagcaggaccccattggtggtctctgatgtgctggacgtgctgttctgggacttgcttctttcactcacgttacgcgtttgggattcaccctgttgac

SEQ ID NO: 9037 - DNA, 122 bp, Homo sapiens
  misc_feature (61)..(62): /note="This region represents a CpG dinucleotide"
  misc_feature (61)..(61): /note="Nucleotide may be methylated to form 5-methylcytosine"
catcacggctgtaatggttaaaaactctcaggcagcttccttcatgatgggatggcaacacgttttctctaagcaaatatggaggaggatttgtacagagcaactgtgcaggagctgaactg

SEQ ID NO: 9038 - DNA, 122 bp, Homo sapiens
  misc_feature (61)..(62): /note="This region represents a CpG dinucleotide"
  misc_feature (61)..(61): /note="Nucleotide may be methylated to form 5-methylcytosine"
cactcatcttttcatgttgctggaagtcagctcctcttagcggtgtgcagcttgggcttccggagttggctgggtctttgtgcttatcagcgataccctcctgtctcccatccctccctctc

SEQ ID NO: 9039 - DNA, 122 bp, Homo sapiens
  misc_feature (61)..(62): /note="This region represents a CpG dinucleotide"
  misc_feature (61)..(61): /note="Nucleotide may be methylated to form 5-methylcytosine"
agatcccatcagctcagctttccagaaaacatcatgctgtccacgatactgatgacattacggtaactagatcatgagcaggaagtagcaaatgcttcggatgccttctatgcaaagaaggg

SEQ ID NO: 9040 - DNA, 122 bp, Homo sapiens
  misc_feature (61)..(62): /note="This region represents a CpG dinucleotide"
  misc_feature (61)..(61): /note="Nucleotide may be methylated to form 5-methylcytosine"
actgggccttccagggtcattattcctagaaataatcccactaaatgcccatcttagcaacgcacatttccatgtgtgagttatttctctctcagccccatttaaaaatgtgaaatttggat

SEQ ID NO: 9041 - DNA, 122 bp, Homo sapiens
  misc_feature (61)..(62): /note="This region represents a CpG dinucleotide"
  misc_feature (61)..(61): /note="Nucleotide may be methylated to form 5-methylcytosine"
gaaagcaggtgagtgattgccgcagcttggaggaagaaggaaatgggaaatggctgctaacgggtatagggtttctttgtgggatattgaaaatattccagaagtgagtgctaatgattgca

SEQ ID NO: 9042 - DNA, 122 bp, Homo sapiens
  misc_feature (61)..(62): /note="This region represents a CpG dinucleotide"
  misc_feature (61)..(61): /note="Nucleotide may be methylated to form 5-methylcytosine"
attttgtaaacagttacctgcacaaggatctgataagtcaaatgtccttcctctatcttacggtgaagggcacaagcttcaggacatggtccctttttgtgtcacatgcctgaatttgaaca

SEQ ID NO: 9043 - DNA, 122 bp, Homo sapiens
  misc_feature (61)..(62): /note="This region represents a CpG dinucleotide"
  misc_feature (61)..(61): /note="Nucleotide may be methylated to form 5-methylcytosine"
gcagcctcttgaggggagggtctcccccacctcgggctggacaaagacagcttttccccacgtccctctgggttctctagagcaacagcaatacccgcccggcaggggtgtggcttagagcc

SEQ ID NO: 9044 - DNA, 122 bp, Homo sapiens
  misc_feature (61)..(62): /note="This region represents a CpG dinucleotide"
  misc_feature (61)..(61): /note="Nucleotide may be methylated to form 5-methylcytosine"
aggttggaggtcagcaggggccagattgctataggccactgaccttcttggctcaacctacggcactgtaaagccatgcttttggaggtagaacactgttaaccagcccttatcttcaatca

SEQ ID NO: 9045 - DNA, 122 bp, Homo sapiens
  misc_feature (61)..(62): /note="This region represents a CpG dinucleotide"
  misc_feature (61)..(61): /note="Nucleotide may be methylated to form 5-methylcytosine"
ctgagttagggactgtggcctctctgtgattatccttccttgatctataattacagtttacgtgaggacaatgtggtacattataactaaggtaacaagctttaatagggataattagtact

SEQ ID NO: 9046 - DNA, 122 bp, Homo sapiens
  misc_feature (61)..(62): /note="This region represents a CpG dinucleotide"
  misc_feature (61)..(61): /note="Nucleotide may be methylated to form 5-methylcytosine"
aagaccagagaacaccacctttttgtgattatggggctgtccccaaacctgtcaggaaggcggatgacatggtctgcagctgttcacctcctgtggactgccctgtttcagatctgggttca

SEQ ID NO: 9047 - DNA, 122 bp, Homo sapiens
  misc_feature (61)..(62): /note="This region represents a CpG dinucleotide"
  misc_feature (61)..(61): /note="Nucleotide may be methylated to form 5-methylcytosine"
gcaaaagcaattcagttacctgtcattgattgctgactgtgtgccagaccccggggtaggcgctttcggccccggctgcctttcttcctttgggactaacagctatgtagaagaggcagccc

SEQ ID NO: 9048 - DNA, 122 bp, Homo sapiens
  misc_feature (61)..(62): /note="This region represents a CpG dinucleotide"
  misc_feature (61)..(61): /note="Nucleotide may be methylated to form 5-methylcytosine"
ctagctttttaaaaatagccatttctgtttcatcccaattaaacaagacccaaagcttcccggttaaaagggtaaaaggccaaaccagtctacgttttcagaagcaacgtgtccaagaatga

SEQ ID NO: 9049 - DNA, 122 bp, Homo sapiens
  misc_feature (61)..(62): /note="This region represents a CpG dinucleotide"
  misc_feature (61)..(61): /note="Nucleotide may be methylated to form 5-methylcytosine"
atctcacagcctgaagcaccgctgccttcactcctgatgcatcactaacatggtacccaacgtgctgaactttggagactgtggttaaattggaggagagccctccctgttaatcttaagtt

SEQ ID NO: 9050 - DNA, 122 bp, Homo sapiens
  misc_feature (61)..(62): /note="This region represents a CpG dinucleotide"
  misc_feature (61)..(61): /note="Nucleotide may be methylated to form 5-methylcytosine"
gggcaggaggccttactttcttgccatgtagtcatcttcatagatctgcttgagtgtcctcgtgacatggcagctgacttccttcacagtgagtgatccaaggaagagagtaaacaggaaac

SEQ ID NO: 9051 - DNA, 122 bp, Homo sapiens
  misc_feature (61)..(62): /note="This region represents a CpG dinucleotide"
  misc_feature (61)..(61): /note="Nucleotide may be methylated to form 5-methylcytosine"
ggaaatgtcactaacctactttgagacgcccagatccagggccaaaggaggctgggctatcgctagaattttacagctctccttcccgaggatgtggctaaaagcaattagggcttggcctg

SEQ ID NO: 9052 - DNA, 122 bp, Homo sapiens
  misc_feature (61)..(62): /note="This region represents a CpG dinucleotide"
  misc_feature (61)..(61): /note="Nucleotide may be methylated to form 5-methylcytosine"
agtgtgctgttgcagtcacttctatacaatgtggagcagccagtcctctggcaaggatgtcgctttggtccaatggtgaaatcagacctagctcatgtcatgctgatgtagaaggccttctc

SEQ ID NO: 9053 - DNA, 122 bp, Homo sapiens
  misc_feature (61)..(62): /note="This region represents a CpG dinucleotide"
  misc_feature (61)..(61): /note="Nucleotide may be methylated to form 5-methylcytosine"
caaatgatgacatagaattcttcccaggcctagatatgcaaacagaagcagtgcaagggccgtgtacacaatgacagtgtgggtgcagataagacagtaatttcccggagagctttggttga

SEQ ID NO: 9054 - DNA, 122 bp, Homo sapiens
  misc_feature (61)..(62): /note="This region represents a CpG dinucleotide"
  misc_feature (61)..(61): /note="Nucleotide may be methylated to form 5-methylcytosine"
agcatctgttatctgttccatcaagcttgcccaaggggtggtgttcaggaactcaaaccacgtttttcccctgctctcacgtcgacagcataacaatcaacacagaagacttctgtgacccc

SEQ ID NO: 9055 - DNA, 122 bp, Homo sapiens
  misc_feature (61)..(62): /note="This region represents a CpG dinucleotide"
  misc_feature (61)..(61): /note="Nucleotide may be methylated to form 5-methylcytosine"
tggtctcccttgaattatgtgctagttcctgaaccaatcactgtcagcaggggaatggaacgctctggttttgtaagtctgagccttactgtataacccatgggccaggggtggatcctgct

SEQ ID NO: 9056 - DNA, 122 bp, Homo sapiens
  misc_feature (61)..(62): /note="This region represents a CpG dinucleotide"
  misc_feature (61)..(61): /note="Nucleotide may be methylated to form 5-methylcytosine"
atggtagtaggctaactgctgccttggcttattttagcaatgagattataatcaccttgacggtgagaggcattttgtttctctttttgtctttacctactcccaccagctgatattcaggg

SEQ ID NO: 9057 - DNA, 122 bp, Homo sapiens
  misc_feature (61)..(62): /note="This region represents a CpG dinucleotide"
  misc_feature (61)..(61): /note="Nucleotide may be methylated to form 5-methylcytosine"
aaatttaaagtacacggattctcaacatatagttatcaaaaaaaagtgacggtgaaactacgggtccagtgccatgacatttataggcactcaaagccttgcctctacctctgcaaccccga

SEQ ID NO: 9058 - DNA, 122 bp, Homo sapiens
  misc_feature (61)..(62): /note="This region represents a CpG dinucleotide"
  misc_feature (61)..(61): /note="Nucleotide may be methylated to form 5-methylcytosine"
atatggctgagagagaaagaaagtgcctccacctaagtgtgcaagaccccaacaggcagccgacctcccagctttaccgattgctccaggatcaggcccagtcctggctgcactgagctgtg

SEQ ID NO: 9059 - DNA, 122 bp, Homo sapiens
  misc_feature (61)..(62): /note="This region represents a CpG dinucleotide"
  misc_feature (61)..(61): /note="Nucleotide may be methylated to form 5-methylcytosine"
ttgctgagcaagcctctcagcagacacactttgaaacctgagcgaacacacaagaatcatcgatgctggcatcccctggtcctcaaaacactggtttctcctgccctatcttgtcatccatt

SEQ ID NO: 9060 - DNA, 122 bp, Homo sapiens
  misc_feature (61)..(62): /note="This region represents a CpG dinucleotide"
  misc_feature (61)..(61): /note="Nucleotide may be methylated to form 5-methylcytosine"
ctttacacctgttaggatggccatcaaaaagtcaaaagataataggagttggagaggatgcgaagaaaaaggaaccctgttacactgttggtgggactgtacattcgggcagcctctctggg

SEQ ID NO: 9061 - DNA, 122 bp, Homo sapiens
  misc_feature (61)..(62): /note="This region represents a CpG dinucleotide"
  misc_feature (61)..(61): /note="Nucleotide may be methylated to form 5-methylcytosine"
gtgagtctatcttgtgtgtctgtgtctaccttgattccactgaatctcattctttagggacgttgggttgaaagaaaatccatccttttttggccaaggaggatgaggcgttagttaattaa

SEQ ID NO: 9062 - DNA, 122 bp, Homo sapiens
  misc_feature (61)..(62): /note="This region represents a CpG dinucleotide"
  misc_feature (61)..(61): /note="Nucleotide may be methylated to form 5-methylcytosine"
ctatttctagttttggtaaggcttccagccaactgtaggctattaggaattaagatttttcggagtcaaaagtaatgtgtggatttttgactgcatgagtcattgtgttgctcccgcaaccc

SEQ ID NO: 9063 - DNA, 122 bp, Homo sapiens
  misc_feature (61)..(62): /note="This region represents a CpG dinucleotide"
  misc_feature (61)..(61): /note="Nucleotide may be methylated to form 5-methylcytosine"
ccttatttcaatgaaaagtactagaaagaggaacctgtgtactgtttaacatagccattccgtggcatttctaagtaagaatatttagtggctacaaccctcaggtatcctcctgttacatt

SEQ ID NO: 9064 - DNA, 122 bp, Homo sapiens
  misc_feature (61)..(62): /note="This region represents a CpG dinucleotide"
  misc_feature (61)..(61): /note="Nucleotide may be methylated to form 5-methylcytosine"
ggtagatgtaattcttaatgacaacagatatacgtgaaaaagcgaatcataggctgccatcgtcatagggcttatgctataaaatgctacttctaaaccagaggatttgctgaaagatgctg

SEQ ID NO: 9065 - DNA, 122 bp, Homo sapiens
  misc_feature (61)..(62): /note="This region represents a CpG dinucleotide"
  misc_feature (61)..(61): /note="Nucleotide may be methylated to form 5-methylcytosine"
accatcctttcctccctctcatgccagccactaagtcccagcaaaggctgagtctccagacggccactattacgacaaggaagtagggaggggactctgctgtcctctggtgtccacccacc

SEQ ID NO: 9066 - DNA, 122 bp, Homo sapiens
  misc_feature (61)..(62): /note="This region represents a CpG dinucleotide"
  misc_feature (61)..(61): /note="Nucleotide may be methylated to form 5-methylcytosine"
ggtgtggcatcgcagggagctggctgaggcttgagcatatttacctactgggaggaacctcgctggcagcagcaaggaggggtagagaatgctttcggcaggcagtgagggcattaaaggag

SEQ ID NO: 9067 - DNA, 122 bp, Homo sapiens
  misc_feature (61)..(62): /note="This region represents a CpG dinucleotide"
  misc_feature (61)..(61): /note="Nucleotide may be methylated to form 5-methylcytosine"
cgatggttttgtcaacagaaagcagttctttcttggcaggtggccatggggtgcagccgccgcacaggctctccagggccttgtatccccaagctctgctagcagagttcccttagcaggca

SEQ ID NO: 9068 - DNA, 122 bp, Homo sapiens
  misc_feature (61)..(62): /note="This region represents a CpG dinucleotide"
  misc_feature (61)..(61): /note="Nucleotide may be methylated to form 5-methylcytosine"
tttaccattgcttaaccaaataccaagtcacggggaacccacagggggcgtgtggctactcgctcaccaagtataggggaaagagatagactgtttacaaaggaaacaaaagtctcagggct

SEQ ID NO: 9069 - DNA, 122 bp, Homo sapiens
  misc_feature (61)..(62): /note="This region represents a CpG dinucleotide"
  misc_feature (61)..(61): /note="Nucleotide may be methylated to form 5-methylcytosine"
gaggaagtaaataattggagacaataatataatctaccacaagtctagtctagaggtaagcggcatggtctagaatagaaatataaattggagaatcatcagtgtacaggttgcagttgaag

SEQ ID NO: 9070 - DNA, 122 bp, Homo sapiens
  misc_feature (61)..(62): /note="This region represents a CpG dinucleotide"
  misc_feature (61)..(61): /note="Nucleotide may be methylated to form 5-methylcytosine"
agggcgtggagacttattatgctagacagtgtacggcaggtgctaggagaggggtccgtccgcctccaaccgaggtgatgctacgcttgaccctcgaacaacacgggtttgaactgcacgag

SEQ ID NO: 9071 - DNA, 122 bp, Homo sapiens
  misc_feature (61)..(62): /note="This region represents a CpG dinucleotide"
  misc_feature (61)..(61): /note="Nucleotide may be methylated to form 5-methylcytosine"
aaaagaagacaatgatggtaacaatgatgatgacaacaatgatgatgacatggctgagaccgtatatggcctgaaatatttactatctagtcctctgcagaaaaagtttgccaaaagtttag

SEQ ID NO: 9072 - DNA, 122 bp, Homo sapiens
  misc_feature (61)..(62): /note="This region represents a CpG dinucleotide"
  misc_feature (61)..(61): /note="Nucleotide may be methylated to form 5-methylcytosine"
ttcatgtacacattttttggagatgtaagttttcatgtggacgtaagttttcatttctcacgaatatacacctaggaatggaattgctggcccatatggtaactctgtagttaaccttttga

SEQ ID NO: 9073 - DNA, 122 bp, Homo sapiens
  misc_feature (61)..(62): /note="This region represents a CpG dinucleotide"
  misc_feature (61)..(61): /note="Nucleotide may be methylated to form 5-methylcytosine"
cgtctgtgatagataggcacgccggttttaagtttttccccttacctttttagatagtcacgtttacagcagctgtaaattagtgatgggctattagtgagctgtgtcattatttaataaaa

SEQ ID NO: 9074 - DNA, 122 bp, Homo sapiens
  misc_feature (61)..(62): /note="This region represents a CpG dinucleotide"
  misc_feature (61)..(61): /note="Nucleotide may be methylated to form 5-methylcytosine"
ctctgtatctcccctggaccaggagcatagaatttgactttcagttatccggtaacctaacgagaatgtatgtcaactatgttgacaactagtcaacatgatttataataaaactgaccctg

SEQ ID NO: 9075 - DNA, 122 bp, Homo sapiens
  misc_feature (61)..(62): /note="This region represents a CpG dinucleotide"
  misc_feature (61)..(61): /note="Nucleotide may be methylated to form 5-methylcytosine"
taaaaaggagaaaatccctgcccaccgcagctgccagcaatcccgctctccatttaaactcgtacagcactcaacacttgcagctgtcatctgactctatgcagctttgcccattctccagc

SEQ ID NO: 9076 - DNA, 122 bp, Homo sapiens
  misc_feature (61)..(62): /note="This region represents a CpG dinucleotide"
  misc_feature (61)..(61): /note="Nucleotide may be methylated to form 5-methylcytosine"
cccaccacacacctggtcttctgtccccggccccaattttcctctttgcctggtcctgaccgcagccccaacctgctgtgacccctcatcagggcgagtgtttcctggatgtcagctgtttc

SEQ ID NO: 9077 - DNA, 122 bp, Homo sapiens
  misc_feature (61)..(62): /note="This region represents a CpG dinucleotide"
  misc_feature (61)..(61): /note="Nucleotide may be methylated to form 5-methylcytosine"
aaagataagtaagatagactgagttagtgcacttaataaccttggtgaaagagatagacacgtaacaagtaatgacaaagagatacaggcatgaagaaatacagtgtgctcagggtgcctgg

SEQ ID NO: 9078 - DNA, 122 bp, Homo sapiens
  misc_feature (61)..(62): /note="This region represents a CpG dinucleotide"
  misc_feature (61)..(61): /note="Nucleotide may be methylated to form 5-methylcytosine"
ttgggtatgactactctgggtctgccacccccagaaagtttagcacaagtcacagagcagcgtcaggaagcccttgtttacatttcacacaccctttaggcccttctcccagccagcctgat

SEQ ID NO: 9079 - DNA, 122 bp, Homo sapiens
  misc_feature (61)..(62): /note="This region represents a CpG dinucleotide"
  misc_feature (61)..(61): /note="Nucleotide may be methylated to form 5-methylcytosine"
ttcataggacactgaggaatgaggaagaaaaataggtgtgaaggtactttttgaaaagcacgaagttctagcaggtatcaggggtaatatttaccggaagaacattatggtgccttgctcat

SEQ ID NO: 9080 - DNA, 122 bp, Homo sapiens
  misc_feature (61)..(62): /note="This region represents a CpG dinucleotide"
  misc_feature (61)..(61): /note="Nucleotide may be methylated to form 5-methylcytosine"
ggccctatcagcaaaggagagaaatgtgcaaacttcttgcagcattaatcaaacctgaaacgttatttttaaggtgtcacgaaatccacgttgactgactggtccttttaatcttaattttg

SEQ ID NO: 9081 - DNA, 122 bp, Homo sapiens
  misc_feature (61)..(62): /note="This region represents a CpG dinucleotide"
  misc_feature (61)..(61): /note="Nucleotide may be methylated to form 5-methylcytosine"
atggtgggtgcattataaatattcaaggtatctgctgcgtacctttgaatccactttacccgtgtccctgctgtagtctgcaattggtactcgagcctgcctatcctttgccaaaactgtca

SEQ ID NO: 9082 - DNA, 122 bp, Homo sapiens
  misc_feature (61)..(62): /note="This region represents a CpG dinucleotide"
  misc_feature (61)..(61): /note="Nucleotide may be methylated to form 5-methylcytosine"
ggggaatggaaagcctggcgctgggagagctgcgctcttgaccctcctttccctctaactcgcccagccatctagggaaatgcacttcgtttttgcgcttcaacctcttatctgtaaaacat

SEQ ID NO: 9083 - DNA, 122 bp, Homo sapiens
  misc_feature (61)..(62): /note="This region represents a CpG dinucleotide"
  misc_feature (61)..(61): /note="Nucleotide may be methylated to form 5-methylcytosine"
ttgaaatactatcttccacgtattctttcccatatgcaaaattaacaactgcctgattaacgcaatgagaaatgtacaattccagtacattgcagcaggtgtcagtataaggcagtgacata

SEQ ID NO: 9084 - DNA, 122 bp, Homo sapiens
  misc_feature (61)..(62): /note="This region represents a CpG dinucleotide"
  misc_feature (61)..(61): /note="Nucleotide may be methylated to form 5-methylcytosine"
gttaagcatgtaccacgttctctgtggtaggaactaacaataatcttgtccactttcatacgtattcttattgtctatcactgatgtctaattatattcaagaaacgtgtgtgaagtgacaa

SEQ ID NO: 9085 - DNA, 122 bp, Homo sapiens
  misc_feature (61)..(62): /note="This region represents a CpG dinucleotide"
  misc_feature (61)..(61): /note="Nucleotide may be methylated to form 5-methylcytosine"
aagcacctgttggtgtggcgaccctgctttctaaagcaagctgcaggggagaccgtaccgcgagccactcagaaggaggcgctgcaggaccatgcaaggcccagcagtgtgggaggggccag

SEQ ID NO: 9086 - DNA, 122 bp, Homo sapiens
  misc_feature (61)..(62): /note="This region represents a CpG dinucleotide"
  misc_feature (61)..(61): /note="Nucleotide may be methylated to form 5-methylcytosine"
agtccaaaggcaacttacgccagcttgcagccagatggccgggggagccactgtgccttacgccctaactactgtaaaggctgcatgtggattcaggaagagtcttgacatgaaagggaagt

SEQ ID NO: 9087 - DNA, 122 bp, Homo sapiens
  misc_feature (61)..(62): /note="This region represents a CpG dinucleotide"
  misc_feature (61)..(61): /note="Nucleotide may be methylated to form 5-methylcytosine"
ttttcccttttctctaagctctgatgtaaggtagtgtctcaggtaattgactcatctgcccgtatttgttcattacagctgttgctaggaagttattatgtaaatggccctgctcctcaatc

SEQ ID NO: 9088 - DNA, 122 bp, Homo sapiens
  misc_feature (61)..(62): /note="This region represents a CpG dinucleotide"
  misc_feature (61)..(61): /note="Nucleotide may be methylated to form 5-methylcytosine"
gaatcatcaaggttttcccatcttgactgtgttgaggtttatcccagcttgacttcccttcgtgtcttagcacatcctggtccactttccctgctatcagttgttaagtatttagagaatgc

SEQ ID NO: 9089 - DNA, 122 bp, Homo sapiens
  misc_feature (61)..(62): /note="This region represents a CpG dinucleotide"
  misc_feature (61)..(61): /note="Nucleotide may be methylated to form 5-methylcytosine"
ccaaaccaagactggaaaccattgagctcacctgtgcactttgcaaacttcgaagtgcagcgcacagggcaacagctgtgagtaatgtgaactgtaaccatcatgattcacgaccttgagaa

SEQ ID NO: 9090 - DNA, 122 bp, Homo sapiens
  misc_feature (61)..(62): /note="This region represents a CpG dinucleotide"
  misc_feature (61)..(61): /note="Nucleotide may be methylated to form 5-methylcytosine"
agtgtaggggaggcagcagtcactttggaatcaagcagtactggtatttaatggcacctccgtttattagtgtatattgtataacgtttattttcctatccagcaaataaaaataacaaaac

SEQ ID NO: 9091 - DNA, 122 bp, Homo sapiens
  misc_feature (61)..(62): /note="This region represents a CpG dinucleotide"
  misc_feature (61)..(61): /note="Nucleotide may be methylated to form 5-methylcytosine"
tcaaggcatgttccctaaaactagagcacatatctttccagttagcgagtggctgtttaacgcaaggaacatcctgcaatcctatgaaagaggatgcaaaagatatgcaggataccctttat

SEQ ID NO: 9092 - DNA, 122 bp, Homo sapiens
  misc_feature (61)..(62): /note="This region represents a CpG dinucleotide"
  misc_feature (61)..(61): /note="Nucleotide may be methylated to form 5-methylcytosine"
tttggcctatttttcaactgtctaaattttcgccgccaaagtcgccaaaaccgcctccgccgcagcctcctcaaaagccgcccccgccgccgctgcagccaaagcctcctcctcctcctctt

SEQ ID NO: 9093 - DNA, 122 bp, Homo sapiens
  misc_feature (61)..(62): /note="This region represents a CpG dinucleotide"
  misc_feature (61)..(61): /note="Nucleotide may be methylated to form 5-methylcytosine"
agagcaggaatcaattcttggtggagaaaataatctatgactagatgacgcttaaaggcacgacaagagattttatgaagttcccctaacggagggaataatgaagtgcctggcagagaagg

SEQ ID NO: 9094 - DNA, 122 bp, Homo sapiens
  misc_feature (61)..(62): /note="This region represents a CpG dinucleotide"
  misc_feature (61)..(61): /note="Nucleotide may be methylated to form 5-methylcytosine"
gaagtcaagcacgaatctaagacatagattatttttatatagctaatgaagagtatgttacgaaattgttgggtttttggggtattgagggtggcaaattttgtgaatcatgcatgcttcac

SEQ ID NO: 9095 - DNA, 122 bp, Homo sapiens
  misc_feature (61)..(62): /note="This region represents a CpG dinucleotide"
  misc_feature (61)..(61): /note="Nucleotide may be methylated to form 5-methylcytosine"
aaattggtacgctgtatgtctactcattgtggggtaatagaaccaccatagaattactcacgtaacttgtcactgaggcagaaaatctttcagtcttagtttcatcacttcaatctactagc

SEQ ID NO: 9096 - DNA, 122 bp, Homo sapiens
  misc_feature (61)..(62): /note="This region represents a CpG dinucleotide"
  misc_feature (61)..(61): /note="Nucleotide may be methylated to form 5-methylcytosine"
ggccctgtgggccctggtcacagtttcaggagaggggaatggttccaataaacaaggcagcgaccatgtgatggccaggttctgtgtcaggctgagtcaccatttgagcagaatgaaggctc

SEQ ID NO: 9097 - DNA, 122 bp, Homo sapiens
  misc_feature (61)..(62): /note="This region represents a CpG dinucleotide"
  misc_feature (61)..(61): /note="Nucleotide may be methylated to form 5-methylcytosine"
ggtgatatgcctgcctcagcctctcaaagtgctgggattacaggtgtgagccactgcacccggcctctaaaagcagaattgacttgctttgctaagaaagttcaggaagcccggataattgc

SEQ ID NO: 9098 - DNA, 122 bp, Homo sapiens
  misc_feature (61)..(62): /note="This region represents a CpG dinucleotide"
  misc_feature (61)..(61): /note="Nucleotide may be methylated to form 5-methylcytosine"
ccaaaattgtttatttgacgtactgctcaacagtgaaaatccttttgctagaaagtagcacgtgtataataaacagaatgtaaccagcaaaataaagtgacagtagattctatcagcttttc

SEQ ID NO: 9099 - DNA, 122 bp, Homo sapiens
  misc_feature (61)..(62): /note="This region represents a CpG dinucleotide"
  misc_feature (61)..(61): /note="Nucleotide may be methylated to form 5-methylcytosine"
tagctctggcatactttgaaaaggcaattggcgatgttattgctgccaagggtgataggacgtcagatctgatcagcctgtacgaggaagctgctcagatagagcagctgaggaggaaccac

SEQ ID NO: 9100 - DNA, 122 bp, Homo sapiens
  misc_feature (61)..(62): /note="This region represents a CpG dinucleotide"
  misc_feature (61)..(61): /note="Nucleotide may be methylated to form 5-methylcytosine"
cgattagaacgggttccagtcgcttgggggcgttggggggctggagggcaagaggttacgcgccccagctcccaccttgggtccttcgcctgcacccagtctaacctggcacctaaaggttt

SEQ ID NO: 9101 - DNA, 122 bp, Homo sapiens
  misc_feature (61)..(62): /note="This region represents a CpG dinucleotide"
  misc_feature (61)..(61): /note="Nucleotide may be methylated to form 5-methylcytosine"
actttaaaaagtggctggcacgtaaatggcaactgctaatacttatttccactctcaggacgcatgagaatgacacaggaaacaggggaaagggcctggcccagtgccccacacacagcaag

SEQ ID NO: 9102 - DNA, 122 bp, Homo sapiens
  misc_feature (61)..(62): /note="This region represents a CpG dinucleotide"
  misc_feature (61)..(61): /note="Nucleotide may be methylated to form 5-methylcytosine"
attgattctaagacacacatctcacccaccctacccaatctaacatctctgagattacaccgcaggctctaattgatgccatttaataattactgtcagccaggtggcagtcttaacctgcc

SEQ ID NO: 9103 - DNA, 122 bp, Homo sapiens
  misc_feature (61)..(62): /note="This region represents a CpG dinucleotide"
  misc_feature (61)..(61): /note="Nucleotide may be methylated to form 5-methylcytosine"
gcaagcaagcaagcaagcttttcctcatagcaggggtgagaagaaagcacagatttggaacgaggaggggatcctcaggcttagaaacctaagatcaaatcccagttcagccacttatgagt

SEQ ID NO: 9104 - DNA, 122 bp, Homo sapiens
  misc_feature (61)..(62): /note="This region represents a CpG dinucleotide"
  misc_feature (61)..(61): /note="Nucleotide may be methylated to form 5-methylcytosine"
aacagaactattcttgcggcactggggtttggtgagactctctctgactcagagaaatgacgcaggatggccactctgtccttggggccccaagcctagaatctgagtctctgactccctgc

SEQ ID NO: 9105 - DNA, 122 bp, Homo sapiens
  misc_feature (61)..(62): /note="This region represents a CpG dinucleotide"
  misc_feature (61)..(61): /note="Nucleotide may be methylated to form 5-methylcytosine"
aaactaaatgacccaaataaggcagatactatggggctcagccaagtaaaccattctgtccgcactggtatcccagccatgtcttatttatttacctagctttactttagatttttatctta

SEQ ID NO: 9106 - DNA, 122 bp, Homo sapiens
  misc_feature (61)..(62): /note="This region represents a CpG dinucleotide"
  misc_feature (61)..(61): /note="Nucleotide may be methylated to form 5-methylcytosine"
ttattaattttaccctctagtaaatatgtcagcatgaggaagtgacacaacagctatctccgatattaaggactattctggtgctgctcctttatgaaaataatagtagagaaaaacaaact

SEQ ID NO: 9107 - DNA, 122 bp, Homo sapiens
  misc_feature (61)..(62): /note="This region represents a CpG dinucleotide"
  misc_feature (61)..(61): /note="Nucleotide may be methylated to form 5-methylcytosine"
cctgcactctctgagaccgcccttggttctcagaaagtgcggggccgggggccccatcaccgggaggggtgctgccctgaaatgctctttgcagaaagtttcagccgtaacaaatgagcacg

SEQ ID NO: 9108 - DNA, 122 bp, Homo sapiens
  misc_feature (61)..(62): /note="This region represents a CpG dinucleotide"
  misc_feature (61)..(61): /note="Nucleotide may be methylated to form 5-methylcytosine"
tgaaacgtgaaccccttcccatggccctggctgtgcagtcctcctggtcggaacatcacacggctgttctccaagagtggttcctgcaaatggcccccgctgtgaagccctgggaagccctg

SEQ ID NO: 9109 - DNA, 122 bp, Homo sapiens
  misc_feature (61)..(62): /note="This region represents a CpG dinucleotide"
  misc_feature (61)..(61): /note="Nucleotide may be methylated to form 5-methylcytosine"
atgtgggctccacaagggtggagattgggtctctctggttcctcactgtatgcggtgccccgcccaaggcctgcacccactaagggctgaataaatacttgttctaagaccaggcccagtag

SEQ ID NO: 9110 - DNA, 122 bp, Homo sapiens
  misc_feature (61)..(62): /note="This region represents a CpG dinucleotide"
  misc_feature (61)..(61): /note="Nucleotide may be methylated to form 5-methylcytosine"
acaatgaaggagaaaatgtagcctcgcaacttcattcgtaaataatccagactaaccgcacggagtataatggatcaaagtgagcagaatcgctcactttggatgagatcagccctagaatg

SEQ ID NO: 9111 - DNA, 122 bp, Homo sapiens
  misc_feature (61)..(62): /note="This region represents a CpG dinucleotide"
  misc_feature (61)..(61): /note="Nucleotide may be methylated to form 5-methylcytosine"
agccattcatttgcttttgaaggtgatcttgtaatagagtgatcctgctcactagtaatgcggcccagtgagcatccaggaatctggttgagcaattcagtgtgccctccttttgggaaaaa

SEQ ID NO: 9112 - DNA, 122 bp, Homo sapiens
  misc_feature (61)..(62): /note="This region represents a CpG dinucleotide"
  misc_feature (61)..(61): /note="Nucleotide may be methylated to form 5-methylcytosine"
aggcgtttcctgggcgatcctggtgcaaagcgaaggcgcgcgggaagcgcagtctggctgcggcccagcccgggggcacccgcggtgccctgaccttggacaagtcctgggtctcggggggc

SEQ ID NO: 9113 - DNA, 122 bp, Homo sapiens
  misc_feature (61)..(62): /note="This region represents a CpG dinucleotide"
  misc_feature (61)..(61): /note="Nucleotide may be methylated to form 5-methylcytosine"
aaagtaagtaagagttggtcagaaaattcatgtttttcttacagactaacaaggcacagacgtatcactcggggagttagaaacaattacacatgactcacgccaagcattttaaagccaca

SEQ ID NO: 9114 - DNA, 122 bp, Homo sapiens
  misc_feature (61)..(62): /note="This region represents a CpG dinucleotide"
  misc_feature (61)..(61): /note="Nucleotide may be methylated to form 5-methylcytosine"
gaaggtaaaacaagagtcgacagggtagaggttaatagctcaaatcctagagccagaccacggcctggttttgaccatggctctaaccgcaggtgacattggaaaagttacttcacctctct

SEQ ID NO: 9115 - DNA, 122 bp, Homo sapiens
  misc_feature (61)..(62): /note="This region represents a CpG dinucleotide"
  misc_feature (61)..(61): /note="Nucleotide may be methylated to form 5-methylcytosine"
ttcactatttaaaagttttatttttcttatatcaggcctagaagcaacttccacatcagacgcactgtttacaaaaaaaaaaaaaaaaaaaaaaaaggtcccataaagccacaggtcctctg

SEQ ID NO: 9116 - DNA, 122 bp, Homo sapiens
  misc_feature (61)..(62): /note="This region represents a CpG dinucleotide"
  misc_feature (61)..(61): /note="Nucleotide may be methylated to form 5-methylcytosine"
aaagcaaccattaaattaataaaccagaggtaagcagagtcacttggtgagatctccatacggagtcactgagtgaagcaggaaagtgtatgatgtaatccagtctttgcacaacaatgatt

SEQ ID NO: 9117 - DNA, 122 bp, Homo sapiens
  misc_feature (61)..(62): /note="This region represents a CpG dinucleotide"
  misc_feature (61)..(61): /note="Nucleotide may be methylated to form 5-methylcytosine"
caccccaggcttgtgggacccgcctttactgtcagtcagtgcgcatgcgtggccgggtatcggacaggaactgcaccagcgttatctcctaggaagttctttgccgttttccgcttatcagc

SEQ ID NO: 9118 - DNA, 122 bp, Homo sapiens
  misc_feature (61)..(62): /note="This region represents a CpG dinucleotide"
  misc_feature (61)..(61): /note="Nucleotide may be methylated to form 5-methylcytosine"
cacccaagagtgcggatggaccactaggctgtactgcctggggccctttaggagaaaatccgtcctcccagtctccccaggtctcttgcctttggcctgctctggttcctgttatagaatgg

SEQ ID NO: 9119 - DNA, 122 bp, Homo sapiens
  misc_feature (61)..(62): /note="This region represents a CpG dinucleotide"
  misc_feature (61)..(61): /note="Nucleotide may be methylated to form 5-methylcytosine"
taattcctctgcttaaccactgccccaccctgaaggcttcatttgtacagtgtgctatcacgtcatttggcctattgttgactcaaagcagtatttacatattaactctctgtcttttaaca

SEQ ID NO: 9120 - DNA, 122 bp, Homo sapiens
  misc_feature (61)..(62): /note="This region represents a CpG dinucleotide"
  misc_feature (61)..(61): /note="Nucleotide may be methylated to form 5-methylcytosine"
atacagcatgaggcacacacccatgggggatggccagggggtccttgaagaagtcctttgcggtggaggacactccaaggaaagtccttgacccaggggaaccacccactgagggtccttaa

SEQ ID NO: 9121 - DNA, 122 bp, Homo sapiens
  misc_feature (61)..(62): /note="This region represents a CpG dinucleotide"
  misc_feature (61)..(61): /note="Nucleotide may be methylated to form 5-methylcytosine"
ccttttgactagaggtgtgtggcttgtgggattctgccaccctgtgtgcagcccttgagacgtggctcgtgcagcaaggccaagtccctgattgttctctcgttttaggctttgccattggg

SEQ ID NO: 9122 - DNA, 122 bp, Homo sapiens
  misc_feature (61)..(62): /note="This region represents a CpG dinucleotide"
  misc_feature (61)..(61): /note="Nucleotide may be methylated to form 5-methylcytosine"
tggagggcaccttgaacataacaggaaatttcaaataacaggaaaccaagaccagcaaggcgggtggctccaccctgcgtcgggcctcagtcagcccccgggggaggccatgaacgccacgg

SEQ ID NO: 9123 - DNA, 122 bp, Homo sapiens
  misc_feature (61)..(62): /note="This region represents a CpG dinucleotide"
  misc_feature (61)..(61): /note="Nucleotide may be methylated to form 5-methylcytosine"
gagctccctctttagtcagctggtgtgatttcctcaacaggctttactagagccgtactccgttgagcaaccattaatggtattgaatgcatgacaactactatggccatttctttaaacat

SEQ ID NO: 9124 - DNA, 122 bp, Homo sapiens
  misc_feature (61)..(62): /note="This region represents a CpG dinucleotide"
  misc_feature (61)..(61): /note="Nucleotide may be methylated to form 5-methylcytosine"
cccagagcctctgtggtttttaagagtaacacacaggaaggaagctcactgaggtgcaaccgttattagtaccttggggagtttaacaggagcacagtgtagaagcaaaacagctttgtgga

SEQ ID NO: 9125 - DNA, 122 bp, Homo sapiens
  misc_feature (61)..(62): /note="This region represents a CpG dinucleotide"
  misc_feature (61)..(61): /note="Nucleotide may be methylated to form 5-methylcytosine"
agccactgagcccggcccagtctttttcttaaaaaatctgctcacaattccaattatttgcgcaatgctgtactaagtacaagagaaaggtgtttcctctcagccaggacagaaggtaggaa

SEQ ID NO: 9126 - DNA, 122 bp, Homo sapiens
  misc_feature (61)..(62): /note="This region represents a CpG dinucleotide"
  misc_feature (61)..(61): /note="Nucleotide may be methylated to form 5-methylcytosine"
gttcatttaaaggttggtctgaacagtgaggcactcccatacaaaggaactccatcataccggatgccaccgtttaaggatcctttgaaacttcttaagaattcaacgagatttttaacctg

SEQ ID NO: 9127 - DNA, 122 bp, Homo sapiens
  misc_feature (61)..(62): /note="This region represents a CpG dinucleotide"
  misc_feature (61)..(61): /note="Nucleotide may be methylated to form 5-methylcytosine"
tatttttaaattctactcaatcagcatttattcagtacctacaacgtatttcttttactacgtaaaaagaaatatcaggtaaaaggttttgatgagtgattgcaacaaaccaatcatccagt

SEQ ID NO: 9128 - DNA, 122 bp, Homo sapiens
  misc_feature (61)..(62): /note="This region represents a CpG dinucleotide"
  misc_feature (61)..(61): /note="Nucleotide may be methylated to form 5-methylcytosine"
tagagcaggtgtaaatgtttagcaggcaattactactagtagtggtagaagcccagattgcgacattactgagaagtgatgattgaaacctttgtggtagataagatcactaaggaagaata

SEQ ID NO: 9129 - DNA, 122 bp, Homo sapiens
  misc_feature (61)..(62): /note="This region represents a CpG dinucleotide"
  misc_feature (61)..(61): /note="Nucleotide may be methylated to form 5-methylcytosine"
atatcctttgcccttactgaatgcagcccccactaagttattaacattgtagaaaagattcgagagcaaaatttaagtgctcatgcaatttaaaataggctgaattaaatggaaaagaagag

SEQ ID NO: 9130 - DNA, 122 bp, Homo sapiens
  misc_feature (61)..(62): /note="This region represents a CpG dinucleotide"
  misc_feature (61)..(61): /note="Nucleotide may be methylated to form 5-methylcytosine"
gcagggcagcctggtggcggctaggacacttctgcagaggacctggagttgggctgctcccggggctcccatctcttgctgggtctgttttcaggtgcaccctcctcctccaggaggcaggg

SEQ ID NO: 9131 - DNA, 122 bp, Homo sapiens
  misc_feature (61)..(62): /note="This region represents a CpG dinucleotide"
  misc_feature (61)..(61): /note="Nucleotide may be methylated to form 5-methylcytosine"
gagcagagcagagctgaaagagaccagtctcagagaagcaaacatgttcaagcaaagaaccgggcaagtcttgttttccctccaaacccaaacctcctagaaactaacagttggtttttgat

SEQ ID NO: 9132 - DNA, 122 bp, Homo sapiens
  misc_feature (61)..(62): /note="This region represents a CpG dinucleotide"
  misc_feature (61)..(61): /note="Nucleotide may be methylated to form 5-methylcytosine"
ggcatgtagctccttttcctgcaataacacagctgcctccttcccagtacaattttgtcccgtctcctgtatgcccaagaaccatacaaacaagtaaagatgtacggcagaatttgcagtca

SEQ ID NO: 9133 - DNA, 122 bp, Homo sapiens
  misc_feature (61)..(62): /note="This region represents a CpG dinucleotide"
  misc_feature (61)..(61): /note="Nucleotide may be methylated to form 5-methylcytosine"
ttctgatgtgctcaatctggggaagagaactgaaaccaaaaacccagcagggatgaatgacgtcttagtcatggaactgacaggagctgtgaaacaggccactcagaagtgaggcagagact

SEQ ID NO: 9134 - DNA, 122 bp, Homo sapiens
  misc_feature (61)..(62): /note="This region represents a CpG dinucleotide"
  misc_feature (61)..(61): /note="Nucleotide may be methylated to form 5-methylcytosine"
agagtttcaggagctctgtaccaggaaccaggggcaaagaacagtatattttttatgtcacgctgaggcacagagaggttaacttgtccaagatcaaatagtatgtgacagagctgagattg

SEQ ID NO: 9135 - DNA, 122 bp, Homo sapiens
  misc_feature (61)..(62): /note="This region represents a CpG dinucleotide"
  misc_feature (61)..(61): /note="Nucleotide may be methylated to form 5-methylcytosine"
cagaagtacaggcactgaacaaatgcccactcgctaggcagaatgcagctgctgcccacacgttagtacccagtggtaaggtggatacaatgtgacctcagaggaccaagagttgaggtcac

SEQ ID NO: 9136 - DNA, 122 bp, Homo sapiens
  misc_feature (61)..(62): /note="This region represents a CpG dinucleotide"
  misc_feature (61)..(61): /note="Nucleotide may be methylated to form 5-methylcytosine"
gctgacgtgtgtgaactccaacttcatgagagatcctgagtcagaatgacctggctaagccgcttccaaaatcctgaaccacagaaactgagataataaatgtttattgttttatgccaatg

SEQ ID NO: 9137 - DNA, 122 bp, Homo sapiens
  misc_feature (61)..(62): /note="This region represents a CpG dinucleotide"
  misc_feature (61)..(61): /note="Nucleotide may be methylated to form 5-methylcytosine"
gatttgccttacaagctaaatgttacatttccactcaacagaaaggtactgctgtgtggccgtaaaaagctggccaaaaccctgtaacctttgcagttagtcatgttatttttggttcatgc

SEQ ID NO: 9138 - DNA, 122 bp, Homo sapiens
  misc_feature (61)..(62): /note="This region represents a CpG dinucleotide"
  misc_feature (61)..(61): /note="Nucleotide may be methylated to form 5-methylcytosine"
cttgtctggcttcccagccgctgctctgacgtcctcgtggacggtttgggcatttctacgcggttgtgcgaccaacaactgcccgttcaggtcaaggtccccatctacaggagaaagggatg

SEQ ID NO: 9139 - DNA, 122 bp, Homo sapiens
  misc_feature (61)..(62): /note="This region represents a CpG dinucleotide"
  misc_feature (61)..(61): /note="Nucleotide may be methylated to form 5-methylcytosine"
tccggtttcctgtggcatcctgcccacttaatcattcaagtaggggaactactggcaaagcgggaaagaccaaggcaagctcctgtgacctagcaagaatcatgtcacatataattaccata

SEQ ID NO: 9140 - DNA, 122 bp, Homo sapiens
  misc_feature (61)..(62): /note="This region represents a CpG dinucleotide"
  misc_feature (61)..(61): /note="Nucleotide may be methylated to form 5-methylcytosine"
catagtctgttttatatttcctgtagattataaacatgccaagttttaagtacaaagatgcgtcacctagtggctgacaagccaggttaccatttacataacgaatgccaatattaatgtta

SEQ ID NO: 9141 - DNA, 122 bp, Homo sapiens
  misc_feature (61)..(62): /note="This region represents a CpG dinucleotide"
  misc_feature (61)..(61): /note="Nucleotide may be methylated to form 5-methylcytosine"
gcccagcccaggccttgtaattgtagcagaggatttggcttccctcagcctatggatctgcgccctgaaggatgaacaggaattagtgaagcaattctctattgagaaggagcaattctcta

SEQ ID NO: 9142 - DNA, 122 bp, Homo sapiens
  misc_feature (61)..(62): /note="This region represents a CpG dinucleotide"
  misc_feature (61)..(61): /note="Nucleotide may be methylated to form 5-methylcytosine"
aaaggggcagggcctgggctgcacaccttaggatgaagtttgctttcccatggctgggggcgggccatgacagggcctctggattaagccaccctgagctctccctccgctagcacacaagc

SEQ ID NO: 9143 - DNA, 122 bp, Homo sapiens
  misc_feature (61)..(62): /note="This region represents a CpG dinucleotide"
  misc_feature (61)..(61): /note="Nucleotide may be methylated to form 5-methylcytosine"
ttgtacaaactgaaaatttatgcattaactgtttgcattctgagcgtgtgttccagattacgtcttacagcattcttctggtatgctgcagaatgcgtgtgtgcaaaaagcacttctttcac

SEQ ID NO: 9144 - DNA, 122 bp, Homo sapiens
  misc_feature (61)..(62): /note="This region represents a CpG dinucleotide"
  misc_feature (61)..(61): /note="Nucleotide may be methylated to form 5-methylcytosine"
tggggcctggtcttttattcccctgtctctgagcctactttccaggtcagcctttgccggcgctgacagcacgcttttctcatagcctctccttctcatagcctttggttgctttcaagttc

SEQ ID NO: 9145 - DNA, 122 bp, Homo sapiens
  misc_feature (61)..(62): /note="This region represents a CpG dinucleotide"
  misc_feature (61)..(61): /note="Nucleotide may be methylated to form 5-methylcytosine"
gaaactctgccactatctccttaccttcccattactggcctttcccaattgtgtgacacacgccattgctggttcctggaatcattttagatggtgcaagatactggattaagcaaggcatg

SEQ ID NO: 9146 - DNA, 122 bp, Homo sapiens
  misc_feature (61)..(62): /note="This region represents a CpG dinucleotide"
  misc_feature (61)..(61): /note="Nucleotide may be methylated to form 5-methylcytosine"
gatgacagtggtgagctgtctggagcagccactgccatcatgctggctacagctggaaggcgtggccaggactgcatgttccatggagctggcgagagccagggacaagcaggagctccacc

SEQ ID NO: 9147 - DNA, 122 bp, Homo sapiens
  misc_feature (61)..(62): /note="This region represents a CpG dinucleotide"
  misc_feature (61)..(61): /note="Nucleotide may be methylated to form 5-methylcytosine"
gctgcaaaaagtcttacagaagggaggagagggggttgtcagcaggagcagcccaggagacgctcatgagaatacgcaagggtctgcaccagtcagcacttggaattgtccctcctgggaga

SEQ ID NO: 9148 - DNA, 122 bp, Homo sapiens
  misc_feature (61)..(62): /note="This region represents a CpG dinucleotide"
  misc_feature (61)..(61): /note="Nucleotide may be methylated to form 5-methylcytosine"
aatttacatctttaaaggaaatcatcatttgtaaatgcacctctgtctctgcacctaaaccgctaggaagtttaactacagggaagacagtgtcttaaagttaacataacaaaccttgcttg

SEQ ID NO: 9149 - DNA, 122 bp, Homo sapiens
  misc_feature (61)..(62): /note="This region represents a CpG dinucleotide"
  misc_feature (61)..(61): /note="Nucleotide may be methylated to form 5-methylcytosine"
tataatttcatttctaaaatttcagtcagatgtcaaatataaaccaacaaatacaaaacccgccagtccagatattaacttcctggttggcataatattcttaatagatttgaactaaaaat

SEQ ID NO: 9150 - DNA, 122 bp, Homo sapiens
  misc_feature (61)..(62): /note="This region represents a CpG dinucleotide"
  misc_feature (61)..(61): /note="Nucleotide may be methylated to form 5-methylcytosine"
gctcagacacgtcctcttttccccacccggattttcagttcccctgaggaaccacctctccgtctccgagtgcccagtctggttcactgagccatttgtgcccagaaggacctgtagtgctg

SEQ ID NO: 9151 - DNA, 122 bp, Homo sapiens
  misc_feature (61)..(62): /note="This region represents a CpG dinucleotide"
  misc_feature (61)..(61): /note="Nucleotide may be methylated to form 5-methylcytosine"
gctcactcatgcttggactactgcccaagtcctgtgacatcattgctcccctctctgacccgtcttcatcccaggaaggaccttcatgttaccctccccaagcagcacttccacaacctcac

SEQ ID NO: 9152 - DNA, 122 bp, Homo sapiens
  misc_feature (61)..(62): /note="This region represents a CpG dinucleotide"
  misc_feature (61)..(61): /note="Nucleotide may be methylated to form 5-methylcytosine"
gttcctgttacagaatttctgcttctcttaacatagattgtagcagctactgagttgaggcgttatctaatgcagtcatctgttgggaccagagtaattgcagtcatattttggctgtgtgc

SEQ ID NO: 9153 - DNA, 122 bp, Homo sapiens
  misc_feature (61)..(62): /note="This region represents a CpG dinucleotide"
  misc_feature (61)..(61): /note="Nucleotide may be methylated to form 5-methylcytosine"
ctcatgctccctcagggtccacagctgtgtactaagtgctggtgctggcacagtgatgcacgtccttctcacatcaaactcggacagggctagggtgtggcctcagaacagcccacttctcc

SEQ ID NO: 9154 - DNA, 122 bp, Homo sapiens
  misc_feature (61)..(62): /note="This region represents a CpG dinucleotide"
  misc_feature (61)..(61): /note="Nucleotide may be methylated to form 5-methylcytosine"
aggtcactcatgcagctgcattcagatgctgagagcaaaacatcagtgatgacatctcatcgtctaaggcctctctccacatgctggttaatcactcagtggttgggcttgggcttcttaca

SEQ ID NO: 9155 - DNA, 122 bp, Homo sapiens
  misc_feature (61)..(62): /note="This region represents a CpG dinucleotide"
  misc_feature (61)..(61): /note="Nucleotide may be methylated to form 5-methylcytosine"
aaactctctgatgaggcacgtgtggatgggatggcagggctgagaaggccggctcccccacggggtgtgcacaacctacctccccagctgtttctgctaccggctggggccttcaactccac

SEQ ID NO: 9156 - DNA, 122 bp, Homo sapiens
  misc_feature (61)..(62): /note="This region represents a CpG dinucleotide"
  misc_feature (61)..(61): /note="Nucleotide may be methylated to form 5-methylcytosine"
caaactccaggcctcaagccctccttccaccccggcctcccaaagtgctgggattataggcgtgagccaccgcggcctcactgcatgatttttgcaagaattctgcaaatataaaactgttc

SEQ ID NO: 9157 - DNA, 122 bp, Homo sapiens
  misc_feature (61)..(62): /note="This region represents a CpG dinucleotide"
  misc_feature (61)..(61): /note="Nucleotide may be methylated to form 5-methylcytosine"
gattagagctatgatttctttctggtagtttcacacactagcattcctgcctaactctcacgtcagagaagtatagtcaaattagtttactttggcttaagatggagttgtaacatttgcaa

SEQ ID NO: 9158 - DNA, 122 bp, Homo sapiens
  misc_feature (61)..(62): /note="This region represents a CpG dinucleotide"
  misc_feature (61)..(61): /note="Nucleotide may be methylated to form 5-methylcytosine"
aaagcatttcacaatcttttttcctcatgcccttctcttcaaggcaatttttgctgggctcggtttatttttatcattgcaacaaccagtttttagaaacttttggaaatgaaaaaagaaaa

SEQ ID NO: 9159 - DNA, 122 bp, Homo sapiens
  misc_feature (61)..(62): /note="This region represents a CpG dinucleotide"
  misc_feature (61)..(61): /note="Nucleotide may be methylated to form 5-methylcytosine"
ctctaagacacatctggtgaaacaggatggcacagaataccttctcacaagtaacacctacgcttgctaaacacacagggagcttctgagaaggacacacttgaaactgctagcaggaatca

SEQ ID NO: 9160 - DNA, 122 bp, Homo sapiens
  misc_feature (61)..(62): /note="This region represents a CpG dinucleotide"
  misc_feature (61)..(61): /note="Nucleotide may be methylated to form 5-methylcytosine"
ggaaggagctgctgtgttttctttgcttaatctggccttgccccacagagaaaacacatgcgtagcctccatcctgtttgtaaagagggcggtcagctactcgaagttgctcgcctggaaaa

SEQ ID NO: 9161 - DNA, 122 bp, Homo sapiens
  misc_feature (61)..(62): /note="This region represents a CpG dinucleotide"
  misc_feature (61)..(61): /note="Nucleotide may be methylated to form 5-methylcytosine"
actaaacccactgatcaatgtcatagtcactgagggtggcaaccagacttaggtgtctctcgggctgatgcaatcggaaatacatggcaccacctaggaagtaatcttgcatgcatgcatgc

SEQ ID NO: 9162 - DNA, 122 bp, Homo sapiens
  misc_feature (61)..(62): /note="This region represents a CpG dinucleotide"
  misc_feature (61)..(61): /note="Nucleotide may be methylated to form 5-methylcytosine"
tcaagtaaaaactcagttgctttggtgctagcttgtattactggcactacttctcacttccgtcttatctccatgctttttgccatatgagtttgccactcttccctcaaaggggaacagca

SEQ ID NO: 9163 - DNA, 122 bp, Homo sapiens
  misc_feature (61)..(62): /note="This region represents a CpG dinucleotide"
  misc_feature (61)..(61): /note="Nucleotide may be methylated to form 5-methylcytosine"
atgtggcagactctccttccttttgaaggctgagtaatactccattgtgtggctacacaacgtttatccactcacccgtcggtggacacctgggctgctttcaccttttggctgttgtgaat

SEQ ID NO: 9164 - DNA, 122 bp, Homo sapiens
  misc_feature (61)..(62): /note="This region represents a CpG dinucleotide"
  misc_feature (61)..(61): /note="Nucleotide may be methylated to form 5-methylcytosine"
ggaggtgaagaagaggatcaaattacctgtcttgaactttcatcctgctacaaaaactaccgttttttggttgtgggaattacagatcacagagtaggtatcaacccatatttatgttcctg

SEQ ID NO: 9165 - DNA, 122 bp, Homo sapiens
  misc_feature (61)..(62): /note="This region represents a CpG dinucleotide"
  misc_feature (61)..(61): /note="Nucleotide may be methylated to form 5-methylcytosine"
ggagaaagggtcgcgccgggcagccgcgaaagcaaggcttccccacgtctgttgacaggacggccgcctctctacttccgctggctacggcctctacgcagtagaggtaccgcgtctgtggg

SEQ ID NO: 9166 - DNA, 122 bp, Homo sapiens
  misc_feature (61)..(62): /note="This region represents a CpG dinucleotide"
  misc_feature (61)..(61): /note="Nucleotide may be methylated to form 5-methylcytosine"
agaggttacaaaactggcacagttccgaaaaatggaggttctatgatgcaaacacaggctcgactaacttcaacatgtgtaatataatcattatgctgtattataattcataattacattta

SEQ ID NO: 9167 - DNA, 122 bp, Homo sapiens
  misc_feature (61)..(62): /note="This region represents a CpG dinucleotide"
  misc_feature (61)..(61): /note="Nucleotide may be methylated to form 5-methylcytosine"
tggtgtctctggagccacatggtgtctcttgtcttcttagatctctttggtcttctctctcgggagaaaatggccacctctggaacaatcaggtttgcgtaaaatcatacagtcaggcgtca

SEQ ID NO: 9168 - DNA, 122 bp, Homo sapiens
  misc_feature (61)..(62): /note="This region represents a CpG dinucleotide"
  misc_feature (61)..(61): /note="Nucleotide may be methylated to form 5-methylcytosine"
cacaggtggatgttcccgctgtgaccacctcaccttctgaagtcggggtgtggagactatcggggagctcccagagcgcccacctcctcctgcgtacggcgtctgtgccagcaggaaagccg

SEQ ID NO: 9169 - DNA, 122 bp, Homo sapiens
  misc_feature (61)..(62): /note="This region represents a CpG dinucleotide"
  misc_feature (61)..(61): /note="Nucleotide may be methylated to form 5-methylcytosine"
agccctgctgctagtccaggaagtaacttcgtgtgtctagaaacctacaccttcctgaagcgcgttagtcccatctgccaggaaatcagccttccaaaatgtacaaaccttttttacaaaat

SEQ ID NO: 9170 - DNA, 122 bp, Homo sapiens
  misc_feature (61)..(62): /note="This region represents a CpG dinucleotide"
  misc_feature (61)..(61): /note="Nucleotide may be methylated to form 5-methylcytosine"
cagtccaataaaaatattttaaactagtgattctcctaaagcaatcagtgatttaacacacgtaacttggctgcagtccctgcagtgacacaggccagattgtgtcataatgtggaaacaac

SEQ ID NO: 9171 - DNA, 122 bp, Homo sapiens
  misc_feature (61)..(62): /note="This region represents a CpG dinucleotide"
  misc_feature (61)..(61): /note="Nucleotide may be methylated to form 5-methylcytosine"
ccttgctgaagtccacctgctccagggaccggctcaactgaggcaggggaggggggcagccgggagaggggcttcaaatcccaagctctacagggcctctctggggctcccagagcaccttc

SEQ ID NO: 9172 - DNA, 122 bp, Homo sapiens
  misc_feature (61)..(62): /note="This region represents a CpG dinucleotide"
  misc_feature (61)..(61): /note="Nucleotide may be methylated to form 5-methylcytosine"
acatcttgcaaaatatttgctttctattgtcataatacattcatgaataattttcactgccgtttattttgtttgtttgcaaggtgaagaacctcctgctgttacatctgttgttatgactc

SEQ ID NO: 9173 - DNA, 122 bp, Homo sapiens
  misc_feature (61)..(62): /note="This region represents a CpG dinucleotide"
  misc_feature (61)..(61): /note="Nucleotide may be methylated to form 5-methylcytosine"
gaggagacagtagtggcgcttcggccgcgcccagggccgcggttcgctcttccccgcgtgcgaccaggctgccagcactggggacctctggcgcccgcccgtccgcagccagcggggacagc

SEQ ID NO: 9174 - DNA, 122 bp, Homo sapiens
  misc_feature (61)..(62): /note="This region represents a CpG dinucleotide"
  misc_feature (61)..(61): /note="Nucleotide may be methylated to form 5-methylcytosine"
tgggctacagcatgtaccacctgacatagagggtcccaggtcgcccacctgtgggccagccgattcctccagccctggtgctgtacccccgacgtgctcccctgctcggcaccgccagccgc

SEQ ID NO: 9175 - DNA, 122 bp, Homo sapiens
  misc_feature (61)..(62): /note="This region represents a CpG dinucleotide"
  misc_feature (61)..(61): /note="Nucleotide may be methylated to form 5-methylcytosine"
agtacacacccaggaaatttgtcatccaccctgagagtaacaaccttattatcattgaaacggaccacaatgcctacactgaggccacgaaagctcagagaaagcagcagatggcagaggta

SEQ ID NO: 9176 - DNA, 122 bp, Homo sapiens
  misc_feature (61)..(62): /note="This region represents a CpG dinucleotide"
  misc_feature (61)..(61): /note="Nucleotide may be methylated to form 5-methylcytosine"
gaaaactattagtcaatttgaaattattctaaggtccagcttagtctagagcttatctaacggtctattgagttctcagtaagtcatgtgaaaggaagtcctatgataacatttcctgagac

SEQ ID NO: 9177 - DNA, 122 bp, Homo sapiens
  misc_feature (61)..(62): /note="This region represents a CpG dinucleotide"
  misc_feature (61)..(61): /note="Nucleotide may be methylated to form 5-methylcytosine"
tgggacaaggaggccccagtgaggaaaccggaaggctggattgctgacagcacagcttcccggctccgctgagctggcattcttgtagctgaaaccctgaggaggccagccccctttcccac

SEQ ID NO: 9178 - DNA, 122 bp, Homo sapiens
  misc_feature (61)..(62): /note="This region represents a CpG dinucleotide"
  misc_feature (61)..(61): /note="Nucleotide may be methylated to form 5-methylcytosine"
ctacagacatacgcgtggattaaggcagagtccgactccaggcaggcaagaagtgtcgtgcgcacagaccacccctggagatggggagctggcacatctcaacatccagccgattctgcggg

SEQ ID NO: 9179 - DNA, 122 bp, Homo sapiens
  misc_feature (61)..(62): /note="This region represents a CpG dinucleotide"
  misc_feature (61)..(61): /note="Nucleotide may be methylated to form 5-methylcytosine"
tttaggagattaaaaaaggaatgggtagagattcagaccactgactaatcattctgaacccggaagtctagagagtttctgaggttttagattgcatcatgtataatgtcaaattctcatac

SEQ ID NO: 9180 - DNA, 122 bp, Homo sapiens
  misc_feature (61)..(62): /note="This region represents a CpG dinucleotide"
  misc_feature (61)..(61): /note="Nucleotide may be methylated to form 5-methylcytosine"
ggtctgattagttttgaatttattcatattgatcttttcacgtgctgttagtttaagactcgaagtggagttatgctaaggtttaccgatagtttgcccactgggaattagtggacctctag

SEQ ID NO: 9181 - DNA, 122 bp, Homo sapiens
  misc_feature (61)..(62): /note="This region represents a CpG dinucleotide"
  misc_feature (61)..(61): /note="Nucleotide may be methylated to form 5-methylcytosine"
ccttgtcctgtatgtcctgataatcgtccttttccacttcctctctcccctccccctggccgacttattgataccgacgtggacaaatgaggtcagaaaacttcagtgaccgcacacagtgt

SEQ ID NO: 9182 - DNA, 122 bp, Homo sapiens
  misc_feature (61)..(62): /note="This region represents a CpG dinucleotide"
  misc_feature (61)..(61): /note="Nucleotide may be methylated to form 5-methylcytosine"
ttaaaattagtgcttccaggcatgtctacttgctgtctgggacaacacagggaagcgtcccgggcacctcatgttgcaatcatgttcaaagcctgggctttggtatcaaattgcctgggttg

SEQ ID NO: 9183 - DNA, 122 bp, Homo sapiens
  misc_feature (61)..(62): /note="This region represents a CpG dinucleotide"
  misc_feature (61)..(61): /note="Nucleotide may be methylated to form 5-methylcytosine"
caacgtgatgtattaattttagggcaaaatgaatggtgctgtgatcattgtgggtaattacgagtctcctcaaagaggaagtgatttctggagggacttttctgacctccttcgcggcagga

SEQ ID NO: 9184 - DNA, 122 bp, Homo sapiens
  misc_feature (61)..(62): /note="This region represents a CpG dinucleotide"
  misc_feature (61)..(61): /note="Nucleotide may be methylated to form 5-methylcytosine"
ctctggggacggcctctgctctggctgaggatttctgtcccagagcggtacaggaatctgcgtagtgttttagtttggagaaaacaggaagttacactcatcacatcttttgcccagatgat

SEQ ID NO: 9185 - DNA, 122 bp, Homo sapiens
  misc_feature (61)..(62): /note="This region represents a CpG dinucleotide"
  misc_feature (61)..(61): /note="Nucleotide may be methylated to form 5-methylcytosine"
gaagtaggtttgggaacacattctgtttgtcagacatggtttattatttgttccacgtaccgttcatagtgaaaatactattcagtggagcatttactaacaaaaatgacagaaactgacca

SEQ ID NO: 9186 - DNA, 122 bp, Homo sapiens
  misc_feature (61)..(62): /note="This region represents a CpG dinucleotide"
  misc_feature (61)..(61): /note="Nucleotide may be methylated to form 5-methylcytosine"
gtctgaattcattaaagcgcaaaacaaatgcttggtatcaccacaacagtatccccttcacgttctccagatgctgctcagccttgccttcctcaggttgtataaacagggatggatttccc

SEQ ID NO: 9187 - DNA, 122 bp, Homo sapiens
  misc_feature (61)..(62): /note="This region represents a CpG dinucleotide"
  misc_feature (61)..(61): /note="Nucleotide may be methylated to form 5-methylcytosine"
caacagttctagggcctggctattcctctctcccagaggggcaggggaggcttgggctggcggggcatccccatcccggactaagccccagagctgagtcagtcactcatcccacagccttg

SEQ ID NO: 9188 - DNA, 122 bp, Homo sapiens
  misc_feature (61)..(62): /note="This region represents a CpG dinucleotide"
  misc_feature (61)..(61): /note="Nucleotide may be methylated to form 5-methylcytosine"
gatattgcaaaaagttgtgccaccctaggctatatgatataaacttagaaagtctatcaacgtgaaaggtgaagagacctctagagacatcggggacaaactccaaatttgggaaaggtcca

SEQ ID NO: 9189 - DNA, 122 bp, Homo sapiens
  misc_feature (61)..(62): /note="This region represents a CpG dinucleotide"
  misc_feature (61)..(61): /note="Nucleotide may be methylated to form 5-methylcytosine"
atgcaggccagctcaaaagctgggggaaattctcaaatctttgtgatgctcagtgtggtacgctctctttgattaatttggcccattgatctcactaggtagctgctgttgataattgtgta

SEQ ID NO: 9190 - DNA, 122 bp, Homo sapiens
  misc_feature (61)..(62): /note="This region represents a CpG dinucleotide"
  misc_feature (61)..(61): /note="Nucleotide may be methylated to form 5-methylcytosine"
ctgaggtagagctttatcgaaggtttctcttggtaaacgttagctttctgaactaagggccgtcttttttttttttcccgcttaagcccattgcataacaatctcttgttttaatcttttgc

SEQ ID NO: 9191 - DNA, 122 bp, Homo sapiens
  misc_feature (61)..(62): /note="This region represents a CpG dinucleotide"
  misc_feature (61)..(61): /note="Nucleotide may be methylated to form 5-methylcytosine"
caagttcattgatcatttctaaaattggccatctggtggcttcatttcaaattgcattcacgttccaaaagatatactttggatctctggaggatgtggctaaacgattcaactctatttac

SEQ ID NO: 9192 - DNA, 122 bp, Homo sapiens
  misc_feature (61)..(62): /note="This region represents a CpG dinucleotide"
  misc_feature (61)..(61): /note="Nucleotide may be methylated to form 5-methylcytosine"
gaccttatttaataatatcattagttatcatttattggactctgaactgagctcccaacacggaagatgtaagatttatctgcattttacagatgagaagacagaggcaccaagcagtataa

SEQ ID NO: 9193 - DNA, 122 bp, Homo sapiens
  misc_feature (61)..(62): /note="This region represents a CpG dinucleotide"
  misc_feature (61)..(61): /note="Nucleotide may be methylated to form 5-methylcytosine"
cttgtgaagcagtattaacatccattacccctccagcagcaatgccttcctcggccgtggcggtgggttacaagtgaagctgaatcttgaaggtacccaagcctccgcctccgcgcaactcg

SEQ ID NO: 9194 - DNA, 122 bp, Homo sapiens
  misc_feature (61)..(62): /note="This region represents a CpG dinucleotide"
  misc_feature (61)..(61): /note="Nucleotide may be methylated to form 5-methylcytosine"
tctactttctgtgggaccttgaacaatcacttaacttttcctgggtttagtttcctcatgcgccctgacagctttacaaggctgcctttgcaatggaacatggtcatgtatgaacacctgta

SEQ ID NO: 9195 - DNA, 122 bp, Homo sapiens
  misc_feature (61)..(62): /note="This region represents a CpG dinucleotide"
  misc_feature (61)..(61): /note="Nucleotide may be methylated to form 5-methylcytosine"
tgccaggcaatattctaaatgccagtgatatgctggtgaaccagacaagcttccctgcctcgtggagctgacaggtacagaaatggtgttttagagaggctgattcaccagctgtggtcacc

SEQ ID NO: 9196 - DNA, 122 bp, Homo sapiens
  misc_feature (61)..(62): /note="This region represents a CpG dinucleotide"
  misc_feature (61)..(61): /note="Nucleotide may be methylated to form 5-methylcytosine"
aaagccagcaagactcctcataccagaggctggatggtttctgcaaatggtgacaccagccgtaacattttccagggggttgatctcagaggcagccaaacctcggggagcaccaaagcaga

SEQ ID NO: 9197 - DNA, 122 bp, Homo sapiens
  misc_feature (61)..(62): /note="This region represents a CpG dinucleotide"
  misc_feature (61)..(61): /note="Nucleotide may be methylated to form 5-methylcytosine"
caagccttaggtcactgctctcttcaaactgctgaactggttgagaaagactgagcttaacggatagaacctgctagccctgcagccattggggttttgtgactactgagtcccagagcctc

SEQ ID NO: 9198 - DNA, 122 bp, Homo sapiens
  misc_feature (61)..(62): /note="This region represents a CpG dinucleotide"
  misc_feature (61)..(61): /note="Nucleotide may be methylated to form 5-methylcytosine"
caacctctcttgcagcatagtttccactggtagtaattccattcagctactcagacaacacgctcctcggccgaatgggacgacccttcttaagatggaaaatgttacaaaagaaaaaggat

SEQ ID NO: 9199 - DNA, 122 bp, Homo sapiens
  misc_feature (61)..(62): /note="This region represents a CpG dinucleotide"
  misc_feature (61)..(61): /note="Nucleotide may be methylated to form 5-methylcytosine"
aggcacagggactgcggtgtttgggccaacctgggctggacctggcgtcgtgtctttggacggactcagggaacatattgattagggaatggaggaccgggaggagggagacactaagccag

SEQ ID NO: 9200 - DNA, 122 bp, Homo sapiens
  misc_feature (61)..(62): /note="This region represents a CpG dinucleotide"
  misc_feature (61)..(61): /note="Nucleotide may be methylated to form 5-methylcytosine"
cagagacagactcatgatagacagggcgacaggcataaccttcacaggggcgaagcgagacgcacacccgtctccagcagggagccacagtccacaggtggctactcctccctcccactgcc

SEQ ID NO: 9201 - DNA, 122 bp, Homo sapiens
  misc_feature (61)..(62): /note="This region represents a CpG dinucleotide"
  misc_feature (61)..(61): /note="Nucleotide may be methylated to form 5-methylcytosine"
gtctagttcttagtacccttagaattgagataattcattatttgtcactcaggtaggtttcgagtgaactgatatatttaattagatccttaaagcccataggatttatactggtcatttct

SEQ ID NO: 9202 - DNA, 122 bp, Homo sapiens
  misc_feature (61)..(62): /note="This region represents a CpG dinucleotide"
  misc_feature (61)..(61): /note="Nucleotide may be methylated to form 5-methylcytosine"
gtaaggctgcctgtcctcagctatcttatcactagtggccatgtacagacttcctcttgacgtcaaaggcaagttgggtacaatatcaaatgagttcccctaacatgaggaaattgtgttcc

SEQ ID NO: 9203 - DNA, 122 bp, Homo sapiens
  misc_feature (61)..(62): /note="This region represents a CpG dinucleotide"
  misc_feature (61)..(61): /note="Nucleotide may be methylated to form 5-methylcytosine"
cctgtaatatgcaaagttcctagtcaaggctgccttaggaattcctgccccttaacttaacgctttaatctttatcagggaaaatatccctcttctctagtgatgtttaagaaatcaattcc

SEQ ID NO: 9204 - DNA, 122 bp, Homo sapiens
  misc_feature (61)..(62): /note="This region represents a CpG dinucleotide"
  misc_feature (61)..(61): /note="Nucleotide may be methylated to form 5-methylcytosine"
gaaacacaaccctctcacgtactttaaaatacccaacacatgcactctgcatattactcacgaaacagctacgaatgcacagtccctgtgttacacacaacaggaagttgccaaaccagatg

SEQ ID NO: 9205 - DNA, 122 bp, Homo sapiens
  misc_feature (61)..(62): /note="This region represents a CpG dinucleotide"
  misc_feature (61)..(61): /note="Nucleotide may be methylated to form 5-methylcytosine"
tttgggagtcttgtgtcctttccattaacctagatgaagcacttagaaggggctgggtcacggtaaggactgcacagtgggaagcattttgatcacgattgtcactatgattcttcctgtcc

SEQ ID NO: 9206 - DNA, 122 bp, Homo sapiens
  misc_feature (61)..(62): /note="This region represents a CpG dinucleotide"
  misc_feature (61)..(61): /note="Nucleotide may be methylated to form 5-methylcytosine"
ccaccatcctcatcccctgtaactcctgatcctaggagagacctctccagttcccccaagcgagaaacagattttcccaaggggagtgcctggaagactttatgtttatacttagtaacttc

SEQ ID NO: 9207 - DNA, 122 bp, Homo sapiens
  misc_feature (61)..(62): /note="This region represents a CpG dinucleotide"
  misc_feature (61)..(61): /note="Nucleotide may be methylated to form 5-methylcytosine"
atctggtcggaagcaaggaggtccgaggtcactgtcccttgaaggctgcagcggaggaaacggagaggctgggctggccctaccctacgtagcctaatcaaagcaagaatctgcaggattta

SEQ ID NO: 9208 - DNA, 122 bp, Homo sapiens
  misc_feature (61)..(62): /note="This region represents a CpG dinucleotide"
  misc_feature (61)..(61): /note="Nucleotide may be methylated to form 5-methylcytosine"
gatatcagaagcagcatttgtgcgtgggtccagcagtggcatttgtccccgcaccatcttcggggctggcccggagcccaggtcctcctactgcccgggagcagtggccgcaactccaggct

SEQ ID NO: 9209 - DNA, 122 bp, Homo sapiens
  misc_feature (61)..(62): /note="This region represents a CpG dinucleotide"
  misc_feature (61)..(61): /note="Nucleotide may be methylated to form 5-methylcytosine"
agagctttctggataacacggcagccatacatctgtagtgccaatgacaggacgtggcctcgaatccgttctgccaaagccagcttctgttcaagactgccaaactagacataatgtgtggg

SEQ ID NO: 9210 - DNA, 122 bp, Homo sapiens
  misc_feature (61)..(62): /note="This region represents a CpG dinucleotide"
  misc_feature (61)..(61): /note="Nucleotide may be methylated to form 5-methylcytosine"
cgcccaggatgacgcgggggccgatgactgggagaccgaccctgattttgtggtaggagccgccagcctttgctttcctctttcatgaagtggaagtggctctcctgggtttttctttgatg

SEQ ID NO: 9211 - DNA, 122 bp, Homo sapiens
  misc_feature (61)..(62): /note="This region represents a CpG dinucleotide"
  misc_feature (61)..(61): /note="Nucleotide may be methylated to form 5-methylcytosine"
agaatgtgcaaaggccctgaggctcagaggtccacagcactaaaaggtggccagtgtggccggagctctcagagcaagggccaaggtggtgggaggtggggctgaggacacagccaggggct

SEQ ID NO: 9212 - DNA, 122 bp, Homo sapiens
  misc_feature (61)..(62): /note="This region represents a CpG dinucleotide"
  misc_feature (61)..(61): /note="Nucleotide may be methylated to form 5-methylcytosine"
gaaggttgcactggattcacccagatcaacaccaagattagtattgagatcttggccaagcgctgtggctcaagcctgtaatcccagcactttgggaggccgaggcaggcagatcacctgag

SEQ ID NO: 9213 - DNA, 122 bp, Homo sapiens
  misc_feature (61)..(62): /note="This region represents a CpG dinucleotide"
  misc_feature (61)..(61): /note="Nucleotide may be methylated to form 5-methylcytosine"
ccctgcacctaccagaaatcagctggatgagtcacagtgagattttccacccctgctcaccgccttgcacataggatgggctctgtctgagcctatactttgcctgttggcttgaattggat

SEQ ID NO: 9214 - DNA, 122 bp, Homo sapiens
  misc_feature (61)..(62): /note="This region represents a CpG dinucleotide"
  misc_feature (61)..(61): /note="Nucleotide may be methylated to form 5-methylcytosine"
aaaggccaaaattccctgactcatgcatgtggcaattctggcttcttaagaaacactcagcgtgttttagaatggtctgggaagtcaaatacaaggggaaagcctgactagtcccactgtgt

SEQ ID NO: 9215 - DNA, 122 bp, Homo sapiens
  misc_feature (61)..(62): /note="This region represents a CpG dinucleotide"
  misc_feature (61)..(61): /note="Nucleotide may be methylated to form 5-methylcytosine"
tgtctcgtgttgctatgaggtttgcatctgtgtggctggaatagcttgtttgtgggggcccgcgcgtgacctgtgtgtgcgttactgtgtgtgtctcaggcaggatagtgacgggccgtgtg

SEQ ID NO: 9216 - DNA, 122 bp, Homo sapiens
  misc_feature (61)..(62): /note="This region represents a CpG dinucleotide"
  misc_feature (61)..(61): /note="Nucleotide may be methylated to form 5-methylcytosine"
catattattcattcagtgttgcacaacaatatagccacacacttagaagcttaacaatcacgtattcattgtctcacagtgtccatggctcaggaatctgcaaaaaagggataatttatctg

SEQ ID NO: 9217 - DNA, 122 bp, Homo sapiens
  misc_feature (61)..(62): /note="This region represents a CpG dinucleotide"
  misc_feature (61)..(61): /note="Nucleotide may be methylated to form 5-methylcytosine"
ttagcgatgaccttgagcagtaggatgtaaacaactcccacaagcttagcgttccaataacggaacacaaggcataaactaaacaggaagaaggcaagtctgtgtgaatatgttcaactcca

SEQ ID NO: 9218 - DNA, 122 bp, Homo sapiens
  misc_feature (61)..(62): /note="This region represents a CpG dinucleotide"
  misc_feature (61)..(61): /note="Nucleotide may be methylated to form 5-methylcytosine"
ttatgaaaagctcatggggacaatgcccccaagaaaccagcagtttgcaaatggaaaactcgttttaagaagggatgaggccaggcgtggtggctcagcctgtaatcccagcactttgggag

SEQ ID NO: 9219 - DNA, 122 bp, Homo sapiens
  misc_feature (61)..(62): /note="This region represents a CpG dinucleotide"
  misc_feature (61)..(61): /note="Nucleotide may be methylated to form 5-methylcytosine"
aataacccaagagaaaaatcaccaacatcccccacccactaaattctctgctgaaagacacgcagacaccgggacacttccttcacacgcgtctctccctgtcagagtccgctaccctccat

SEQ ID NO: 9220 - DNA, 122 bp, Homo sapiens
  misc_feature (61)..(62): /note="This region represents a CpG dinucleotide"
  misc_feature (61)..(61): /note="Nucleotide may be methylated to form 5-methylcytosine"
taggtcttggcagggagacaagggatcctagtctgtacccaagactcatctgagaggtgacgtcactgaacccggctggggaccattttatgcaaagtctatggagagcaggtttgcctcag

SEQ ID NO: 9221 - DNA, 122 bp, Homo sapiens
  misc_feature (61)..(62): /note="This region represents a CpG dinucleotide"
  misc_feature (61)..(61): /note="Nucleotide may be methylated to form 5-methylcytosine"
gaggctgaggcagagaattgcttgaactcgggaggcggaggttgcagtgagccgagatcgcgccatttgctctccagcctgggaaacagagcaagactccgtctcagaaaaaaaaaaaagac

SEQ ID NO: 9222 - DNA, 122 bp, Homo sapiens
  misc_feature (61)..(62): /note="This region represents a CpG dinucleotide"
  misc_feature (61)..(61): /note="Nucleotide may be methylated to form 5-methylcytosine"
ggcatctcctcaagctggctggggttctctgcatctcagctgtggcgcctggtgtgagggcgcacgcttcgcagtgagagtgaaatgcccagttcgcgctggcagagggagaccctgtgaag

SEQ ID NO: 9223 - DNA, 122 bp, Homo sapiens
  misc_feature (61)..(62): /note="This region represents a CpG dinucleotide"
  misc_feature (61)..(61): /note="Nucleotide may be methylated to form 5-methylcytosine"
agtgtctgtcatggaaacattacccttccttgttcctgctactgtcacctgggaagttagcgttagcttgcctttcagggtgaagcattacatagttcaaaagtgttctttttctccagata

SEQ ID NO: 9224 - DNA, 122 bp, Homo sapiens
  misc_feature (61)..(62): /note="This region represents a CpG dinucleotide"
  misc_feature (61)..(61): /note="Nucleotide may be methylated to form 5-methylcytosine"
ggctctccagctttctgttaaacaaaaggctctttaacatttgatttcatttcagaataacgttcttacttcatgattctataattggtataagctatacagtctctggaaaggcatttctt

SEQ ID NO: 9225 - DNA, 122 bp, Homo sapiens
  misc_feature (61)..(62): /note="This region represents a CpG dinucleotide"
  misc_feature (61)..(61): /note="Nucleotide may be methylated to form 5-methylcytosine"
taaaggtcacctcttcaaaaagctatacctgactcaccctagagaatttggttcctctggcgtgtgctcgtgatacttcatttgctggatggaacatgagtgaatggagtggtggcattcct

SEQ ID NO: 9226 - DNA, 122 bp, Homo sapiens
  misc_feature (61)..(62): /note="This region represents a CpG dinucleotide"
  misc_feature (61)..(61): /note="Nucleotide may be methylated to form 5-methylcytosine"
gatcctttactactgaactcacagggctgtaacactgttactgtacagagaggaccaggacgatgccagcaccccgtttatcctgagtgaactctccggaggcctcttcaagcttgtgggtt

SEQ ID NO: 9227 - DNA, 122 bp, Homo sapiens
  misc_feature (61)..(62): /note="This region represents a CpG dinucleotide"
  misc_feature (61)..(61): /note="Nucleotide may be methylated to form 5-methylcytosine"
acaaacaaaatcaactcaccaagaccatggcattgtagtaacaaaagtgtttaattgacacgaggctggtcactccccataggaaatggggttattactcactcagatcaatctccctgaag

SEQ ID NO: 9228 - DNA, 122 bp, Homo sapiens
  misc_feature (61)..(62): /note="This region represents a CpG dinucleotide"
  misc_feature (61)..(61): /note="Nucleotide may be methylated to form 5-methylcytosine"
caatcatttcttcacggaacacacgtgggccaacgctgaccgggctctgtgccaggaacccgcaaggcgctgcttgttcatctccagccacggggagctcattccctagcagcgggccagac

SEQ ID NO: 9229 - DNA, 122 bp, Homo sapiens
  misc_feature (61)..(62): /note="This region represents a CpG dinucleotide"
  misc_feature (61)..(61): /note="Nucleotide may be methylated to form 5-methylcytosine"
aaaaaaattattctgagagattattatcaactgctgtgagtgcgacaagcactacatatacgaaaatagaaaatacaagagtgtaaatgtaagatggtgcgatacagtgtataatttgctaa

SEQ ID NO: 9230 - DNA, 122 bp, Homo sapiens
  misc_feature (61)..(62): /note="This region represents a CpG dinucleotide"
  misc_feature (61)..(61): /note="Nucleotide may be methylated to form 5-methylcytosine"
gaggagtctgcccatccccagcagcacgcgagcgccgccagcgctccctgggcacccgctcgcactcaagtgcaggcagcgtggtgacaatgccaactgcgccccctatctctgacaggctc

SEQ ID NO: 9231 - DNA, 122 bp, Homo sapiens
  misc_feature (61)..(62): /note="This region represents a CpG dinucleotide"
  misc_feature (61)..(61): /note="Nucleotide may be methylated to form 5-methylcytosine"
gaaaaacatactgtgacatggttcatattttccccccagatgtttttctgttttctctcacgtactcaaaatgtccagttaattaaggaaaacactgtagtggatttctttagtgaagcttt

SEQ ID NO: 9232 - DNA, 122 bp, Homo sapiens
  misc_feature (61)..(62): /note="This region represents a CpG dinucleotide"
  misc_feature (61)..(61): /note="Nucleotide may be methylated to form 5-methylcytosine"
tcttactgttgtaggatgtatcaggagtttgtttttatgatgaatgttccatcttatggacgtaccacatttgtccattcattagttgacagacatttgaattgcttccacttcctggcttc

SEQ ID NO: 9233 - DNA, 122 bp, Homo sapiens
  misc_feature (61)..(62): /note="This region represents a CpG dinucleotide"
  misc_feature (61)..(61): /note="Nucleotide may be methylated to form 5-methylcytosine"
gtgactatcaagaaagagagcgggaggaataaataggcttctttgtgtgagagagaaccacggacatgaagcaggcctctcaggtatggcaggatgcctgctttatgtccaggttgactttg

SEQ ID NO: 9234 - DNA, 122 bp, Homo sapiens
  misc_feature (61)..(62): /note="This region represents a CpG dinucleotide"
  misc_feature (61)..(61): /note="Nucleotide may be methylated to form 5-methylcytosine"
caatctctacgattgttctgagaattagatgaggaaacacctacaaaacaattattatcgcggccagcacatggcaaaagcattgtttgctagcatggcaaaaagaagacaaccatagtgga

SEQ ID NO: 9235 - DNA, 122 bp, Homo sapiens
  misc_feature (61)..(62): /note="This region represents a CpG dinucleotide"
  misc_feature (61)..(61): /note="Nucleotide may be methylated to form 5-methylcytosine"
aagatggactcttgcattatagccatctgagaagcccatggttagagtggtcacctcttacggaacctgaggaggctgacaaaacatgtgcccgactaaaacacttcatcagatcatggaaa

SEQ ID NO: 9236 - DNA, 122 bp, Homo sapiens
  misc_feature (61)..(62): /note="This region represents a CpG dinucleotide"
  misc_feature (61)..(61): /note="Nucleotide may be methylated to form 5-methylcytosine"
aacagttgtaaagattaaatgagataacttttgaacagtgcttttcaaactagaaaacaccgcaaatatttgattataaggtaggtttgtccaagtcccaacagctgtgggaggactgaaaa

SEQ ID NO: 9237 - DNA, 122 bp, Homo sapiens
  misc_feature (61)..(62): /note="This region represents a CpG dinucleotide"
  misc_feature (61)..(61): /note="Nucleotide may be methylated to form 5-methylcytosine"
cattggtcagtgccatgaatcttgaagttaaatgtttcaccctaatgcactgctagtgggcgtgcacacttgtggagccactctggagagtacgcatgcatgacttcattgaattaagtctg

SEQ ID NO: 9238 - DNA, 122 bp, Homo sapiens
  misc_feature (61)..(62): /note="This region represents a CpG dinucleotide"
  misc_feature (61)..(61): /note="Nucleotide may be methylated to form 5-methylcytosine"
gtgcttctcaaatctcctctaccaggtcacagttctctttagcctagattacctcaatagcgtcaaaaccggtatccctgcctcctgtctctcctgcttcaatccattctcacagcacccca

SEQ ID NO: 9239 - DNA, 122 bp, Homo sapiens
  misc_feature (61)..(62): /note="This region represents a CpG dinucleotide"
  misc_feature (61)..(61): /note="Nucleotide may be methylated to form 5-methylcytosine"
aggatgatgtctgcattgtctggggtgagtcactggctttttcaggcctcttcctgaccccgccacctgtggagcctaccctaacaaggtgtaggggccagaatccaggtcaaggtcatacc

SEQ ID NO: 9240 - DNA, 122 bp, Homo sapiens
  misc_feature (61)..(62): /note="This region represents a CpG dinucleotide"
  misc_feature (61)..(61): /note="Nucleotide may be methylated to form 5-methylcytosine"
caggctggcctcaagtgatcctcctgcctcacctcccaaagtgctgggattataggcgtgcgccaccatgcccggacaggatatttcttaaaaggagattgttagggaaaatgatgtgagca

SEQ ID NO: 9241 - DNA, 122 bp, Homo sapiens
  misc_feature (61)..(62): /note="This region represents a CpG dinucleotide"
  misc_feature (61)..(61): /note="Nucleotide may be methylated to form 5-methylcytosine"
catcctggactctttccagggttttgtgcaaggcctcgggagggccgggtctggcatcttcgtgcccagctcgttctttgccatgcttggctcgcctgccatggccggtatctactgtgacc

SEQ ID NO: 9242 - DNA, 122 bp, Homo sapiens
  misc_feature (61)..(62): /note="This region represents a CpG dinucleotide"
  misc_feature (61)..(61): /note="Nucleotide may be methylated to form 5-methylcytosine"
cgggtcacctttgtaccacccggacttcgccggccctggaggctttgctgccatatgggccgctgaacctaatcaacttcgcacaggtcctggaggggtgaggaccggccttggggccgcgg

SEQ ID NO: 9243 - DNA, 122 bp, Homo sapiens
  misc_feature (61)..(62): /note="This region represents a CpG dinucleotide"
  misc_feature (61)..(61): /note="Nucleotide may be methylated to form 5-methylcytosine"
aaaaaggactactggctcagcaaatatttatcaagcactgaatacacattcctattatgccgtgatgttagtgtctcttattttcaatcttgatcaagataagaagtatcaacagatgtgtc

SEQ ID NO: 9244 - DNA, 122 bp, Homo sapiens
  misc_feature (61)..(62): /note="This region represents a CpG dinucleotide"
  misc_feature (61)..(61): /note="Nucleotide may be methylated to form 5-methylcytosine"
ctgtgtgggaacccctcgcagcccagctctctgctaggcctgtgtatcacaatctgagctcgccttgtattcctacgttggttctgccccaaggcacaaagccttgcctgccacagggtgct

SEQ ID NO: 9245 - DNA, 122 bp, Homo sapiens
  misc_feature (61)..(62): /note="This region represents a CpG dinucleotide"
  misc_feature (61)..(61): /note="Nucleotide may be methylated to form 5-methylcytosine"
gaagccaggagtccccgtctgtccctgggtcgcctgggcgctgctggcctgtagaggcgccgcttcgatgcccgggattccgcaagggtcaaccctgcgcgctcctgcctcctggtgttctg

SEQ ID NO: 9246 - DNA, 122 bp, Homo sapiens
  misc_feature (61)..(62): /note="This region represents a CpG dinucleotide"
  misc_feature (61)..(61): /note="Nucleotide may be methylated to form 5-methylcytosine"
acaaaatgtatctcatgaaaagcatactttaaaaattcacaacctaatcctctagaatcccgtcagggcagaaatataaattatactcacacttcagagagaaactttcagaccaaattaga

SEQ ID NO: 9247 - DNA, 122 bp, Homo sapiens
  misc_feature (61)..(62): /note="This region represents a CpG dinucleotide"
  misc_feature (61)..(61): /note="Nucleotide may be methylated to form 5-methylcytosine"
tcaaaaatcagttgccccaaataatgtctcaggtatgtattttcaaaggatatctggaaacgctatgtaaagattagaaacagtctgtgtgtagtccatagactggatattatgtaacattt

SEQ ID NO: 9248 - DNA, 122 bp, Homo sapiens
  misc_feature (61)..(62): /note="This region represents a CpG dinucleotide"
  misc_feature (61)..(61): /note="Nucleotide may be methylated to form 5-methylcytosine"
acctgtaatcccagcactttgggaggcccgaggttggcagatcacttgaggttagcggctcgagaccagcctggccaacatggtgaaaccctgtctctactaaaaatacaaaaattacctgg

SEQ ID NO: 9249 - DNA, 122 bp, Homo sapiens
  misc_feature (61)..(62): /note="This region represents a CpG dinucleotide"
  misc_feature (61)..(61): /note="Nucleotide may be methylated to form 5-methylcytosine"
ccctggttcatattctagcttagaaatagttcacatagttctgtgtagacataatatttacgggaaccagagatgggtggattctgatagtggcttgtggaatagtctccagtgcagtcaaa

SEQ ID NO: 9250 - DNA, 122 bp, Homo sapiens
  misc_feature (61)..(62): /note="This region represents a CpG dinucleotide"
  misc_feature (61)..(61): /note="Nucleotide may be methylated to form 5-methylcytosine"
ggtcttgaggaagtccaaagggatttggacaaatgcaacttcatggggtaaagaatatggcgctcttggtgcaaactcttgggcatctgctaggatgtgagaacggtagtaatagcaggaag

SEQ ID NO: 9251 - DNA, 122 bp, Homo sapiens
  misc_feature (61)..(62): /note="This region represents a CpG dinucleotide"
  misc_feature (61)..(61): /note="Nucleotide may be methylated to form 5-methylcytosine"
aagtgattaaagatgcataatgtgaatgatgcctaaaatttccacccttacagaagctgccgtaaaatgccatactctagttaagcttatggagagggaaactagctctagagaaaagtact

SEQ ID NO: 9252 - DNA, 122 bp, Homo sapiens
  misc_feature (61)..(62): /note="This region represents a CpG dinucleotide"
  misc_feature (61)..(61): /note="Nucleotide may be methylated to form 5-methylcytosine"
ccccgcgccctgtggttttctgaggcccccgaggaggaagtgcgggctcccggcatgcctcgcatccggccccagccctgagccacctcaggccgcccctggccagccctgaggcccgcccc

SEQ ID NO: 9253 - DNA, 122 bp, Homo sapiens
  misc_feature (61)..(62): /note="This region represents a CpG dinucleotide"
  misc_feature (61)..(61): /note="Nucleotide may be methylated to form 5-methylcytosine"
ttagttgccttgctacttggcgcaaaaccaattcctcttttcaatatcaagtttcataagcgtggaacagtaacaaatcattataaaccctctgggactggtgggtgtgtgatgatgcgggg

SEQ ID NO: 9254 - DNA, 122 bp, Homo sapiens
  misc_feature (61)..(62): /note="This region represents a CpG dinucleotide"
  misc_feature (61)..(61): /note="Nucleotide may be methylated to form 5-methylcytosine"
ttgcctgggttttattcctagctccccccagttattattgggtaggtcagtgtctcaaaccgtcagcttcctcattgtaaaacatgacaataatagcacctacttatgagggttgttttggg

SEQ ID NO: 9255 - DNA, 122 bp, Homo sapiens
  misc_feature (61)..(62): /note="This region represents a CpG dinucleotide"
  misc_feature (61)..(61): /note="Nucleotide may be methylated to form 5-methylcytosine"
gagttaacaatgcttcaaggatagtcagccagctaagccggacagacactgatggattggcgtccttctctgaactgccttcgagagtctggaggcctttgcagctgaataccaaagagact

SEQ ID NO: 9256 - DNA, 122 bp, Homo sapiens
  misc_feature (61)..(62): /note="This region represents a CpG dinucleotide"
  misc_feature (61)..(61): /note="Nucleotide may be methylated to form 5-methylcytosine"
gtcaagccctgcctctttttactcttggctctctgctttcttctctgttggcttccttctcgagccagctctctctgtggggtgacaaatgaccactggcagcctatgctcacattgtccct

SEQ ID NO: 9257 - DNA, 122 bp, Homo sapiens
  misc_feature (61)..(62): /note="This region represents a CpG dinucleotide"
  misc_feature (61)..(61): /note="Nucleotide may be methylated to form 5-methylcytosine"
gctagactctggctgctctggtggcagttgcttagctcaggcttgggcacgtccacctggcgcatctgaaacattagccagcagggcgcagactcgtcagtgagagcattcctgagcccagc

SEQ ID NO: 9258 - DNA, 122 bp, Homo sapiens
  misc_feature (61)..(62): /note="This region represents a CpG dinucleotide"
  misc_feature (61)..(61): /note="Nucleotide may be methylated to form 5-methylcytosine"
tttgaaaaaaatccaacatcctgttgtcataaaacacactcagaaaactaataggccaggcgtagtggctcatgcctgtaatcccagcactttgggaggccaaggtgggtagatcacttgag

SEQ ID NO: 9259 - DNA, 122 bp, Homo sapiens
  misc_feature (61)..(62): /note="This region represents a CpG dinucleotide"
  misc_feature (61)..(61): /note="Nucleotide may be methylated to form 5-methylcytosine"
aatgccaaagttacctattgttaaatattttcaaagcagtgtaggcagtcctgccaaccccgtcctggctgtctccaagagcgctggccaacagtgccaagggtccttgccagtttcctgga

SEQ ID NO: 9260 - DNA, 122 bp, Homo sapiens
  misc_feature (61)..(62): /note="This region represents a CpG dinucleotide"
  misc_feature (61)..(61): /note="Nucleotide may be methylated to form 5-methylcytosine"
aagacagcaggattggatactctacctttgaagcctttgtccataatgtatgtgttctgacgtctatccattccacaagcacctgtgtaaaaataacatgtaaggaaagaaaatatgggggt

SEQ ID NO: 9261 - DNA, 122 bp, Homo sapiens
  misc_feature (61)..(62): /note="This region represents a CpG dinucleotide"
  misc_feature (61)..(61): /note="Nucleotide may be methylated to form 5-methylcytosine"
atgttcctggggatccacccttatagaagttaccttttagagagaggagacagacaaatacgtgtaatgctcaagttgtgataagtacgatgaagaagtacaaagcagaagggagggcgcgg

SEQ ID NO: 9262 - DNA, 122 bp, Homo sapiens
  misc_feature (61)..(62): /note="This region represents a CpG dinucleotide"
  misc_feature (61)..(61): /note="Nucleotide may be methylated to form 5-methylcytosine"
ggcagagtctccattcacacagacctcccacgcctcgcctcagcagcttgccgttgtcggcgtgctgtggtgttagtgatgcctgcagatttcatcttcagaagagtgaacagaaacggcat

SEQ ID NO: 9263 - DNA, 122 bp, Homo sapiens
  misc_feature (61)..(62): /note="This region represents a CpG dinucleotide"
  misc_feature (61)..(61): /note="Nucleotide may be methylated to form 5-methylcytosine"
gccctcctcggcctcccgaagtgctgggattataggcgtgagccaccgcacccggcccgtcgtcttaattgacagctgttgcctaccacaaaccccactgacaacagggcctggaagtggat

SEQ ID NO: 9264 - DNA, 122 bp, Homo sapiens
  misc_feature (61)..(62): /note="This region represents a CpG dinucleotide"
  misc_feature (61)..(61): /note="Nucleotide may be methylated to form 5-methylcytosine"
ctttttctccatgaggccaaggcttgtcttccaatgagcagctccttacaataactaagccggcttctgcttgtaccttcccagacacctccactggcaaaacctttccattgagcaatctt

SEQ ID NO: 9265 - DNA, 122 bp, Homo sapiens
  misc_feature (61)..(62): /note="This region represents a CpG dinucleotide"
  misc_feature (61)..(61): /note="Nucleotide may be methylated to form 5-methylcytosine"
cccacaagagtgattcagagggtgacactacacacgcagccggtttgctgcggaggaacacggggctggggcgtctgctgcttttagagcaggcctgccctttgtccaggagggaggtatcg

SEQ ID NO: 9266 - DNA, 122 bp, Homo sapiens
  misc_feature (61)..(62): /note="This region represents a CpG dinucleotide"
  misc_feature (61)..(61): /note="Nucleotide may be methylated to form 5-methylcytosine"
gccacacataaaacacactaacgctaacaatagctgatgagctttaaaacaatctcataacgttttaagaagtttaagagtttgtgttgggccgcactcaaagctgtcctgggccatatgca

SEQ ID NO: 9267 - DNA, 122 bp, Homo sapiens
  misc_feature (61)..(62): /note="This region represents a CpG dinucleotide"
  misc_feature (61)..(61): /note="Nucleotide may be methylated to form 5-methylcytosine"
cagtagaggaagagcaagaacctcgttcatgccaactctacaaacatgcattggtatcggcgggtgcccatcagggtgtccagcagtgaatcagactccagccctgcccttggacctcgcag

SEQ ID NO: 9268 - DNA, 122 bp, Homo sapiens
  misc_feature (61)..(62): /note="This region represents a CpG dinucleotide"
  misc_feature (61)..(61): /note="Nucleotide may be methylated to form 5-methylcytosine"
caaatctgttcccaagatgtccacatttgaaatactcagtgaagccaaataaatacttgccgtgtctttaataatctgtaccatgattacaccagggaagtgctgatgaaaatcccctgttg

SEQ ID NO: 9269 - DNA, 122 bp, Homo sapiens
  misc_feature (61)..(62): /note="This region represents a CpG dinucleotide"
  misc_feature (61)..(61): /note="Nucleotide may be methylated to form 5-methylcytosine"
gccaaaggtcacatggctcaggaccaagtgcagaaccaggacagcaagcctctgtcctggcggttctcacccagtctggacccaaaggcaggaaagtgttaagaaacacttgctggcaatga

SEQ ID NO: 9270 - DNA, 122 bp, Homo sapiens
  misc_feature (61)..(62): /note="This region represents a CpG dinucleotide"
  misc_feature (61)..(61): /note="Nucleotide may be methylated to form 5-methylcytosine"
cccaagtctgacaggctattaaacactcaagtggagatgtgaagtagacagtaggatagacgtctgaagctcaggggacaggccaagactgcagatataaatttaagagtcgactgcatgta

SEQ ID NO: 9271 - DNA, 122 bp, Homo sapiens
  misc_feature (61)..(62): /note="This region represents a CpG dinucleotide"
  misc_feature (61)..(61): /note="Nucleotide may be methylated to form 5-methylcytosine"
atgccgttcccttgagtctttacatacctacttacccttcaagtctcagaacaaatgagacgtttcttgacctttctagtgattctcaactagccctgtataattggttctcaaacttggct

SEQ ID NO: 9272 - DNA, 122 bp, Homo sapiens
  misc_feature (61)..(62): /note="This region represents a CpG dinucleotide"
  misc_feature (61)..(61): /note="Nucleotide may be methylated to form 5-methylcytosine"
tactgttaatgtttcttttttatgtgacctttcaaactttagttttattaatcatggtaacgtattttgggagaaagctgtgaccctagacaacaggtgtcaaaaccaagccccatagcagt

SEQ ID NO: 9273 - DNA, 122 bp, Homo sapiens
  misc_feature (61)..(62): /note="This region represents a CpG dinucleotide"
  misc_feature (61)..(61): /note="Nucleotide may be methylated to form 5-methylcytosine"
ctcttactgtccccagtttatgcatgaacagagaaagctgagatacggagactagtgatccgtcgaggtaataaacggcacaggtggggtttgaactccatcagtttgattgcagaggcctg

SEQ ID NO: 9274 - DNA, 122 bp, Homo sapiens
  misc_feature (61)..(62): /note="This region represents a CpG dinucleotide"
  misc_feature (61)..(61): /note="Nucleotide may be methylated to form 5-methylcytosine"
attgtgtaaaaaagaaacatctagagaatgccacagacaggcctagtatggctacagtaccgtatataaaagacaattgctcacaatgatagcactgaagcactgagagatatcaaagtact

SEQ ID NO: 9275 - DNA, 122 bp, Homo sapiens
  misc_feature (61)..(62): /note="This region represents a CpG dinucleotide"
  misc_feature (61)..(61): /note="Nucleotide may be methylated to form 5-methylcytosine"
tggagggggctcaagggcattaggctgaattttaaaagttaatctctaaaggtcacatgccgcacaattccatttatacaaaattctcaaaatgacaaaatcacagagctgcagaacagctt

SEQ ID NO: 9276 - DNA, 122 bp, Homo sapiens
  misc_feature (61)..(62): /note="This region represents a CpG dinucleotide"
  misc_feature (61)..(61): /note="Nucleotide may be methylated to form 5-methylcytosine"
tgtggttccaattcagagacagaccaatggaacagctcagagcctcaaaggagatttacacgagaaggaaataaaatgtacaacagaagtcagtaagggaaggaaaatctatttaaaaatga

SEQ ID NO: 9277 - DNA, 122 bp, Homo sapiens
  misc_feature (61)..(62): /note="This region represents a CpG dinucleotide"
  misc_feature (61)..(61): /note="Nucleotide may be methylated to form 5-methylcytosine"
cccgaggaaatcttcacattcattgatgactacctactgagcaatcaggagttgacccagcgtcgggagcaaagggacatatgcgagtgaacttgagccagggcatggttaaagtcaaggga

SEQ ID NO: 9278 - DNA, 122 bp, Homo sapiens
  misc_feature (61)..(62): /note="This region represents a CpG dinucleotide"
  misc_feature (61)..(61): /note="Nucleotide may be methylated to form 5-methylcytosine"
ggactctacgattcagctatatcactgcgcccagcctggccagcgctcagattcagactgcgctgggattcacaataactagtagggtactacctgccctgggaaaacattcctaatttcaa

SEQ ID NO: 9279 - DNA, 122 bp, Homo sapiens
  misc_feature (61)..(62): /note="This region represents a CpG dinucleotide"
  misc_feature (61)..(61): /note="Nucleotide may be methylated to form 5-methylcytosine"
cctgagagcaagggaccaaatctcccaaacttagccacagaatatttttccccttcaaagcgtctttccccagaatgcactctgggcaatcctgcctgactgctgtctttcagttggctcag

SEQ ID NO: 9280 - DNA, 122 bp, Homo sapiens
  misc_feature (61)..(62): /note="This region represents a CpG dinucleotide"
  misc_feature (61)..(61): /note="Nucleotide may be methylated to form 5-methylcytosine"
aggagctattgctagagaattattgttttcctttgagggtgtcatattacattgctttttcgtgcttcctgtattgttacattgatttctgcacatctgaagcaatagtcacttcctcttat

SEQ ID NO: 9281 - DNA, 122 bp, Homo sapiens
  misc_feature (61)..(62): /note="This region represents a CpG dinucleotide"
  misc_feature (61)..(61): /note="Nucleotide may be methylated to form 5-methylcytosine"
gaatgaggctttccagtctgtcttgtggaaacagccaatattcccagccgtctctgagcacgacacaattacagtcatgtgttgcttaatgacagagatatgttctgaggaatgcaccttta

SEQ ID NO: 9282 - DNA, 122 bp, Homo sapiens
  misc_feature (61)..(62): /note="This region represents a CpG dinucleotide"
  misc_feature (61)..(61): /note="Nucleotide may be methylated to form 5-methylcytosine"
tgtgacagggtgacagtgttaccgttgtttctttataagctgctttgacggaacaggtgtcgtcagggagtgtggaaattcctcttcacacatgtgctgtgccggcagctccctgtttctcc

SEQ ID NO: 9283 - DNA, 122 bp, Homo sapiens
  misc_feature (61)..(62): /note="This region represents a CpG dinucleotide"
  misc_feature (61)..(61): /note="Nucleotide may be methylated to form 5-methylcytosine"
aatccattgagcaggaatttctgacagatgtcacagaaggcaagcttcaggaacgtcttccgagcctacaacaagaacacaggtgtaaattatgctgaataaataaaagatgacaaaagaca

SEQ ID NO: 9284 - DNA, 122 bp, Homo sapiens
  misc_feature (61)..(62): /note="This region represents a CpG dinucleotide"
  misc_feature (61)..(61): /note="Nucleotide may be methylated to form 5-methylcytosine"
cagtagggaaggcacagacatgaggccaagtctgtttgccattatgaagggtttcctaaacgtcaagcaacatggtgctttccatggtgctgatgatttcacctcggtcctgtttctccttt

SEQ ID NO: 9285 - DNA, 122 bp, Homo sapiens
  misc_feature (61)..(62): /note="This region represents a CpG dinucleotide"
  misc_feature (61)..(61): /note="Nucleotide may be methylated to form 5-methylcytosine"
cgtgagagtgggggctagggattcctccctgggtgcgggtgtaaccaatttctggtctgccgatggccttgggaaagggcctcccatctgcttccaacaacccccttacaatgtcagaaaat

SEQ ID NO: 9286 - DNA, 122 bp, Homo sapiens
  misc_feature (61)..(62): /note="This region represents a CpG dinucleotide"
  misc_feature (61)..(61): /note="Nucleotide may be methylated to form 5-methylcytosine"
gataatcagagagtggagtgagtgcattttgcaagctacaaggtgccttcccaagggaagcgtgaagtcacctgggtgaaggtattgggaagtgaggccctgtcacagatcctgccccacaa

SEQ ID NO: 9287 - DNA, 122 bp, Homo sapiens
  misc_feature (61)..(62): /note="This region represents a CpG dinucleotide"
  misc_feature (61)..(61): /note="Nucleotide may be methylated to form 5-methylcytosine"
aaaccacgtagactcactgtggcttcccttaatgtgatgtagctaacattcagcaaagtacgtaccagcaagaccatgcattaagggtagtgtgtgtgtgtgtgtgtgtgtgtgtgtgtgtg

SEQ ID NO: 9288 - DNA, 122 bp, Homo sapiens
  misc_feature (61)..(62): /note="This region represents a CpG dinucleotide"
  misc_feature (61)..(61): /note="Nucleotide may be methylated to form 5-methylcytosine"
gctgagccagttggagcagagatccctgcagctgcaggtggataaccaggcactgaagtgcgtatggcccacggaggggcgggcggcgggtgcaggctggggccaagctctggcccagctct

SEQ ID NO: 9289 - DNA, 122 bp, Homo sapiens
  misc_feature (61)..(62): /note="This region represents a CpG dinucleotide"
  misc_feature (61)..(61): /note="Nucleotide may be methylated to form 5-methylcytosine"
acagattcaaaggttccaggggagtgtgttggccactctcaggacagtacacagtagcttcgggtgtgtcccagtcagtcctaggagctgtggaaagagtagaagtgcctgaatgtggtgct

SEQ ID NO: 9290 - DNA, 122 bp, Homo sapiens
  misc_feature (61)..(62): /note="This region represents a CpG dinucleotide"
  misc_feature (61)..(61): /note="Nucleotide may be methylated to form 5-methylcytosine"
ggaaactgtctccagaagcttccctccccacgacagataatgagcagcaagtgcttctggcgacttagggtgatgtgaaatcacgctgggaatcctgctcctcctcaggtcctggcagtttc

SEQ ID NO: 9291 - DNA, 122 bp, Homo sapiens
  misc_feature (61)..(62): /note="This region represents a CpG dinucleotide"
  misc_feature (61)..(61): /note="Nucleotide may be methylated to form 5-methylcytosine"
cccacccagtactcattgagctgccgctgtgaaccctgcctgagctccccagtatgaacacgccttgctgacctggggctcctggccacaccctgagcaagtccaaatgcgcctgtgtacca

SEQ ID NO: 9292 - DNA, 122 bp, Homo sapiens
  misc_feature (61)..(62): /note="This region represents a CpG dinucleotide"
  misc_feature (61)..(61): /note="Nucleotide may be methylated to form 5-methylcytosine"
ggaagatcaaatcccaagaagttctcactcacatggcaggcagttgttgctgtttgttgacgaggaacacagctgtgtctgttgaccagcagagctaagaatgataggaactgaaagataga

SEQ ID NO: 9293 - DNA, 122 bp, Homo sapiens
  misc_feature (61)..(62): /note="This region represents a CpG dinucleotide"
  misc_feature (61)..(61): /note="Nucleotide may be methylated to form 5-methylcytosine"
tgagccaagattgcgccaatgtgtgtccggaactggttccttcaggtgagttcttggtctcgctgacttcaagaatgaagctgtggaccctcgcggtgagtgtgacagttcttaaagatggt

SEQ ID NO: 9294 - DNA, 122 bp, Homo sapiens
  misc_feature (61)..(62): /note="This region represents a CpG dinucleotide"
  misc_feature (61)..(61): /note="Nucleotide may be methylated to form 5-methylcytosine"
agatgggcagccggggacgattgctctgaagttggagttaaatctcctgccttttctccccgcgcccccccaccccgccctgtcccggctgtttttgtttttaaaaaggaaggatagatagg

SEQ ID NO: 9295 - DNA, 122 bp, Homo sapiens
  misc_feature (61)..(62): /note="This region represents a CpG dinucleotide"
  misc_feature (61)..(61): /note="Nucleotide may be methylated to form 5-methylcytosine"
acttgctcttgtgggaaacagggattactaacaagttttccgattgaggactacctgacacggcagatttgtgatttagaaagattacaagtctgggcactgtggctcaagtctgtaatccc

SEQ ID NO: 9296 - DNA, 122 bp, Homo sapiens
  misc_feature (61)..(62): /note="This region represents a CpG dinucleotide"
  misc_feature (61)..(61): /note="Nucleotide may be methylated to form 5-methylcytosine"
tggcggggtgggtcccttttgctgggctggactgtacatatgttaatagcgcaaacccgacgccacatttttataattgtgattaaactttattgtacaaaagtgtttggtcggtgtatttg

SEQ ID NO: 9297 - DNA, 122 bp, Homo sapiens
  misc_feature (61)..(62): /note="This region represents a CpG dinucleotide"
  misc_feature (61)..(61): /note="Nucleotide may be methylated to form 5-methylcytosine"
tggaagacattcttcccccacccccataaaaactgtatatattcaaggtgtacaacatgacgttttgatatacatatgcatagtgaagtgattactgctgtcaagcaaattaacatgtccat

SEQ ID NO: 9298 - DNA, 122 bp, Homo sapiens
  misc_feature (61)..(62): /note="This region represents a CpG dinucleotide"
  misc_feature (61)..(61): /note="Nucleotide may be methylated to form 5-methylcytosine"
aggttccggagctgttggacaagtctcttattccccatgctacacaacctgaaagcaaggcgttctccttgaaaatgaaaggagattgtttcgggtatctttctggggtggcgtctggagac

SEQ ID NO: 9299 - DNA, 122 bp, Homo sapiens
  misc_feature (61)..(62): /note="This region represents a CpG dinucleotide"
  misc_feature (61)..(61): /note="Nucleotide may be methylated to form 5-methylcytosine"
gaacttcctaggtatctatcctgattgttgcttggtgtttatacatgcatgatgttcagccgtgattcactagactccagtcacattctccttccttctatttttctaatacttcaagctct

SEQ ID NO: 9300 - DNA, 122 bp, Homo sapiens
  misc_feature (61)..(62): /note="This region represents a CpG dinucleotide"
  misc_feature (61)..(61): /note="Nucleotide may be methylated to form 5-methylcytosine"
ccttgagaagagtctgattttcagcaccttgatcaatgtgtgacacatacatgcttcatgcgcagagaaggaaatgatttcactacagtgtaattattctcagaattcaatacctgtatttc

SEQ ID NO: 9301 - DNA, 122 bp, Homo sapiens
  misc_feature (61)..(62): /note="This region represents a CpG dinucleotide"
  misc_feature (61)..(61): /note="Nucleotide may be methylated to form 5-methylcytosine"
tgcaccttccacagagccgacactccccgtctctctcagctcacactcctcacccctcctcgggctgctaccctccaggaaggtgcttcccgcacctgtaggaagcttcctcccccagggag

SEQ ID NO: 9302 - DNA, 122 bp, Homo sapiens
  misc_feature (61)..(62): /note="This region represents a CpG dinucleotide"
  misc_feature (61)..(61): /note="Nucleotide may be methylated to form 5-methylcytosine"
atctgaagtgtacattcgttatttcacaaacaaactgaacccaactgcatacatcacttccgtttcaaagtggctatcgtttgggaaatactaaaaaaaaaatgattcatgtctttctgaac

SEQ ID NO: 9303 - DNA, 122 bp, Homo sapiens
  misc_feature (61)..(62): /note="This region represents a CpG dinucleotide"
  misc_feature (61)..(61): /note="Nucleotide may be methylated to form 5-methylcytosine"
gtgagtcactgcagctcttgcgtgctcagtgtcctcatttgcatcacagggatggcattccgtgcctgcgattcactatgggtcttaacaaatctattccttctcttcccctcccacttcag

SEQ ID NO: 9304 - DNA, 122 bp, Homo sapiens
  misc_feature (61)..(62): /note="This region represents a CpG dinucleotide"
  misc_feature (61)..(61): /note="Nucleotide may be methylated to form 5-methylcytosine"
gtaacgacatagaccttcgttagaatcttgacactgtcgcttaacaacagtgactttaagcgtgggttttctcatctgaaaaatgggaggagaggtttctaatccatggtttttgtttgttt

SEQ ID NO: 9305 - DNA, 122 bp, Homo sapiens
  misc_feature (61)..(62): /note="This region represents a CpG dinucleotide"
  misc_feature (61)..(61): /note="Nucleotide may be methylated to form 5-methylcytosine"
taatgttaagggtgatggtgaacccaaatccttcccatgtcagtcgtctgactgtaaattcgtggggttgcacccctaaccaaggcattcactttgtggactagattttaaacatttcctgt

SEQ ID NO: 9306 - DNA, 122 bp, Homo sapiens
  misc_feature (61)..(62): /note="This region represents a CpG dinucleotide"
  misc_feature (61)..(61): /note="Nucleotide may be methylated to form 5-methylcytosine"
acttggaaaaaccacaatgaacaaaacacaaaagtccctgcatcatgaaggctatgatcgcggagtgtttcagactgccatgctcctccagagagaaagaacaccttatcatgtgcctgtca

SEQ ID NO: 9307 - DNA, 122 bp, Homo sapiens
  misc_feature (61)..(62): /note="This region represents a CpG dinucleotide"
  misc_feature (61)..(61): /note="Nucleotide may be methylated to form 5-methylcytosine"
cagacaagcatgtgcgcaaagttatccaacagcactgaccacaccatgagtcaaagcatccgtgttcagaggtttggggtcaaacagagctcacaccattcctgaccccgattgttatgagt

SEQ ID NO: 9308 - DNA, 122 bp, Homo sapiens
  misc_feature (61)..(62): /note="This region represents a CpG dinucleotide"
  misc_feature (61)..(61): /note="Nucleotide may be methylated to form 5-methylcytosine"
gttgaaattcgacccatttctattactcaagcttactacaaggtcacatgaggccaagaacgggtactgcaggaacactaataatactgactattgtaacaagagctagcatttaggccagg

SEQ ID NO: 9309 - DNA, 122 bp, Homo sapiens
  misc_feature (61)..(62): /note="This region represents a CpG dinucleotide"
  misc_feature (61)..(61): /note="Nucleotide may be methylated to form 5-methylcytosine"
ggagctaaggccactgcatttgatctctctgaatatcctttctacccaccaggctgcaatcggtagcagtcaccattgaacatccttgaagcaattcttccaaaattaccttgcatcaaaga

SEQ ID NO: 9310 - DNA, 122 bp, Homo sapiens
  misc_feature (61)..(62): /note="This region represents a CpG dinucleotide"
  misc_feature (61)..(61): /note="Nucleotide may be methylated to form 5-methylcytosine"
gcacatgctcacaagtcaactttggcaggaaactagcaaaggtctgttccctaccatttgcgttgcatctttatctctccggttcattgtttgccactgagtgcttaaacctcaacttccca

SEQ ID NO: 9311 - DNA, 122 bp, Homo sapiens
  misc_feature (61)..(62): /note="This region represents a CpG dinucleotide"
  misc_feature (61)..(61): /note="Nucleotide may be methylated to form 5-methylcytosine"
ttgttgagaaaacctggatttcccacaatgtggaagcaacgaggaaggggtttctggtcccggttctgaaggctgtgaccttcagcgcacatctatacaatgctgatagccccggcacctct

SEQ ID NO: 9312 - DNA, 122 bp, Homo sapiens
  misc_feature (61)..(62): /note="This region represents a CpG dinucleotide"
  misc_feature (61)..(61): /note="Nucleotide may be methylated to form 5-methylcytosine"
caaaagtatctatagtgacactgaaaccacagagaagaacacagactctggaaccaggtgcgcgggggttctgggaagataagtaggaactcaccagggcacagagatgggggtcacctagg

SEQ ID NO: 9313 - DNA, 122 bp, Homo sapiens
  misc_feature (61)..(62): /note="This region represents a CpG dinucleotide"
  misc_feature (61)..(61): /note="Nucleotide may be methylated to form 5-methylcytosine"
ttttctgtctaccttgttttttcagttttcactggggaattctgagatagcgtgttctttcgtggagtatttatatcctgtcttgaaatgctgaatgcatagcatctacttgtttctacatg

SEQ ID NO: 9314 - DNA, 122 bp, Homo sapiens
  misc_feature (61)..(62): /note="This region represents a CpG dinucleotide"
  misc_feature (61)..(61): /note="Nucleotide may be methylated to form 5-methylcytosine"
acttttgaccttctgtctcatcagccaggccacaaacgcgatgtttacatagccatttaccggaagcaagagcctggaccacagagcagatcaccagcagcatatggctcacgtgtgggcga

SEQ ID NO: 9315 - DNA, 122 bp, Homo sapiens
  misc_feature (61)..(62): /note="This region represents a CpG dinucleotide"
  misc_feature (61)..(61): /note="Nucleotide may be methylated to form 5-methylcytosine"
agctcagtactaaatatctactcatccctgattaaataaggtagtaggtcttcactttctcggaagcttctctgtaaattagattatatctagatgcaacataagaaggggaaaccctaatg

SEQ ID NO: 9316 - DNA, 122 bp, Homo sapiens
  misc_feature (61)..(62): /note="This region represents a CpG dinucleotide"
  misc_feature (61)..(61): /note="Nucleotide may be methylated to form 5-methylcytosine"
gcaagtgtgtgcactgctatctaaacatgaaccctgcatgccatgtcttagaggaacttgcgatccaccttgttttgaaaagacttccttcataatcatacttgaatgacttcattgatttg

SEQ ID NO: 9317 - DNA, 122 bp, Homo sapiens
  misc_feature (61)..(62): /note="This region represents a CpG dinucleotide"
  misc_feature (61)..(61): /note="Nucleotide may be methylated to form 5-methylcytosine"
agaaatgaatgaataaatgaacaaatggatggtatatcctctcctgggagggaggacactcgagcagacttgatcacaacgttgtacatctgctttgtctagaaaggtaaaatatgaaagta

SEQ ID NO: 9318 - DNA, 122 bp, Homo sapiens
  misc_feature (61)..(62): /note="This region represents a CpG dinucleotide"
  misc_feature (61)..(61): /note="Nucleotide may be methylated to form 5-methylcytosine"
tgcaaagattcagctctaatttcatttccatcacaaaagaattggcaaataactaaagcacgggaacacataactaaagtgcggctgtgctagtcataagcctataataaagcacagatttg

SEQ ID NO: 9319 - DNA, 122 bp, Homo sapiens
  misc_feature (61)..(62): /note="This region represents a CpG dinucleotide"
  misc_feature (61)..(61): /note="Nucleotide may be methylated to form 5-methylcytosine"
accacattgtagtaagaatggtaaaggcagtgagtgatttgggccagagagggagattcacggtgaaaacataccagtttgttttagaaactctgttagaagtgctgttgtggccctctggg

SEQ ID NO: 9320 - DNA, 122 bp, Homo sapiens
  misc_feature (61)..(62): /note="This region represents a CpG dinucleotide"
  misc_feature (61)..(61): /note="Nucleotide may be methylated to form 5-methylcytosine"
ttaaaatgaaatcatcctggattatctgggtgggcccaatataatcataagggtcctttacgtgtggaagagggaggcagtgttcagattcaaagatctgaagatgttacactgctgccttt

SEQ ID NO: 9321 - DNA, 122 bp, Homo sapiens
  misc_feature (61)..(62): /note="This region represents a CpG dinucleotide"
  misc_feature (61)..(61): /note="Nucleotide may be methylated to form 5-methylcytosine"
gggcaatcagtgtagctagcattaagggctctggccaggcctcccttccccaaactgccacggtctccaaccatgtcttgacctcccagagtttgttagggaagatgggaccttatgggatc

SEQ ID NO: 9322 - DNA, 122 bp, Homo sapiens
  misc_feature (61)..(62): /note="This region represents a CpG dinucleotide"
  misc_feature (61)..(61): /note="Nucleotide may be methylated to form 5-methylcytosine"
ttaggagtaacaaaaacactgttaagttataacatctggacttcatcaccacagccctgacgtcaggacgcagcccagatgttaactagagtaaccatctaacgtttgggtgaatgtggtct

SEQ ID NO: 9323 - DNA, 122 bp, Homo sapiens
  misc_feature (61)..(62): /note="This region represents a CpG dinucleotide"
  misc_feature (61)..(61): /note="Nucleotide may be methylated to form 5-methylcytosine"
gatgagcgctcaggaatcatgggctatcaaaggtaggtgctgagggaatgaaatctgggacgatagactacgaagcattggagaaaagacctatggacatttggaagataatgtgtggagtg

SEQ ID NO: 9324 - DNA, 122 bp, Homo sapiens
  misc_feature (61)..(62): /note="This region represents a CpG dinucleotide"
  misc_feature (61)..(61): /note="Nucleotide may be methylated to form 5-methylcytosine"
tctgtatcacacacacacacacacacacacacacacacacaaaatccttggctgctagagcgtgcattctagtgcggaagagacaagacaataaacttgggctgtcagctggaactaagcgt

SEQ ID NO: 9325 - DNA, 122 bp, Homo sapiens
  misc_feature (61)..(62): /note="This region represents a CpG dinucleotide"
  misc_feature (61)..(61): /note="Nucleotide may be methylated to form 5-methylcytosine"
tgtccggaaagcaccgctgatattgtcaggttacacactgaatggagggtgactaataagcgatgccagttgcctgtggactcgagagaatccagataccaagcgacgcctcacgttgcgcc

SEQ ID NO: 9326 - DNA, 122 bp, Homo sapiens
  misc_feature (61)..(62): /note="This region represents a CpG dinucleotide"
  misc_feature (61)..(61): /note="Nucleotide may be methylated to form 5-methylcytosine"
tccggtgacaggcacttccaacagcaaaccccacccccaccccgacatgtgctggggaaccgggagttcctgcccctgagaggctgatgttgttggagaaaatatgacctggagaaacacat

SEQ ID NO: 9327 - DNA, 122 bp, Homo sapiens
  misc_feature (61)..(62): /note="This region represents a CpG dinucleotide"
  misc_feature (61)..(61): /note="Nucleotide may be methylated to form 5-methylcytosine"
taggcaccagtggggagagtcaagctttctcaggaagatggagatctgtttggtgcttcacgttcctgtgtaacatgaacatagggaaggccaataggcagcctgaaacctagaagaaagtc

SEQ ID NO: 9328 - DNA, 122 bp, Homo sapiens
  misc_feature (61)..(62): /note="This region represents a CpG dinucleotide"
  misc_feature (61)..(61): /note="Nucleotide may be methylated to form 5-methylcytosine"
tttttttttcctgagacagggttcactgtcacgcaagctggagtgccgtggcattatcaccgctaaccgcagccttgaactcctgggctcaagcgatcctcctgcctcagcctcctgagcag

SEQ ID NO: 9329 - DNA, 122 bp, Homo sapiens
  misc_feature (61)..(62): /note="This region represents a CpG dinucleotide"
  misc_feature (61)..(61): /note="Nucleotide may be methylated to form 5-methylcytosine"
ttcaaaataaaacaatggaaggttgggagtaggaggggttatgaatcaaatagaagtacacgagttgattgctgcagctggtgatgggtatacatagagttcattgtactattctttctaca

SEQ ID NO: 9330 - DNA, 122 bp, Homo sapiens
  misc_feature (61)..(62): /note="This region represents a CpG dinucleotide"
  misc_feature (61)..(61): /note="Nucleotide may be methylated to form 5-methylcytosine"
ttgttttattgggtatgtgaatcttaaaagctgtttctatattaagcagccgcttcatttcgattaactgcaagccgttatgatccctatctgtttaactgaatacactgacagtccctcta

SEQ ID NO: 9331 - DNA, 122 bp, Homo sapiens
  misc_feature (61)..(62): /note="This region represents a CpG dinucleotide"
  misc_feature (61)..(61): /note="Nucleotide may be methylated to form 5-methylcytosine"
aagcgtaaatcgggcggcgggggctgcagagccttcatctcttcctccgtcccgggatgtcggagagacggcagcccagcctccgccaccgcaaagctgcttaacgggcagcgcgagtccct

SEQ ID NO: 9332 - DNA, 122 bp, Homo sapiens
  misc_feature (61)..(62): /note="This region represents a CpG dinucleotide"
  misc_feature (61)..(61): /note="Nucleotide may be methylated to form 5-methylcytosine"
aacagggccctcgggcctctggtgtcccccatggtgcagggggatgacaaggtgtttcgccgcgcgccctcctggaggaagcgcttccggccgcgggagcaccacggtcgcggcggcatgct

SEQ ID NO: 9333 - DNA, 122 bp, Homo sapiens
  misc_feature (61)..(62): /note="This region represents a CpG dinucleotide"
  misc_feature (61)..(61): /note="Nucleotide may be methylated to form 5-methylcytosine"
tacccactctcaggcatttctttatagcaacacaagaccagcctaacacacaaggtggcacgaagagtaagcaactgagtaaggatttgacctcagtctgcctgactctaaattctagattc

SEQ ID NO: 9334 - DNA, 122 bp, Homo sapiens
  misc_feature (61)..(62): /note="This region represents a CpG dinucleotide"
  misc_feature (61)..(61): /note="Nucleotide may be methylated to form 5-methylcytosine"
cttataccacaataggtctagcattttaaaaagttaactagtttgcacatagacacttggcgaatagttgattggttatataatcccatcaaggtatgcaaataaacatgtattatggcatc

SEQ ID NO: 9335 - DNA, 122 bp, Homo sapiens
  misc_feature (61)..(62): /note="This region represents a CpG dinucleotide"
  misc_feature (61)..(61): /note="Nucleotide may be methylated to form 5-methylcytosine"
agtgatccacccaccttggcctcccaaagtgctgggattacaggtgtgtgccaccgtgcccggctgaatcattattattattgtgactaattgtgacacctgtcctgcaaggccttcaaaaa

SEQ ID NO: 9336 - DNA, 122 bp, Homo sapiens
  misc_feature (61)..(62): /note="This region represents a CpG dinucleotide"
  misc_feature (61)..(61): /note="Nucleotide may be methylated to form 5-methylcytosine"
gaggcccagactggagggagccggggttccgaggcccccaagcaccgaatgacagatacacgcctacccagacacactctcaggcacacagggacgcgatccctgatacactcacacacaca

SEQ ID NO: 9337 - DNA, 122 bp, Homo sapiens
  misc_feature (61)..(62): /note="This region represents a CpG dinucleotide"
  misc_feature (61)..(61): /note="Nucleotide may be methylated to form 5-methylcytosine"
ccaagtctcagtgaaagtgaaaattgctgaacatttcaagattgttctaatggccaaagccgtaggactgacaggtgtcactcagcatttctagtcaatggaactctaacagaaatgaaggc

SEQ ID NO: 9338 - DNA, 122 bp, Homo sapiens
  misc_feature (61)..(62): /note="This region represents a CpG dinucleotide"
  misc_feature (61)..(61): /note="Nucleotide may be methylated to form 5-methylcytosine"
acaaatgtcagaggattctagaactggtatttttcctttaattcaagcagaatgtataaccgtatgtaatcaagattaatcatacttgaacttcagagacatgattactgtatcacattcac

SEQ ID NO: 9339 - DNA, 122 bp, Homo sapiens
  misc_feature (61)..(62): /note="This region represents a CpG dinucleotide"
  misc_feature (61)..(61): /note="Nucleotide may be methylated to form 5-methylcytosine"
tgggctctcagctttctctcttcaatttagggagtcagcagggctccaactgagatgccccgtcctgctctgcaccatggaaattctggacagtagctgagaccgttgtttcttggggatta

SEQ ID NO: 9340 - DNA, 122 bp, Homo sapiens
  misc_feature (61)..(62): /note="This region represents a CpG dinucleotide"
  misc_feature (61)..(61): /note="Nucleotide may be methylated to form 5-methylcytosine"
aaatttaaacattcaatgggcttttgggccagagggtattcaaagtcctatacaacggcccgagcccctgtgaaatgattttattttggtaagtccctaatggggacaaagaaaaacttgac

SEQ ID NO: 9341 - DNA, 122 bp, Homo sapiens
  misc_feature (61)..(62): /note="This region represents a CpG dinucleotide"
  misc_feature (61)..(61): /note="Nucleotide may be methylated to form 5-methylcytosine"
aaacaagccacaggatgtgaagctctggtgcttttactctctgtggcaccaggaattttccgagcagaaagaggcttccccctcctgttcccagcaggaaagagagaggaaatagaggaaaa

SEQ ID NO: 9342 - DNA, 122 bp, Homo sapiens
  misc_feature (61)..(62): /note="This region represents a CpG dinucleotide"
  misc_feature (61)..(61): /note="Nucleotide may be methylated to form 5-methylcytosine"
cctgtgcctcccgcagtaagtacttaagaaatacttgtgaaacacatgaataaaggttaacgaagggcaaaggaaacaagcctttattgatgatttttctctgtgcccagtaatacttgggt

SEQ ID NO: 9343 - DNA, 122 bp, Homo sapiens
  misc_feature (61)..(62): /note="This region represents a CpG dinucleotide"
  misc_feature (61)..(61): /note="Nucleotide may be methylated to form 5-methylcytosine"
tcatacggaaaagcacaacgcaaaaactacagcatatattttttccctctaagctttttccgcacccttgtggacttaccctttgctgcgttctgagagtgcacagatgaccaaatagacca

SEQ ID NO: 9344 - DNA, 122 bp, Homo sapiens
  misc_feature (61)..(62): /note="This region represents a CpG dinucleotide"
  misc_feature (61)..(61): /note="Nucleotide may be methylated to form 5-methylcytosine"
ctgccacagttcttatatacttaaggcttacatcaccactcagaggacttacatcattttcgcccttaagaagagatatttggccgggcgtggtggctcacgcctgtaatcccagcactctg

SEQ ID NO: 9345 - DNA, 122 bp, Homo sapiens
  misc_feature (61)..(62): /note="This region represents a CpG dinucleotide"
  misc_feature (61)..(61): /note="Nucleotide may be methylated to form 5-methylcytosine"
aaaaacaaaatatcacttcctggtattattttccataatcagatttgagatgttagactacgtggcaaaaatgccaggaagtgacatttttgcaggctagcatctcaaatctgattctggaa

SEQ ID NO: 9346 - DNA, 122 bp, Homo sapiens
  misc_feature (61)..(62): /note="This region represents a CpG dinucleotide"
  misc_feature (61)..(61): /note="Nucleotide may be methylated to form 5-methylcytosine"
gctgttctgtgattcctgcctcctgagctaggagattgcaatttacattatgcaaatagacgttatgcaatcaaggcactttagcaggaatctggcggcagagaggccgattgatgagatgc

SEQ ID NO: 9347 - DNA, 122 bp, Homo sapiens
  misc_feature (61)..(62): /note="This region represents a CpG dinucleotide"
  misc_feature (61)..(61): /note="Nucleotide may be methylated to form 5-methylcytosine"
ttataagagttcccttttctctgcatccttgtcaacacttttttttctttttctttttttcgtctgttcatttgataatagctacgctgattggagtgtagtggtatattattgtggttttg

SEQ ID NO: 9348 - DNA, 122 bp, Homo sapiens
  misc_feature (61)..(62): /note="This region represents a CpG dinucleotide"
  misc_feature (61)..(61): /note="Nucleotide may be methylated to form 5-methylcytosine"
tcgaattcatctgtgtgcttgtacaattaattcacctatttctctattcatttcccctctcgtccacatactcttcttccttctttcaaatattcaagtgcctgctaatgtgcttggtccaa

SEQ ID NO: 9349 - DNA, 122 bp, Homo sapiens
  misc_feature (61)..(62): /note="This region represents a CpG dinucleotide"
  misc_feature (61)..(61): /note="Nucleotide may be methylated to form 5-methylcytosine"
tggctacccttatttaacaattctatcagcaactcagttttggttcttggtagtgatatacgttaagattttagcaggaaaatttagtcattgagcaatttgttcttttggtcacttgctcc

SEQ ID NO: 9350 - DNA, 122 bp, Homo sapiens
  misc_feature (61)..(62): /note="This region represents a CpG dinucleotide"
  misc_feature (61)..(61): /note="Nucleotide may be methylated to form 5-methylcytosine"
tggaataataacctctgtactttattttctactctgaaaatgacttattttatttgctctcggtctatgtttatatctccccccctaccctgcctgtctcctcaccccccaccaacttctga

SEQ ID NO: 9351 - DNA, 122 bp, Homo sapiens
  misc_feature (61)..(62): /note="This region represents a CpG dinucleotide"
  misc_feature (61)..(61): /note="Nucleotide may be methylated to form 5-methylcytosine"
aattgcgtgttgttctaagttgatgaaatctcttgccatcccattctgtcctacctgggacgtgagtcacccctttgtccggcattccattaaacgcccattagtcactgacatcctctgct

SEQ ID NO: 9352 - DNA, 122 bp, Homo sapiens
  misc_feature (61)..(62): /note="This region represents a CpG dinucleotide"
  misc_feature (61)..(61): /note="Nucleotide may be methylated to form 5-methylcytosine"
tttccaaaccattcttgaatgtgcatttcatccatatttataagaatgcaagcctgcacacgctttccaccctgtgtcaccccatcatgggcagggacttggtttacagacttttatatttg

SEQ ID NO: 9353 - DNA, 122 bp, Homo sapiens
  misc_feature (61)..(62): /note="This region represents a CpG dinucleotide"
  misc_feature (61)..(61): /note="Nucleotide may be methylated to form 5-methylcytosine"
actcatggaaacataatcatgatccagctaaggaagtacaagttacaaagactgagaaaacgaagaaaacttctgtccctgaggaaacagaatgtgttcatacactgcgtccccgtaatgta

SEQ ID NO: 9354 - DNA, 122 bp, Homo sapiens
  misc_feature (61)..(62): /note="This region represents a CpG dinucleotide"
  misc_feature (61)..(61): /note="Nucleotide may be methylated to form 5-methylcytosine"
ctcctgttcccacctcttcgtctgcatgcctaagaaactgttttacaagtaaataagggacgctttgtctaggctttggagccaggaagttgagacaaatttaggaatgagatgaagtaatg

SEQ ID NO: 9355 - DNA, 122 bp, Homo sapiens
  misc_feature (61)..(62): /note="This region represents a CpG dinucleotide"
  misc_feature (61)..(61): /note="Nucleotide may be methylated to form 5-methylcytosine"
agtgaagtgtcatcaaattacttaaccattgtcagtaggccgcctgtgctatttcacctgcgttaacaatcgtctagaacttgcctaatgttcctcattcttgtgctttctttactcttgag

SEQ ID NO: 9356 - DNA, 122 bp, Homo sapiens
  misc_feature (61)..(62): /note="This region represents a CpG dinucleotide"
  misc_feature (61)..(61): /note="Nucleotide may be methylated to form 5-methylcytosine"
aacatgcctctctaagtcatcctgtaaggtgaccccgaagtgtgacttgtcacaccatcccgccttctttaccgcctgagccgtggagggcagcctggcctgatgcaccaaggattcatgct

SEQ ID NO: 9357 - DNA, 122 bp, Homo sapiens
  misc_feature (61)..(62): /note="This region represents a CpG dinucleotide"
  misc_feature (61)..(61): /note="Nucleotide may be methylated to form 5-methylcytosine"
ctttgttcagttttgaattccaaggagttatcatcctgctggcctcgaatagggtgttaacgaatccactgaaaaggaatgtttttaaaaagagtctttattccaaccagcagtttgccaac

SEQ ID NO: 9358 - DNA, 122 bp, Homo sapiens
  misc_feature (61)..(62): /note="This region represents a CpG dinucleotide"
  misc_feature (61)..(61): /note="Nucleotide may be methylated to form 5-methylcytosine"
ctgtatttagagctccagacgtctgtgcggacccaagtctgctggcaggggtattgatgtcgtacttcgtcatttctgagtgccattagagccaccaacctgttctgggcctaggctgggtc

SEQ ID NO: 9359 - DNA, 122 bp, Homo sapiens
  misc_feature (61)..(62): /note="This region represents a CpG dinucleotide"
  misc_feature (61)..(61): /note="Nucleotide may be methylated to form 5-methylcytosine"
gtgatatgatcagaattgcattctttcaagacatcgctgaatgcagtgtggaggatggctcgtggatatgtgttggaggtgggtgggggtgagtggatacaggaagagggtggaggctagga

SEQ ID NO: 9360 - DNA, 122 bp, Homo sapiens
  misc_feature (61)..(62): /note="This region represents a CpG dinucleotide"
  misc_feature (61)..(61): /note="Nucleotide may be methylated to form 5-methylcytosine"
aaaaataccaaaaaaaaaaagttagccagacgttgtggcgggtgcagagtctgagggaggcgaattgcttcaacctacctggaaggtggaggttgcagtgcactgcagcctgggcgacagag

SEQ ID NO: 9361 - DNA, 122 bp, Homo sapiens
  misc_feature (61)..(62): /note="This region represents a CpG dinucleotide"
  misc_feature (61)..(61): /note="Nucleotide may be methylated to form 5-methylcytosine"
cacagacagagtctgggttcttactcacctgggcaggctatgggtggggtggggtgagaacgcactcagcagcctcagagggacataggaagaaaggagtgaggaaaactcccaggaattta

SEQ ID NO: 9362 - DNA, 122 bp, Homo sapiens
  misc_feature (61)..(62): /note="This region represents a CpG dinucleotide"
  misc_feature (61)..(61): /note="Nucleotide may be methylated to form 5-methylcytosine"
actcctgtcttcctgagcgcagggaggctgcagggtaattgcttttggatcttccaaatgcgggtgagacaaatccacagcagcctgtaattatcaagcatgtatgtggtgtgtatcgagta

SEQ ID NO: 9363 - DNA, 122 bp, Homo sapiens
  misc_feature (61)..(62): /note="This region represents a CpG dinucleotide"
  misc_feature (61)..(61): /note="Nucleotide may be methylated to form 5-methylcytosine"
attaaagctgagtgttttcttggaaaatgtcctgcatgtgttgaaattaaaagcctttggcgaaggctttaagctcacagtgaattctggtgtgttacctgcacctgccagcagccttgctt

SEQ ID NO: 9364 - DNA, 122 bp, Homo sapiens
  misc_feature (61)..(62): /note="This region represents a CpG dinucleotide"
  misc_feature (61)..(61): /note="Nucleotide may be methylated to form 5-methylcytosine"
agcatttggatgaatgaacttgacttaacattttcctcccactgcagttttgctcattcacgtcttcatctctggatgtcctgtcagtctttctgggtcacacctctcatcctgccttctta

SEQ ID NO: 9365 - DNA, 122 bp, Homo sapiens
  misc_feature (61)..(62): /note="This region represents a CpG dinucleotide"
  misc_feature (61)..(61): /note="Nucleotide may be methylated to form 5-methylcytosine"
ctatatgaggtcattgatatcctaacatactcatttgactgacatccactgacatctggtcgtcctttttgatagggggattttggcgtatcagggacccaacggaataactaggacacaga

SEQ ID NO: 9366 - DNA, 122 bp, Homo sapiens
  misc_feature (61)..(62): /note="This region represents a CpG dinucleotide"
  misc_feature (61)..(61): /note="Nucleotide may be methylated to form 5-methylcytosine"
taatcatgcttctaaacatgggctggcaattcaggaaagggccactgaaaatattagcctcgttcttttctctgtagagtgagcacagactattcctaaaccacattgcagtatgccaacat

SEQ ID NO: 9367 - DNA, 122 bp, Homo sapiens
  misc_feature (61)..(62): /note="This region represents a CpG dinucleotide"
  misc_feature (61)..(61): /note="Nucleotide may be methylated to form 5-methylcytosine"
acaggactgaggaaaatgagccggagttcccatgctggcctgaccataataatcactcagcgggacttaattgtagcaatttctgggatctcccaaactttctaaatccaagtctccagata

SEQ ID NO: 9368 - DNA, 122 bp, Homo sapiens
  misc_feature (61)..(62): /note="This region represents a CpG dinucleotide"
  misc_feature (61)..(61): /note="Nucleotide may be methylated to form 5-methylcytosine"
gcttatagccttggccccatcagaacttgcttccaaatattccctttgtggggctggggacgcccactgggctgggggtgctacactggccttgaagtcctggccacctgccagggtcaaca

SEQ ID NO: 9369 - DNA, 122 bp, Homo sapiens
  misc_feature (61)..(62): /note="This region represents a CpG dinucleotide"
  misc_feature (61)..(61): /note="Nucleotide may be methylated to form 5-methylcytosine"
accatgaagataactcaggccgtcggagaaagtggcctgcccaacgcaggtgctagagcgcgaaccaagagaagtcgatcctcctggtctccccggctgcctggtgagtggcagaccacagg

SEQ ID NO: 9370 - DNA, 122 bp, Homo sapiens
  misc_feature (61)..(62): /note="This region represents a CpG dinucleotide"
  misc_feature (61)..(61): /note="Nucleotide may be methylated to form 5-methylcytosine"
ctcccacgacgtttgttttgtacttgtgttacagcaacacggtcacattgtgccacatcacgagtttacaacccatgtgtgtctccggtctggatggtgaaatcctcactgatagtacctgc

SEQ ID NO: 9371 - DNA, 122 bp, Homo sapiens
  misc_feature (61)..(62): /note="This region represents a CpG dinucleotide"
  misc_feature (61)..(61): /note="Nucleotide may be methylated to form 5-methylcytosine"
acagaagatgggtgaatcatccaagtatttgagttccagttcaccattcttccagcgtttcgttaaacaatgattgtgtttgctcaaaaaaaaaagacaatgagaacaaggcacagtggccc

SEQ ID NO: 9372 - DNA, 122 bp, Homo sapiens
  misc_feature (61)..(62): /note="This region represents a CpG dinucleotide"
  misc_feature (61)..(61): /note="Nucleotide may be methylated to form 5-methylcytosine"
attggcagaataaaggcccctgctaaagacgtcctgagaacctgtcaatatgttatgctacgtaacaaagggaattagggttgcaggtggaattaaggttgctattcagctggcctttttat

SEQ ID NO: 9373 - DNA, 122 bp, Homo sapiens
  misc_feature (61)..(62): /note="This region represents a CpG dinucleotide"
  misc_feature (61)..(61): /note="Nucleotide may be methylated to form 5-methylcytosine"
tttcactgcaaaatatgctcccactccatatgctccaaataagggccatttgtacactatcgtcatctaccatagttttgtctgtcctataacaaaattttatgagtatttttatttaattt

SEQ ID NO: 9374 - DNA, 122 bp, Homo sapiens
  misc_feature (61)..(62): /note="This region represents a CpG dinucleotide"
  misc_feature (61)..(61): /note="Nucleotide may be methylated to form 5-methylcytosine"
ttgaataactatgatttattgaattcttaccatgttctaagttctttatgtatactgtttcgtttaatcttcacaacaattctaggagtcaggttcaattgttattgccatttgatagatga

SEQ ID NO: 9375 - DNA, 122 bp, Homo sapiens
  misc_feature (61)..(62): /note="This region represents a CpG dinucleotide"
  misc_feature (61)..(61): /note="Nucleotide may be methylated to form 5-methylcytosine"
aaattctaagagatatgaaattcaaaggacattgtcaacacttttctggctcagcttttacgaaagtcttcagagttcagtagccctttgttcaatgtaacagaagtactaactaatttgag

SEQ ID NO: 9376 - DNA, 122 bp, Homo sapiens
  misc_feature (61)..(62): /note="This region represents a CpG dinucleotide"
  misc_feature (61)..(61): /note="Nucleotide may be methylated to form 5-methylcytosine"
gtttctgtgggtcagaaggccaagaacaatgtggcttagctggttccctgcttagggtttcgtaaggctgaaatgatggtgtcagcagtattgtgttcctttctggtgactctggagatgaa

SEQ ID NO: 9377 - DNA, 122 bp, Homo sapiens
  misc_feature (61)..(62): /note="This region represents a CpG dinucleotide"
  misc_feature (61)..(61): /note="Nucleotide may be methylated to form 5-methylcytosine"
ttttttttttgcaatcagatatgttacatcaccactactgccttagtcagctcaggctaccgtaataaaataccatagactggtggcttaaccaacagaaatttatatatattctcacagct

SEQ ID NO: 9378 - DNA, 122 bp, Homo sapiens
  misc_feature (61)..(62): /note="This region represents a CpG dinucleotide"
  misc_feature (61)..(61): /note="Nucleotide may be methylated to form 5-methylcytosine"
aaggattattccatttgtaagattatttcttgttttcttagtttttctgtgtaagccttgcgtaagtgaatttcttttaaaaatgatttggcaacaaaagtatattcggcatgtagtattta

SEQ ID NO: 9379 - DNA, 122 bp, Homo sapiens
  misc_feature (61)..(62): /note="This region represents a CpG dinucleotide"
  misc_feature (61)..(61): /note="Nucleotide may be methylated to form 5-methylcytosine"
ccttctgctctccagctcctcccctcagtcagcccaaatactgatttccctcctaaggcacgctcctcaactccttgcaggtgccctggcacgccctgtacccccaccaaccttgtgtaccc

SEQ ID NO: 9380 - DNA, 122 bp, Homo sapiens
  misc_feature (61)..(62): /note="This region represents a CpG dinucleotide"
  misc_feature (61)..(61): /note="Nucleotide may be methylated to form 5-methylcytosine"
tcattattgggatttagagctctggatatagttgtattaaccagagaagatataggataacgttcagaagattttacatgtacgtgtcttagagaatgagccagcagctctctgtaacttca

SEQ ID NO: 9381 - DNA, 122 bp, Homo sapiens
  misc_feature (61)..(62): /note="This region represents a CpG dinucleotide"
  misc_feature (61)..(61): /note="Nucleotide may be methylated to form 5-methylcytosine"
accatcacatgggagatgaggcttcaatatataaatttgggggggacacaacaatcagtccgtagcaagttccatgaatgaattaattacatcttgcgtatcttctatgtgcaaaacatggg

SEQ ID NO: 9382 - DNA, 122 bp, Homo sapiens
  misc_feature (61)..(62): /note="This region represents a CpG dinucleotide"
  misc_feature (61)..(61): /note="Nucleotide may be methylated to form 5-methylcytosine"
catgcacacacccacacatgctcatagtcagacagcactgcatccctcacttccatgttacgacactttaatcaagttcacaagctcctccacaaccttggccagtcttccagagcctcatg

SEQ ID NO: 9383 - DNA, 122 bp, Homo sapiens
  misc_feature (61)..(62): /note="This region represents a CpG dinucleotide"
  misc_feature (61)..(61): /note="Nucleotide may be methylated to form 5-methylcytosine"
tttcagcaggaaactgtgagctataaaaaactgacatagcagatttgggtaaaaaaattccggaagcaaaagaatatgagaccaaatttttaaaaattgggctagtagattagttataattg

SEQ ID NO: 9384 - DNA, 122 bp, Homo sapiens
  misc_feature (61)..(62): /note="This region represents a CpG dinucleotide"
  misc_feature (61)..(61): /note="Nucleotide may be methylated to form 5-methylcytosine"
atacagtaagtgctatgtaagtgtctgttaaataaatcatagtctgttccctctgcccttcgaggcccttcaggggaaaagttagaagataacagcttcaaagcgagacaagtaatttccag

SEQ ID NO: 9385 - DNA, 122 bp, Homo sapiens
  misc_feature (61)..(62): /note="This region represents a CpG dinucleotide"
  misc_feature (61)..(61): /note="Nucleotide may be methylated to form 5-methylcytosine"
atgaggatgaaatggagttcctctctctctctttgtatgaacagtaatccttagtcactgcgaattctgaaatttttttggcctggtgccttgtgttatagttaatttgtggctgggcagag

SEQ ID NO: 9386 - DNA, 122 bp, Homo sapiens
  misc_feature (61)..(62): /note="This region represents a CpG dinucleotide"
  misc_feature (61)..(61): /note="Nucleotide may be methylated to form 5-methylcytosine"
tattctccttatatgactaaatcatgcacctaaatattgtttctagagctgcagatagcacggcttgggacaatagttttaggaaaagagcagctaagtatttactcatcagtcgtaacaaa

SEQ ID NO: 9387 - DNA, 122 bp, Homo sapiens
  misc_feature (61)..(62): /note="This region represents a CpG dinucleotide"
  misc_feature (61)..(61): /note="Nucleotide may be methylated to form 5-methylcytosine"
ccagaagaaggaccgctagatgtagaggtctgggaacaagtggggagaaatattaaacaacgttatgcacaagggcaatgtgtcccagtaacagcttttaatgctatgggctttaattagag

SEQ ID NO: 9388 - DNA, 122 bp, Homo sapiens
  misc_feature (61)..(62): /note="This region represents a CpG dinucleotide"
  misc_feature (61)..(61): /note="Nucleotide may be methylated to form 5-methylcytosine"
gggcagagagttgagccatccatctgtgtcagccagcaaaggggcctcctccgtgctccacggtatcactagcaccaccaccacgctgggaaccacgtgaagaacctggatttccggcctgt

SEQ ID NO: 9389 - DNA, 122 bp, Homo sapiens
  misc_feature (61)..(62): /note="This region represents a CpG dinucleotide"
  misc_feature (61)..(61): /note="Nucleotide may be methylated to form 5-methylcytosine"
ctgggcgatctcttcgctctctggcatgtcctggatggcagcactgatcttctctcagatcgtcagcaccagactctgccatttcaggctgcagtaccttctgtccacaagccaatcgagca

SEQ ID NO: 9390 - DNA, 122 bp, Homo sapiens
  misc_feature (61)..(62): /note="This region represents a CpG dinucleotide"
  misc_feature (61)..(61): /note="Nucleotide may be methylated to form 5-methylcytosine"
cttgatctcctgacctcgtgatcctcccactttggcctcccaaagtgctgggattacaggcgtgagccaccatgcctgacctgtttaatgtttaaaatatgccgtaaagaaaatccagctgg

SEQ ID NO: 9391 - DNA, 122 bp, Homo sapiens
  misc_feature (61)..(62): /note="This region represents a CpG dinucleotide"
  misc_feature (61)..(61): /note="Nucleotide may be methylated to form 5-methylcytosine"
ctgcttgaggcaatgagatccgagagggggcagcaatcatgggtggagagaactacacagcgtaatcaagaatcaaatggggaggcaggattccaagactagagaccagaaaagtgcctgtc

SEQ ID NO: 9392 - DNA, 122 bp, Homo sapiens
  misc_feature (61)..(62): /note="This region represents a CpG dinucleotide"
  misc_feature (61)..(61): /note="Nucleotide may be methylated to form 5-methylcytosine"
gagggcacctagtctagcaagctgaaagatggcactaaccatctagacaactagaggagacgtgtgtctagattgcagaaggcattcagtgaatatgtgttgattcaccgaactaacaggaa

SEQ ID NO: 9393 - DNA, 122 bp, Homo sapiens
  misc_feature (61)..(62): /note="This region represents a CpG dinucleotide"
  misc_feature (61)..(61): /note="Nucleotide may be methylated to form 5-methylcytosine"
tcctggggtgcagcaggtttattttggataaagcagtggtgtgcagagaccaacctcccacggcaggctggagggatgtgcagggggaccacccagaaaggaggcgaggggtggaagacaga

SEQ ID NO: 9394 - DNA, 122 bp, Homo sapiens
  misc_feature (61)..(62): /note="This region represents a CpG dinucleotide"
  misc_feature (61)..(61): /note="Nucleotide may be methylated to form 5-methylcytosine"
gaatactcttggcttatccatgagtgatagagcctacagactgtgactaagaagggcttccgtagataaatatctctcaagaggtcgttattatctcaaaccactgaatttatccttgtgat

SEQ ID NO: 9395 - DNA, 122 bp, Homo sapiens
  misc_feature (61)..(62): /note="This region represents a CpG dinucleotide"
  misc_feature (61)..(61): /note="Nucleotide may be methylated to form 5-methylcytosine"
cccgggggaggttatgactcagctaccacaaacatcacatcaaattggcttgtacgactgcgtagatcttaaataacaatgggtccttcctgaggctgatttccgctcactctcgcttcttg

SEQ ID NO: 9396 - DNA, 122 bp, Homo sapiens
  misc_feature (61)..(62): /note="This region represents a CpG dinucleotide"
  misc_feature (61)..(61): /note="Nucleotide may be methylated to form 5-methylcytosine"
tgtttatatagtttacaaagagtaaacccccttatcagttagggaatggtgggaacattccggtaatccaagttcccagacactagccaaagcccagctttaaaatcagggctaaggatagc

SEQ ID NO: 9397 - DNA, 122 bp, Homo sapiens
  misc_feature (61)..(62): /note="This region represents a CpG dinucleotide"
  misc_feature (61)..(61): /note="Nucleotide may be methylated to form 5-methylcytosine"
aaccctgtctcaaaaaacaaacccaaaacaaacaacaacaaacgcaggctaactgaataccgagcccatgtccccttccatgcccacaatgctgccttgcctttgtgcagaatgtggttaga

SEQ ID NO: 9398 - DNA, 122 bp, Homo sapiens
  misc_feature (61)..(62): /note="This region represents a CpG dinucleotide"
  misc_feature (61)..(61): /note="Nucleotide may be methylated to form 5-methylcytosine"
atagttggttggttaaatgattgcctagaatctgcttggaatacatgtgttaatttcaaccgggaatcttgatcatcataatgagaaagcagatttttagaaaaactgtacaatcagaaagc

SEQ ID NO: 9399 - DNA, 122 bp, Homo sapiens
  misc_feature (61)..(62): /note="This region represents a CpG dinucleotide"
  misc_feature (61)..(61): /note="Nucleotide may be methylated to form 5-methylcytosine"
ttttttgctgtcatcccttcagggcagtggatgtatctgacacctagtgaatacaggccacggatgttgcaaaacattctattatatagaaggcagtccccgacaacaaagaataatctgga

SEQ ID NO: 9400 - DNA, 122 bp, Homo sapiens
  misc_feature (61)..(62): /note="This region represents a CpG dinucleotide"
  misc_feature (61)..(61): /note="Nucleotide may be methylated to form 5-methylcytosine"
agtgaaactccatcttaaaaaaaaaaaaaaaaaagaagaagtttccaggaagagaatttccgttcaagttgtaagtcaagtccagaacctcaagagctggcagagagcagaagcctcgtggc

SEQ ID NO: 9401 - DNA, 122 bp, Homo sapiens
  misc_feature (61)..(62): /note="This region represents a CpG dinucleotide"
  misc_feature (61)..(61): /note="Nucleotide may be methylated to form 5-methylcytosine"
tgactcccggagaatttatagacatgtgggagcccactggcctcgccgctggtgtgtggccgcgtttgtgggtgctggtcaacaccttgctccacaaggaaatacttctgtgagttgtgacg

SEQ ID NO: 9402 - DNA, 122 bp, Homo sapiens
  misc_feature (61)..(62): /note="This region represents a CpG dinucleotide"
  misc_feature (61)..(61): /note="Nucleotide may be methylated to form 5-methylcytosine"
ctccgtagagggtgggagtttagacatctggctccaagttgtaaacctacctacttgtcacggaaatatgagaagttttaattttcctttggataaaggcaatcagctcccacagatggcca

SEQ ID NO: 9403 - DNA, 122 bp, Homo sapiens
  misc_feature (61)..(62): /note="This region represents a CpG dinucleotide"
  misc_feature (61)..(61): /note="Nucleotide may be methylated to form 5-methylcytosine"
ctggagctttgtcctggggctttcccgtgggggtgtggcttggctgattcaagaagaacacgtgcaaagcggggcttattcacaggagtctggtgttggccgttaggtttgatcgtggtcag

SEQ ID NO: 9404 - DNA, 122 bp, Homo sapiens
  misc_feature (61)..(62): /note="This region represents a CpG dinucleotide"
  misc_feature (61)..(61): /note="Nucleotide may be methylated to form 5-methylcytosine"
agaaaacaccaatcaaatgtgcaatagggtgccttactgttccctgcaagcttgggcagccgcattccaggtgcctttctgctctgtgatcaagatgtgacagtagcctgagtgctggtgcc

SEQ ID NO: 9405 - DNA, 122 bp, Homo sapiens
  misc_feature (61)..(62): /note="This region represents a CpG dinucleotide"
  misc_feature (61)..(61): /note="Nucleotide may be methylated to form 5-methylcytosine"
gagcttgaagatacatagtttcttctacacacagcaggatgaggcaaatccttctgcctacgatgactaggacctgaggcatcctgccctttcttgctccttggtgaatgaaaaggagaact

SEQ ID NO: 9406 - DNA, 122 bp, Homo sapiens
  misc_feature (61)..(62): /note="This region represents a CpG dinucleotide"
  misc_feature (61)..(61): /note="Nucleotide may be methylated to form 5-methylcytosine"
cctagttctgcggccgagaggggctaacgtacgcaccaccagcccctagacaaacacaaacgcatgtgagttttaggttccaccgttgtcacttcagcccagggtcagtaaacattttctgt

SEQ ID NO: 9407 - DNA, 122 bp, Homo sapiens
  misc_feature (61)..(62): /note="This region represents a CpG dinucleotide"
  misc_feature (61)..(61): /note="Nucleotide may be methylated to form 5-methylcytosine"
aggcctcggggagggcaccccctaagaccacagtggccaagatcacagtggccacggccacggccacagtcatggtggccacggccacagccactaatcaggaggccaggccaccctgcctc

SEQ ID NO: 9408 - DNA, 122 bp, Homo sapiens
  misc_feature (61)..(62): /note="This region represents a CpG dinucleotide"
  misc_feature (61)..(61): /note="Nucleotide may be methylated to form 5-methylcytosine"
ttgcccctctctacctgctcttatgtactttctcactgcactgtcttgttacgaggaggacgggctaagggcagaaactcagcatgaagcccatgatgcacttgcaattttagctagatata

SEQ ID NO: 9409 - DNA, 122 bp, Homo sapiens
  misc_feature (61)..(62): /note="This region represents a CpG dinucleotide"
  misc_feature (61)..(61): /note="Nucleotide may be methylated to form 5-methylcytosine"
gtctggcacatagtcaatggttagtaaatgtgaactattgtgtgacattgtggttagtcacgtatggggctgtgtttcctttagtatattgctcttttaatgtcatttcctttgtactgtta

SEQ ID NO: 9410 - DNA, 122 bp, Homo sapiens
  misc_feature (61)..(62): /note="This region represents a CpG dinucleotide"
  misc_feature (61)..(61): /note="Nucleotide may be methylated to form 5-methylcytosine"
tcctttgattcttatctttgtccccttgaacttgtgagctgaagttttgtctgcttttcccgttacacgaagctggtgatctctgggtccaggatagtgtacttgtttgggggacagatgtg

SEQ ID NO: 9411 - DNA, 122 bp, Homo sapiens
  misc_feature (61)..(62): /note="This region represents a CpG dinucleotide"
  misc_feature (61)..(61): /note="Nucleotide may be methylated to form 5-methylcytosine"
gtgtggcactaacagtaccgatagtactactactaataattgcccgagaggtctgctatccgttaactgacactcggtagcggccgctgcggaatttcgaattgcgggaaacccgcagactt

SEQ ID NO: 9412 - DNA, 122 bp, Homo sapiens
  misc_feature (61)..(62): /note="This region represents a CpG dinucleotide"
  misc_feature (61)..(61): /note="Nucleotide may be methylated to form 5-methylcytosine"
gatttcctgatcaccatggcaacacacaggggtgggtactgtggtttctctgcctgaagacgcactcgtcaaagactacttggtgttacagaattctggtgcagtgaagcaacagttctggg

SEQ ID NO: 9413 - DNA, 122 bp, Homo sapiens
  misc_feature (61)..(62): /note="This region represents a CpG dinucleotide"
  misc_feature (61)..(61): /note="Nucleotide may be methylated to form 5-methylcytosine"
ggcgggagtttgcaggtggggaacggctggaggaactcgtggaacagcctgagaggtgtccggcgaggtagggcatgggtggccttgagccctgaggctgagcggagctgtctttgagagcc

SEQ ID NO: 9414 - DNA, 122 bp, Homo sapiens
  misc_feature (61)..(62): /note="This region represents a CpG dinucleotide"
  misc_feature (61)..(61): /note="Nucleotide may be methylated to form 5-methylcytosine"
gactggttggcacctgtgatatactgatggttaaatattttggatcacacctgtaatgagcgggtgactaatttctggcaatgacactgagtagaagtttggaacattagagccctagtaaa

SEQ ID NO: 9415 - DNA, 122 bp, Homo sapiens
  misc_feature (61)..(62): /note="This region represents a CpG dinucleotide"
  misc_feature (61)..(61): /note="Nucleotide may be methylated to form 5-methylcytosine"
atcctatcatctatactttaaggaacaaggatatgaaagaggctctgaggaaacttctctcgggaaaattgtgattcctatggacatgatttgcaaggaattcattataagccaggtagctt

SEQ ID NO: 9416 - DNA, 122 bp, Homo sapiens
  misc_feature (61)..(62): /note="This region represents a CpG dinucleotide"
  misc_feature (61)..(61): /note="Nucleotide may be methylated to form 5-methylcytosine"
gcctgatttaagataggaggaaactgaggcaaaggaggataagcaatgtgtccaagcctacgcctctgatgagtataggtctgggatttgaactcaagcagtccggccccagaggccttagt

SEQ ID NO: 9417 - DNA, 122 bp, Homo sapiens
  misc_feature (61)..(62): /note="This region represents a CpG dinucleotide"
  misc_feature (61)..(61): /note="Nucleotide may be methylated to form 5-methylcytosine"
ttatttgcagaaggcatacccgtgatgttcacttccttctgtaaagactctgttttaacacgtaagtcagatttatgccatattcttctgaaacactgaagatgtttatttttcgcatgtta

SEQ ID NO: 9418 - DNA, 122 bp, Homo sapiens
  misc_feature (61)..(62): /note="This region represents a CpG dinucleotide"
  misc_feature (61)..(61): /note="Nucleotide may be methylated to form 5-methylcytosine"
gactgaagccagaatttaacggcagctgcctcgcttccatttttatgtctaatatgtagacgtacatttgtaagacaaaataaacatttaaaatagagtttaagaaacagaaaactcaaaat

SEQ ID NO: 9419 - DNA, 122 bp, Homo sapiens
  misc_feature (61)..(62): /note="This region represents a CpG dinucleotide"
  misc_feature (61)..(61): /note="Nucleotide may be methylated to form 5-methylcytosine"
gctttctccaggtacacctgaccaagcttttcctcaggagagtcttatatctcctacaagcggcaacagggtatgtgtatttaaaacagaccaaaaaaaaaaaaaaacaccaaaaaaccacc

SEQ ID NO: 9420 - DNA, 122 bp, Homo sapiens
  misc_feature (61)..(62): /note="This region represents a CpG dinucleotide"
  misc_feature (61)..(61): /note="Nucleotide may be methylated to form 5-methylcytosine"
ttcccagtaacattgtgaggcaatatgcacaaagtactgccaaccagggaagctcacccacggcttggtgcccagagtttttattgggactcagtcacacagacctggttgatcacccatgt

SEQ ID NO: 9421 - DNA, 122 bp, Homo sapiens
  misc_feature (61)..(62): /note="This region represents a CpG dinucleotide"
  misc_feature (61)..(61): /note="Nucleotide may be methylated to form 5-methylcytosine"
ttggcttcttctgttgtgttcttagcttccaaaatagtagtctctcctcagagccagacgcgcaatgccatcatgttaatgaggtgcctcatgtgcttcaatagccactgactgatggtacc

SEQ ID NO: 9422 - DNA, 122 bp, Homo sapiens
  misc_feature (61)..(62): /note="This region represents a CpG dinucleotide"
  misc_feature (61)..(61): /note="Nucleotide may be methylated to form 5-methylcytosine"
tataagggcagggctcagatacaatccgagagcaggactaaagcatgagggcggccaaggcggaagggagtagggaaggaagcgccgcgcgtttccaagatacgcaggcgggctcggcgaga

SEQ ID NO: 9423 - DNA, 122 bp, Homo sapiens
  misc_feature (61)..(62): /note="This region represents a CpG dinucleotide"
  misc_feature (61)..(61): /note="Nucleotide may be methylated to form 5-methylcytosine"
gtgcagtaactgccattttgtgaggagctcagtttatttctgtctcgaccacaaagctcacgagaagcacagagcatgcataagctggaggtatgcaaaaagctcataaacactgacttcct

SEQ ID NO: 9424 - DNA, 122 bp, Homo sapiens
  misc_feature (61)..(62): /note="This region represents a CpG dinucleotide"
  misc_feature (61)..(61): /note="Nucleotide may be methylated to form 5-methylcytosine"
atcattacccagcaggtggctcaaaacgacagaagcatgttctctcacagtcctggaggccggaagtccaagatcaagatgacagcaggcctcactccctccaaaggctctaagggagaaac

SEQ ID NO: 9425 - DNA, 122 bp, Homo sapiens
  misc_feature (61)..(62): /note="This region represents a CpG dinucleotide"
  misc_feature (61)..(61): /note="Nucleotide may be methylated to form 5-methylcytosine"
gcattttatgaaatcagtgagaaactccagaaaaaggcttctgcctctttttacgagggtcgtatttggagcaaaggagggaagaaaagcatctgtcaatttgataaatcattttcaggaaa

SEQ ID NO: 9426 - DNA, 122 bp, Homo sapiens
  misc_feature (61)..(62): /note="This region represents a CpG dinucleotide"
  misc_feature (61)..(61): /note="Nucleotide may be methylated to form 5-methylcytosine"
gtaaagcgaaaacaacataaacaggaagtaagcacacaggcagcagtgtgccgatcaaaccgcacccacagccacaggcagtgggccagaggtgacccactagccacagccggccgaccctg

SEQ ID NO: 9427 - DNA, 122 bp, Homo sapiens
  misc_feature (61)..(62): /note="This region represents a CpG dinucleotide"
  misc_feature (61)..(61): /note="Nucleotide may be methylated to form 5-methylcytosine"
aaattttgttatttatttacttcaaaatctcttcaactgaatccaggagtttgcactgcccgtctgtaaagctactgccacttttgctccatctagtggaatattgatttttgcttggtaat

SEQ ID NO: 9428 - DNA, 122 bp, Homo sapiens
  misc_feature (61)..(62): /note="This region represents a CpG dinucleotide"
  misc_feature (61)..(61): /note="Nucleotide may be methylated to form 5-methylcytosine"
gtgagaccctgtctcaaaaaaaaaaaaaaaaaaaaacggaacaaaggaattgattatgatcgaatgtttcccaagaaagagaaattagccttaatgggatcatagccaaaccacaaaacata

SEQ ID NO: 9429 - DNA, 122 bp, Homo sapiens
  misc_feature (61)..(62): /note="This region represents a CpG dinucleotide"
  misc_feature (61)..(61): /note="Nucleotide may be methylated to form 5-methylcytosine"
tcccgctgggtgcggaaccgggtgcaagaggccgaagcgctgccccataaagccgatcttcgccggggccccgcccaggccctaacgaatacatcccattggcaggaaccggcagcaggtcc

SEQ ID NO: 9430 - DNA, 122 bp, Homo sapiens
  misc_feature (61)..(62): /note="This region represents a CpG dinucleotide"
  misc_feature (61)..(61): /note="Nucleotide may be methylated to form 5-methylcytosine"
ttatcagaattattatttaataagggggatagctctagaatttattccagccacagagctcggggaagtggaaaaacatgtctggacatgatgattatggagaactccctttaagggaaaaa

SEQ ID NO: 9431 - DNA, 122 bp, Homo sapiens
  misc_feature (61)..(62): /note="This region represents a CpG dinucleotide"
  misc_feature (61)..(61): /note="Nucleotide may be methylated to form 5-methylcytosine"
gtgtttatacccagcaataaaaagggaaaactgaggatacatgccacaacctggatgaaccgtgaaaacatgctgaaagaaaccagacacaaacgatgacatatatgattccatttatatga

SEQ ID NO: 9432 - DNA, 122 bp, Homo sapiens
  misc_feature (61)..(62): /note="This region represents a CpG dinucleotide"
  misc_feature (61)..(61): /note="Nucleotide may be methylated to form 5-methylcytosine"
tccccatccttcttaggatccaaactttgtctcctatccattacaggctatcaaaactcacgttccaggctttccaatttcgaatcacaagagactgttgctgctaccctgtcaacaacgat

SEQ ID NO: 9433 - DNA, 122 bp, Homo sapiens
  misc_feature (61)..(62): /note="This region represents a CpG dinucleotide"
  misc_feature (61)..(61): /note="Nucleotide may be methylated to form 5-methylcytosine"
gccattgcccttattgggccttgcctcaggagttcctctgtgtatctctggtccagattccggaggaaacctgtttgacttgagtagatgccattgcccttattgggccttgcctcaggagt

SEQ ID NO: 9434 - DNA, 122 bp, Homo sapiens
  misc_feature (61)..(62): /note="This region represents a CpG dinucleotide"
  misc_feature (61)..(61): /note="Nucleotide may be methylated to form 5-methylcytosine"
ttagttattacagctctcttagtcagtctcctcataactgagtcactagattaactgatgcgtgctgatgtctgtggaatactgagcacttacagctactacattcatctccagtacgcttg

SEQ ID NO: 9435 - DNA, 122 bp, Homo sapiens
  misc_feature (61)..(62): /note="This region represents a CpG dinucleotide"
  misc_feature (61)..(61): /note="Nucleotide may be methylated to form 5-methylcytosine"
ggcattctccctactttacagacagagaaacagacacagtgagttgagtagactgcccaacgtaactcaggttacgttaagtggctgcaccagggtttaagtttcaacctaggtctcgattt

SEQ ID NO: 9436 - DNA, 122 bp, Homo sapiens
  misc_feature (61)..(62): /note="This region represents a CpG dinucleotide"
  misc_feature (61)..(61): /note="Nucleotide may be methylated to form 5-methylcytosine"
caagaacctatctcaaaaaaaaaaaaaaaaaaaaaaaaaaaaaaaaagaatgagatcaagcggtaagtaatgacatgtggccttgtttctgctaagtcagacctgccctcccctacgttact

SEQ ID NO: 9437 - DNA, 122 bp, Homo sapiens
  misc_feature (61)..(62): /note="This region represents a CpG dinucleotide"
  misc_feature (61)..(61): /note="Nucleotide may be methylated to form 5-methylcytosine"
tgggtactcacaggcctttgaagcttgcaagacctctgttcttatgtaacagccaacagccgccatctgttacacactcaccacatgcctggcactggggaggcctcctgtgtggattacgt

SEQ ID NO: 9438 - DNA, 122 bp, Homo sapiens
  misc_feature (61)..(62): /note="This region represents a CpG dinucleotide"
  misc_feature (61)..(61): /note="Nucleotide may be methylated to form 5-methylcytosine"
ccaaaagaatgtggcagaagtgggcatcatgccagttgacagcttccaattttacctcttcgagctcactcttgggatgctctctctcagaatccagctaccatgttctgagaagcccaagc

SEQ ID NO: 9439 - DNA, 122 bp, Homo sapiens
  misc_feature (61)..(62): /note="This region represents a CpG dinucleotide"
  misc_feature (61)..(61): /note="Nucleotide may be methylated to form 5-methylcytosine"
atcctggcatctctacttctgaagatgccattccttttcctcagagggaatgggcttctccgcctccctctccaataggtgtggcaatcagctgtcttccagttccctttcactgcatcagc

SEQ ID NO: 9440 - DNA, 122 bp, Homo sapiens
  misc_feature (61)..(62): /note="This region represents a CpG dinucleotide"
  misc_feature (61)..(61): /note="Nucleotide may be methylated to form 5-methylcytosine"
gcaagggaagctgtagtgaagagtgttgctgccatttggctggtgctgaaactgcacctacgtggaggttatcactgtgggtggaaatggtttctattgttctttactgctagggtgatttt

SEQ ID NO: 9441 - DNA, 122 bp, Homo sapiens
  misc_feature (61)..(62): /note="This region represents a CpG dinucleotide"
  misc_feature (61)..(61): /note="Nucleotide may be methylated to form 5-methylcytosine"
aaagccaaagtcacgaagtggctgtggcttcccagcagcaggttctccagtaggagcacacgctcttcagactctggcattcatttccttaactcactcactttaaggccttctgggtgaat

SEQ ID NO: 9442 - DNA, 122 bp, Homo sapiens
  misc_feature (61)..(62): /note="This region represents a CpG dinucleotide"
  misc_feature (61)..(61): /note="Nucleotide may be methylated to form 5-methylcytosine"
tattttgaatgtctggtgcacaggaaggaaccgataaaaatagaattacaatgcccttaccgccaaagtagcaaaggagctgattaagattgatgtctgaataaatatacaatagcaggccc

SEQ ID NO: 9443 - DNA, 122 bp, Homo sapiens
  misc_feature (61)..(62): /note="This region represents a CpG dinucleotide"
  misc_feature (61)..(61): /note="Nucleotide may be methylated to form 5-methylcytosine"
gtcacccacttcctctttccacaactgtggaagtaggcgttacttgacattctgaaagtacgtcagaaagtaatcctgacagcactttctgtaattggtgtgttgttgctgtgcttcatgct

SEQ ID NO: 9444 - DNA, 122 bp, Homo sapiens
  misc_feature (61)..(62): /note="This region represents a CpG dinucleotide"
  misc_feature (61)..(61): /note="Nucleotide may be methylated to form 5-methylcytosine"
aatcttcgaattgccgcactgtggcatggtattagtatcctctctatgatgggctgattacgaggtaaagctgcattggctgaccgctctatcaggtgtctgctctaataactccaagcatg

SEQ ID NO: 9445 - DNA, 122 bp, Homo sapiens
  misc_feature (61)..(62): /note="This region represents a CpG dinucleotide"
  misc_feature (61)..(61): /note="Nucleotide may be methylated to form 5-methylcytosine"
ctggcccagatactttttcttgagtaggaatttcgagtcaccctgaacattgcatgccttcgtagtggggaagacaataggaaaccacaggctgtaggctaaaatgggttgtgtttcttgta

SEQ ID NO: 9446 - DNA, 122 bp, Homo sapiens
  misc_feature (61)..(62): /note="This region represents a CpG dinucleotide"
  misc_feature (61)..(61): /note="Nucleotide may be methylated to form 5-methylcytosine"
aaacaaccaaatgggataatacactagcacatactttgtgctgtctgaaattaagtagcacggtgtggcaatcaaatgcgcaagacttagccggtttagcaagtatcagaaacttaggtgaa

SEQ ID NO: 9447 - DNA, 122 bp, Homo sapiens
  misc_feature (61)..(62): /note="This region represents a CpG dinucleotide"
  misc_feature (61)..(61): /note="Nucleotide may be methylated to form 5-methylcytosine"
atgatcctccacgcctgaccaggattacaacttcattcttccagctgctcagatctaaaccgccagagtcatccccgagtcctctcttaaactccacatccgccctgtgggtatccgcctgt

SEQ ID NO: 9448 - DNA, 122 bp, Homo sapiens
  misc_feature (61)..(62): /note="This region represents a CpG dinucleotide"
  misc_feature (61)..(61): /note="Nucleotide may be methylated to form 5-methylcytosine"
gtcatcgcctttctttttgtggcctgaaacgatgtcatcaattcgcagtagcagaactgccgtctaggagaaaaaccacagatgcaaagaggtcagcagagaaggaaaggacacttttcttt

SEQ ID NO: 9449 - DNA, 122 bp, Homo sapiens
  misc_feature (61)..(62): /note="This region represents a CpG dinucleotide"
  misc_feature (61)..(61): /note="Nucleotide may be methylated to form 5-methylcytosine"
tctccatgtctgcgtgggttttctctgggtccttcagtttcctcccatgtcccaaagctgcgcacatgaggtgaacaggcgtgcctacatggtccctgtgtgagtgagtgtgggtgtacatg

SEQ ID NO: 9450 - DNA, 122 bp, Homo sapiens
  misc_feature (61)..(62): /note="This region represents a CpG dinucleotide"
  misc_feature (61)..(61): /note="Nucleotide may be methylated to form 5-methylcytosine"
ttaatgaaactactgagtgatgggaggaaaaaaggagagaatgctacttaacaggttcagcgatagcctaatagtagaattaggtacttaatctgggttctcaaggatgaatccgtatttga

SEQ ID NO: 9451 - DNA, 122 bp, Homo sapiens
  misc_feature (61)..(62): /note="This region represents a CpG dinucleotide"
  misc_feature (61)..(61): /note="Nucleotide may be methylated to form 5-methylcytosine"
gctaatgctttctgtgatggacaactaggaacaagctcaagctacaaagcaaacagagatcgtaattcatttttgaaatcaataaagggatgatcaagtggcagaggaggagttgttagctg

SEQ ID NO: 9452 - DNA, 122 bp, Homo sapiens
  misc_feature (61)..(62): /note="This region represents a CpG dinucleotide"
  misc_feature (61)..(61): /note="Nucleotide may be methylated to form 5-methylcytosine"
agacccctaccagcctgtggcccagctgggggcaggactccggggcagggtgagtccctgcgtgacctgattctctgtgggcaggccgggcagggtggctgcagggcggcggagcctgtgct

SEQ ID NO: 9453 - DNA, 122 bp, Homo sapiens
  misc_feature (61)..(62): /note="This region represents a CpG dinucleotide"
  misc_feature (61)..(61): /note="Nucleotide may be methylated to form 5-methylcytosine"
tacctccctctcccttccacataggcattttatctcccatcaagaatgtgaatacatgtacgtattcagaggaaaagagttcatgcagcctactacagtataattattaatatcttactccc

SEQ ID NO: 9454 - DNA, 122 bp, Homo sapiens
  misc_feature (61)..(62): /note="This region represents a CpG dinucleotide"
  misc_feature (61)..(61): /note="Nucleotide may be methylated to form 5-methylcytosine"
tctttcttaagcctccttgttcctcagagcaggcagtgcaggctatgggattccccaggacggagaggcctctgccccggctgcttgatgcaaggctcagagaggccactaggtttctacca

SEQ ID NO: 9455 - DNA, 122 bp, Homo sapiens
  misc_feature (61)..(62): /note="This region represents a CpG dinucleotide"
  misc_feature (61)..(61): /note="Nucleotide may be methylated to form 5-methylcytosine"
aggctcggtgcaaaacccatcttctaaagggcagctggcctcttctagcggggcagagatcgttcagctttgacccctttgtaattatggcaggagtccagggccccacaccagccacccta

SEQ ID NO: 9456 - DNA, 122 bp, Homo sapiens
  misc_feature (61)..(62): /note="This region represents a CpG dinucleotide"
  misc_feature (61)..(61): /note="Nucleotide may be methylated to form 5-methylcytosine"
ccctgtggatcctctggttggaagcatagccactcagtatttgaccaacagagcagaacacgacaggatagccagacagaggaccaagagatacgcaacgtaattcacataatttgtatgca

SEQ ID NO: 9457 - DNA, 122 bp, Homo sapiens
  misc_feature (61)..(62): /note="This region represents a CpG dinucleotide"
  misc_feature (61)..(61): /note="Nucleotide may be methylated to form 5-methylcytosine"
gatgacgaactttgaatgtgaagatgtaaataaatcctggctcggcaaccctgcctgtgacgcgacttggagcatatctctgcactcagctcctgagtctatttcctcacgtgggaaaatgg

SEQ ID NO: 9458 - DNA, 122 bp, Homo sapiens
  misc_feature (61)..(62): /note="This region represents a CpG dinucleotide"
  misc_feature (61)..(61): /note="Nucleotide may be methylated to form 5-methylcytosine"
acaacaatgaaaaccgggctactgctgttgctaaggctgtagtagcaacatggtgtctttcgcaggtggacttctttgccccttaggtaaacagtcctgcaagccaggaatagaggctgtgt

SEQ ID NO: 9459 - DNA, 122 bp, Homo sapiens
  misc_feature (61)..(62): /note="This region represents a CpG dinucleotide"
  misc_feature (61)..(61): /note="Nucleotide may be methylated to form 5-methylcytosine"
gttcctgggaggactaggttttggaatttcccctaaacatatatcctctcagggccgaatcggacctttggcgtttcctgttctgtactgggaaccagaagctttctgaattatctcatagg

SEQ ID NO: 9460 - DNA, 122 bp, Homo sapiens
  misc_feature (61)..(62): /note="This region represents a CpG dinucleotide"
  misc_feature (61)..(61): /note="Nucleotide may be methylated to form 5-methylcytosine"
acacacacacaaacacacacacgcatgcacacacatgcacacctcccccccatacacacacggtgatccagaaaacaggaaagagggccatcagtaaatctagaaactgtgagcaatttcta

SEQ ID NO: 9461 - DNA, 122 bp, Homo sapiens
  misc_feature (61)..(62): /note="This region represents a CpG dinucleotide"
  misc_feature (61)..(61): /note="Nucleotide may be methylated to form 5-methylcytosine"
ctggactagtacatgtccgcagcgggccctgggaggctgcagaatgggaagttgttaaaacgtcaactgcagcagagattccaaagtgacctaaaggaaattcgaatttcttctgccccatt

SEQ ID NO: 9462 - DNA, 122 bp, Homo sapiens
  misc_feature (61)..(62): /note="This region represents a CpG dinucleotide"
  misc_feature (61)..(61): /note="Nucleotide may be methylated to form 5-methylcytosine"
atccaactatgcttttactcttctgcctgaaagtgacatacctcacttctgctcatacttcgctggctaaaccacatcaaaatggcatgcctgagttaaatagtgcaggaatgtataacctt

SEQ ID NO: 9463 - DNA, 122 bp, Homo sapiens
  misc_feature (61)..(62): /note="This region represents a CpG dinucleotide"
  misc_feature (61)..(61): /note="Nucleotide may be methylated to form 5-methylcytosine"
agagatgaataaattgatgatacattgaatattgttcactgacctgcactttaatgtttacgacaaaattttataatgaaggaggtattttggttagtgggatagaaggattcgtatttgta

SEQ ID NO: 9464 - DNA, 122 bp, Homo sapiens
  misc_feature (61)..(62): /note="This region represents a CpG dinucleotide"
  misc_feature (61)..(61): /note="Nucleotide may be methylated to form 5-methylcytosine"
aaccaccccagaacaacaatgaaggaaaattccagaatgacaactgtacagcaagtctagcgagcagccagtccagattgaaataagaggaaggaaggctctgggacaaaaactccaaagaa

SEQ ID NO: 9465 - DNA, 122 bp, Homo sapiens
  misc_feature (61)..(62): /note="This region represents a CpG dinucleotide"
  misc_feature (61)..(61): /note="Nucleotide may be methylated to form 5-methylcytosine"
gctgcatgacgactactcccgccgcgtctccaggagcactgagcaggacagcaggcggggcggggcggtcatgcatgggaccactgcaacctgcaccgtggcccccggtttcggctcagcca

SEQ ID NO: 9466 - DNA, 122 bp, Homo sapiens
  misc_feature (61)..(62): /note="This region represents a CpG dinucleotide"
  misc_feature (61)..(61): /note="Nucleotide may be methylated to form 5-methylcytosine"
tttattcccggctgtccttccagtccggaagcctgaagtggacaccgaggaactgcggtgcggaaactaagatagtactgggaagacttgggttctggccagccaagattaccaaaaaaaaa

SEQ ID NO: 9467 - DNA, 122 bp, Homo sapiens
  misc_feature (61)..(62): /note="This region represents a CpG dinucleotide"
  misc_feature (61)..(61): /note="Nucleotide may be methylated to form 5-methylcytosine"
tacctctgaatggccacccttagaccctgtgatccatcctctctcctagctgagtaaatccgggtctctaggatgccagaggcagcgcacacaagctgggaaatcctcagggctcctaccag

SEQ ID NO: 9468 - DNA, 122 bp, Homo sapiens
  misc_feature (61)..(62): /note="This region represents a CpG dinucleotide"
  misc_feature (61)..(61): /note="Nucleotide may be methylated to form 5-methylcytosine"
acagacaaggaaaacacatcagagaggttttgaaattgcctggcatcatcaactagaaaacggtcagcctgggattcaaacacagggagtgtgactccagaatccacactcccaacagcaag

SEQ ID NO: 9469 - DNA, 122 bp, Homo sapiens
  misc_feature (61)..(62): /note="This region represents a CpG dinucleotide"
  misc_feature (61)..(61): /note="Nucleotide may be methylated to form 5-methylcytosine"
tccgtgcagtgaagatatattaggcaaatgactgtttcctataatctttccttttttttccgtttcactttatgttttatgtttcctgataaagtagatttgatcatgcaaacacatacaac

SEQ ID NO: 9470 - DNA, 122 bp, Homo sapiens
  misc_feature (61)..(62): /note="This region represents a CpG dinucleotide"
  misc_feature (61)..(61): /note="Nucleotide may be methylated to form 5-methylcytosine"
ctccttggagccagcttgaacctttttctcacagatgctttgtgcttcctgtcccctaaccgccttactcacccttccccatgctcaacttttggaaagtccccttggcctcacttgtttga

SEQ ID NO: 9471 - DNA, 122 bp, Homo sapiens
  misc_feature (61)..(62): /note="This region represents a CpG dinucleotide"
  misc_feature (61)..(61): /note="Nucleotide may be methylated to form 5-methylcytosine"
ttcttcctgtacctgtcaagtgttcctagacggtcatataccaattacacttcaccatttcgccccttagcgcgcatgcatgagtccatttatccaactcttgagatcttatcaggaagctg

SEQ ID NO: 9472 - DNA, 122 bp, Homo sapiens
  misc_feature (61)..(62): /note="This region represents a CpG dinucleotide"
  misc_feature (61)..(61): /note="Nucleotide may be methylated to form 5-methylcytosine"
gagattctctcacctcagcctcctgagtagtttgagattacaggtggccaccatcaagcacggctaattttttgtatttttagtagagatggtgtttcgccatgttggccaggctggtctcg

SEQ ID NO: 9473 - DNA, 122 bp, Homo sapiens
  misc_feature (61)..(62): /note="This region represents a CpG dinucleotide"
  misc_feature (61)..(61): /note="Nucleotide may be methylated to form 5-methylcytosine"
tgttgtaaggattgaatgagttaataaacagcaagtgcttagaagaaagggcctggctcacgttaaatgctctgtgagcattagctattagtattgttgttgctgctgttgttgttgttaca

SEQ ID NO: 9474 - DNA, 122 bp, Homo sapiens
  misc_feature (61)..(62): /note="This region represents a CpG dinucleotide"
  misc_feature (61)..(61): /note="Nucleotide may be methylated to form 5-methylcytosine"
tatggccaccctgactaaagcgtgacctccttttgctgcacgttttattcttagagcttgcgttcagcgccacaccaccacctatcacactggagagacaaatagttcatatctgccaaatc

SEQ ID NO: 9475 - DNA, 122 bp, Homo sapiens
  misc_feature (61)..(62): /note="This region represents a CpG dinucleotide"
  misc_feature (61)..(61): /note="Nucleotide may be methylated to form 5-methylcytosine"
gttggtgagaaagttggcaggagctggtcaggcaagaattgatttcctgagtgtccactgcgtgctcctctctgtgggaggcacaggtagatgcacggtcacagctccactgggcatgtgca

SEQ ID NO: 9476 - DNA, 122 bp, Homo sapiens
  misc_feature (61)..(62): /note="This region represents a CpG dinucleotide"
  misc_feature (61)..(61): /note="Nucleotide may be methylated to form 5-methylcytosine"
atttatttccctatctatgttaataagggaggagacagggtgagggcaagaagagggaaacgaaaatgaaagagctcagatatgagcatttggtaactggtttgaacgcaattagttggttg

SEQ ID NO: 9477 - DNA, 122 bp, Homo sapiens
  misc_feature (61)..(62): /note="This region represents a CpG dinucleotide"
  misc_feature (61)..(61): /note="Nucleotide may be methylated to form 5-methylcytosine"
aaggagtggacttagcagctgagtcaaacggggaggagggagttggtgttctggtactcccgagctcctaagctcctaagctatgcagaattacagttctttggtaacagaaaaaacaaagt

SEQ ID NO: 9478 - DNA, 122 bp, Homo sapiens
  misc_feature (61)..(62): /note="This region represents a CpG dinucleotide"
  misc_feature (61)..(61): /note="Nucleotide may be methylated to form 5-methylcytosine"
gtctgattttctcctcctctttgtgtacccgacggtgttgctgtgagctcaggaccatcccggcggctgtggatgggatcatcgtgtgtgtatggccacagccctccgcctcgctcgctcgg

SEQ ID NO: 9479 - DNA, 122 bp, Homo sapiens
  misc_feature (61)..(62): /note="This region represents a CpG dinucleotide"
  misc_feature (61)..(61): /note="Nucleotide may be methylated to form 5-methylcytosine"
aaattaaaaatgtctggtttttaatccaataatattttcctgaacacattaaggctattacgtacacatggcatgccatctctgcagtttggagaattagtaagagagtcctactcttgcaa

SEQ ID NO: 9480 - DNA, 122 bp, Homo sapiens
  misc_feature (61)..(62): /note="This region represents a CpG dinucleotide"
  misc_feature (61)..(61): /note="Nucleotide may be methylated to form 5-methylcytosine"
ccatgtttttaggggattctgtgctttcccacctaaaaatcatagcactgattcctgtcacggtgctaggcaggagagggtcataccaggtcagaaacacttcttcttctgtgtgcacccat

SEQ ID NO: 9481 - DNA, 122 bp, Homo sapiens
  misc_feature (61)..(62): /note="This region represents a CpG dinucleotide"
  misc_feature (61)..(61): /note="Nucleotide may be methylated to form 5-methylcytosine"
cagccacttagaagtgttataaaatgtagtacaacccaccccgctgccttcagaacaggacgcaaacaaggctgtagctctgtcttgcttggacaattctctactggcacctaccaagctgc

SEQ ID NO: 9482 - DNA, 122 bp, Homo sapiens
  misc_feature (61)..(62): /note="This region represents a CpG dinucleotide"
  misc_feature (61)..(61): /note="Nucleotide may be methylated to form 5-methylcytosine"
gggtggggtcataggagccatccttcagctttgcctggggtctctggtggagggcagttccgtcaacaaaagccagggtgggatcaggccaacttggtgtgggttggaggactcaggccttg

SEQ ID NO: 9483 - DNA, 122 bp, Homo sapiens
  misc_feature (61)..(62): /note="This region represents a CpG dinucleotide"
  misc_feature (61)..(61): /note="Nucleotide may be methylated to form 5-methylcytosine"
acatgagttattttattagcagagcatagaaacatctttgagaattggctagaatttccacggtggtttatgcaagtaagccctgagctatttgctaaatatttgagcaaacagaacattgt

SEQ ID NO: 9484 - DNA, 122 bp, Homo sapiens
  misc_feature (61)..(62): /note="This region represents a CpG dinucleotide"
  misc_feature (61)..(61): /note="Nucleotide may be methylated to form 5-methylcytosine"
caataatattacctgtcttgtcacctgcagattgttttgcagatcggaacagataatatgcgcagtgtcacaaaaatataaggaatgagtgtttctattgcaccaaaggaaattactcatta

SEQ ID NO: 9485 - DNA, 122 bp, Homo sapiens
  misc_feature (61)..(62): /note="This region represents a CpG dinucleotide"
  misc_feature (61)..(61): /note="Nucleotide may be methylated to form 5-methylcytosine"
agcagagaattcatcagtagggcaatttctgccggctgttggagaatcagcacatgccagcgtgagacactataatgaatcattatcgttagtaattcataacggattcattccaagaaaat

SEQ ID NO: 9486 - DNA, 122 bp, Homo sapiens
  misc_feature (61)..(62): /note="This region represents a CpG dinucleotide"
  misc_feature (61)..(61): /note="Nucleotide may be methylated to form 5-methylcytosine"
tgtttgatttgaactgatgtcacttccaaggaactaggttggagtgtggacatcacagcacgttatagaatctttaagctggtgctcgaaataaactcaatgtgctggaaaggcagaactcc

SEQ ID NO: 9487 - DNA, 122 bp, Homo sapiens
  misc_feature (61)..(62): /note="This region represents a CpG dinucleotide"
  misc_feature (61)..(61): /note="Nucleotide may be methylated to form 5-methylcytosine"
gtgtgtgtgtgcatgctcaagcttgcatcactgtgtgcctgcacacatatgaacacgcatcgtgtctgcctgtctccatactttccagatagagtcccttccaggacctgggtcctttcaca

SEQ ID NO: 9488 - DNA, 122 bp, Homo sapiens
  misc_feature (61)..(62): /note="This region represents a CpG dinucleotide"
  misc_feature (61)..(61): /note="Nucleotide may be methylated to form 5-methylcytosine"
aggcaaaattcctgccttgtaaatacaatataagtaaatgtagctatcataaggataccacggcctattattggcaatgacaaatgagcaggaaaccaaagcccagttggagattaatgact

SEQ ID NO: 9489 - DNA, 122 bp, Homo sapiens
  misc_feature (61)..(62): /note="This region represents a CpG dinucleotide"
  misc_feature (61)..(61): /note="Nucleotide may be methylated to form 5-methylcytosine"
attagcccagggctagttctgaaagtcaaactctgcctggcagaagtaggtgaatgacagcgatcagaggacattgatttttgccagctcttacatgagtcataaatgtgatgatatttgtg

SEQ ID NO: 9490 - DNA, 122 bp, Homo sapiens
  misc_feature (61)..(62): /note="This region represents a CpG dinucleotide"
  misc_feature (61)..(61): /note="Nucleotide may be methylated to form 5-methylcytosine"
cccatctgccctaagaacaaagagcttgtaaaccaataaattgggtggaggccgagagctcggggccgtcagcaagcctccagctccggtcccctggacccgccttttagactcttattctg

SEQ ID NO: 9491 - DNA, 122 bp, Homo sapiens
  misc_feature (61)..(62): /note="This region represents a CpG dinucleotide"
  misc_feature (61)..(61): /note="Nucleotide may be methylated to form 5-methylcytosine"
gttcccccgagacctggctgtttaaaggtgtgcggcacctccccaccttgctgctgctttcgccatgtgacgcgcctgctcccccttctcttccaccaggattgtgggtttcctggggcctc

SEQ ID NO: 9492 - DNA, 122 bp, Homo sapiens
  misc_feature (61)..(62): /note="This region represents a CpG dinucleotide"
  misc_feature (61)..(61): /note="Nucleotide may be methylated to form 5-methylcytosine"
ggatttatcttagcaccgattaaggcttacccacaaggcaaggctctttctgtgtcctcacgctgtcactcctaaaactttccagaactacaagtgacccagctctcagtcaggaagggctc

SEQ ID NO: 9493 - DNA, 122 bp, Homo sapiens
  misc_feature (61)..(62): /note="This region represents a CpG dinucleotide"
  misc_feature (61)..(61): /note="Nucleotide may be methylated to form 5-methylcytosine"
tgccccagagggcctggccaactggttgggttgggatgaggcctcggttttgagcctctgcggtggcaattccagatataccaggaggccgaaactgctcctggaggctggggcaggagagg

SEQ ID NO: 9494 - DNA, 122 bp, Homo sapiens
  misc_feature (61)..(62): /note="This region represents a CpG dinucleotide"
  misc_feature (61)..(61): /note="Nucleotide may be methylated to form 5-methylcytosine"
gcaaccctaaggcaaatttgcatcctccctatagtatcacaggcaatgcacttttgaaagcgccacctcctggctggaggtcaaccaacacaaaacaaaaatataaccaaggacccaaggac

SEQ ID NO: 9495 - DNA, 122 bp, Homo sapiens
  misc_feature (61)..(62): /note="This region represents a CpG dinucleotide"
  misc_feature (61)..(61): /note="Nucleotide may be methylated to form 5-methylcytosine"
gccaggctgggcggggcctgtgtaggtagagggaggagttaaccagcatggaagagagagcgtccaatcagaaagctgagggccaggcactgggccaatggagcaatttggaggggagccaa

SEQ ID NO: 9496 - DNA, 122 bp, Homo sapiens
  misc_feature (61)..(62): /note="This region represents a CpG dinucleotide"
  misc_feature (61)..(61): /note="Nucleotide may be methylated to form 5-methylcytosine"
gcaaactaacaatttacccttacagtatctggttacagccagcaatttttcacaaaaatacgcttatctcctcccttcccatcatttaaaagggcaagcagttaaggtcacagtttaaaagt

SEQ ID NO: 9497 - DNA, 122 bp, Homo sapiens
  misc_feature (61)..(62): /note="This region represents a CpG dinucleotide"
  misc_feature (61)..(61): /note="Nucleotide may be methylated to form 5-methylcytosine"
gggacaatggtgggaccctctgcaaactgcccccagacagactcaatgcttaaagcacagcgcagaggctcacagggcctgtcttgtcatgtatgaacaccagggaccttcagagaagggct

SEQ ID NO: 9498 - DNA, 122 bp, Homo sapiens
  misc_feature (61)..(62): /note="This region represents a CpG dinucleotide"
  misc_feature (61)..(61): /note="Nucleotide may be methylated to form 5-methylcytosine"
gccaagcgtggaaaggctgtcttttccctggatgatgtataactaagcaggagagagcttcgagtgggttcaccacatcagccaccactcctgcttctgagcacagggtgctctcctcttga

SEQ ID NO: 9499 - DNA, 122 bp, Homo sapiens
  misc_feature (61)..(62): /note="This region represents a CpG dinucleotide"
  misc_feature (61)..(61): /note="Nucleotide may be methylated to form 5-methylcytosine"
ctttaaatctctattgattggcagcttcctgaaatacagagtcagagagcgtgtccaccacgtcctgagtttggtaccaacccaggtgctgatggaaattccaagtagggagaaaacgtcct

SEQ ID NO: 9500 - DNA, 122 bp, Homo sapiens
  misc_feature (61)..(62): /note="This region represents a CpG dinucleotide"
  misc_feature (61)..(61): /note="Nucleotide may be methylated to form 5-methylcytosine"
ttccaactatttcaaaaggtaaaattcattcttagctcccaggttgtccaaaaacagacgcgcaggatggccaagcaccagagtttatcgtttgcccataataatcgggttgattcggccaa

SEQ ID NO: 9501 - DNA, 122 bp, Homo sapiens
  misc_feature (61)..(62): /note="This region represents a CpG dinucleotide"
  misc_feature (61)..(61): /note="Nucleotide may be methylated to form 5-methylcytosine"
ggagcaggtatctaagagcaacgaaactaccagaaacaaaatacgacgtcgcttttcatacgaccagcctgatgggccaaagtggtggacaggccaatccataatccattaataaccattaa

SEQ ID NO: 9502 - DNA, 122 bp, Homo sapiens
  misc_feature (61)..(62): /note="This region represents a CpG dinucleotide"
  misc_feature (61)..(61): /note="Nucleotide may be methylated to form 5-methylcytosine"
tctagctcctgcttaactatttcctttggcttgagtgccttgaggtaaatctaaggtcaacgtctagctgagtcaatgtacaatggtgacacagcaacacatttaagacatctggtaagcag

SEQ ID NO: 9503 - DNA, 122 bp, Homo sapiens
  misc_feature (61)..(62): /note="This region represents a CpG dinucleotide"
  misc_feature (61)..(61): /note="Nucleotide may be methylated to form 5-methylcytosine"
taattaaccgttgggatttaccataaccatttagtaacagtctaaaggtatagtattttacggtggtgtttataatgttaaaagcgagaaaaatatggatcaaatatgtattttactaaaaa

SEQ ID NO: 9504 - DNA, 122 bp, Homo sapiens
  misc_feature (61)..(62): /note="This region represents a CpG dinucleotide"
  misc_feature (61)..(61): /note="Nucleotide may be methylated to form 5-methylcytosine"
tgtgaatctggctgatgccctacagcccagtgaaaccagacctctctattggacagaattcgtttgcatctctaccaaacaaaaatcctttgccactcctcagtcttccacaggttagcagg

SEQ ID NO: 9505 - DNA, 122 bp, Homo sapiens
  misc_feature (61)..(62): /note="This region represents a CpG dinucleotide"
  misc_feature (61)..(61): /note="Nucleotide may be methylated to form 5-methylcytosine"
cttgaatgcagaggagtacatttgttcatttttacaattattctattatttatactgaggcgtctttgagaggatgatatatatatggggagaagtagttaccccttggacaaaagagacaa

SEQ ID NO: 9506 - DNA, 122 bp, Homo sapiens
  misc_feature (61)..(62): /note="This region represents a CpG dinucleotide"
  misc_feature (61)..(61): /note="Nucleotide may be methylated to form 5-methylcytosine"
gtctttgcctcaacttcaaaaatgcacagttgttgagagcctggaagagacattcaggaacgggctgcaacaagccttgctctggtgtggtcctgcttatccaattgttgctcaataatgtc

SEQ ID NO: 9507 - DNA, 122 bp, Homo sapiens
  misc_feature (61)..(62): /note="This region represents a CpG dinucleotide"
  misc_feature (61)..(61): /note="Nucleotide may be methylated to form 5-methylcytosine"
ccacttccactcatatcccattggccagactagtcacatggccattccaagtgcaaaggacgctgggaaatgcagagaaactcaaggctactgataagcatagagtcacagctgcaatcatc

SEQ ID NO: 9508 - DNA, 122 bp, Homo sapiens
  misc_feature (61)..(62): /note="This region represents a CpG dinucleotide"
  misc_feature (61)..(61): /note="Nucleotide may be methylated to form 5-methylcytosine"
cagcaagattattttgtcagcaacatttggatcccattggtgatgagagacatgtgggcccggcaaggagacaattgtggtagtcaagacaggatgtgaataagacataaagaagcgtttca

SEQ ID NO: 9509 - DNA, 122 bp, Homo sapiens
  misc_feature (61)..(62): /note="This region represents a CpG dinucleotide"
  misc_feature (61)..(61): /note="Nucleotide may be methylated to form 5-methylcytosine"
ctttcatacaactcctgggaaagacggttaccgaaacagagcgctaaatcattggctttgcgagctgcacctggtcaatgtcactgtctcctatgaatccacttaccattcagagctcgttt

SEQ ID NO: 9510 - DNA, 122 bp, Homo sapiens
  misc_feature (61)..(62): /note="This region represents a CpG dinucleotide"
  misc_feature (61)..(61): /note="Nucleotide may be methylated to form 5-methylcytosine"
agggtggggaaggagagagatgactactgagacaaagaaaacagaaacctctgctctcaacgggcttgcatcttcttggggttgaaacatctattcccgcctgaagtggtccaagaatcttt

SEQ ID NO: 9511 - DNA, 122 bp, Homo sapiens
  misc_feature (61)..(62): /note="This region represents a CpG dinucleotide"
  misc_feature (61)..(61): /note="Nucleotide may be methylated to form 5-methylcytosine"
ggcacccactgagcccagacatccctgcccagagccacccaccacggcctccccatccaccgtgactcactcgagtgaagccaataccattgcagaaaccacgacccacacacaggcccggc

SEQ ID NO: 9512 - DNA, 122 bp, Homo sapiens
  misc_feature (61)..(62): /note="This region represents a CpG dinucleotide"
  misc_feature (61)..(61): /note="Nucleotide may be methylated to form 5-methylcytosine"
cagcaccgaggaataccctcctctctagaatgtgaggccactgtgtggaggaagacaccacggtgctctactgagccatgaaagtcacgcctgacctaaacagaagactacgtcccctggct

SEQ ID NO: 9513 - DNA, 122 bp, Homo sapiens
  misc_feature (61)..(62): /note="This region represents a CpG dinucleotide"
  misc_feature (61)..(61): /note="Nucleotide may be methylated to form 5-methylcytosine"
aatatgttgctaaaagtttccttttcttcaaataaagcaataactgccatttatgaagcacgtattaggtgccaggtacttcactggccttaactctttgtaactcatgttttcaccgtcac

SEQ ID NO: 9514 - DNA, 122 bp, Homo sapiens
  misc_feature (61)..(62): /note="This region represents a CpG dinucleotide"
  misc_feature (61)..(61): /note="Nucleotide may be methylated to form 5-methylcytosine"
taaaatctgtatgctcaaagagcttcgctgtgtgcatttatgagaacctagtcattaacccgcagaatagtgaatcagccaatagtgtttgcagtccttcagtatttttataattggtgttt

SEQ ID NO: 9515 - DNA, 122 bp, Homo sapiens
  misc_feature (61)..(62): /note="This region represents a CpG dinucleotide"
  misc_feature (61)..(61): /note="Nucleotide may be methylated to form 5-methylcytosine"
tttccactggtagtaattccattcagctactcagacaacacgctcctcggccgaatgggacgacccttcttaagatggaaaatgttacaaaagaaaaaggatgaaggtctgtggcaataaac

SEQ ID NO: 9516 - DNA, 122 bp, Homo sapiens
  misc_feature (61)..(62): /note="This region represents a CpG dinucleotide"
  misc_feature (61)..(61): /note="Nucleotide may be methylated to form 5-methylcytosine"
ccccagctcccctgttcaccccacccatatctgccttgtgcatggcaggaagtggggacacgaaggcaaatcagagccctgtgatcccatcagaacacacggactggcggtgggtggtctct

SEQ ID NO: 9517 - DNA, 122 bp, Homo sapiens
  misc_feature (61)..(62): /note="This region represents a CpG dinucleotide"
  misc_feature (61)..(61): /note="Nucleotide may be methylated to form 5-methylcytosine"
gacagtctgagatagaagcagaactgcagagctagaagactcagagatcattaagaccaacgtaaacatttcacagatgagataatgagtagttgctgaaagagagagctgtttgtggggat

SEQ ID NO: 9518 - DNA, 122 bp, Homo sapiens
  misc_feature (61)..(62): /note="This region represents a CpG dinucleotide"
  misc_feature (61)..(61): /note="Nucleotide may be methylated to form 5-methylcytosine"
caccgcattctggtacagaacccaggagtctgggaattctaaattcgagcctggccttttcgtagcattcatatttgtcaagggaggaggagagaatgtatttaacagtttgtcagcttgag

SEQ ID NO: 9519 - DNA, 122 bp, Homo sapiens
  misc_feature (61)..(62): /note="This region represents a CpG dinucleotide"
  misc_feature (61)..(61): /note="Nucleotide may be methylated to form 5-methylcytosine"
ggagaaaaaaaggatcgtctcagcatcaggctgacctgggtttcagtctagctttggctgcgtgccttggatagtaaattttcctccttgaaccttggcttcttcctccagggagaaaaacc

SEQ ID NO: 9520 - DNA, 122 bp, Homo sapiens
  misc_feature (61)..(62): /note="This region represents a CpG dinucleotide"
  misc_feature (61)..(61): /note="Nucleotide may be methylated to form 5-methylcytosine"
ccggaggctcctcgggacaggaaatagcggtgagccagtgccagcagaagattgtgctcccgcctgggtgtgtggcttattccctggctccattaattcctctccctgagcctcagctttct

SEQ ID NO: 9521 - DNA, 122 bp, Homo sapiens
  misc_feature (61)..(62): /note="This region represents a CpG dinucleotide"
  misc_feature (61)..(61): /note="Nucleotide may be methylated to form 5-methylcytosine"
tataaagccaaaggcaaagctcttagtaacaacctgtttcagctgagacaagctgacctccgcttctgaaattatacttaatcattcaccaaaatagctgcatataataaaccacttaaagc

SEQ ID NO: 9522 - DNA, 122 bp, Homo sapiens
  misc_feature (61)..(62): /note="This region represents a CpG dinucleotide"
  misc_feature (61)..(61): /note="Nucleotide may be methylated to form 5-methylcytosine"
gtacttctcattccatgtcactgtcattcactgccctctcattctctccctctctgcacgcgcagaaccacagagcacagactcgagcaagctaaatcgctatttgcagagcctgtggctgt

SEQ ID NO: 9523 - DNA, 122 bp, Homo sapiens
  misc_feature (61)..(62): /note="This region represents a CpG dinucleotide"
  misc_feature (61)..(61): /note="Nucleotide may be methylated to form 5-methylcytosine"
acaaggacaaaaattagagatactgtcagttgttaatcaagcttggcaatttggggccaacggctacaggagttattgtttggcttcctggaccagtttctagaaacagcggtcagacttcc

SEQ ID NO: 9524 - DNA, 122 bp, Homo sapiens
  misc_feature (61)..(62): /note="This region represents a CpG dinucleotide"
  misc_feature (61)..(61): /note="Nucleotide may be methylated to form 5-methylcytosine"
tggtaggagagagcagaagttttaaacctcatttgaccttcatgaagttgtcaaaatcaccgtggctccgtaagaatgtgagtgcatgttcttattgcaagcctgttttaccaggccacacc

SEQ ID NO: 9525 - DNA, 122 bp, Homo sapiens
  misc_feature (61)..(62): /note="This region represents a CpG dinucleotide"
  misc_feature (61)..(61): /note="Nucleotide may be methylated to form 5-methylcytosine"
agatggcagccagcttggccacttggacgtgcaggttatgcaatgtgagcatcctaataccgtcttcccctcccacagccgccacccggctgcctcaccctggagctgggattgtccagggc

SEQ ID NO: 9526 - DNA, 122 bp, Homo sapiens
  misc_feature (61)..(62): /note="This region represents a CpG dinucleotide"
  misc_feature (61)..(61): /note="Nucleotide may be methylated to form 5-methylcytosine"
ggctgtactaagcggtcgggtttccccgggaatttgatggttcctatagtctgcctgtgtcggaggcttctttggtttggaaggatctgggcaaatgtgttgggttcaggaatggacaaagg

SEQ ID NO: 9527 - DNA, 122 bp, Homo sapiens
  misc_feature (61)..(62): /note="This region represents a CpG dinucleotide"
  misc_feature (61)..(61): /note="Nucleotide may be methylated to form 5-methylcytosine"
atgtcaggtgctgttgtgggcctttgtcactcgagttgtcagtctaggtgtgtgtgtaaacggacatggaataaacaagggctccaagtggaacagcttgttttggccaaaagaagtgagtt

SEQ ID NO: 9528 - DNA, 122 bp, Homo sapiens
  misc_feature (61)..(62): /note="This region represents a CpG dinucleotide"
  misc_feature (61)..(61): /note="Nucleotide may be methylated to form 5-methylcytosine"
tgtgattggctgacaaagggtctttgcccccagtgctaaagatggtcctgctcattcgcacgggaggtgctggaggcttgtcttccagttctctgttatcacacatgattcagaaatatgaa

SEQ ID NO: 9529 - DNA, 122 bp, Homo sapiens
  misc_feature (61)..(62): /note="This region represents a CpG dinucleotide"
  misc_feature (61)..(61): /note="Nucleotide may be methylated to form 5-methylcytosine"
atcaccatctgggatccagtaagctcccccatggggcctaaactagactaagttggtttccgtcactcacagccagaggagtcctgcctaagaaattgggaaagagagcggagaagacaaaa

SEQ ID NO: 9530 - DNA, 122 bp, Homo sapiens
  misc_feature (61)..(62): /note="This region represents a CpG dinucleotide"
  misc_feature (61)..(61): /note="Nucleotide may be methylated to form 5-methylcytosine"
tgtcataactgctgacattcatcttgattactttagttaaaataaatagttatacttgggcggctttcagagaatacatcatagtagatgtaatgctggaaagcaatgggctcttggttttt

SEQ ID NO: 9531 - DNA, 122 bp, Homo sapiens
  misc_feature (61)..(62): /note="This region represents a CpG dinucleotide"
  misc_feature (61)..(61): /note="Nucleotide may be methylated to form 5-methylcytosine"
tacagcaaaaaatatgcattgcctatgccattaatttgccacttggtaaatactacctttcgttactaattatatctctataagaacctagggtaacaataaagtctgagttcactatcctt

SEQ ID NO: 9532 - DNA, 122 bp, Homo sapiens
  misc_feature (61)..(62): /note="This region represents a CpG dinucleotide"
  misc_feature (61)..(61): /note="Nucleotide may be methylated to form 5-methylcytosine"
acacttgatatatcctctgtcattttcattttagcccttctggtagtcataatggtatcacgttgtggctttaatttgcatttctctaatggctaatatagttgagtaccttttttcatatg

SEQ ID NO: 9533 - DNA, 122 bp, Homo sapiens
  misc_feature (61)..(62): /note="This region represents a CpG dinucleotide"
  misc_feature (61)..(61): /note="Nucleotide may be methylated to form 5-methylcytosine"
cagagagtgggggtgggggtttcatgctgccagggcccctcccagttgggactcatgccacgcttaagctgagtaagttaaggactctgcctctggacccccgtcagcacatcctgtgctcc

SEQ ID NO: 9534 - DNA, 122 bp, Homo sapiens
  misc_feature (61)..(62): /note="This region represents a CpG dinucleotide"
  misc_feature (61)..(61): /note="Nucleotide may be methylated to form 5-methylcytosine"
tgaaccctctttaacaggaagtagaggttgaagcaattctgtggctgctattagggaatccgtagactgttcatggaagagtggaaggtgggctttatagcccggtagttatgtacttagac

SEQ ID NO: 9535 - DNA, 122 bp, Homo sapiens
  misc_feature (61)..(62): /note="This region represents a CpG dinucleotide"
  misc_feature (61)..(61): /note="Nucleotide may be methylated to form 5-methylcytosine"
cattggctggggccctttacaagacagatgcacaagacaaaaccgtacaaatttagttaacgtaagttttatttgacacaggagccttcataaggaaatgaagacctgaagtagctgaacct

SEQ ID NO: 9536 - DNA, 122 bp, Homo sapiens
  misc_feature (61)..(62): /note="This region represents a CpG dinucleotide"
  misc_feature (61)..(61): /note="Nucleotide may be methylated to form 5-methylcytosine"
ctcagctatgatgttcactggcccatcactcacctcctgcaggtgcggccgatcaggggccgggattggggacctctatcttagagggttttaggcgaatcctaaatagtgtgtctccacta

SEQ ID NO: 9537 - DNA, 122 bp, Homo sapiens
  misc_feature (61)..(62): /note="This region represents a CpG dinucleotide"
  misc_feature (61)..(61): /note="Nucleotide may be methylated to form 5-methylcytosine"
tgataattgggtgctcacgcatgcgtgtgtgagatgtgtcaccctcaaaccttgttatgacgtcagcacattacccgtctaacatgaacttagaagaagcaaaaccaaaaacaaatccagcc

SEQ ID NO: 9538 - DNA, 122 bp, Homo sapiens
  misc_feature (61)..(62): /note="This region represents a CpG dinucleotide"
  misc_feature (61)..(61): /note="Nucleotide may be methylated to form 5-methylcytosine"
gggatgactccatttttctgggatgacaggtgggaagagccacccaggacttaacaatgacgcttctgtgtgacagactggacagaaatcaagcattctcctgaggccatgacttttatgtt

SEQ ID NO: 9539 - DNA, 122 bp, Homo sapiens
  misc_feature (61)..(62): /note="This region represents a CpG dinucleotide"
  misc_feature (61)..(61): /note="Nucleotide may be methylated to form 5-methylcytosine"
gaagaattacatgacaatgaagtaggcagcagagcagaacacagagaaggcattaagtagcggagacacagatgagctgagtcaccatgacagaacactatagtagggagcagtggatattt

SEQ ID NO: 9540 - DNA, 122 bp, Homo sapiens
  misc_feature (61)..(62): /note="This region represents a CpG dinucleotide"
  misc_feature (61)..(61): /note="Nucleotide may be methylated to form 5-methylcytosine"
agcactcttgtcttaatcctctgttacgtaagtgccaagagaatacagaaatacaggaggcgagatctttgccctgaaggagtttgaaatcaagacaggaacttccgaaagaaggctcaaag

SEQ ID NO: 9541 - DNA, 122 bp, Homo sapiens
  misc_feature (61)..(62): /note="This region represents a CpG dinucleotide"
  misc_feature (61)..(61): /note="Nucleotide may be methylated to form 5-methylcytosine"
attttcttcttagtatatatcctacaagtgtgcaggatagtttgctagatgctaaaacaacgacataaaaaatgacaggagggaaatgcaaataaataaaggacaagccccgaaaagcatta

SEQ ID NO: 9542 - DNA, 122 bp, Homo sapiens
  misc_feature (61)..(62): /note="This region represents a CpG dinucleotide"
  misc_feature (61)..(61): /note="Nucleotide may be methylated to form 5-methylcytosine"
ctctgtctcaaaaaaaaaaaaaaaaaaaaagtatctaaagtgccagaaaaaataatcgggcgcaatggttgtttggcaaccctcattcaggatgttacgacacatttcccaaatattctgct

SEQ ID NO: 9543 - DNA, 122 bp, Homo sapiens
  misc_feature (61)..(62): /note="This region represents a CpG dinucleotide"
  misc_feature (61)..(61): /note="Nucleotide may be methylated to form 5-methylcytosine"
ttggtctgggatatgacctgagcgatgggatttttagaagtttcccaggtgattataatacgaagccaaggttgagaaccacaggtctacagctaatgccacagcccaaagaataagtctat

SEQ ID NO: 9544 - DNA, 122 bp, Homo sapiens
  misc_feature (61)..(62): /note="This region represents a CpG dinucleotide"
  misc_feature (61)..(61): /note="Nucleotide may be methylated to form 5-methylcytosine"
agaatttataaacaggaaaacattttcttcgggttatttctggaaatctcttccaaacatcggagttttcttctaacttaagtctcttcccacctccttcccaggggatctgctgaagggtg

SEQ ID NO: 9545 - DNA, 122 bp, Homo sapiens
  misc_feature (61)..(62): /note="This region represents a CpG dinucleotide"
  misc_feature (61)..(61): /note="Nucleotide may be methylated to form 5-methylcytosine"
tctgtggcttctataattaatctcccagtagaagctgttttagaaagactccagaacaaccgaaagaagtcttttctttgtggaattgttttgggtcttgtgagtggaaacattcagaaaca

SEQ ID NO: 9546 - DNA, 122 bp, Homo sapiens
  misc_feature (61)..(62): /note="This region represents a CpG dinucleotide"
  misc_feature (61)..(61): /note="Nucleotide may be methylated to form 5-methylcytosine"
tggagaagtattctctgctgagaagagattttccatcaggctttacgggaacgcaggtgacgtataccctacagccatggtgctttcctttccggtttcatgcttagcaaagagccctctga

SEQ ID NO: 9547 - DNA, 122 bp, Homo sapiens
  misc_feature (61)..(62): /note="This region represents a CpG dinucleotide"
  misc_feature (61)..(61): /note="Nucleotide may be methylated to form 5-methylcytosine"
ttccctctagtattgtgaagcagattattagatttgagaagatgtgttccacaaatgtctcgaaagagtccaggagtggaggctgctaaatggtttgcttaattctaatgctttatacagat

SEQ ID NO: 9548 - DNA, 122 bp, Homo sapiens
  misc_feature (61)..(62): /note="This region represents a CpG dinucleotide"
  misc_feature (61)..(61): /note="Nucleotide may be methylated to form 5-methylcytosine"
ggggggaaaggtgaagaattgaaatttaaccaatgagttacttatatttctggagagccccggtgttatcctattaaatactttacaatgggatcgcatcgcagactgtaaatgaagaggaa

SEQ ID NO: 9549 - DNA, 122 bp, Homo sapiens
  misc_feature (61)..(62): /note="This region represents a CpG dinucleotide"
  misc_feature (61)..(61): /note="Nucleotide may be methylated to form 5-methylcytosine"
agagtgagtaatattctgaatgaggctacagtgacattatcatgtttgcaacatagctttcgttactaggaaaatttgtgaggcaaatccagactttaccaaaaaataccagtttggaacct

SEQ ID NO: 9550 - DNA, 122 bp, Homo sapiens
  misc_feature (61)..(62): /note="This region represents a CpG dinucleotide"
  misc_feature (61)..(61): /note="Nucleotide may be methylated to form 5-methylcytosine"
attgttacaatctcaaaatattagagtcacttgactattcagctcatagtcctgctaccacgtagggttagacctaaaccacatgaattaaatatcccagaaaatgaaattccacaacctct

SEQ ID NO: 9551 - DNA, 122 bp, Homo sapiens
  misc_feature (61)..(62): /note="This region represents a CpG dinucleotide"
  misc_feature (61)..(61): /note="Nucleotide may be methylated to form 5-methylcytosine"
gaggtgcaaagatgagacactggatcaagaccagggagacaagcctagggcgtacactcacgtagcaaaacacatcaggctatacagtggaaggaagctgaagggcaaaaggtagctcatta

SEQ ID NO: 9552 - DNA, 122 bp, Homo sapiens
  misc_feature (61)..(62): /note="This region represents a CpG dinucleotide"
  misc_feature (61)..(61): /note="Nucleotide may be methylated to form 5-methylcytosine"
ctaacagtgatgctgcaggctttctggacgggacgggacctcagacacaataatccattccgccgtcgccacgcagtgcctttcgaccattcagtttcagcgctgggaggaaggagaggcgt

SEQ ID NO: 9553 - DNA, 122 bp, Homo sapiens
  misc_feature (61)..(62): /note="This region represents a CpG dinucleotide"
  misc_feature (61)..(61): /note="Nucleotide may be methylated to form 5-methylcytosine"
gttatctttgaattcccaggaggtggcccagtgcctggtgcataggaggagctgaagaaacggaagacttcttaaagggatactcgccattcactttgaagcacttctttgtacaacaaatt

SEQ ID NO: 9554 - DNA, 122 bp, Homo sapiens
  misc_feature (61)..(62): /note="This region represents a CpG dinucleotide"
  misc_feature (61)..(61): /note="Nucleotide may be methylated to form 5-methylcytosine"
gcagagatgatgggatagagcagtgccacccaccctgccttgtttaccctgcctccccttcgctgagctgtctctgtccctggctgcctctgaagcttgcttcacgcaatgagatgtcaatg

SEQ ID NO: 9555 - DNA, 122 bp, Homo sapiens
  misc_feature (61)..(62): /note="This region represents a CpG dinucleotide"
  misc_feature (61)..(61): /note="Nucleotide may be methylated to form 5-methylcytosine"
caagctcaacatgtggcaaaggtcggtgagttcctcctgccccagggaccctgtgcccgtcgtgtcaaaactgtcaaacagctccttgagtcgggcctcatgctggtcctgctccacctcat

SEQ ID NO: 9556 - DNA, 122 bp, Homo sapiens
  misc_feature (61)..(62): /note="This region represents a CpG dinucleotide"
  misc_feature (61)..(61): /note="Nucleotide may be methylated to form 5-methylcytosine"
ttttcaatctcagcctcagagcaatgctccaagaacaggaacctaaaggaagccaggctacgagatctggcacttgcatctgctcctggaagccagcctggcctctggaggcctgagaacct

SEQ ID NO: 9557 - DNA, 122 bp, Homo sapiens
  misc_feature (61)..(62): /note="This region represents a CpG dinucleotide"
  misc_feature (61)..(61): /note="Nucleotide may be methylated to form 5-methylcytosine"
atggtctctgcccacacagagctcactctgtggtacaatatacaaacaaatataagatttcgtcaggagcggtgctccctcagtagagggtacttaattgtcatattaccatttacatatgc

SEQ ID NO: 9558 - DNA, 122 bp, Homo sapiens
  misc_feature (61)..(62): /note="This region represents a CpG dinucleotide"
  misc_feature (61)..(61): /note="Nucleotide may be methylated to form 5-methylcytosine"
tttagccacttccccgacagcttcaacagaaagtctctctgaaggattcgattggcttggcgtgggtccagtgcccagccctggggtattcaccatgccaatggactcccaatactggatct

SEQ ID NO: 9559 - DNA, 122 bp, Homo sapiens
  misc_feature (61)..(62): /note="This region represents a CpG dinucleotide"
  misc_feature (61)..(61): /note="Nucleotide may be methylated to form 5-methylcytosine"
cagaccaggaattgaatcctgcctctgcagcttacaaactgcacaccatctatctgtttacgaaaccactgaaagcttccttgtttcatctgttcatgaggatagtattttttacctcacgg

SEQ ID NO: 9560 - DNA, 122 bp, Homo sapiens
  misc_feature (61)..(62): /note="This region represents a CpG dinucleotide"
  misc_feature (61)..(61): /note="Nucleotide may be methylated to form 5-methylcytosine"
ttgtgggttctggcaagtccaaaatctttagagcaagttggaaattctggtaagagctgacgttgcagtattgcatctgaaggttgaaaactcaggcagaatgtctatgttgctgtctggtg

SEQ ID NO: 9561 - DNA, 122 bp, Homo sapiens
  misc_feature (61)..(62): /note="This region represents a CpG dinucleotide"
  misc_feature (61)..(61): /note="Nucleotide may be methylated to form 5-methylcytosine"
acgcacacaatggaagacatcactgtgcttgtgaaacctgtgttgagagcagacagatggcggttatcaaatactttggcactcatacacaggagacagttacatctcagaggagtgtaact

SEQ ID NO: 9562 - DNA, 122 bp, Homo sapiens
  misc_feature (61)..(62): /note="This region represents a CpG dinucleotide"
  misc_feature (61)..(61): /note="Nucleotide may be methylated to form 5-methylcytosine"
gtggaaaaggctgacaagtttcatttccctgaccttggacagccctcctgatgcagggagcgcccatccctggggagcactgcctctccaggagcctgaacttccttctttttggttcagga

SEQ ID NO: 9563 - DNA, 122 bp, Homo sapiens
  misc_feature (61)..(62): /note="This region represents a CpG dinucleotide"
  misc_feature (61)..(61): /note="Nucleotide may be methylated to form 5-methylcytosine"
tagcaaagcaagtgttgaaacttaacactgaatactaaactgattccctaccggatctgccggaagagaagcatgcagccatttgggaagctgagggtcaaggtcatttatattccaggtat

SEQ ID NO: 9564 - DNA, 122 bp, Homo sapiens
  misc_feature (61)..(62): /note="This region represents a CpG dinucleotide"
  misc_feature (61)..(61): /note="Nucleotide may be methylated to form 5-methylcytosine"
tagtcatgacttagaacttataactcatgttcggaactgtccatgttcacgcacaggggccgtatcactccgccagagctgccctgggtgccggtgtgcagaggggtccgagagtgactgtc

SEQ ID NO: 9565 - DNA, 122 bp, Homo sapiens
  misc_feature (61)..(62): /note="This region represents a CpG dinucleotide"
  misc_feature (61)..(61): /note="Nucleotide may be methylated to form 5-methylcytosine"
tctatgtgtctcattttcctaatctatcaagtggggataataatggcacagtttctatctcgtagagttgatgaagagatatgatggttataattcagagtctgtcagataaaaagcattta

SEQ ID NO: 9566 - DNA, 122 bp, Homo sapiens
  misc_feature (61)..(62): /note="This region represents a CpG dinucleotide"
  misc_feature (61)..(61): /note="Nucleotide may be methylated to form 5-methylcytosine"
aggtgggctgatggacatattaattggttataagtgttatttaacaagagtaggcttcttcgtatatgaatacctgtccaaggaaccaggatacttatgacagctgggcaggaaccctgatc

SEQ ID NO: 9567 - DNA, 122 bp, Homo sapiens
  misc_feature (61)..(62): /note="This region represents a CpG dinucleotide"
  misc_feature (61)..(61): /note="Nucleotide may be methylated to form 5-methylcytosine"
tacaaccgcaaaagataatctatagaagctcagccattccaacaattcacacagtaccttcgtgcctggcaggttgcaattctgtcttgctttggcaaatgagtcagtcagaagccagaaag

SEQ ID NO: 9568 - DNA, 122 bp, Homo sapiens
  misc_feature (61)..(62): /note="This region represents a CpG dinucleotide"
  misc_feature (61)..(61): /note="Nucleotide may be methylated to form 5-methylcytosine"
cttgttttctacaattgattcagaacataagtgcctatgcataaaaaggagaaagagacacgtaattaatatcggtcacaaaggattagcccactgctgggccatccaggagaccttgacca

SEQ ID NO: 9569 - DNA, 122 bp, Homo sapiens
  misc_feature (61)..(62): /note="This region represents a CpG dinucleotide"
  misc_feature (61)..(61): /note="Nucleotide may be methylated to form 5-methylcytosine"
aaagttcagcaaccacatgcaaaacaaaccctccgtgagggcagcaagtctccgtgaggacggctgggattggctgcacagcaaagccaggagaggctccatgaggagaacagcattcagag

SEQ ID NO: 9570 - DNA, 122 bp, Homo sapiens
  misc_feature (61)..(62): /note="This region represents a CpG dinucleotide"
  misc_feature (61)..(61): /note="Nucleotide may be methylated to form 5-methylcytosine"
tgagctcagatgaggaattcgacagtgtctacgatccctcgtccattgcatcactgcttacggagagcaacctacagaccagctcctgttagctcgtggtcctcaaggactcagaaaccagg

SEQ ID NO: 9571 - DNA, 122 bp, Homo sapiens
  misc_feature (61)..(62): /note="This region represents a CpG dinucleotide"
  misc_feature (61)..(61): /note="Nucleotide may be methylated to form 5-methylcytosine"
tcagctgaccctagagtgtggtcaagtccatacttactaatggtgagtagaagccttacacgtagataaagacatggacatgatgtagactgtgggccatcaactccaagccccattttaaa

SEQ ID NO: 9572 - DNA, 122 bp, Homo sapiens
  misc_feature (61)..(62): /note="This region represents a CpG dinucleotide"
  misc_feature (61)..(61): /note="Nucleotide may be methylated to form 5-methylcytosine"
taaagaatattttcactgcgctaagaactttttgtattctaactatacattcctctctctcgttcctgtcccttgatattcactaatccttttcctatctccacatttttcccttttcagaa

SEQ ID NO: 9573 - DNA, 122 bp, Homo sapiens
  misc_feature (61)..(62): /note="This region represents a CpG dinucleotide"
  misc_feature (61)..(61): /note="Nucleotide may be methylated to form 5-methylcytosine"
tatcttcattgggcacttaactatgtgccaggcactgcacatacaaaatgaagactaacacgcctgcctaacctcaaggagtacctcttaactggcaactcaatgccatactctgaccgggc

SEQ ID NO: 9574 - DNA, 122 bp, Homo sapiens
  misc_feature (61)..(62): /note="This region represents a CpG dinucleotide"
  misc_feature (61)..(61): /note="Nucleotide may be methylated to form 5-methylcytosine"
gtccaataccatggttgatctcatgggcaaccttgtccatgccgtggttgagcccctggacgcctttgtccaactccttgccggtgtggctccccatgttgctaagtccgttgaaaaccttc

SEQ ID NO: 9575 - DNA, 122 bp, Homo sapiens
  misc_feature (61)..(62): /note="This region represents a CpG dinucleotide"
  misc_feature (61)..(61): /note="Nucleotide may be methylated to form 5-methylcytosine"
tctaccagccaccttctacctataggatcaagaccagactccttggcacaatggcctgctcgcaacctgctgctccaggacttccttttgccctttcccactagattccagacacaacagtg

SEQ ID NO: 9576 - DNA, 122 bp, Homo sapiens
  misc_feature (61)..(62): /note="This region represents a CpG dinucleotide"
  misc_feature (61)..(61): /note="Nucleotide may be methylated to form 5-methylcytosine"
ttctgatttcttccaaactaaatgataaatcaacaaagaaaacccaggccatctcacaaacgttttttggcagcagccactcttcagagaggaataagaaggaattcctccgcgagggaggg

SEQ ID NO: 9577 - DNA, 122 bp, Homo sapiens
  misc_feature (61)..(62): /note="This region represents a CpG dinucleotide"
  misc_feature (61)..(61): /note="Nucleotide may be methylated to form 5-methylcytosine"
tactcactaattccacaaacatttgctaagcatgtattcagtgttgggcaccatgcaagacgctgtagatacaatggtgaggaaagacaaatatggcatgtcttatcttggatctggtggtc

SEQ ID NO: 9578 - DNA, 122 bp, Homo sapiens
  misc_feature (61)..(62): /note="This region represents a CpG dinucleotide"
  misc_feature (61)..(61): /note="Nucleotide may be methylated to form 5-methylcytosine"
agtttaataccagcctggggcaacatggtgaaactccgtgtctacaaaaaattagctaggcgtgatggcgtgcacctatacctcctactcgggaatcatctgagccggggaagtcaaagtca

SEQ ID NO: 9579 - DNA, 122 bp, Homo sapiens
  misc_feature (61)..(62): /note="This region represents a CpG dinucleotide"
  misc_feature (61)..(61): /note="Nucleotide may be methylated to form 5-methylcytosine"
gccttcttgagtgtgcatgaccaagactctggaaagaatggtcaagttgtctgttacacacgtgataatttaccttttaaattagaaaagtcaataggtaattattatagattagtgacaag

SEQ ID NO: 9580 - DNA, 122 bp, Homo sapiens
  misc_feature (61)..(62): /note="This region represents a CpG dinucleotide"
  misc_feature (61)..(61): /note="Nucleotide may be methylated to form 5-methylcytosine"
cacatgtattgccacctgaatttctttttcggtgaagtgcctgttcatgacctatgcaggcgtgaggtcttgcctgtggtttgatcctacactgataaatttcacatatttcatatattgtt

SEQ ID NO: 9581 - DNA, 122 bp, Homo sapiens
  misc_feature (61)..(62): /note="This region represents a CpG dinucleotide"
  misc_feature (61)..(61): /note="Nucleotide may be methylated to form 5-methylcytosine"
ttcccagatttcgccactgaatattttgattcagtagacttagttcaggatcttgaaatacgtaagtatgacaaaggctacagctgattcatatgcttggcaagtttgggagagactgtact

SEQ ID NO: 9582 - DNA, 122 bp, Homo sapiens
  misc_feature (61)..(62): /note="This region represents a CpG dinucleotide"
  misc_feature (61)..(61): /note="Nucleotide may be methylated to form 5-methylcytosine"
gaccatggacatcagcattagtggcagcaacaggaggagggaagagattagaactttcatcgcaactgtcggtgcagctgtaagttgcttgaagaatataatggaaggttccctgctggagg

SEQ ID NO: 9583 - DNA, 122 bp, Homo sapiens
  misc_feature (61)..(62): /note="This region represents a CpG dinucleotide"
  misc_feature (61)..(61): /note="Nucleotide may be methylated to form 5-methylcytosine"
aggaacgacaggctcaaaatatgaagacttaatccagacacctctgtgtctctgaacttgcgttgtttcttctttggaggtgaagtacacatcgttttactccgggcagaggacttgtgctc

SEQ ID NO: 9584 - DNA, 122 bp, Homo sapiens
  misc_feature (61)..(62): /note="This region represents a CpG dinucleotide"
  misc_feature (61)..(61): /note="Nucleotide may be methylated to form 5-methylcytosine"
gcacccctagtggtacagcaacacatgctcaaatctcttgatgagtaacattttccatgtcgtacctgtggcatctcagtgacaaatggattctagggccctggaatattgccactcactga

SEQ ID NO: 9585 - DNA, 122 bp, Homo sapiens
  misc_feature (61)..(62): /note="This region represents a CpG dinucleotide"
  misc_feature (61)..(61): /note="Nucleotide may be methylated to form 5-methylcytosine"
acaaacttaagccctcaaatcttctggcatatatgttaaaattatctcctttgtttataccgtccctcccttccagcatttatcttgggaattattcactttttccagatctaatccacacc

SEQ ID NO: 9586 - DNA, 122 bp, Homo sapiens
  misc_feature (61)..(62): /note="This region represents a CpG dinucleotide"
  misc_feature (61)..(61): /note="Nucleotide may be methylated to form 5-methylcytosine"
caagcgtgaaaagactattctgtttgcaaaggcatttttcccatcctgcctggcttgtcacgttctgtgactggactcatgcacccagctggcagctgcaccagccagaccctgaggtaact

SEQ ID NO: 9587 - DNA, 122 bp, Homo sapiens
  misc_feature (61)..(62): /note="This region represents a CpG dinucleotide"
  misc_feature (61)..(61): /note="Nucleotide may be methylated to form 5-methylcytosine"
tggccaaaatcacacaacttagattcacctgtttccagacgcaagcacttaactgccacacggtcctgactatgttgagagctgcggacaccagtatgaacaagacctgcagagtgtctagg

SEQ ID NO: 9588 - DNA, 122 bp, Homo sapiens
  misc_feature (61)..(62): /note="This region represents a CpG dinucleotide"
  misc_feature (61)..(61): /note="Nucleotide may be methylated to form 5-methylcytosine"
tggaaatccctgccctgttcagccccacagctcccaactatttggttcctgctccatggtcgggcctctgacagccactttgaataaaccagacaccgcacatgtgtcttgagaattatttg

SEQ ID NO: 9589 - DNA, 122 bp, Homo sapiens
  misc_feature (61)..(62): /note="This region represents a CpG dinucleotide"
  misc_feature (61)..(61): /note="Nucleotide may be methylated to form 5-methylcytosine"
cagctctgaccttgcagactccccaggataatgctcactctcattataggccattgggtacgagggattccagcaattcctgaaaatctatctcgaagtggataatgttcccagacacctaa

SEQ ID NO: 9590 - DNA, 122 bp, Homo sapiens
  misc_feature (61)..(62): /note="This region represents a CpG dinucleotide"
  misc_feature (61)..(61): /note="Nucleotide may be methylated to form 5-methylcytosine"
tgagaatttcatatcccagaaaacatgcaaatatcaattcttctaattttgttcacttatcggaaggcaaaactacttactttcctgactcagaagcacaaacagaaagtaaagaatacttc

SEQ ID NO: 9591 - DNA, 122 bp, Homo sapiens
  misc_feature (61)..(62): /note="This region represents a CpG dinucleotide"
  misc_feature (61)..(61): /note="Nucleotide may be methylated to form 5-methylcytosine"
ttggggtatttttttagaataaaagaggaagagagcaggatttgaaagtggaagatgatacgctacttttgaaaaaaaattttagctagatacagaatttataatgtaggaatatgatacaa

SEQ ID NO: 9592 - DNA, 122 bp, Homo sapiens
  misc_feature (61)..(62): /note="This region represents a CpG dinucleotide"
  misc_feature (61)..(61): /note="Nucleotide may be methylated to form 5-methylcytosine"
ttccatcattcaactaacatttattgaagatctactctacaccagatactggatgtgcagcgatgagtcaaatacactcttgtttcaaggaatgcagggtccgttggatagaaaacagttac

SEQ ID NO: 9593 - DNA, 122 bp, Homo sapiens
  misc_feature (61)..(62): /note="This region represents a CpG dinucleotide"
  misc_feature (61)..(61): /note="Nucleotide may be methylated to form 5-methylcytosine"
tccaagaagggtagctctgggatcccgggcaggaaattggtgacaaggtgacaaggtgcgcgtgtcacagctgcccagttcacggcttattcagtcttctccctccccccactccccaccag

SEQ ID NO: 9594 - DNA, 122 bp, Homo sapiens
  misc_feature (61)..(62): /note="This region represents a CpG dinucleotide"
  misc_feature (61)..(61): /note="Nucleotide may be methylated to form 5-methylcytosine"
acctgttgcatatgggcgctcccgctgatgcaaaacggcgttctgaacagggaaggcatgcgtgctgcgcagcagggctcccgcagcggggtgtgggttcagggtgctggacttcaaaaccg

SEQ ID NO: 9595 - DNA, 122 bp, Homo sapiens
  misc_feature (61)..(62): /note="This region represents a CpG dinucleotide"
  misc_feature (61)..(61): /note="Nucleotide may be methylated to form 5-methylcytosine"
atatgaggctagcatatgattacaggatagcactctgatacttgaagactagagaagagacgtaggtatggggagtcatcattttgcaggttacacatgccccatcagcggggttgagatgg

SEQ ID NO: 9596 - DNA, 122 bp, Homo sapiens
  misc_feature (61)..(62): /note="This region represents a CpG dinucleotide"
  misc_feature (61)..(61): /note="Nucleotide may be methylated to form 5-methylcytosine"
tatgattattgggccaaagtgtccaggttctcttgacagatccctctatgtctagcaacacgtggctatgagactaaagttttggaacacagaatctattggtgtggaaccaattcacttca

SEQ ID NO: 9597 - DNA, 122 bp, Homo sapiens
  misc_feature (61)..(62): /note="This region represents a CpG dinucleotide"
  misc_feature (61)..(61): /note="Nucleotide may be methylated to form 5-methylcytosine"
cacgttcatctccagcttagacccacataataaactgctactgtacacctttgaactaaccgtccccacaaatagtctcaattcatctcatataaaaataagtcctctttccctcccaaact

SEQ ID NO: 9598 - DNA, 122 bp, Homo sapiens
  misc_feature (61)..(62): /note="This region represents a CpG dinucleotide"
  misc_feature (61)..(61): /note="Nucleotide may be methylated to form 5-methylcytosine"
ctcagtaacatggaggaactgatgaagatgaaaattaacccaagaaaaccaccacattagcggggacctccatcaacacacaaaacccctgagaataagaatgagataaagaaccaacaatt

SEQ ID NO: 9599 - DNA, 122 bp, Homo sapiens
  misc_feature (61)..(62): /note="This region represents a CpG dinucleotide"
  misc_feature (61)..(61): /note="Nucleotide may be methylated to form 5-methylcytosine"
ctttcaatcaatcctccacactgaagccagcatttgtttttaaaccagcaaacttgattacgccactcctctgactcaaaccttccagtggcatctcatgatcttcagtataaaaatcagag

SEQ ID NO: 9600 - DNA, 122 bp, Homo sapiens
  misc_feature (61)..(62): /note="This region represents a CpG dinucleotide"
  misc_feature (61)..(61): /note="Nucleotide may be methylated to form 5-methylcytosine"
aacagccttgacaagtgtgaagtagctgactcaggaaagcaaccagatgggaagctgtgacgtaatgtgatgaactccaggttcaagagtcacacatgttgtaagagtgcatcccgggccgg

SEQ ID NO: 9601 - DNA, 122 bp, Homo sapiens
  misc_feature (61)..(62): /note="This region represents a CpG dinucleotide"
  misc_feature (61)..(61): /note="Nucleotide may be methylated to form 5-methylcytosine"
gctaaacaaaataaaattacccaatagctctgcagtgagttgctgaaggtatttcattcccgtggtgcttatgagtaatcccatgcatagaaacaataccaaaaaagcattcttatcttttg

SEQ ID NO: 9602 - DNA, 122 bp, Homo sapiens
  misc_feature (61)..(62): /note="This region represents a CpG dinucleotide"
  misc_feature (61)..(61): /note="Nucleotide may be methylated to form 5-methylcytosine"
ggagaacgagggggtggagggcatgccagccctaaggatgagcatgggtcaagccatgtccgcatcgaagtgcatcctgtggtttgagactagcaagatcatccacatgactaataccatca

SEQ ID NO: 9603 - DNA, 122 bp, Homo sapiens
  misc_feature (61)..(62): /note="This region represents a CpG dinucleotide"
  misc_feature (61)..(61): /note="Nucleotide may be methylated to form 5-methylcytosine"
gctcatccccacactgggagtaagcattcactgtgctccaggcaccgtgttggacgtgggcgtgagtataatagaatagtctttctcttctgagcactcacattgtagggaaaaccataaaa

SEQ ID NO: 9604 - DNA, 122 bp, Homo sapiens
  misc_feature (61)..(62): /note="This region represents a CpG dinucleotide"
  misc_feature (61)..(61): /note="Nucleotide may be methylated to form 5-methylcytosine"
ctcactccagaagaaagtagacgcttgcacgttgaacataaaatcatcttggctccaacacgatggagcaaaaaaggttctgaacttgcaacgcacatatttgcaggttatagtaaatccag

SEQ ID NO: 9605 - DNA, 122 bp, Homo sapiens
  misc_feature (61)..(62): /note="This region represents a CpG dinucleotide"
  misc_feature (61)..(61): /note="Nucleotide may be methylated to form 5-methylcytosine"
tgaatacctcctaccttcccttggtgccaattccttgtaatcagctggtttcctaggtaacgactcaaccaccaatacactcttcagatgacaaaccaaaaaaaaaaaaagaaaaaaaatta

SEQ ID NO: 9606 - DNA, 122 bp, Homo sapiens
  misc_feature (61)..(62): /note="This region represents a CpG dinucleotide"
  misc_feature (61)..(61): /note="Nucleotide may be methylated to form 5-methylcytosine"
gggcaccggctcatctaattcatttgtgtacagatccacaaaactgcacctggctgtggccgtcagtaagtgctatataaatgcttcataagtgtttgttgaaggaagttgaaatgtagtcg

SEQ ID NO: 9607 - DNA, 122 bp, Homo sapiens
  misc_feature (61)..(62): /note="This region represents a CpG dinucleotide"
  misc_feature (61)..(61): /note="Nucleotide may be methylated to form 5-methylcytosine"
ccttgggattccttttcctagaccagctcttatgccggctgcctcacctccaggctcagacgccttttccagtttcagctaaatgtgaaacttttcagaggtatgaggttgtgtgctcttcc

SEQ ID NO: 9608 - DNA, 122 bp, Homo sapiens
  misc_feature (61)..(62): /note="This region represents a CpG dinucleotide"
  misc_feature (61)..(61): /note="Nucleotide may be methylated to form 5-methylcytosine"
taagtatgcagttttatgacattaactacatgtgcattgttatgcaaccatctaggatgacgttctaacctcatttcaagcttagccgcattcactatctttccaggactagggtagttttc

SEQ ID NO: 9609 - DNA, 122 bp, Homo sapiens
  misc_feature (61)..(62): /note="This region represents a CpG dinucleotide"
  misc_feature (61)..(61): /note="Nucleotide may be methylated to form 5-methylcytosine"
cctggctgggtgggggcccctcttggctgagctcgggtgccccccctccccacccaaggccggccctttcctgtggagtcatctcaccgccgtgcgcacccactcgtaactcgcacccgggt

SEQ ID NO: 9610 - DNA, 122 bp, Homo sapiens
  misc_feature (61)..(62): /note="This region represents a CpG dinucleotide"
  misc_feature (61)..(61): /note="Nucleotide may be methylated to form 5-methylcytosine"
ggctccctgcagtgatggagcagggatgaaaggcagaacttatcggctcaaaacacagcacggcagccaggcagcacatgttttgcagaatttttgaagaatactaaggtttcatttgcatt

SEQ ID NO: 9611 - DNA, 122 bp, Homo sapiens
  misc_feature (61)..(62): /note="This region represents a CpG dinucleotide"
  misc_feature (61)..(61): /note="Nucleotide may be methylated to form 5-methylcytosine"
cacctatctggatcttagtttcttcttttataaagttaggcacttgagccccatggtcttcgaggtccctgtcagacccaagtttgatttttctccatcccttgggaacagggcagtccacc

SEQ ID NO: 9612 - DNA, 122 bp, Homo sapiens
  misc_feature (61)..(62): /note="This region represents a CpG dinucleotide"
  misc_feature (61)..(61): /note="Nucleotide may be methylated to form 5-methylcytosine"
cgctgggtactggcgacaggaagggttggcccaaagtggctggcggagcttaatctggggcggcccagggagcctcctggctggtggagggacagagcaccatcatccgggctggcctccgc

SEQ ID NO: 9613 - DNA, 122 bp, Homo sapiens
  misc_feature (61)..(62): /note="This region represents a CpG dinucleotide"
  misc_feature (61)..(61): /note="Nucleotide may be methylated to form 5-methylcytosine"
ccccactgatgccaggtcctggtatcattgctgtctgactactcacacaccatgaggtagcgtccctgcttttttttttttttttttcctgagacagagtctcgctctgtcacccaggctgg

SEQ ID NO: 9614 - DNA, 122 bp, Homo sapiens
  misc_feature (61)..(62): /note="This region represents a CpG dinucleotide"
  misc_feature (61)..(61): /note="Nucleotide may be methylated to form 5-methylcytosine"
agcaagctcccagttcgcacaggtcagaacgtgaaggatgcctttgcagggcggtgcttacggcccagggcacctggcttcacgcactaatgatcagagagccgcgtgcctccgtgcaaaac

SEQ ID NO: 9615 - DNA, 122 bp, Homo sapiens
  misc_feature (61)..(62): /note="This region represents a CpG dinucleotide"
  misc_feature (61)..(61): /note="Nucleotide may be methylated to form 5-methylcytosine"
tggacattttactcatatctgcaaaagactagcagtaacatagcacctactctatcactccgagtccagtaaggcagtagaatccacatgaggcatttcaagcagaggggactatttacaaa

SEQ ID NO: 9616 - DNA, 122 bp, Homo sapiens
  misc_feature (61)..(62): /note="This region represents a CpG dinucleotide"
  misc_feature (61)..(61): /note="Nucleotide may be methylated to form 5-methylcytosine"
atattaccctttttagcttgataaagatcaaagtcacgtaccaaatagtctcttggaaaccgtacatacaactcctggtcttctctggcagtaaaagtctgaaagctgtttttgaattctgc

SEQ ID NO: 9617 - DNA, 122 bp, Homo sapiens
  misc_feature (61)..(62): /note="This region represents a CpG dinucleotide"
  misc_feature (61)..(61): /note="Nucleotide may be methylated to form 5-methylcytosine"
aattccaggctcggtgattctgcaatacatgctggtaagaacatttgactcatcctggaacgggataaagaaacacagaagaccaaataatgaagaaggactagaaaacatttttgtacgta

SEQ ID NO: 9618 - DNA, 122 bp, Homo sapiens
  misc_feature (61)..(62): /note="This region represents a CpG dinucleotide"
  misc_feature (61)..(61): /note="Nucleotide may be methylated to form 5-methylcytosine"
tagaggtgctagagcccctgtgagctatgggatgtaatgtttctctttcggtttagctcccgcctgtgttcagttctgatgcactcagagtactctctgacacctgaaggcctgggcccttc

SEQ ID NO: 9619 - DNA, 122 bp, Homo sapiens
  misc_feature (61)..(62): /note="This region represents a CpG dinucleotide"
  misc_feature (61)..(61): /note="Nucleotide may be methylated to form 5-methylcytosine"
tctttgggttaaccacaaagcaaactacagacagtttgcacaaattcagagcaatgcatacgtggcaaattaacagccttatcaagcttcaaacatcctggctttttgaggcacagtaatac

SEQ ID NO: 9620 - DNA, 122 bp, Homo sapiens
  misc_feature (61)..(62): /note="This region represents a CpG dinucleotide"
  misc_feature (61)..(61): /note="Nucleotide may be methylated to form 5-methylcytosine"
aggactcaggctaggggtggtgcctttcccttcttggaaactcttgctggcattctcaaccgtcatccttgctccaggaaggagactctcctatatgctcctatagcatccagagctgacat

SEQ ID NO: 9621 - DNA, 122 bp, Homo sapiens
  misc_feature (61)..(62): /note="This region represents a CpG dinucleotide"
  misc_feature (61)..(61): /note="Nucleotide may be methylated to form 5-methylcytosine"
gcagccgcagacaccacccaactggcagaaatttcaaacaaggggttctgccttgcactccggtgcaagggttgggcacgtggactcacatgtgaccaatcacattgtctttcctgagatcc

SEQ ID NO: 9622 - DNA, 122 bp, Homo sapiens
  misc_feature (61)..(62): /note="This region represents a CpG dinucleotide"
  misc_feature (61)..(61): /note="Nucleotide may be methylated to form 5-methylcytosine"
gaatctctataaggagaaggaaggaagttgtttttagcaaccatcatttccctgtcttaacgtgacactacttctgaacctcaaacactgaaactaggttggagcatttgtatgtgatactg

SEQ ID NO: 9623 - DNA, 122 bp, Homo sapiens
  misc_feature (61)..(62): /note="This region represents a CpG dinucleotide"
  misc_feature (61)..(61): /note="Nucleotide may be methylated to form 5-methylcytosine"
atagtgacaaagtactttgaacttcacaggttccattcaccctgcagttatggctattaccgtgcccagaagccaccaccagggggctccagcatgtctctgaaacctggctgttcagtaag

SEQ ID NO: 9624 - DNA, 122 bp, Homo sapiens
  misc_feature (61)..(62): /note="This region represents a CpG dinucleotide"
  misc_feature (61)..(61): /note="Nucleotide may be methylated to form 5-methylcytosine"
taaaaaggacagttcacttgaccaaacttgaccacacataccacagcaagctgatgacagcgccatacatgatttttcatgagcaaagagaaatgtactgcatacatcttaacctccagttg

SEQ ID NO: 9625 - DNA, 122 bp, Homo sapiens
  misc_feature (61)..(62): /note="This region represents a CpG dinucleotide"
  misc_feature (61)..(61): /note="Nucleotide may be methylated to form 5-methylcytosine"
ttgcctgagtcactaagttccttaaaagataaatgactctattccctgccttttcttacacgtaaggtaatatctgatggggttagtgatgatgcctctgtaatctataaccagctgtactc

SEQ ID NO: 9626 - DNA, 122 bp, Homo sapiens
  misc_feature (61)..(62): /note="This region represents a CpG dinucleotide"
  misc_feature (61)..(61): /note="Nucleotide may be methylated to form 5-methylcytosine"
cctgtcgccaatggtagaaccaggactggagttctaatctccttgactcctaagccaaaccgctgatcaagtaaaacctaaaacatttataatttgtatatgttttgcaaccaataaaacaa

SEQ ID NO: 9627 - DNA, 122 bp, Homo sapiens
  misc_feature (61)..(62): /note="This region represents a CpG dinucleotide"
  misc_feature (61)..(61): /note="Nucleotide may be methylated to form 5-methylcytosine"
gatcctccgttttgttcatcacacagctcccggcactttaataaatgaggctcaaagaaacgacgggcttaggtcatgcagtagtcaaattcagaactcatgtttgattccaaagcccacac

SEQ ID NO: 9628 - DNA, 122 bp, Homo sapiens
  misc_feature (61)..(62): /note="This region represents a CpG dinucleotide"
  misc_feature (61)..(61): /note="Nucleotide may be methylated to form 5-methylcytosine"
gggaattaactgtacactatttaatccaccagttccggttcattagaaaaatgcagttctcgccggacatggtggctcacacctgtaatcccagcaattctggaggccaaggtgggcagatt

SEQ ID NO: 9629 - DNA, 122 bp, Homo sapiens
  misc_feature (61)..(62): /note="This region represents a CpG dinucleotide"
  misc_feature (61)..(61): /note="Nucleotide may be methylated to form 5-methylcytosine"
cagagaaagctctgaccccaagagaaaccgacatcatacacacacacacacacacacacacgcagggcagaggaatatgtggtttctcaaacggattcctaaaacatacatatatatataat

SEQ ID NO: 9630 - DNA, 122 bp, Homo sapiens
  misc_feature (61)..(62): /note="This region represents a CpG dinucleotide"
  misc_feature (61)..(61): /note="Nucleotide may be methylated to form 5-methylcytosine"
agaagaggcttttctagcggcacgaaagaatttggaagcggcagtgttacggtaaaaaaccgacaaggtgcctgatgaagaggatttttatttccactaggtggtgctgttggcttagcact

SEQ ID NO: 9631 - DNA, 122 bp, Homo sapiens
  misc_feature (61)..(62): /note="This region represents a CpG dinucleotide"
  misc_feature (61)..(61): /note="Nucleotide may be methylated to form 5-methylcytosine"
ctctctctcacacacacacacacacacacacacacacacacacacacacgcatgcacgcacgactttcagacctgtattggtactcattactcatgcagcctggctgagtgagccttttttt

SEQ ID NO: 9632 - DNA, 122 bp, Homo sapiens
  misc_feature (61)..(62): /note="This region represents a CpG dinucleotide"
  misc_feature (61)..(61): /note="Nucleotide may be methylated to form 5-methylcytosine"
caggcgtgcgtccctccccacgtcctggtgaggccagccatgtttctaggagtctcaggccgactcagtgtgtagtgagagaaggtaaacgtaggggaaagaaaattaaaatgctcaaagag

SEQ ID NO: 9633 - DNA, 122 bp, Homo sapiens
  misc_feature (61)..(62): /note="This region represents a CpG dinucleotide"
  misc_feature (61)..(61): /note="Nucleotide may be methylated to form 5-methylcytosine"
tctggcaactgcccctgctaacagtggagatttattatcatagaaaatcatttcaatctgcggaggttccaaagggaccattttatggtcatgggcataattaatagcagaactgtttggga

SEQ ID NO: 9634 - DNA, 122 bp, Homo sapiens
  misc_feature (61)..(62): /note="This region represents a CpG dinucleotide"
  misc_feature (61)..(61): /note="Nucleotide may be methylated to form 5-methylcytosine"
ccctcgattccctccgaacccccccttaaaaacctacgccgactgctcctcctcttggcccggcctcgaaaggggcccacttaccgctccgcggttaataacaggcctcgcgctccctgaca

SEQ ID NO: 9635 - DNA, 122 bp, Homo sapiens
  misc_feature (61)..(62): /note="This region represents a CpG dinucleotide"
  misc_feature (61)..(61): /note="Nucleotide may be methylated to form 5-methylcytosine"
ggcggggctgtgaccaggctagcatagctagggtcaagcactagacgactttcagcagagcgctccagtgttccaggaggcgtgtgtgctacctactcatactgacagccctcctatcttct

SEQ ID NO: 9636 - DNA, 122 bp, Homo sapiens
  misc_feature (61)..(62): /note="This region represents a CpG dinucleotide"
  misc_feature (61)..(61): /note="Nucleotide may be methylated to form 5-methylcytosine"
tatgactgaacaaaaatattctaagtggaaagtcttgttcccagtcctgcagtgcatctgcgtggctttcacagtcccccaaccatggagggagcatccccattgtttttacatttgtgtct

SEQ ID NO: 9637 - DNA, 122 bp, Homo sapiens
  misc_feature (61)..(62): /note="This region represents a CpG dinucleotide"
  misc_feature (61)..(61): /note="Nucleotide may be methylated to form 5-methylcytosine"
actgccccagatgggcgaggtggggtggacacggttcttgggccggccctgatgattttccggggcaaacttggctcgagggctctgtctcgctggagcctggaatcgcagttgcgcttggg

SEQ ID NO: 9638 - DNA, 122 bp, Homo sapiens
  misc_feature (61)..(62): /note="This region represents a CpG dinucleotide"
  misc_feature (61)..(61): /note="Nucleotide may be methylated to form 5-methylcytosine"
tccaggctccttcccgctcctggagctgccgctgggtctcagctctctgctctgaggctacgccgcagctacagctccctgacctgttcctgttcaggctcccaggaaacctcagagtggca

SEQ ID NO: 9639 - DNA, 122 bp, Homo sapiens
  misc_feature (61)..(62): /note="This region represents a CpG dinucleotide"
  misc_feature (61)..(61): /note="Nucleotide may be methylated to form 5-methylcytosine"
tctcaattctgttctctgcccattagttcaacaatcctgagtagggcttgctctgctgcccggacatttagaaaggccaggcgaggctgaggcaggcagatcacctgaggtcaggagtttga

SEQ ID NO: 9640 - DNA, 122 bp, Homo sapiens
  misc_feature (61)..(62): /note="This region represents a CpG dinucleotide"
  misc_feature (61)..(61): /note="Nucleotide may be methylated to form 5-methylcytosine"
ttctctgagggtaaaattagtaggtgaattcaggacaatggcatgccaggaactatgtgacgcatcacaaccaccagctgaaccagggatttgtgaaggagccagaggcatgtgggcagcca

SEQ ID NO: 9641 - DNA, 122 bp, Homo sapiens
  misc_feature (61)..(62): /note="This region represents a CpG dinucleotide"
  misc_feature (61)..(61): /note="Nucleotide may be methylated to form 5-methylcytosine"
gagctgacaaatgcttgtcacagtttccaggcccagctcaatgaaaggggtggaaaaaaacgtagttttccttgcctcaatgatggaatttagtacatgttgatagaatttagtgcaaggct

SEQ ID NO: 9642 - DNA, 122 bp, Homo sapiens
  misc_feature (61)..(62): /note="This region represents a CpG dinucleotide"
  misc_feature (61)..(61): /note="Nucleotide may be methylated to form 5-methylcytosine"
tcactgcggccggggaaacccactcccaggactcagcccggaagaggccctgaaggggagcggagactgggcgctggggtgggggcgggggcgccgagcctcaacttcccgcgtctgctgga

SEQ ID NO: 9643 - DNA, 122 bp, Homo sapiens
  misc_feature (61)..(62): /note="This region represents a CpG dinucleotide"
  misc_feature (61)..(61): /note="Nucleotide may be methylated to form 5-methylcytosine"
tcctgggcctgcccaggtatctgcaaactcccgggttccacagcaccttgtatttcatgacgatacaaaggagtagctattggggctctatctgctgagggagattcatcagacaccccgat

SEQ ID NO: 9644 - DNA, 122 bp, Homo sapiens
  misc_feature (61)..(62): /note="This region represents a CpG dinucleotide"
  misc_feature (61)..(61): /note="Nucleotide may be methylated to form 5-methylcytosine"
ggacggcgtccaacccgcattcatgtcaggagtgagtcgcacgtggctttgtggtcatggcgacttaatccgcctggacggtggctccgtctccctgggcttagacgaccttggcacttctg

SEQ ID NO: 9645 - DNA, 122 bp, Homo sapiens
  misc_feature (61)..(62): /note="This region represents a CpG dinucleotide"
  misc_feature (61)..(61): /note="Nucleotide may be methylated to form 5-methylcytosine"
cctcggggtgagggaggccactctataaggagaccatgtgtgtggaagcaccttgggaaacgctgcgcgcaggccgggacccagggcagtcggccttccttatccatggattcaatgaactg

SEQ ID NO: 9646 - DNA, 122 bp, Homo sapiens
  misc_feature (61)..(62): /note="This region represents a CpG dinucleotide"
  misc_feature (61)..(61): /note="Nucleotide may be methylated to form 5-methylcytosine"
aaaagcaaggaccttgttgtgttaccaatgtgtcactgaatcctaattcaatgcttcaagcgtggtaaacgttaatgaatgaataaggtttttgaaaagcaggaacattgtgttgaccttac

SEQ ID NO: 9647 - DNA, 122 bp, Homo sapiens
  misc_feature (61)..(62): /note="This region represents a CpG dinucleotide"
  misc_feature (61)..(61): /note="Nucleotide may be methylated to form 5-methylcytosine"
atttatgtgcttctgtcaaaatacatttattctatcccaagagccccagaagtcttaactcgttccagcattaattcaaaagtctgaagccgagaatctcatctaaatcagatatgagtgag

SEQ ID NO: 9648 - DNA, 122 bp, Homo sapiens
  misc_feature (61)..(62): /note="This region represents a CpG dinucleotide"
  misc_feature (61)..(61): /note="Nucleotide may be methylated to form 5-methylcytosine"
ctaggcctaggtaagattgcatctggagcctggggccaggtctggggccctacagtaaggcggagatgggctggtatgtgtcctgagcggaggttaggaaggctctgaacactgtcatggga

SEQ ID NO: 9649 - DNA, 122 bp, Homo sapiens
  misc_feature (61)..(62): /note="This region represents a CpG dinucleotide"
  misc_feature (61)..(61): /note="Nucleotide may be methylated to form 5-methylcytosine"
cagcaaacagtattgatggattcggggaatgccatttgacagttacaggctcccgtgaggcggtgcaggctcctccgagccagggatggagctggggattgagtgacacaagactctttggg

SEQ ID NO: 9650 - DNA, 122 bp, Homo sapiens
  misc_feature (61)..(62): /note="This region represents a CpG dinucleotide"
  misc_feature (61)..(61): /note="Nucleotide may be methylated to form 5-methylcytosine"
tatttgggttcaaagagacacactgagtcaaaagacttgggtttgatccctggctctgtccgtttgattgcatgaccatggtaagtccccaagctccctaggcttccatttcctcatttatg

SEQ ID NO: 9651 - DNA, 122 bp, Homo sapiens
  misc_feature (61)..(62): /note="This region represents a CpG dinucleotide"
  misc_feature (61)..(61): /note="Nucleotide may be methylated to form 5-methylcytosine"
ataattgaggttctcatgttattctatttgtcataaagtcaagcctagattcatactggccgttgttgaggataccggttgggtacagaatgagtcatggcagctttattccaaagagcatg

SEQ ID NO: 9652 - DNA, 122 bp, Homo sapiens
  misc_feature (61)..(62): /note="This region represents a CpG dinucleotide"
  misc_feature (61)..(61): /note="Nucleotide may be methylated to form 5-methylcytosine"
ttgcaaaacctctctaagctcatttcttcatccacaaaatggtaaaactaatcttttctgcgtagggttgttgtaagaattacatgagaggtgtgaaaacagtctagaacagtggcagtgtg

SEQ ID NO: 9653 - DNA, 122 bp, Homo sapiens
  misc_feature (61)..(62): /note="This region represents a CpG dinucleotide"
  misc_feature (61)..(61): /note="Nucleotide may be methylated to form 5-methylcytosine"
gggcagaagaaataccttctctttttatttgggaagggatgccctgttcatgcacttttacgtttgtctatctggtaaatcgattgcatgtagggatccagtttctcatgcctcttatattt

SEQ ID NO: 9654 - DNA, 122 bp, Homo sapiens
  misc_feature (61)..(62): /note="This region represents a CpG dinucleotide"
  misc_feature (61)..(61): /note="Nucleotide may be methylated to form 5-methylcytosine"
tctgtcacacgtcattgtttctgccttctggattcaggaccacaaagctgcaggctgggacgcagccctggggctgaagattgtgctgtgtcacatgggtctagctgctgctgtggtatgtg

SEQ ID NO: 9655 - DNA, 122 bp, Homo sapiens
  misc_feature (61)..(62): /note="This region represents a CpG dinucleotide"
  misc_feature (61)..(61): /note="Nucleotide may be methylated to form 5-methylcytosine"
attttgtgtctttacccacatggaaattcaacaaataatttagttcaattcagtaagtgccgatttattgagctcttaatatatgctagacacgtgggacatagagatgaaagagcctgttc

SEQ ID NO: 9656 - DNA, 122 bp, Homo sapiens
  misc_feature (61)..(62): /note="This region represents a CpG dinucleotide"
  misc_feature (61)..(61): /note="Nucleotide may be methylated to form 5-methylcytosine"
ccagctccgcctcctgcagagcttggttgccagggctgggtcaggctgcctgggcgttgccgtctgacctgtgcacagatgtggccaggtgaggacacaagctgttgtctcgtttgctgtgt

SEQ ID NO: 9657 - DNA, 122 bp, Homo sapiens
  misc_feature (61)..(62): /note="This region represents a CpG dinucleotide"
  misc_feature (61)..(61): /note="Nucleotide may be methylated to form 5-methylcytosine"
tggggctggtcctggactgataagtacacacttgatctcagccaaagagcagagaagcgacggactgaccaagtataaggaggctccagacaacatgcagacacccagcagctggccctttt

SEQ ID NO: 9658 - DNA, 122 bp, Homo sapiens
  misc_feature (61)..(62): /note="This region represents a CpG dinucleotide"
  misc_feature (61)..(61): /note="Nucleotide may be methylated to form 5-methylcytosine"
ctcaggcgtctgtcctggcaacagtggcttctcctctgtgatctgcacctcctgcagctccgccatggtggcctggcaggatgaggaaatgagactgggaagttgtctctacatccccacat

SEQ ID NO: 9659 - DNA, 122 bp, Homo sapiens
  misc_feature (61)..(62): /note="This region represents a CpG dinucleotide"
  misc_feature (61)..(61): /note="Nucleotide may be methylated to form 5-methylcytosine"
gccaagtgatggccctcccatgttatggctacatagctgtttatattacacatggagttgcgcgcctgcgctacagacttgctgagtcacccgggatgtttacctcagcccatcctgcctgg

SEQ ID NO: 9660 - DNA, 122 bp, Homo sapiens
  misc_feature (61)..(62): /note="This region represents a CpG dinucleotide"
  misc_feature (61)..(61): /note="Nucleotide may be methylated to form 5-methylcytosine"
gacgatgcggtcatccttgaagcaccctgcagagggaggccagacaggagtgaggaaggacggccaccctggcccttgcagcatggccttggccaagctgcgcccatacccccacatttctg

SEQ ID NO: 9661 - DNA, 122 bp, Homo sapiens
  misc_feature (61)..(62): /note="This region represents a CpG dinucleotide"
  misc_feature (61)..(61): /note="Nucleotide may be methylated to form 5-methylcytosine"
gggaagtgccagggttgagaggctgcagcagcggggctgagtggcagagacaccagcaggcgtgggggtttaccaagtgcagggtgtcttaacaggaagagaaactccctccaaagcagacc

SEQ ID NO: 9662 - DNA, 122 bp, Homo sapiens
  misc_feature (61)..(62): /note="This region represents a CpG dinucleotide"
  misc_feature (61)..(61): /note="Nucleotide may be methylated to form 5-methylcytosine"
ttggaagaggagagaaaagctaagattcttcacagattaagaagctctctgaataacagacgaagaaacttagatgatgatctacaggcaacagagagtcactggaggttttctaaaaggag

SEQ ID NO: 9663 - DNA, 122 bp, Homo sapiens
  misc_feature (61)..(62): /note="This region represents a CpG dinucleotide"
  misc_feature (61)..(61): /note="Nucleotide may be methylated to form 5-methylcytosine"
gtgtgtgtgttttgttgttgttgttttgagacagagtctctcactgtactcccaggctggcgtacagtgacacgatcatggctccctgcagcctccaccttccaggatccaagcgatcctcc

SEQ ID NO: 9664 - DNA, 122 bp, Homo sapiens
  misc_feature (61)..(62): /note="This region represents a CpG dinucleotide"
  misc_feature (61)..(61): /note="Nucleotide may be methylated to form 5-methylcytosine"
tattgtttatcttatttattctcttcctattgcatctggaacacagtctgttttcaataccgtttgttgaactccagggtagattacagggctgtgtattataatctacagtactttaactg

SEQ ID NO: 9665 - DNA, 122 bp, Homo sapiens
  misc_feature (61)..(62): /note="This region represents a CpG dinucleotide"
  misc_feature (61)..(61): /note="Nucleotide may be methylated to form 5-methylcytosine"
tgttaataagtggttttgtctgagttgtgctgaagaaaaagatctggtgagggtggaatgcgtcatgggtaaatgaaagtgccaattgaagtgagaacacagaggtgaatggagagattgaa

SEQ ID NO: 9666 - DNA, 122 bp, Homo sapiens
  misc_feature (61)..(62): /note="This region represents a CpG dinucleotide"
  misc_feature (61)..(61): /note="Nucleotide may be methylated to form 5-methylcytosine"
accttgtgatccgcccaccttggcctcccaaagtgctgggattacaggcgtgagccaccacgcccggccaattcatatgggttttagtgtgttcacaatgttattgtgaccatcaccactat

SEQ ID NO: 9667 - DNA, 122 bp, Homo sapiens
  misc_feature (61)..(62): /note="This region represents a CpG dinucleotide"
  misc_feature (61)..(61): /note="Nucleotide may be methylated to form 5-methylcytosine"
gcagatttaaaaagaatggcatatacgcctacaggtgcacagagctacatgtgtgactcacgctgcggtatgtggtttcatgagaagttacttatgaaatcattgctgatttctgatcctca

SEQ ID NO: 9668 - DNA, 122 bp, Homo sapiens
  misc_feature (61)..(62): /note="This region represents a CpG dinucleotide"
  misc_feature (61)..(61): /note="Nucleotide may be methylated to form 5-methylcytosine"
gaggtaggaactaattaccccctgtaacttcaggatgatcagcatgatttggggcagacacgcacacagaggctgataaagtcttttctgatgtaaatcagacaattccttcctagatcaga

SEQ ID NO: 9669 - DNA, 122 bp, Homo sapiens
  misc_feature (61)..(62): /note="This region represents a CpG dinucleotide"
  misc_feature (61)..(61): /note="Nucleotide may be methylated to form 5-methylcytosine"
tgcattgtgtcttggtttggctttggcaactgtctgattaggtccttaacagcagcgactcgctgtcttggttcttgctctgaaaaaagataataaccagatattttacagcaaattcttat

SEQ ID NO: 9670 - DNA, 122 bp, Homo sapiens
  misc_feature (61)..(62): /note="This region represents a CpG dinucleotide"
  misc_feature (61)..(61): /note="Nucleotide may be methylated to form 5-methylcytosine"
agaagtgtctggcttctgctctgaaagattctgatttattggtctgggatatgacctgagcgatgggatttttagaagtttcccaggtgattataatacgaagccaaggttgagaaccacag

SEQ ID NO: 9671 - DNA, 122 bp, Homo sapiens
  misc_feature (61)..(62): /note="This region represents a CpG dinucleotide"
  misc_feature (61)..(61): /note="Nucleotide may be methylated to form 5-methylcytosine"
atcatatctaacagtgaagctttccagcaaaaaccttctgctctagaatgcataattatgcgagcataagatctactactctagacttttagcataattacctataggcagcaaaaccctag

SEQ ID NO: 9672 - DNA, 122 bp, Homo sapiens
  misc_feature (61)..(62): /note="This region represents a CpG dinucleotide"
  misc_feature (61)..(61): /note="Nucleotide may be methylated to form 5-methylcytosine"
tggtctggcagctgtggcaagatgacttgaaaggaacggaaaccagagatagggaaccagcgtcgtagttcagatgggaactaataaaggcctgatgagggaagtaacaatgagatagaaaa

SEQ ID NO: 9673 - DNA, 122 bp, Homo sapiens
  misc_feature (61)..(62): /note="This region represents a CpG dinucleotide"
  misc_feature (61)..(61): /note="Nucleotide may be methylated to form 5-methylcytosine"
agcgatccctaaatcactaaagaatgctttgttttctacctgtctactttttccctagaacggaatacctggtcatgtatatcatcagaacaattgctcatctatcagctagtccttccagg

SEQ ID NO: 9674 - DNA, 122 bp, Homo sapiens
  misc_feature (61)..(62): /note="This region represents a CpG dinucleotide"
  misc_feature (61)..(61): /note="Nucleotide may be methylated to form 5-methylcytosine"
actgaggccctgggggctccaccctctttctgggcttgtcagaggcatttaagaaatacacgttgacttgacatgacccatgtgaaacgggcgtaacgagactccctgcatggctgctggat

SEQ ID NO: 9675 - DNA, 122 bp, Homo sapiens
  misc_feature (61)..(62): /note="This region represents a CpG dinucleotide"
  misc_feature (61)..(61): /note="Nucleotide may be methylated to form 5-methylcytosine"
cagtttaggccctttccagagggcatacagcttcctttcatctgaggcttagcgacttcgcggaccaaccatgcagtttgccttgtccaggtagtttagccaggtagccataactcagtctt

SEQ ID NO: 9676 - DNA, 122 bp, Homo sapiens
  misc_feature (61)..(62): /note="This region represents a CpG dinucleotide"
  misc_feature (61)..(61): /note="Nucleotide may be methylated to form 5-methylcytosine"
ctctaacttccaccctaagataaactctgattccttctttgtttagcccacagaagctcacggattactcctgtgttgcctaacaactccaaggaaattagaactcctttccaggaactctc

SEQ ID NO: 9677 - DNA, 122 bp, Homo sapiens
  misc_feature (61)..(62): /note="This region represents a CpG dinucleotide"
  misc_feature (61)..(61): /note="Nucleotide may be methylated to form 5-methylcytosine"
tggtttggggagttcacctctccctaccttctgccatacaggaaaagggagaaggaggtgcgtcacctagtgcttctgagtgtccccgagatgcacttctagtttgacagtgctgccaaagg

SEQ ID NO: 9678 - DNA, 122 bp, Homo sapiens
  misc_feature (61)..(62): /note="This region represents a CpG dinucleotide"
  misc_feature (61)..(61): /note="Nucleotide may be methylated to form 5-methylcytosine"
tgctaaccagggaagctccaccaagccttggtgtccagattttttcttgagggttggtcacgtaggcatagcatgactgatagcccatgtggctgaccttcagttttcagcccctccaaaga

SEQ ID NO: 9679 - DNA, 122 bp, Homo sapiens
  misc_feature (61)..(62): /note="This region represents a CpG dinucleotide"
  misc_feature (61)..(61): /note="Nucleotide may be methylated to form 5-methylcytosine"
aaagacaatatttgtacaaaccagcagaaagctgatgtaagaatttacttaacatcagctcgtaaaggccttgtaaaggaagtaaaaacttaaacaaataagtaccaagacaaatatataaa

SEQ ID NO: 9680 - DNA, 122 bp, Homo sapiens
  misc_feature (61)..(62): /note="This region represents a CpG dinucleotide"
  misc_feature (61)..(61): /note="Nucleotide may be methylated to form 5-methylcytosine"
ctctgatcttagctcctggagtgccccggagcaaacctgtccaccctgtcccctgcaggacggtctgttagcctcaattagcagaaagcttacagactctgggaaaaggtgtgcctggctgt

SEQ ID NO: 9681 - DNA, 122 bp, Homo sapiens
  misc_feature (61)..(62): /note="This region represents a CpG dinucleotide"
  misc_feature (61)..(61): /note="Nucleotide may be methylated to form 5-methylcytosine"
caatgcgcacttgcttcaggtttcctcttaacatcatcttactgagttcgcctcggacaccggatacaggcctagatttatagacagtgtgtctatatatatgtatacgtctctacataaac

SEQ ID NO: 9682 - DNA, 122 bp, Homo sapiens
  misc_feature (61)..(62): /note="This region represents a CpG dinucleotide"
  misc_feature (61)..(61): /note="Nucleotide may be methylated to form 5-methylcytosine"
gccagtgggagaacgcattttctttcaggtctgtgctgcctgccagggagctgctgttctcgtgcggcatcttaagatggccctggcagcctttggcttttgccttgtgagggtcaatgggc

SEQ ID NO: 9683 - DNA, 122 bp, Homo sapiens
  misc_feature (61)..(62): /note="This region represents a CpG dinucleotide"
  misc_feature (61)..(61): /note="Nucleotide may be methylated to form 5-methylcytosine"
atcaataggtcttatacaataggataagagctacagagtctggggacccgggggttctgacggcacaggaaagagggtgactaactttatcttgaaatcctcaggaacgctctggagaggat

SEQ ID NO: 9684 - DNA, 122 bp, Homo sapiens
  misc_feature (61)..(62): /note="This region represents a CpG dinucleotide"
  misc_feature (61)..(61): /note="Nucleotide may be methylated to form 5-methylcytosine"
aggtgaggctaacgttcacatgccttgagagtggccgggatgactcttgcaggccagtctcgctggttgcttttatctctgatgaatccaccctatttggctttgggggtgcctgactcact

SEQ ID NO: 9685 - DNA, 122 bp, Homo sapiens
  misc_feature (61)..(62): /note="This region represents a CpG dinucleotide"
  misc_feature (61)..(61): /note="Nucleotide may be methylated to form 5-methylcytosine"
ggagtgactgctacaggtttggggtttcatcttggagtggtgaaaatgttctaaaagtgacggtaaaagtgatggtaatgatggttgcacaactccgtgaatatacaaaaaaccatcaaatt

SEQ ID NO: 9686 - DNA, 122 bp, Homo sapiens
  misc_feature (61)..(62): /note="This region represents a CpG dinucleotide"
  misc_feature (61)..(61): /note="Nucleotide may be methylated to form 5-methylcytosine"
ttccttcagttatttcaaatgtcgcctctttctactcagctgttgaagtcaaaaatctggcgtcattcttgacctcttcttttacctcaagtctcaaattcagtccattgccaaattctgtg

SEQ ID NO: 9687 - DNA, 122 bp, Homo sapiens
  misc_feature (61)..(62): /note="This region represents a CpG dinucleotide"
  misc_feature (61)..(61): /note="Nucleotide may be methylated to form 5-methylcytosine"
aatatattcccaaaagctctatttttttttctttcttcttttaggttctctgtgttctatcgacgtctggtgcaatggagaagtcaggagatggtacttgaatcctgactctgtcacaagct

SEQ ID NO: 9688 - DNA, 122 bp, Homo sapiens
  misc_feature (61)..(62): /note="This region represents a CpG dinucleotide"
  misc_feature (61)..(61): /note="Nucleotide may be methylated to form 5-methylcytosine"
agaattatgaggggaattacgtcatcaggggaaatccaggtttcacctgggatgaggcggcggcgcatgtatttaaagaacagattgcaaatttctgagctccttggcagcagagcagggtt

SEQ ID NO: 9689 - DNA, 122 bp, Homo sapiens
  misc_feature (61)..(62): /note="This region represents a CpG dinucleotide"
  misc_feature (61)..(61): /note="Nucleotide may be methylated to form 5-methylcytosine"
caatgaccccgtattctggattgcagtcattcccaaagtccacaggataagggtgatatgcgtcacgtaaggatcccagactcatcagactctagggagtaccaggtgccaacaaagaaagc

SEQ ID NO: 9690 - DNA, 122 bp, Homo sapiens
  misc_feature (61)..(62): /note="This region represents a CpG dinucleotide"
  misc_feature (61)..(61): /note="Nucleotide may be methylated to form 5-methylcytosine"
cgtgtgaataattaattggctgaataacagtcacaattgaatggatgaaagagtacatgacggacaatgtatgagtggctaaactgttgaccgacagactgagtcaatgaataggtgaatga

SEQ ID NO: 9691 - DNA, 122 bp, Homo sapiens
  misc_feature (61)..(62): /note="This region represents a CpG dinucleotide"
  misc_feature (61)..(61): /note="Nucleotide may be methylated to form 5-methylcytosine"
cttctcaggaaatgaaattgctctgtgcaacaatgagagagccactttttaaactttttgcgtgagtgtgcattcaattgctcacattgttttggctccaggggaaatctgacctcggaaaa

SEQ ID NO: 9692 - DNA, 122 bp, Homo sapiens
  misc_feature (61)..(62): /note="This region represents a CpG dinucleotide"
  misc_feature (61)..(61): /note="Nucleotide may be methylated to form 5-methylcytosine"
cagtgtcttttatttgctacttcatgttgtactgcctcaggcacggggacacttgagggacgccatcctgtgacttatgcttgtgcccaccagctgccggggtccccctcccactagcgcca

SEQ ID NO: 9693 - DNA, 122 bp, Homo sapiens
  misc_feature (61)..(62): /note="This region represents a CpG dinucleotide"
  misc_feature (61)..(61): /note="Nucleotide may be methylated to form 5-methylcytosine"
agaccttgtcctttgggtaacaaagcaagcacattctttctagaaataggacagcaaaggcgaaggaagagggaaaacagtaacaaataactaaagccatataaggagcggcccatgttcag

SEQ ID NO: 9694 - DNA, 122 bp, Homo sapiens
  misc_feature (61)..(62): /note="This region represents a CpG dinucleotide"
  misc_feature (61)..(61): /note="Nucleotide may be methylated to form 5-methylcytosine"
gaatatatttaccttggattttatccctcatatcatgggcttgctctaccagctgacttgcgtggttaatggtgtccatgctttccttctgaacaagttgtccttttctggaggcttgattt

SEQ ID NO: 9695 - DNA, 122 bp, Homo sapiens
  misc_feature (61)..(62): /note="This region represents a CpG dinucleotide"
  misc_feature (61)..(61): /note="Nucleotide may be methylated to form 5-methylcytosine"
tctggtgtaacttcagttctgccagtaagccactaggctgactgtgttgcctcctggaagcgtctctgtttccaagcaggcaatgactaatgacgcttgtcacctgttatcttccatgaagt

SEQ ID NO: 9696 - DNA, 122 bp, Homo sapiens
  misc_feature (61)..(62): /note="This region represents a CpG dinucleotide"
  misc_feature (61)..(61): /note="Nucleotide may be methylated to form 5-methylcytosine"
agcaatgctcaaaataaaaataacaggaaatgagaattgaggaatattcacataagggaacgatatattgcagttaagatgagtaaactagagctcaatgtattaacagaatgttgagtgaa

SEQ ID NO: 9697 - DNA, 122 bp, Homo sapiens
  misc_feature (61)..(62): /note="This region represents a CpG dinucleotide"
  misc_feature (61)..(61): /note="Nucleotide may be methylated to form 5-methylcytosine"
aaaattctttggtaggaggtagggagtggctcttcctgctcatccttggatgtttagccgcgtccctgggcctctaaccactagatgtcagtagcataccttggccccggttttgacaacca

SEQ ID NO: 9698 - DNA, 122 bp, Homo sapiens
  misc_feature (61)..(62): /note="This region represents a CpG dinucleotide"
  misc_feature (61)..(61): /note="Nucleotide may be methylated to form 5-methylcytosine"
aagtaattaataaattctgaaaatcaagcatgtgaaatttggtaccttttgttaatacaacgtagctgagacactagcaatgacagaagtgattactcactggtattacttaatggactgta

SEQ ID NO: 9699 - DNA, 122 bp, Homo sapiens
  misc_feature (61)..(62): /note="This region represents a CpG dinucleotide"
  misc_feature (61)..(61): /note="Nucleotide may be methylated to form 5-methylcytosine"
ggacagctcagtctacagcatgtcattcatctctggaaaatatgatgactcactggctcacgtaagtacccaccacatatgtgcctaaacatacctcagtctctttcttatcaacaggttcc

SEQ ID NO: 9700 - DNA, 122 bp, Homo sapiens
  misc_feature (61)..(62): /note="This region represents a CpG dinucleotide"
  misc_feature (61)..(61): /note="Nucleotide may be methylated to form 5-methylcytosine"
tggggtgtgccaattctatggtcctactggaggctggccaatgttgactgaagacaagaacgcccaaccttgcaatagaaaccctgctgtgctgttttcctggatggtctccacaagccccg

SEQ ID NO: 9701 - DNA, 122 bp, Homo sapiens
  misc_feature (61)..(62): /note="This region represents a CpG dinucleotide"
  misc_feature (61)..(61): /note="Nucleotide may be methylated to form 5-methylcytosine"
agaagattgaagctctcctttatttgcttgtaacagaatgctcttcgtatctttcaaaagcgtcaaaagctggatatggaaagtataggccaggtttgatacagaagtgtagtttggcagtt

SEQ ID NO: 9702 - DNA, 122 bp, Homo sapiens
  misc_feature (61)..(62): /note="This region represents a CpG dinucleotide"
  misc_feature (61)..(61): /note="Nucleotide may be methylated to form 5-methylcytosine"
agggagctgaattcacagttccctgctctctccaagcacggcacctcagccctgtgtgggcgaggctgttgaccttgatctgcgtcctgccagctcaccgtcaagtaccctgttcacgcacc

SEQ ID NO: 9703 - DNA, 122 bp, Homo sapiens
  misc_feature (61)..(62): /note="This region represents a CpG dinucleotide"
  misc_feature (61)..(61): /note="Nucleotide may be methylated to form 5-methylcytosine"
tgtgtgagaagggagtgctggcctggaccatgactgtatgcactggtctgaccagacaatcgcttctcagtcttgcttagagtcagggattagcgttgtgtgccttttcccttgcttggtat

SEQ ID NO: 9704 - DNA, 122 bp, Homo sapiens
  misc_feature (61)..(62): /note="This region represents a CpG dinucleotide"
  misc_feature (61)..(61): /note="Nucleotide may be methylated to form 5-methylcytosine"
gcaaacacagccaggctgtcacacatttgcatgccttgatacacagtagtgccacatgcccgtcctcctccagtctgcctgatgaactcctcttcatccctcatagtccaactgggctggcc

SEQ ID NO: 9705 - DNA, 122 bp, Homo sapiens
  misc_feature (61)..(62): /note="This region represents a CpG dinucleotide"
  misc_feature (61)..(61): /note="Nucleotide may be methylated to form 5-methylcytosine"
cttgttccctgccgtcctcctagtacctacctcagtgcttggagaatgcatgaatgtatgcgtgccccagtcctccctgccatccacacatcctgcccacattccccagagcagctttgaca

SEQ ID NO: 9706 - DNA, 122 bp, Homo sapiens
  misc_feature (61)..(62): /note="This region represents a CpG dinucleotide"
  misc_feature (61)..(61): /note="Nucleotide may be methylated to form 5-methylcytosine"
tgagattcaggttctgcagataaggaggctcaagaattgaaaaatacctgctgtgtcttacgcagtaaaagggtcatgtgaaagaataggttcacaatgctgataagactgcttgttttatg

SEQ ID NO: 9707 - DNA, 122 bp, Homo sapiens
  misc_feature (61)..(62): /note="This region represents a CpG dinucleotide"
  misc_feature (61)..(61): /note="Nucleotide may be methylated to form 5-methylcytosine"
gaggaggaagagagatcaccctaaagttcttccagttgcacagaaccgcccccgaggcaccgctgcaccggctctttggttcagagaccctacatcacatcccactgatggagtgatagaat

SEQ ID NO: 9708 - DNA, 122 bp, Homo sapiens
  misc_feature (61)..(62): /note="This region represents a CpG dinucleotide"
  misc_feature (61)..(61): /note="Nucleotide may be methylated to form 5-methylcytosine"
atatgtttagatacagaaataccattatgttacaattgcctccagtaatgagtacagtaacgagctatacaggtttgtagcctagagatgacaggccatactccacagcctaggagtgcagc

SEQ ID NO: 9709 - DNA, 122 bp, Homo sapiens
  misc_feature (61)..(62): /note="This region represents a CpG dinucleotide"
  misc_feature (61)..(61): /note="Nucleotide may be methylated to form 5-methylcytosine"
tctacatgtcacatgagaataaaataatgcctatctcacagggttctggagaatattaagcgagataccttaaacttaatgactagcacaaagaaggtgaccactaaaatagagttcttact

SEQ ID NO: 9710 - DNA, 122 bp, Homo sapiens
  misc_feature (61)..(62): /note="This region represents a CpG dinucleotide"
  misc_feature (61)..(61): /note="Nucleotide may be methylated to form 5-methylcytosine"
tttaatccgtatcacaccactgcactgagcattgtacttcattgaggaatgtgctccaaccgtgacacacttaggtgaactttcatcatcatgtgataggcacatctatttccaaacacatc

SEQ ID NO: 9711 - DNA, 122 bp, Homo sapiens
  misc_feature (61)..(62): /note="This region represents a CpG dinucleotide"
  misc_feature (61)..(61): /note="Nucleotide may be methylated to form 5-methylcytosine"
ctactcaggaggctgaggtggggggatggcttaagcccaggggtttgaagctgctgtgcgcgatgactgtggcactgcaattcagtcttggtgacagactgagaccctgtctcaaaaacata

SEQ ID NO: 9712 - DNA, 122 bp, Homo sapiens
  misc_feature (61)..(62): /note="This region represents a CpG dinucleotide"
  misc_feature (61)..(61): /note="Nucleotide may be methylated to form 5-methylcytosine"
ccccagcaacacgagagacctcacagagggagtcacactaacgtggtcggggctccagagcgaaaccccaaccactatgctcacagccaggaccgagcaggctgggccaacggcagtccctg

SEQ ID NO: 9713 - DNA, 122 bp, Homo sapiens
  misc_feature (61)..(62): /note="This region represents a CpG dinucleotide"
  misc_feature (61)..(61): /note="Nucleotide may be methylated to form 5-methylcytosine"
ctcacctagaggaggacagagacatcaataacacacagctcccaagccggttttgcccatcgtcattcccttgcaggtctgttaaccagcaccaaggtgatgggtagagcaggttctctgtg

SEQ ID NO: 9714 - DNA, 122 bp, Homo sapiens
  misc_feature (61)..(62): /note="This region represents a CpG dinucleotide"
  misc_feature (61)..(61): /note="Nucleotide may be methylated to form 5-methylcytosine"
ctacctggtgttcctacccgcaccggggggtcccagcgcaccggaccccggtttacaggccgggtggttggaggcccagcactgcccagagccctgggcccctctcagctcaaagacccggg

SEQ ID NO: 9715 - DNA, 122 bp, Homo sapiens
  misc_feature (61)..(62): /note="This region represents a CpG dinucleotide"
  misc_feature (61)..(61): /note="Nucleotide may be methylated to form 5-methylcytosine"
aatttttagaatcagtggaaatttgttaacttttattttcttaaattcgcatttttaaaacgtggtcctggtgaccaccgtgtcagtaaaagtccagtgcataaacagaaatcacctacata

SEQ ID NO: 9716 - DNA, 122 bp, Homo sapiens
  misc_feature (61)..(62): /note="This region represents a CpG dinucleotide"
  misc_feature (61)..(61): /note="Nucleotide may be methylated to form 5-methylcytosine"
ggactcaagtgatctgccgccttggcctcccattctgtggggattaaaggtgtgagccaccgcaccctgcctccttttcctgttgtctgccattttgataagttaactttaccgaggaagaa

SEQ ID NO: 9717 - DNA, 122 bp, Homo sapiens
  misc_feature (61)..(62): /note="This region represents a CpG dinucleotide"
  misc_feature (61)..(61): /note="Nucleotide may be methylated to form 5-methylcytosine"
ggggggtccagacacaagcaccccttccctgggagactgcttaccaccatcacagtcagacgctcaagcagcacccacacgagaggagagccaccaacgtgaagcctttcagaaaaggccca

SEQ ID NO: 9718 - DNA, 122 bp, Homo sapiens
  misc_feature (61)..(62): /note="This region represents a CpG dinucleotide"
  misc_feature (61)..(61): /note="Nucleotide may be methylated to form 5-methylcytosine"
caaacctgtaaattaccggcttccgtttgctgggacaagtgtaaaatgggcctctttgtacgcaggtgaagtagatttggcaatcacaacagaccctttgtgtgacgattgtgatgataagc

SEQ ID NO: 9719 - DNA, 122 bp, Homo sapiens
  misc_feature (61)..(62): /note="This region represents a CpG dinucleotide"
  misc_feature (61)..(61): /note="Nucleotide may be methylated to form 5-methylcytosine"
aggtttagttgctctagacatgtctacaatttagaactcatgcaccaaagatgaaaattccgtgctccgggacgaactgctgttcctgggcggcccggctagctctgcctacgcgctcagcc

SEQ ID NO: 9720 - DNA, 122 bp, Homo sapiens
  misc_feature (61)..(62): /note="This region represents a CpG dinucleotide"
  misc_feature (61)..(61): /note="Nucleotide may be methylated to form 5-methylcytosine"
cttgcagttctgaaagcttgctgacagtaggttctctttatctccaccctttcactgaagcgtcttagcccaggagggttgaacccgtattagaagcccatgcctaaattaaatttcttaag

SEQ ID NO: 9721 - DNA, 122 bp, Homo sapiens
  misc_feature (61)..(62): /note="This region represents a CpG dinucleotide"
  misc_feature (61)..(61): /note="Nucleotide may be methylated to form 5-methylcytosine"
ttccaagagtccaagcttggcgagtgcaccgcagagagaaacatgctccccatagaaagacgagggcatccatcattgaggatcctgtcccccgagcacccctggtctgcaacagaaacctg

SEQ ID NO: 9722 - DNA, 122 bp, Homo sapiens
  misc_feature (61)..(62): /note="This region represents a CpG dinucleotide"
  misc_feature (61)..(61): /note="Nucleotide may be methylated to form 5-methylcytosine"
ctaaaatgtatgtcataaaataaacttagttaagcactgtaatacctttcaacttcctaccgaaataagctgccatggtagaggcagagaattattttagctgatggtgctttttgtgattt

SEQ ID NO: 9723 - DNA, 122 bp, Homo sapiens
  misc_feature (61)..(62): /note="This region represents a CpG dinucleotide"
  misc_feature (61)..(61): /note="Nucleotide may be methylated to form 5-methylcytosine"
acattatagtaacagtgagcatttattgatcgcctactataggccaggcactgggcgaggcgtttcattgatattatctcattagttaccaccttgccttgcttgttctgtatcctgcttga

SEQ ID NO: 9724 - DNA, 122 bp, Homo sapiens
  misc_feature (61)..(62): /note="This region represents a CpG dinucleotide"
  misc_feature (61)..(61): /note="Nucleotide may be methylated to form 5-methylcytosine"
tgcctcatacaaaatggaaattcaaatagtgtttattgatagggttattatggtgcttcacggagattttgcaagtaaagcacatagcataaggcctgatgcagcataagtgctcaataaat

SEQ ID NO: 9725 - DNA, 122 bp, Homo sapiens
  misc_feature (61)..(62): /note="This region represents a CpG dinucleotide"
  misc_feature (61)..(61): /note="Nucleotide may be methylated to form 5-methylcytosine"
gtgatacagatttttctgagatggacagtgcctctcactgaccccgcccccagtatcctacgaccaaggaaaagaatctcatgtgtcatttctgtgggccacggtagttaaggaaactccat

SEQ ID NO: 9726 - DNA, 122 bp, Homo sapiens
  misc_feature (61)..(62): /note="This region represents a CpG dinucleotide"
  misc_feature (61)..(61): /note="Nucleotide may be methylated to form 5-methylcytosine"
atgttaattttgtcctgaaaccagtttgtctttgcaaatgggaagtcagtcacagaaatacggcatttgccaaatgagaaatttggagtagagcccctagagaagcaaagggcttctgtttc

SEQ ID NO: 9727 - DNA, 122 bp, Homo sapiens
  misc_feature (61)..(62): /note="This region represents a CpG dinucleotide"
  misc_feature (61)..(61): /note="Nucleotide may be methylated to form 5-methylcytosine"
gatgatttgattgtgagccaggtgcttgcttatatatttggctttttgccactgctgtaacgcctgcctaaaatacacactgtgaaaatcaaataacatgcattagtcttaacatactctgg

SEQ ID NO: 9728 - DNA, 122 bp, Homo sapiens
  misc_feature (61)..(62): /note="This region represents a CpG dinucleotide"
  misc_feature (61)..(61): /note="Nucleotide may be methylated to form 5-methylcytosine"
cctaggacagaccaagccagtacgcatgggagaggaaagacaggaagaacctgagcctgacgctgctgctgagtcacagattagcccattctggagctgccatcacctccccgcttcctgct

SEQ ID NO: 9729 - DNA, 122 bp, Homo sapiens
  misc_feature (61)..(62): /note="This region represents a CpG dinucleotide"
  misc_feature (61)..(61): /note="Nucleotide may be methylated to form 5-methylcytosine"
acttccctaattctgccagacagtttccaattctgttctattgcagataaatcagcaggacgggaacagcctctcacaagactgatccatgtgatgatatgatgttgcctcattctggcctc

SEQ ID NO: 9730 - DNA, 122 bp, Homo sapiens
  misc_feature (61)..(62): /note="This region represents a CpG dinucleotide"
  misc_feature (61)..(61): /note="Nucleotide may be methylated to form 5-methylcytosine"
acacttttctctctgcagcagatccagagccagagctctacctcgatcctttctgccctccgggtttctccagtcagaaattccccatgcagcatgtgctgtgtaatcatcccccctggatc

SEQ ID NO: 9731 - DNA, 122 bp, Homo sapiens
  misc_feature (61)..(62): /note="This region represents a CpG dinucleotide"
  misc_feature (61)..(61): /note="Nucleotide may be methylated to form 5-methylcytosine"
caaagggaagaaaccacttattctggttgactgacttcgtcatgttcattaaacaaccctcgcaggaactagatacttccagaataacagaatttttttttttttgcagttggtcactttca

SEQ ID NO: 9732 - DNA, 122 bp, Homo sapiens
  misc_feature (61)..(62): /note="This region represents a CpG dinucleotide"
  misc_feature (61)..(61): /note="Nucleotide may be methylated to form 5-methylcytosine"
tggattacaaagagaattttatgacactggcaggcacataactttctccagcattctaagcgtcttcctgtctttcttgttcccacacgttaaatcagcagtgcatgacttacaatttgact

SEQ ID NO: 9733 - DNA, 122 bp, Homo sapiens
  misc_feature (61)..(62): /note="This region represents a CpG dinucleotide"
  misc_feature (61)..(61): /note="Nucleotide may be methylated to form 5-methylcytosine"
gactgtgggagtagctcagagacttcagcacatataaccaggtacaacgtgacacggggccgcacagacctgtatttgtaccggaaaaaaattttctatttatctactcttgtctgatgcca

SEQ ID NO: 9734 - DNA, 122 bp, Homo sapiens
  misc_feature (61)..(62): /note="This region represents a CpG dinucleotide"
  misc_feature (61)..(61): /note="Nucleotide may be methylated to form 5-methylcytosine"
aagtagccgggcgtggtggcgcatgcctgcatttccagctactccctgaggtgggaggatcgcttgaacccaggtggcagaggttgcggtgaactgagattgcgccattgcactccagcctg

SEQ ID NO: 9735 - DNA, 122 bp, Homo sapiens
  misc_feature (61)..(62): /note="This region represents a CpG dinucleotide"
  misc_feature (61)..(61): /note="Nucleotide may be methylated to form 5-methylcytosine"
gcacagttatcttataatattcctgtataatggttgccaaggggatgtttaatgttgttacgcaggaagctgtgctgaacaagagtcttttgctttcagatcagactctgggcaggaagtga

SEQ ID NO: 9736 - DNA, 122 bp, Homo sapiens
  misc_feature (61)..(62): /note="This region represents a CpG dinucleotide"
  misc_feature (61)..(61): /note="Nucleotide may be methylated to form 5-methylcytosine"
ttgtaatcttcaaatcccagcttgcctgctctaatggccatttgttgtttttgtcttccccgcatgcttcccaccttcttctagtaacagcgactccccttccttaagggatctcctccttc

SEQ ID NO: 9737 - DNA, 122 bp, Homo sapiens
  misc_feature (61)..(62): /note="This region represents a CpG dinucleotide"
  misc_feature (61)..(61): /note="Nucleotide may be methylated to form 5-methylcytosine"
gctgattattgtgagctcagttcccactgaggcctctcatgggggcaagtgtgtgcagggcgcgttgtcctgcctggggctgcctgggtggctaagcaggcttccctctccttgcttggtgg

SEQ ID NO: 9738 - DNA, 122 bp, Homo sapiens
  misc_feature (61)..(62): /note="This region represents a CpG dinucleotide"
  misc_feature (61)..(61): /note="Nucleotide may be methylated to form 5-methylcytosine"
ctgtatccactttaccgacaataaaagcataaagacagggctaatccccagcctggccagcgggcgtctaaatgaagggacatgtgccatgctggttaaatattttgaaggccaggtgtggt

SEQ ID NO: 9739 - DNA, 122 bp, Homo sapiens
  misc_feature (61)..(62): /note="This region represents a CpG dinucleotide"
  misc_feature (61)..(61): /note="Nucleotide may be methylated to form 5-methylcytosine"
ccagaactccatggtgaaccctcccacatatttgccctaaagacacaaacactggttgaacggagttgtggcaaataagaaagaggaaaacccaacccagaatactgcgctgtgtgtcaaat

SEQ ID NO: 9740 - DNA, 122 bp, Homo sapiens
  misc_feature (61)..(62): /note="This region represents a CpG dinucleotide"
  misc_feature (61)..(61): /note="Nucleotide may be methylated to form 5-methylcytosine"
agaagattctgcaactggctgaatgggacaaggagcactggataagcagaaaggcagagccgaagatcacaggcagacgctgagcttgagtgagagagaactgtgctgccactcactacagc

SEQ ID NO: 9741 - DNA, 122 bp, Homo sapiens
  misc_feature (61)..(62): /note="This region represents a CpG dinucleotide"
  misc_feature (61)..(61): /note="Nucleotide may be methylated to form 5-methylcytosine"
tgcccagcagccagaataagggagctcctgtgctgctttgttttgcaggtcagagtttaacgttaagacagattttttaagtttgaaaggttttcagatgagatgagttctttgggtgataa

SEQ ID NO: 9742 - DNA, 122 bp, Homo sapiens
  misc_feature (61)..(62): /note="This region represents a CpG dinucleotide"
  misc_feature (61)..(61): /note="Nucleotide may be methylated to form 5-methylcytosine"
acatattaaaaaataaacattacttgatcacctattctgttctagtacttctctatttaccgcctgtacagagaagtaacacacagtcctcaacttcaagaaggaatcctaagcatctcaaa

SEQ ID NO: 9743 - DNA, 122 bp, Homo sapiens
  misc_feature (61)..(62): /note="This region represents a CpG dinucleotide"
  misc_feature (61)..(61): /note="Nucleotide may be methylated to form 5-methylcytosine"
tatgctgaagtcctaaattcactggagttctgaatcaactcaccctgggattgactgttacgtgaaatagtaaatgtcattttgcttaagtcatttttagttgtgttttcagttacttgtag

SEQ ID NO: 9744 - DNA, 122 bp, Homo sapiens
  misc_feature (61)..(62): /note="This region represents a CpG dinucleotide"
  misc_feature (61)..(61): /note="Nucleotide may be methylated to form 5-methylcytosine"
aaaaaagtgtgtccttcatgggttacactttcatatttttatgcagtgttaagttagctacgttatggggaacttgggttttattcctgctcgtgcatgatgtatgtttcagaacttatttg

SEQ ID NO: 9745 - DNA, 122 bp, Homo sapiens
  misc_feature (61)..(62): /note="This region represents a CpG dinucleotide"
  misc_feature (61)..(61): /note="Nucleotide may be methylated to form 5-methylcytosine"
ttagaaaggggaaagatgacacaagcaatagtgaaggctagtggagggaagtggggctttcgtccaaggaagcaaaaaatcataatgtgttattttttagggagtgtctggtgcaggcatgc

SEQ ID NO: 9746 - DNA, 122 bp, Homo sapiens
  misc_feature (61)..(62): /note="This region represents a CpG dinucleotide"
  misc_feature (61)..(61): /note="Nucleotide may be methylated to form 5-methylcytosine"
gcaccagccacagttacttcgtcaaccctctgttcgccggggccgaggccgaggcctgagcggccgcctgaccgtcgaccttggggctctccacccgctctggccccagtcgaactgggggc

SEQ ID NO: 9747 - DNA, 122 bp, Homo sapiens
  misc_feature (61)..(62): /note="This region represents a CpG dinucleotide"
  misc_feature (61)..(61): /note="Nucleotide may be methylated to form 5-methylcytosine"
caaagtgctgggattataggtgtgagccaccgtgcccggcctggatctgttttcttagcacgcagtgaggaatctttgtacttaaggccagggcaacaaagtcaagaggtcaaggtgtaggg

SEQ ID NO: 9748 - DNA, 122 bp, Homo sapiens
  misc_feature (61)..(62): /note="This region represents a CpG dinucleotide"
  misc_feature (61)..(61): /note="Nucleotide may be methylated to form 5-methylcytosine"
ctgggttgagttttggacacataagatttaagttgcctagcgaacatccagcatcagagccgctgagtgatggtgaggtgtatgagggtggagacataaatcatatgacggtatctaaagcc

SEQ ID NO: 9749 - DNA, 122 bp, Homo sapiens
  misc_feature (61)..(62): /note="This region represents a CpG dinucleotide"
  misc_feature (61)..(61): /note="Nucleotide may be methylated to form 5-methylcytosine"
agggcctaaggtggacagacaactgattcatttaaatacatgagacaaatgcttaaaatacgtattttaaaaaaggctacctgagtaccaagcaaggttgaccaggctgactagctgggttg

SEQ ID NO: 9750 - DNA, 122 bp, Homo sapiens
  misc_feature (61)..(62): /note="This region represents a CpG dinucleotide"
  misc_feature (61)..(61): /note="Nucleotide may be methylated to form 5-methylcytosine"
gcacagttctttccagtcctggcacagaatagagcctgggcttcagtgtggccataagtacggggtttgtgtagggcattggggtttcgccctcatcatctcactcctgcgccactgcctgt

SEQ ID NO: 9751 - DNA, 122 bp, Homo sapiens
  misc_feature (61)..(62): /note="This region represents a CpG dinucleotide"
  misc_feature (61)..(61): /note="Nucleotide may be methylated to form 5-methylcytosine"
gcaagtgagtctgcagcttatctgtgttgcttttccctatctctcctttacttcctgtctcgcagcctcccttaccacagtagccagccccagtgctgtgttctgcatcctggcagtcccag

SEQ ID NO: 9752 - DNA, 122 bp, Homo sapiens
  misc_feature (61)..(62): /note="This region represents a CpG dinucleotide"
  misc_feature (61)..(61): /note="Nucleotide may be methylated to form 5-methylcytosine"
catgccataaacactattccacattttgtttatttcagtttacaaaacatcctgcaatctcgttgttttctgttgtgtagatgtttatttaaccaatgccctaatggtgaacacttcctggt

SEQ ID NO: 9753 - DNA, 122 bp, Homo sapiens
  misc_feature (61)..(62): /note="This region represents a CpG dinucleotide"
  misc_feature (61)..(61): /note="Nucleotide may be methylated to form 5-methylcytosine"
tgagctattgtgaagctgaattagcacacccaaatgggatttaaacccatgatctgccctcgtgagtgggaaccggtggagtgaccgtgtccgacgctctcaaggctaggtcaggcttttct

SEQ ID NO: 9754 - DNA, 122 bp, Homo sapiens
  misc_feature (61)..(62): /note="This region represents a CpG dinucleotide"
  misc_feature (61)..(61): /note="Nucleotide may be methylated to form 5-methylcytosine"
tgttccacccagacccatacaatcaaatgtgttgactcttggttctgtgagtcttatcaccgacccaaaggacaacatctgttcatcagcatgtagtgtagcatgactaggtattggatgaa

SEQ ID NO: 9755 - DNA, 122 bp, Homo sapiens
  misc_feature (61)..(62): /note="This region represents a CpG dinucleotide"
  misc_feature (61)..(61): /note="Nucleotide may be methylated to form 5-methylcytosine"
attatctcctctaccagactgtaagcaacatggcggcgaaatcacgtgtcttttgctgaacgcatttcctgtagctgcctggcagggtcaggcaaaggcagttggttaataaatctttgctg

SEQ ID NO: 9756 - DNA, 122 bp, Homo sapiens
  misc_feature (61)..(62): /note="This region represents a CpG dinucleotide"
  misc_feature (61)..(61): /note="Nucleotide may be methylated to form 5-methylcytosine"
attacagatcagtataaccacgtggttaaagcaaacaatctcggctattaatctggattccgtcactttccaattatgttaccttgagcaagttatttaacctctgtgagcctcaatttcca

SEQ ID NO: 9757 - DNA, 122 bp, Homo sapiens
  misc_feature (61)..(62): /note="This region represents a CpG dinucleotide"
  misc_feature (61)..(61): /note="Nucleotide may be methylated to form 5-methylcytosine"
ctgacaccagcccctcagcggggccgtattgctgtggtaatctgggtgagccggacagagcgtcctgcttacaagttcaatataatggaacagcagggggcgaagggctggcagaaaagctt

SEQ ID NO: 9758 - DNA, 122 bp, Homo sapiens
  misc_feature (61)..(62): /note="This region represents a CpG dinucleotide"
  misc_feature (61)..(61): /note="Nucleotide may be methylated to form 5-methylcytosine"
tgatttgccttggatgactcagctgcatattcaactattatttatctaacacccagacatcgcagggggaaaaaaaaatctaaaactcttagtcaatgaccattctccctctgcatttgttt

SEQ ID NO: 9759 - DNA, 122 bp, Homo sapiens
  misc_feature (61)..(62): /note="This region represents a CpG dinucleotide"
  misc_feature (61)..(61): /note="Nucleotide may be methylated to form 5-methylcytosine"
gacctccctctgcagtgcttgttacaaactaggtcttccggcaggctctgtggtgttcaccgtggccagacccaggccattaactgatttactgttttcaaagaacactgttcatggggtgg

SEQ ID NO: 9760 - DNA, 122 bp, Homo sapiens
  misc_feature (61)..(62): /note="This region represents a CpG dinucleotide"
  misc_feature (61)..(61): /note="Nucleotide may be methylated to form 5-methylcytosine"
acctaagccaaggtggccctctcagtttcttttgtaatagctgtactgtcaacagaggcacgcagccccaggccactttctaagacccaaaccagccagatatctctttgacaacatctata

SEQ ID NO: 9761 - DNA, 122 bp, Homo sapiens
  misc_feature (61)..(62): /note="This region represents a CpG dinucleotide"
  misc_feature (61)..(61): /note="Nucleotide may be methylated to form 5-methylcytosine"
cagcctgcggctcacgcttgcttcagtgcagctgtgtatccttctgacatgagcctggggcggttacgtcctggggtcctccactcccagggcaccctcacctacagtgatcccggcttctg

SEQ ID NO: 9762 - DNA, 122 bp, Homo sapiens
  misc_feature (61)..(62): /note="This region represents a CpG dinucleotide"
  misc_feature (61)..(61): /note="Nucleotide may be methylated to form 5-methylcytosine"
tgattattgtgagctcagttcccactgaggcctctcatgggggcaagtgtgtgcagggcgcgttgtcctgcctggggctgcctgggtggctaagcaggcttccctctccttgcttggtggcg

SEQ ID NO: 9763 - DNA, 122 bp, Homo sapiens
  misc_feature (61)..(62): /note="This region represents a CpG dinucleotide"
  misc_feature (61)..(61): /note="Nucleotide may be methylated to form 5-methylcytosine"
ctgtctgtaacagttaaatatagtacattcatcaaaagaaacactgcagctttaaaataacgaacaaaggaaatctttatgtcctgagatgaaaagatatgtatcagctgcccactgtgtta

SEQ ID NO: 9764 - DNA, 122 bp, Homo sapiens
  misc_feature (61)..(62): /note="This region represents a CpG dinucleotide"
  misc_feature (61)..(61): /note="Nucleotide may be methylated to form 5-methylcytosine"
aaagacaaggaagtgatatgaaaccacctctgttacaatgatgtccgtgcctctgaaatgcgtccacgcagaggatcgcgcagaggcagaaggaggcttggggggtgtgaaggaagaatgca

SEQ ID NO: 9765 - DNA, 122 bp, Homo sapiens
  misc_feature (61)..(62): /note="This region represents a CpG dinucleotide"
  misc_feature (61)..(61): /note="Nucleotide may be methylated to form 5-methylcytosine"
actgctttcaagaaaatattttttcttgctcgttcagttcaggagcatctcactttatgccgttaacacccccagatcctgatctctcttctcacttatctatttgccgaaaggcacatttt

SEQ ID NO: 9766 - DNA, 122 bp, Homo sapiens
  misc_feature (61)..(62): /note="This region represents a CpG dinucleotide"
  misc_feature (61)..(61): /note="Nucleotide may be methylated to form 5-methylcytosine"
tagacacggttcattacctgtcaggtaagtccctactgcaagggccttactcacattttgcgtgtccatggccttgatccttagggtccacttatctgtcacttaggccacccttgtcttta

SEQ ID NO: 9767 - DNA, 122 bp, Homo sapiens
  misc_feature (61)..(62): /note="This region represents a CpG dinucleotide"
  misc_feature (61)..(61): /note="Nucleotide may be methylated to form 5-methylcytosine"
acataatcaccataaccagtaccatcaagtttaaagtcagtgaagcgtaaaatgactttacggtgatcaccagtgtctattaaccaggtgcaattgcttccaggaggataaaagtctggata

SEQ ID NO: 9768 - DNA, 122 bp, Homo sapiens
  misc_feature (61)..(62): /note="This region represents a CpG dinucleotide"
  misc_feature (61)..(61): /note="Nucleotide may be methylated to form 5-methylcytosine"
gaggcaatgagacatgattaggtaatctgcatagcaagcactgctggttggccaaccaaacgtccattgccagactctttcttcttccttgtctggcttcattacagagaatggaaaagcta

SEQ ID NO: 9769 - DNA, 122 bp, Homo sapiens
  misc_feature (61)..(62): /note="This region represents a CpG dinucleotide"
  misc_feature (61)..(61): /note="Nucleotide may be methylated to form 5-methylcytosine"
gggcagagttcgcagcaagtccagctcaatctgcttggaggctgggttctgtttctccagcgccttctgcagcaaggtctggaagtggccaggctcagtgttgtccttgaacttcctggtgt

SEQ ID NO: 9770 - DNA, 122 bp, Homo sapiens
  misc_feature (61)..(62): /note="This region represents a CpG dinucleotide"
  misc_feature (61)..(61): /note="Nucleotide may be methylated to form 5-methylcytosine"
aggtgtgggaaggaacttccaaaggtaatagcatctggtcctagcaaggtcttaaaacgccgtttgatttcagaatgcctcattttgtagatttaatccagaatctgcagtttctggcgacg

SEQ ID NO: 9771 - DNA, 122 bp, Homo sapiens
  misc_feature (61)..(62): /note="This region represents a CpG dinucleotide"
  misc_feature (61)..(61): /note="Nucleotide may be methylated to form 5-methylcytosine"
ccctcctttcctcttgttaaatgatgattgacacacccgggctcaatttccagttcattacgtaacactctgagcaagtcatttaccctctctgagctgaagtctttttggctgtacaatgg

SEQ ID NO: 9772 - DNA, 122 bp, Homo sapiens
  misc_feature (61)..(62): /note="This region represents a CpG dinucleotide"
  misc_feature (61)..(61): /note="Nucleotide may be methylated to form 5-methylcytosine"
gaaagttactgtaagtatcatccttttctaaaagtttaaacaacttttcgaatgaggaaacgaaaccccagagagagcagccagctaagtgacaaagctggtttctgaacacacgggcccgt

SEQ ID NO: 9773 - DNA, 122 bp, Homo sapiens
  misc_feature (61)..(62): /note="This region represents a CpG dinucleotide"
  misc_feature (61)..(61): /note="Nucleotide may be methylated to form 5-methylcytosine"
tgggatcattgcacttggccagttttccagcaaaaagctgaactccaaagcttgcaaaaacgagcattaatgtcagcaaaagaatggagacctgaaagaaattgatgaaatgttaaatctct

SEQ ID NO: 9774 - DNA, 122 bp, Homo sapiens
  misc_feature (61)..(62): /note="This region represents a CpG dinucleotide"
  misc_feature (61)..(61): /note="Nucleotide may be methylated to form 5-methylcytosine"
ctccaggagttgcctgccttcagtataatgggcaacattgaaagcagcaaggcgttcggtcgacaaggtcagagtgcctttcattcctgcaataatcaaccagtgtagctcttcctcagacc

SEQ ID NO: 9775 - DNA, 122 bp, Homo sapiens
  misc_feature (61)..(62): /note="This region represents a CpG dinucleotide"
  misc_feature (61)..(61): /note="Nucleotide may be methylated to form 5-methylcytosine"
caatacaaatacagcaggtcctcagacaacctcatttcattcaatgccatttccttataacgttgatgagaaaaaacattcccagcctaggccactgtctgtgtggagtttgcacattctcc

SEQ ID NO: 9776 - DNA, 122 bp, Homo sapiens
  misc_feature (61)..(62): /note="This region represents a CpG dinucleotide"
  misc_feature (61)..(61): /note="Nucleotide may be methylated to form 5-methylcytosine"
caataaacagtgcctgagcacagggactacctaaaaaagttaagtcatatttgctaccctcgtgttgatgtaaggattcaaacatccaaacaaatatgatagaaagtggattgttattataa

SEQ ID NO: 9777 - DNA, 122 bp, Homo sapiens
  misc_feature (61)..(62): /note="This region represents a CpG dinucleotide"
  misc_feature (61)..(61): /note="Nucleotide may be methylated to form 5-methylcytosine"
cataaaaattgtgtgtcctggaatgtcgtcgtctttcacataaagccaatctcaaatatacgtcttgttttagcaaaatatttttcagcaccaaaaagggatagacctaccaatgctctgtt

SEQ ID NO: 9778 - DNA, 122 bp, Homo sapiens
  misc_feature (61)..(62): /note="This region represents a CpG dinucleotide"
  misc_feature (61)..(61): /note="Nucleotide may be methylated to form 5-methylcytosine"
ttggaaattcatgcatgtctttgtagtccataggattctcagaataaccttgtgactagacgagagaaatattgactgtgcgattactgaaggcaaagactgtttgtgatgcttgattactt

SEQ ID NO: 9779 - DNA, 122 bp, Homo sapiens
  misc_feature (61)..(62): /note="This region represents a CpG dinucleotide"
  misc_feature (61)..(61): /note="Nucleotide may be methylated to form 5-methylcytosine"
cctgccatgtaatggtaaatctaagtcaaccctagtaatttcattcctctggccaatgatcgcttggggtgtggccatgagctgcctcttcgcctgagcctgagccacagctaccctctgca

SEQ ID NO: 9780 - DNA, 122 bp, Homo sapiens
  misc_feature (61)..(62): /note="This region represents a CpG dinucleotide"
  misc_feature (61)..(61): /note="Nucleotide may be methylated to form 5-methylcytosine"
tttttagttgcaaatgggctgtttatgatgatcattatttgaatggtctgcgccgggctccgggctgtctgtctgctgctgatggccagttaatcagatgagtctcctccctgcctgggcct

SEQ ID NO: 9781 - DNA, 122 bp, Homo sapiens
  misc_feature (61)..(62): /note="This region represents a CpG dinucleotide"
  misc_feature (61)..(61): /note="Nucleotide may be methylated to form 5-methylcytosine"
ctgcacacagggctcactggagacacactgacatctcgattccttttcccacccactgcccgcgtggggctgtgggccaggctggtccctgtccactatttgtaagccttcccagccctttc

SEQ ID NO: 9782 - DNA, 122 bp, Homo sapiens
  misc_feature (61)..(62): /note="This region represents a CpG dinucleotide"
  misc_feature (61)..(61): /note="Nucleotide may be methylated to form 5-methylcytosine"
gtgttctataccactgtgggatgactgtcattaacaataatactttatatcatttcaaatcgctagaagaaggatatggaatgtttccaacacaaagaaatgataaatgagatgatgatctg

SEQ ID NO: 9783 - DNA, 122 bp, Homo sapiens
  misc_feature (61)..(62): /note="This region represents a CpG dinucleotide"
  misc_feature (61)..(61): /note="Nucleotide may be methylated to form 5-methylcytosine"
aggtttttctctggacaaaaaggggcctaccatttagactctcacactcagtcagccctgcgtcaaggtcacaccacatagggccatgagtcatggccaaatcaggcctgccctgcctcctg

SEQ ID NO: 9784 - DNA, 122 bp, Homo sapiens
  misc_feature (61)..(62): /note="This region represents a CpG dinucleotide"
  misc_feature (61)..(61): /note="Nucleotide may be methylated to form 5-methylcytosine"
cctgggctgtttaatacacttggcactcgtgctgcctaccagctgcctggatgttttgagcgtttctaataatagctctccttctacttcagttcttcttagttctctagctctaggaaatc

SEQ ID NO: 9785 - DNA, 122 bp, Homo sapiens
  misc_feature (61)..(62): /note="This region represents a CpG dinucleotide"
  misc_feature (61)..(61): /note="Nucleotide may be methylated to form 5-methylcytosine"
atacactgaaaccagctcaggcagaacaaaggaacaaagacaaatttcccaggttgcagccggcagtcagaagccagaagccaccaaatagctccctgggttgcttttatgcactcaacctg

SEQ ID NO: 9786 - DNA, 122 bp, Homo sapiens
  misc_feature (61)..(62): /note="This region represents a CpG dinucleotide"
  misc_feature (61)..(61): /note="Nucleotide may be methylated to form 5-methylcytosine"
gagtgatgaatggcaacaatgatgactgactgacagctgtgatgactgacagtaatgacacgtcatgccacactgcactggggtcacacctctggaaggccactttgttgattcaacttgag

SEQ ID NO: 9787 - DNA, 122 bp, Homo sapiens
  misc_feature (61)..(62): /note="This region represents a CpG dinucleotide"
  misc_feature (61)..(61): /note="Nucleotide may be methylated to form 5-methylcytosine"
ttgacaaaaatctctttaaacaccaatgagtcaaagcctgggatctggagaaattgatgacgtctgcagctataggtaaaacatctttcaggactattggcagggactttaatgcttttgca

SEQ ID NO: 9788 - DNA, 122 bp, Homo sapiens
  misc_feature (61)..(62): /note="This region represents a CpG dinucleotide"
  misc_feature (61)..(61): /note="Nucleotide may be methylated to form 5-methylcytosine"
tcattcatttatctattcaccaatattaagcacccactgtgtaggaggcactgttctaggcgctgcagatacagaagtaaacaaaatgacaaagtcctagttacacattctaggaaataaga

SEQ ID NO: 9789 - DNA, 122 bp, Homo sapiens
  misc_feature (61)..(62): /note="This region represents a CpG dinucleotide"
  misc_feature (61)..(61): /note="Nucleotide may be methylated to form 5-methylcytosine"
tgggaagaacagtcctgctcacttgggagggctgtgtcagcttttacagagcagctttcacggtcctttgttcctctctccccagatcctacagtgtcagtatccgaatcaatcactttcct

SEQ ID NO: 9790 - DNA, 122 bp, Homo sapiens
  misc_feature (61)..(62): /note="This region represents a CpG dinucleotide"
  misc_feature (61)..(61): /note="Nucleotide may be methylated to form 5-methylcytosine"
atatagtgattggccagaaaacagtaaggtaaaaagccattgtcctaagtgtttgaaaggcgaggacagagtatttagtttgagtgcattgtctccagccagagtagtgagtaaatacaaga

SEQ ID NO: 9791 - DNA, 122 bp, Homo sapiens
  misc_feature (61)..(62): /note="This region represents a CpG dinucleotide"
  misc_feature (61)..(61): /note="Nucleotide may be methylated to form 5-methylcytosine"
agaagtttggaatgtcagacaaggaggaagtgaagctaaatcctggaaccacaggggctacgtctgcacagatgccataactgagagctacatcccttgagaagaaatggaaagcaaaagta

SEQ ID NO: 9792 - DNA, 122 bp, Homo sapiens
  misc_feature (61)..(62): /note="This region represents a CpG dinucleotide"
  misc_feature (61)..(61): /note="Nucleotide may be methylated to form 5-methylcytosine"
aagtgaaagtaacaggtctctcccttgaaagcaaaagttagaaatgattaagcttagtgacgaagacacatcaaaacctgagataagccagaagctaggcctcttgcactcaacagttaccc

SEQ ID NO: 9793 - DNA, 122 bp, Homo sapiens
  misc_feature (61)..(62): /note="This region represents a CpG dinucleotide"
  misc_feature (61)..(61): /note="Nucleotide may be methylated to form 5-methylcytosine"
gatggctgcctgaggccttgcccagaggaagctgagagagaagagatggaagagagcccacggctctgggacccagcagagcacattcagatggaaaccagctatgactgggtgacacctct

SEQ ID NO: 9794 - DNA, 122 bp, Homo sapiens
  misc_feature (61)..(62): /note="This region represents a CpG dinucleotide"
  misc_feature (61)..(61): /note="Nucleotide may be methylated to form 5-methylcytosine"
cataaatggtgccttcattttgtgagtctgcgctgagtgaggccgtgaggcgggcggttccgccacctgctttccacgccagaggcctttcaagacggcgggagccctgcggttccagcgcg

SEQ ID NO: 9795 - DNA, 122 bp, Homo sapiens
  misc_feature (61)..(62): /note="This region represents a CpG dinucleotide"
  misc_feature (61)..(61): /note="Nucleotide may be methylated to form 5-methylcytosine"
tcactttcctcctctacacatgcaactcttggatgacaacttaagccaatcactatatctcgtattcctttaactcctctcactcccagattggttcaggaacaggaacgtaatcatatgac

SEQ ID NO: 9796 - DNA, 122 bp, Homo sapiens
  misc_feature (61)..(62): /note="This region represents a CpG dinucleotide"
  misc_feature (61)..(61): /note="Nucleotide may be methylated to form 5-methylcytosine"
tgagtagtgggcagggaagaagccagcctgggcctgggctccttggggagacaggactaacgctggagcctgggccactgcaggcctgtgatctggaacccagcaaagcctcatcaccctgc

SEQ ID NO: 9797 - DNA, 122 bp, Homo sapiens
  misc_feature (61)..(62): /note="This region represents a CpG dinucleotide"
  misc_feature (61)..(61): /note="Nucleotide may be methylated to form 5-methylcytosine"
tgctttacacagctacttcaaaaaccagtacataatttgcatattcggatcaataggtggcgcttttcccctttctgacagtctcgttttcagaatcctgttagagtcaaacttattgttac

SEQ ID NO: 9798 - DNA, 122 bp, Homo sapiens
  misc_feature (61)..(62): /note="This region represents a CpG dinucleotide"
  misc_feature (61)..(61): /note="Nucleotide may be methylated to form 5-methylcytosine"
aaatacttcagggtctgcagatctgtaggatctttagcaactacctactctgttgtaaggcgaaagcaggcagagaagccaggtaaacgcgtgggcgtgtctgtgtgctaataaaactttat

SEQ ID NO: 9799 - DNA, 122 bp, Homo sapiens
  misc_feature (61)..(62): /note="This region represents a CpG dinucleotide"
  misc_feature (61)..(61): /note="Nucleotide may be methylated to form 5-methylcytosine"
agctggatggtttgatgcctcaagtcagaagaccacactgcctgcgtctgaaccccagctcgccagctgtgagatcttgggcaacttaatgtacctttcagagcctcaacattttcatctgt

SEQ ID NO: 9800 - DNA, 122 bp, Homo sapiens
  misc_feature (61)..(62): /note="This region represents a CpG dinucleotide"
  misc_feature (61)..(61): /note="Nucleotide may be methylated to form 5-methylcytosine"
cactcagtttaaggaaacacagagcagagaggagaacattaaacaacaccctgaggaagccgtgagccaggctcagaacataagccactccacaggagaaatgacttcattttttcaacaaa

SEQ ID NO: 9801 - DNA, 122 bp, Homo sapiens
  misc_feature (61)..(62): /note="This region represents a CpG dinucleotide"
  misc_feature (61)..(61): /note="Nucleotide may be methylated to form 5-methylcytosine"
tgctcacaggcaaaaaaaaaaaaaaaccaaacaaacaaaaaaaaacagtcactagctaaacgtgctgagctttaccaagcctcgcctcatctcaggtcaggaactgggtggatccctgaaat

SEQ ID NO: 9802 - DNA, 122 bp, Homo sapiens
  misc_feature (61)..(62): /note="This region represents a CpG dinucleotide"
  misc_feature (61)..(61): /note="Nucleotide may be methylated to form 5-methylcytosine"
ccagaacattctggcacaggtgccagtccagcctcagtgctccagccctgctgcagccagcgaagccaagtacatatttcatggagaatagtcagtcataaacgctgtggaaaactgaatga

SEQ ID NO: 9803 - DNA, 122 bp, Homo sapiens
  misc_feature (61)..(62): /note="This region represents a CpG dinucleotide"
  misc_feature (61)..(61): /note="Nucleotide may be methylated to form 5-methylcytosine"
actgctgcccatattccactggccaagcaagccacatggccacacccagcctcaaggggacgtggggatatgcacttctcaatgtacctataagtgagcctgtgggtggtagttaatccctg

SEQ ID NO: 9804 - DNA, 122 bp, Homo sapiens
  misc_feature (61)..(62): /note="This region represents a CpG dinucleotide"
  misc_feature (61)..(61): /note="Nucleotide may be methylated to form 5-methylcytosine"
tcatagatcagaacatactggagcctgtaacccgtgcacagagggtgtggattacaccaacgcttccaacaatgaaccttcttgcttcccatgtacagtttgtaaatcaggtacagaatgtg

SEQ ID NO: 9805 - DNA, 122 bp, Homo sapiens
  misc_feature (61)..(62): /note="This region represents a CpG dinucleotide"
  misc_feature (61)..(61): /note="Nucleotide may be methylated to form 5-methylcytosine"
ccctctcagggtgctcctgaggctatgagcagctggcagttccctgtctgagaggtccttcgtaccgcaggagaggcagctctcacctgaaggcctccctggacaccggtctcaactttgtg

SEQ ID NO: 9806 - DNA, 122 bp, Homo sapiens
  misc_feature (61)..(62): /note="This region represents a CpG dinucleotide"
  misc_feature (61)..(61): /note="Nucleotide may be methylated to form 5-methylcytosine"
tctagagattcaagtcacagccttaggccccagtcacaagtgtgtccccaggctttgccacgttactcacaggcctctggagctgagaacaagtgcgtggcactgaaaaacctgggggaagg

SEQ ID NO: 9807 - DNA, 122 bp, Homo sapiens
  misc_feature (61)..(62): /note="This region represents a CpG dinucleotide"
  misc_feature (61)..(61): /note="Nucleotide may be methylated to form 5-methylcytosine"
gaagcatagccaagccttgggcgtgtgtgtgcactgcacacccacacatgcatatgtacacgtgacagacctgctgggctgaaccactgagccttagagctcagagctatcaggaccttaga

SEQ ID NO: 9808 - DNA, 122 bp, Homo sapiens
  misc_feature (61)..(62): /note="This region represents a CpG dinucleotide"
  misc_feature (61)..(61): /note="Nucleotide may be methylated to form 5-methylcytosine"
cattaaagaagggagaaagagcaccctcttttggcaaaagtttctcctgtgtgggctctccggtccccctgtctcatttcaaaatcagatttgcatcctgctgttggagtacacttgagccc

SEQ ID NO: 9809 - DNA, 122 bp, Homo sapiens
  misc_feature (61)..(62): /note="This region represents a CpG dinucleotide"
  misc_feature (61)..(61): /note="Nucleotide may be methylated to form 5-methylcytosine"
tccccagaaattgtgatttaactggcctcagggtgcatcctgggcatcaagattctagagcgtggtagagtttgaagaccgctagtctaacaagtctgctcccagttgcttgctgattctct

SEQ ID NO: 9810 - DNA, 122 bp, Homo sapiens
  misc_feature (61)..(62): /note="This region represents a CpG dinucleotide"
  misc_feature (61)..(61): /note="Nucleotide may be methylated to form 5-methylcytosine"
gtcaccaaggaatggcatacagtgcaggcagggccaagtcctcagctccaggtctcctgccgatgctgtttgcttgacaacaccacgtggctgggtcaacatgcaccacatggagagcttgg

SEQ ID NO: 9811 - DNA, 122 bp, Homo sapiens
  misc_feature (61)..(62): /note="This region represents a CpG dinucleotide"
  misc_feature (61)..(61): /note="Nucleotide may be methylated to form 5-methylcytosine"
tgcttacagtatgtgaaatactctcaccagaacaaaggtcccagcgtcaataagtcaaaccgcagactctgacagctgagtgaatagcagaggccagagtccacttgaagtgttcacactct

SEQ ID NO: 9812 - DNA, 122 bp, Homo sapiens
  misc_feature (61)..(62): /note="This region represents a CpG dinucleotide"
  misc_feature (61)..(61): /note="Nucleotide may be methylated to form 5-methylcytosine"
gcagctgaacagtgctgggtttggtgactcagaaattctcttggcctttcctcatgattgcgagatggctgctatagctccaagcatcatgtctgtgttctagggagaaagaagatgaggaa

SEQ ID NO: 9813 - DNA, 122 bp, Homo sapiens
  misc_feature (61)..(62): /note="This region represents a CpG dinucleotide"
  misc_feature (61)..(61): /note="Nucleotide may be methylated to form 5-methylcytosine"
tgcccggccaggaccctgagtggttcacttatacaaggatcttcttcctcttctgtcacccgagacagcaagactaccccctgcctcctcctcagccttctcaacgtgagaacaaggatgaa

SEQ ID NO: 9814 - DNA, 122 bp, Homo sapiens
  misc_feature (61)..(62): /note="This region represents a CpG dinucleotide"
  misc_feature (61)..(61): /note="Nucleotide may be methylated to form 5-methylcytosine"
cgcacagccaggccaggcgccccgtcgcgccccacatacgcggggtgcactcggcggggccgggcgggaacatggcgcctgccctccactcgggaccgccacagaaaaatcgggggtgcgtg

SEQ ID NO: 9815 - DNA, 122 bp, Homo sapiens
  misc_feature (61)..(62): /note="This region represents a CpG dinucleotide"
  misc_feature (61)..(61): /note="Nucleotide may be methylated to form 5-methylcytosine"
tcagccccaagtgtggactcccaagccttagcagctgtagagagcaactggctacttagccgcagccctggagccacccctggtcctaaatttcgggcaccactgccctccaggcatcctgg

SEQ ID NO: 9816 - DNA, 122 bp, Homo sapiens
  misc_feature (61)..(62): /note="This region represents a CpG dinucleotide"
  misc_feature (61)..(61): /note="Nucleotide may be methylated to form 5-methylcytosine"
agacggggtttcaccatgttagccaggacttcctctaattctcccatcaaatgcagagggcgtccttttctgcacccatagtttctaccctatattgtattacaatgcttgtggtggccctg

SEQ ID NO: 9817 - DNA, 122 bp, Homo sapiens
  misc_feature (61)..(62): /note="This region represents a CpG dinucleotide"
  misc_feature (61)..(61): /note="Nucleotide may be methylated to form 5-methylcytosine"
ccagtacataatttgcatattcggatcaataggtggcgcttttcccctttctgacagtctcgttttcagaatcctgttagagtcaaacttattgttacaaatcttcaatattaccgatagaa

SEQ ID NO: 9818 - DNA, 122 bp, Homo sapiens
  misc_feature (61)..(62): /note="This region represents a CpG dinucleotide"
  misc_feature (61)..(61): /note="Nucleotide may be methylated to form 5-methylcytosine"
caagatccataggtggtgctgagccatctctttcagggtctaaccttctgtggaaaagcacggcactgttctagcagagtcagtttcacttgagttttcttcctcctttttataacgacatt

SEQ ID NO: 9819 - DNA, 122 bp, Homo sapiens
  misc_feature (61)..(62): /note="This region represents a CpG dinucleotide"
  misc_feature (61)..(61): /note="Nucleotide may be methylated to form 5-methylcytosine"
aggaaaattcaaatgaatagctcagttataaggcaaatattcatttttcaaacaaactgtcgaaaggattcatttaaaaatctacttacaagcttggattacaacagtccattaaaaagtca

SEQ ID NO: 9820 - DNA, 122 bp, Homo sapiens
  misc_feature (61)..(62): /note="This region represents a CpG dinucleotide"
  misc_feature (61)..(61): /note="Nucleotide may be methylated to form 5-methylcytosine"
cattacggcacttggcatgcaaatcgcttctgtgctgcaggccgggtgctgggcagggctcgcggaaggtttaaacagggttggagtcgtttacgaggggacaagtgacaaggaaaaaaaat

SEQ ID NO: 9821 - DNA, 122 bp, Homo sapiens
  misc_feature (61)..(62): /note="This region represents a CpG dinucleotide"
  misc_feature (61)..(61): /note="Nucleotide may be methylated to form 5-methylcytosine"
cagatcagatagttaatcttgcatttcagttgttccaggtacctttaaatattctttatacgcatcactactttgacaatattgtagttgatccaccactagattttgccattaatgcatta

SEQ ID NO: 9822 - DNA, 122 bp, Homo sapiens
  misc_feature (61)..(62): /note="This region represents a CpG dinucleotide"
  misc_feature (61)..(61): /note="Nucleotide may be methylated to form 5-methylcytosine"
ttttaagcgtttacagggccctaaattcagacattttctatttgctataagaacatctcacgtgttagttactctgaagttcactggggcagaatgccatacatctgatttataataacgtt

SEQ ID NO: 9823 - DNA, 122 bp, Homo sapiens
  misc_feature (61)..(62): /note="This region represents a CpG dinucleotide"
  misc_feature (61)..(61): /note="Nucleotide may be methylated to form 5-methylcytosine"
agggttaacaattactgagtagagtccagggatgcgtttaacctcctacaacacacaggacggcctccaacaacaaagaattactcagcaatggtaccaggtttgagaaaccctggtctagc

SEQ ID NO: 9824 - DNA, 122 bp, Homo sapiens
  misc_feature (61)..(62): /note="This region represents a CpG dinucleotide"
  misc_feature (61)..(61): /note="Nucleotide may be methylated to form 5-methylcytosine"
gagttaggaattttcctgtttgaattcctggcattctgcacactttattgcatctttgctcgtgagcctcaaatgagatatttggattacagatccttagaagaataaaatccataagctct

SEQ ID NO: 9825 - DNA, 122 bp, Homo sapiens
  misc_feature (61)..(62): /note="This region represents a CpG dinucleotide"
  misc_feature (61)..(61): /note="Nucleotide may be methylated to form 5-methylcytosine"
gtgatcctttcctcctgctgtttgttttggtctgtccctttcaggcaggagacttcactccgtgtctaatgaccttgcctgtctgtcccgagaatgggacactctcaaacatgcttgactga

SEQ ID NO: 9826 - DNA, 122 bp, Homo sapiens
  misc_feature (61)..(62): /note="This region represents a CpG dinucleotide"
  misc_feature (61)..(61): /note="Nucleotide may be methylated to form 5-methylcytosine"
ggttatgcaaacaacagtccacctaatatttttggcaatgataatgaagttatggaacaacgaagaccgaagaggcatacactgatgcatataaagctccagagttgggaaaatatacaagc

SEQ ID NO: 9827 - DNA, 122 bp, Homo sapiens
  misc_feature (61)..(62): /note="This region represents a CpG dinucleotide"
  misc_feature (61)..(61): /note="Nucleotide may be methylated to form 5-methylcytosine"
gcttgagttgaatgacttttccaccctctttccttggcaggaacaagtgaccctgtcttccgtggcctcgtggggctggctctgctcctcctcccttgactgagagacgtcatggagattgg

SEQ ID NO: 9828 - DNA, 122 bp, Homo sapiens
  misc_feature (61)..(62): /note="This region represents a CpG dinucleotide"
  misc_feature (61)..(61): /note="Nucleotide may be methylated to form 5-methylcytosine"
ctcaaatgatctgcctgccttggcctcccaaagtgctgggattacaggcgtgagccaccacgcccggtgctgatggcatttggaaccaccctgtagttacatacacaagtgtttctgatccc

SEQ ID NO: 9829 - DNA, 122 bp, Homo sapiens
  misc_feature (61)..(62): /note="This region represents a CpG dinucleotide"
  misc_feature (61)..(61): /note="Nucleotide may be methylated to form 5-methylcytosine"
tccaggttgacacatggtggcagggcggagcttgagaggggtgtggttaggtcaggtcagcggacaagggccatatccagccacccacgctggccattcgcagtgtgccatcactgtgcggg

SEQ ID NO: 9830 - DNA, 122 bp, Homo sapiens
  misc_feature (61)..(62): /note="This region represents a CpG dinucleotide"
  misc_feature (61)..(61): /note="Nucleotide may be methylated to form 5-methylcytosine"
agagcaaaaagagaacctggaagtgttcccaaatttaacatctgcaggcagataggatgacgaaatgtattagtactgaggaataactttctcccgtcttcttggaaaacatctggggtatt

SEQ ID NO: 9831 - DNA, 122 bp, Homo sapiens
  misc_feature (61)..(62): /note="This region represents a CpG dinucleotide"
  misc_feature (61)..(61): /note="Nucleotide may be methylated to form 5-methylcytosine"
gtcataaagaacttgattttgccaacttcctcactggatcaaaggcctttgtcagactttcgccactgtttgtcttatgcagcaagatctctctcagtgacacggctgggaagtaaagtatc

SEQ ID NO: 9832 - DNA, 122 bp, Homo sapiens
  misc_feature (61)..(62): /note="This region represents a CpG dinucleotide"
  misc_feature (61)..(61): /note="Nucleotide may be methylated to form 5-methylcytosine"
tataaaatagtgggtgttataattcacaagataatctcatttcctttccaaggtccctaacgtttgtgtcctctttagaactgtggctctaaaacaaattgcaagacagtatactctgatga

SEQ ID NO: 9833 - DNA, 122 bp, Homo sapiens
  misc_feature (61)..(62): /note="This region represents a CpG dinucleotide"
  misc_feature (61)..(61): /note="Nucleotide may be methylated to form 5-methylcytosine"
aagggggtggagaacatgacgctgggctcctttgacggcggagcccagctatgtggcccacgccctcagccctggagataatttggttcattcacatgttggtgatgacagagatactgcag

SEQ ID NO: 9834 - DNA, 122 bp, Homo sapiens
  misc_feature (61)..(62): /note="This region represents a CpG dinucleotide"
  misc_feature (61)..(61): /note="Nucleotide may be methylated to form 5-methylcytosine"
ccctgtgacatagcagcttctcttctagaaactcttatatatctttactggaaacatgtacgagaattttcagagcagcattacttttaattccaaactttcctgtaaaacccaaatgtcca

SEQ ID NO: 9835 - DNA, 122 bp, Homo sapiens
  misc_feature (61)..(62): /note="This region represents a CpG dinucleotide"
  misc_feature (61)..(61): /note="Nucleotide may be methylated to form 5-methylcytosine"
gcagcaggtaggtaggtggtgggggccctctttttcacttttctttctctctttccttgtcgtgagctcaggggccataagccacccgttcaacagccaaaggatgaagcagatcttggcaa

SEQ ID NO: 9836 - DNA, 122 bp, Homo sapiens
  misc_feature (61)..(62): /note="This region represents a CpG dinucleotide"
  misc_feature (61)..(61): /note="Nucleotide may be methylated to form 5-methylcytosine"
ttcaaaacatttcttgaacaccttttcagcacagaacctaatctggctcctgcaaacaaacgtgaataagctgaattccggtcatcaaggcggtcacagcttaataggaaagaaggatatgt

SEQ ID NO: 9837 - DNA, 122 bp, Homo sapiens
  misc_feature (61)..(62): /note="This region represents a CpG dinucleotide"
  misc_feature (61)..(61): /note="Nucleotide may be methylated to form 5-methylcytosine"
gatgattaagacttagtaatgtccatcttacacttcagtctgatatttaccttctttagccgtagcccaacttgtagtttcagggactttcatggtccctcttcttttcagtcctggattgt

SEQ ID NO: 9838 - DNA, 122 bp, Homo sapiens
  misc_feature (61)..(62): /note="This region represents a CpG dinucleotide"
  misc_feature (61)..(61): /note="Nucleotide may be methylated to form 5-methylcytosine"
tggcaaacagccagcaagttctcagtagatttcccatttgtcataggtttctcatgtatccgggtttggcttaaagatcaaattgcctttaggttgacttctgatccttgccagaaagagct

SEQ ID NO: 9839 - DNA, 122 bp, Homo sapiens
  misc_feature (61)..(62): /note="This region represents a CpG dinucleotide"
  misc_feature (61)..(61): /note="Nucleotide may be methylated to form 5-methylcytosine"
gactcagaactgggtggatgcagcgctgaagtgtagaatagccatggttacacacccttccgcagttgttatagggatatttcctggtaatgtattgtaaaaggacaatttcccagtatatt

SEQ ID NO: 9840 - DNA, 122 bp, Homo sapiens
  misc_feature (61)..(62): /note="This region represents a CpG dinucleotide"
  misc_feature (61)..(61): /note="Nucleotide may be methylated to form 5-methylcytosine"
atcagctccaagtaagttatgacaaagaacccaggactagctacaaatcctcctgacattcgcccttcgcaagctgatatttgagagcccagctgactcagaaggaggcagagctgcaggtg

SEQ ID NO: 9841 - DNA, 122 bp, Homo sapiens
  misc_feature (61)..(62): /note="This region represents a CpG dinucleotide"
  misc_feature (61)..(61): /note="Nucleotide may be methylated to form 5-methylcytosine"
cactgatcttaacttgatcacagtagatccattgctaagccacataagtcatgggtagaccgtaacataactgacaaaatgttttggcactagggaaggtttaaagacttttctgcaggtgc

SEQ ID NO: 9842 - DNA, 122 bp, Homo sapiens
  misc_feature (61)..(62): /note="This region represents a CpG dinucleotide"
  misc_feature (61)..(61): /note="Nucleotide may be methylated to form 5-methylcytosine"
tgatgctgaacagtactgaggtcaaaccccaggcaaaacagcttcgctaaggtatgaaaccgagctacctgtttttgatatttgttgcttgttttatttggttggttggtggaaagtcttat

SEQ ID NO: 9843 - DNA, 122 bp, Homo sapiens
  misc_feature (61)..(62): /note="This region represents a CpG dinucleotide"
  misc_feature (61)..(61): /note="Nucleotide may be methylated to form 5-methylcytosine"
atgggtgccttaatattcctatgggataaatgctttatttggtcaaaaactggaagctgacgctccacttaagagtctaggtcacgcggcaagccagacacttgaaggagcttaaagctttc

SEQ ID NO: 9844 - DNA, 122 bp, Homo sapiens
  misc_feature (61)..(62): /note="This region represents a CpG dinucleotide"
  misc_feature (61)..(61): /note="Nucleotide may be methylated to form 5-methylcytosine"
cttcagggaggagccagcaacacaaaagccctttcaccagcacattttttaactctctgccgggcctcccacccgtctctaatcaagttcctgctgccaggaattctagccccagctcccac

SEQ ID NO: 9845 - DNA, 122 bp, Homo sapiens
  misc_feature (61)..(62): /note="This region represents a CpG dinucleotide"
  misc_feature (61)..(61): /note="Nucleotide may be methylated to form 5-methylcytosine"
gagtcagaacctgggtggaatcttggctctgccactcattaagcgccatgaccttaagcacgttgcctaaaactctctagcctgcttcctcttctacaaactgcacacacctaccccacagg

SEQ ID NO: 9846 - DNA, 122 bp, Homo sapiens
  misc_feature (61)..(62): /note="This region represents a CpG dinucleotide"
  misc_feature (61)..(61): /note="Nucleotide may be methylated to form 5-methylcytosine"
ctaggcagtggctggatgggatggctgatacctgtgatcttcctgcaggtgcccaagggccgccgggatggcctgcctgcccacattggctccatggcacagcgggcatactgggcgctgct

SEQ ID NO: 9847 - DNA, 122 bp, Homo sapiens
  misc_feature (61)..(62): /note="This region represents a CpG dinucleotide"
  misc_feature (61)..(61): /note="Nucleotide may be methylated to form 5-methylcytosine"
aaatcttgcataaatcagggactgacctttgtactctcctttcagggccttaccttttatcgtagtcaaaatgaagaaagcaatgagggtgttgttgatggcacaggtagacttggcaacac

SEQ ID NO: 9848 - DNA, 122 bp, Homo sapiens
  misc_feature (61)..(62): /note="This region represents a CpG dinucleotide"
  misc_feature (61)..(61): /note="Nucleotide may be methylated to form 5-methylcytosine"
ttgcagtatcgtggtgttgagtcacttgcgatctttccggttcagtgactcctcagtgtgcgtggattggggccctccagagatgctctctgtctgtgtgtgtcatcgcagccctctgctgt

SEQ ID NO: 9849 - DNA, 122 bp, Homo sapiens
  misc_feature (61)..(62): /note="This region represents a CpG dinucleotide"
  misc_feature (61)..(61): /note="Nucleotide may be methylated to form 5-methylcytosine"
ggattacagttgtcccatccatacactggtctgtgttggcttttgtcacctgggcatgtgcggccaccatcttgactgctcagctagttctgtacctgggttctagaatgatgtcataatga

SEQ ID NO: 9850 - DNA, 122 bp, Homo sapiens
  misc_feature (61)..(62): /note="This region represents a CpG dinucleotide"
  misc_feature (61)..(61): /note="Nucleotide may be methylated to form 5-methylcytosine"
gggctttactttgcacaaactcaggtggaatcagtcaggatccagccaggagacaggaaacgcagcagtaatttgaacaggaaaaattcagtatacagaatcgttaacaaaggaaaagaagg

SEQ ID NO: 9851 - DNA, 122 bp, Homo sapiens
  misc_feature (61)..(62): /note="This region represents a CpG dinucleotide"
  misc_feature (61)..(61): /note="Nucleotide may be methylated to form 5-methylcytosine"
tttattataaatactaatatcatttttatgttctctgtagttcacttcctgccttgccaacgcctttaggctattttgcgttccccatatgtgggaatggatatttttagcattaagcagaa

SEQ ID NO: 9852 - DNA, 122 bp, Homo sapiens
  misc_feature (61)..(62): /note="This region represents a CpG dinucleotide"
  misc_feature (61)..(61): /note="Nucleotide may be methylated to form 5-methylcytosine"
cactgactgtattctgtgagcactgaaagtacttcctctttctaattgtttctgggcaagcgtaagttatttgattagccaattaacaaagtgaaatagggaggctgaggcaggagaattgc

SEQ ID NO: 9853 - DNA, 122 bp, Homo sapiens
  misc_feature (61)..(62): /note="This region represents a CpG dinucleotide"
  misc_feature (61)..(61): /note="Nucleotide may be methylated to form 5-methylcytosine"
gtgtcttgcccatcatcttatgtatccccaccctgtgggagtctggggttcctggtggtgcgtctctggtcttcactcctgcagctgttttgcttggggtagaagtttcatgtttgcctgaa

SEQ ID NO: 9854 - DNA, 122 bp, Homo sapiens
  misc_feature (61)..(62): /note="This region represents a CpG dinucleotide"
  misc_feature (61)..(61): /note="Nucleotide may be methylated to form 5-methylcytosine"
gaagtggcagaagcttctgtacgtaggaacccagtcacttcgtagcagagaggcagactgcgcacagatctgcgtggggaagggagtgcgccaagccacagcctgatgggccggcgtgcctg

SEQ ID NO: 9855 - DNA, 122 bp, Homo sapiens
  misc_feature (61)..(62): /note="This region represents a CpG dinucleotide"
  misc_feature (61)..(61): /note="Nucleotide may be methylated to form 5-methylcytosine"
aatgttctacccttgagaactcatctggggatgggaagaaagccaaaaagtaaactgcttcgttctctagtttaatctgcctgttacatggtctcctagaagcctgtatcttctcttcaaag

SEQ ID NO: 9856 - DNA, 122 bp, Homo sapiens
  misc_feature (61)..(62): /note="This region represents a CpG dinucleotide"
  misc_feature (61)..(61): /note="Nucleotide may be methylated to form 5-methylcytosine"
gaggattgctgagcacagggattgtaaagagaaagtgctggtgcgttgggagtttagtgacggtgattcaatcttgttttagcggtggtgactgccatttatgcagctagctctgtgcgctg

SEQ ID NO: 9857 - DNA, 122 bp, Homo sapiens
  misc_feature (61)..(62): /note="This region represents a CpG dinucleotide"
  misc_feature (61)..(61): /note="Nucleotide may be methylated to form 5-methylcytosine"
ggggagctgagggcccttctgtgtgtgaaggagtcgcagggcccagggcagagggtcccccgtcttttgggcagaccagagaaggctccggagaccaggcgacatttagggagaacctgagg

SEQ ID NO: 9858 - DNA, 122 bp, Homo sapiens
  misc_feature (61)..(62): /note="This region represents a CpG dinucleotide"
  misc_feature (61)..(61): /note="Nucleotide may be methylated to form 5-methylcytosine"
aatgtgtggatccatcattgacctgttttgtttccagtgtggggctatcacacataaagccgctgtgagcactcatgtgcaagtctctttgtggacatctgctttcacttctcttgggtaaa

SEQ ID NO: 9859 - DNA, 122 bp, Homo sapiens
  misc_feature (61)..(62): /note="This region represents a CpG dinucleotide"
  misc_feature (61)..(61): /note="Nucleotide may be methylated to form 5-methylcytosine"
tcataatcttattgaaatcctatatcttcccattgacttttatcgtttcaagccagttaccggagttgtcagtaccaacgcgcggacgccgcgcaaggccggggcgggggacttcccttggt

SEQ ID NO: 9860 - DNA, 122 bp, Homo sapiens
  misc_feature (61)..(62): /note="This region represents a CpG dinucleotide"
  misc_feature (61)..(61): /note="Nucleotide may be methylated to form 5-methylcytosine"
tgtgagtatagtgtctgctgcagtcttgagaccaccatggcaggaaatgtctttagttcccgcttctgtcttctcctgcctgccctgttctgtcatttctaagttgccttctgtgatgtatc

SEQ ID NO: 9861 - DNA, 122 bp, Homo sapiens
  misc_feature (61)..(62): /note="This region represents a CpG dinucleotide"
  misc_feature (61)..(61): /note="Nucleotide may be methylated to form 5-methylcytosine"
gtgggccagagcctggcctcggctggcagttgcctgggagctgactgacacatcagccagcgctgccacaggctcgcacatagtgagggcgtgcttctgtgcgtcccatggaagtccatggc

SEQ ID NO: 9862 - DNA, 122 bp, Homo sapiens
  misc_feature (61)..(62): /note="This region represents a CpG dinucleotide"
  misc_feature (61)..(61): /note="Nucleotide may be methylated to form 5-methylcytosine"
ctagaggctagggagggattggtagagggaggaggaggagaggttggccaataagtaccacgttacaattaggtaggagaaataagttctggtgttctattgcacaatagggtgactatagt

SEQ ID NO: 9863 - DNA, 122 bp, Homo sapiens
  misc_feature (61)..(62): /note="This region represents a CpG dinucleotide"
  misc_feature (61)..(61): /note="Nucleotide may be methylated to form 5-methylcytosine"
tagtctgtcaggctcaccttctctctggaaagaatttgcttaacttgacattccatgtgccgctaataaaatatattttgaaagaataagggtgtggttgggagtcactgttgacaaagacc

SEQ ID NO: 9864 - DNA, 122 bp, Homo sapiens
  misc_feature (61)..(62): /note="This region represents a CpG dinucleotide"
  misc_feature (61)..(61): /note="Nucleotide may be methylated to form 5-methylcytosine"
tgaagcaatactgaactacagatctagtttatttatctgcatgcctttctgtcaaattcacgcttgtgtgcataaacacttttttttcttatatatgctttctgtgccgaggaaagttcagc

SEQ ID NO: 9865 - DNA, 122 bp, Homo sapiens
  misc_feature (61)..(62): /note="This region represents a CpG dinucleotide"
  misc_feature (61)..(61): /note="Nucleotide may be methylated to form 5-methylcytosine"
gcctgaatcagctttttttttcttccttctctggcctctatctacctagtcctgaaatgacgtcatactctcttaacataaaagtaagtgaacaacattctcaatttctatttgaggctaac

SEQ ID NO: 9866 - DNA, 122 bp, Homo sapiens
  misc_feature (61)..(62): /note="This region represents a CpG dinucleotide"
  misc_feature (61)..(61): /note="Nucleotide may be methylated to form 5-methylcytosine"
aagctttctttccaccagggaagactgcaaaggccagagatcattttcacaactaaaggtcgtcatctgggcaaatgaaccactctgacttggagattaggggctcagacagccgtggatga

SEQ ID NO: 9867 - DNA, 122 bp, Homo sapiens
  misc_feature (61)..(62): /note="This region represents a CpG dinucleotide"
  misc_feature (61)..(61): /note="Nucleotide may be methylated to form 5-methylcytosine"
tgcaccctttgtctctggtcttcatgggggatccctcatggtgagggtgtatgaaagggccgcagtagggaaggaagcttaattttccctctttcccagttcccctctgtggtcgtgacggg

SEQ ID NO: 9868 - DNA, 122 bp, Homo sapiens
  misc_feature (61)..(62): /note="This region represents a CpG dinucleotide"
  misc_feature (61)..(61): /note="Nucleotide may be methylated to form 5-methylcytosine"
taacccttgattgtcttatctgtcaaacatggtaaagtcatacctctttcatagggctgtcgtgagtatcaaatgagatgcaggttgcgtaatcccaaatccaaaaatccaaaatccaaaac

SEQ ID NO: 9869 - DNA, 122 bp, Homo sapiens
  misc_feature (61)..(62): /note="This region represents a CpG dinucleotide"
  misc_feature (61)..(61): /note="Nucleotide may be methylated to form 5-methylcytosine"
ttgtttggatagtatgaaaggacaaagtatcagcactcagaaatgtcaacctttgaacctcgaacactttctgatttataaaaagaatccttccaaaaagatgcaggagccctaatgtaatc

SEQ ID NO: 9870 - DNA, 122 bp, Homo sapiens
  misc_feature (61)..(62): /note="This region represents a CpG dinucleotide"
  misc_feature (61)..(61): /note="Nucleotide may be methylated to form 5-methylcytosine"
cccttctcccttcctccttctgtgtttctctctcctagtggcaatagaggttactgcaagcgtgagttcccattgtataagtggccaaagggcaaattgtgttgtctagtgcttgatgtctc

SEQ ID NO: 9871 - DNA, 122 bp, Homo sapiens
  misc_feature (61)..(62): /note="This region represents a CpG dinucleotide"
  misc_feature (61)..(61): /note="Nucleotide may be methylated to form 5-methylcytosine"
tcaatgagtgcttgtgttctgggaatgggggcggggtgacatccagcctctttccctctccgcccccgacaggatgtcccaggctggacgcggcagaggaggtcccccacaagtgaaggtcc

SEQ ID NO: 9872 - DNA, 122 bp, Homo sapiens
  misc_feature (61)..(62): /note="This region represents a CpG dinucleotide"
  misc_feature (61)..(61): /note="Nucleotide may be methylated to form 5-methylcytosine"
gtttcagagacttccattctatggttttagatgtcctctcatccttgcctcagtgttggccgcaggaggactcccctcattggtggttcaagttctatctgaggatgggggaggaagaaatc

SEQ ID NO: 9873 - DNA, 122 bp, Homo sapiens
  misc_feature (61)..(62): /note="This region represents a CpG dinucleotide"
  misc_feature (61)..(61): /note="Nucleotide may be methylated to form 5-methylcytosine"
acagcacctttccatgtcatggaaacatgcccatgcctatataaagtgaagcacactttccgcatagccctgcaatcaccccacaggagaaaaccgtccctcttgccttgcccatcctatgg

SEQ ID NO: 9874 - DNA, 122 bp, Homo sapiens
  misc_feature (61)..(62): /note="This region represents a CpG dinucleotide"
  misc_feature (61)..(61): /note="Nucleotide may be methylated to form 5-methylcytosine"
gtagtcggagctcctcctccttctacggccagctaccgactgaaggctgctggccctggccgttgcctagtaaccacaaaacctcctatgtcacctggttgccaggaaacaaccaagtcagg

SEQ ID NO: 9875 - DNA, 122 bp, Homo sapiens
  misc_feature (61)..(62): /note="This region represents a CpG dinucleotide"
  misc_feature (61)..(61): /note="Nucleotide may be methylated to form 5-methylcytosine"
tctagggactgttcatgaagctctctgaatgatcccacttaatcctccctcccttgaattcgaaataaggagcacatacctctccaccttgcctccttagcaacaggatatagggtgggaag

SEQ ID NO: 9876 - DNA, 122 bp, Homo sapiens
  misc_feature (61)..(62): /note="This region represents a CpG dinucleotide"
  misc_feature (61)..(61): /note="Nucleotide may be methylated to form 5-methylcytosine"
acgtctgaatcatctgcagacattaagtcagcaacagtagtaagaatgtcctccagatctcgccctcaaaccagcaggaacggtggcttctgatagcttggtagaaatgcaaactcaggccc

SEQ ID NO: 9877 - DNA, 122 bp, Homo sapiens
  misc_feature (61)..(62): /note="This region represents a CpG dinucleotide"
  misc_feature (61)..(61): /note="Nucleotide may be methylated to form 5-methylcytosine"
ccaaaccacaagcagtatgagctccacctagaaggtgtgtgggaaagccattttgtaagacgtgtttgcacaagcaagacaaaggaagcatttgattggtcagagtggaaagttccggaggt

SEQ ID NO: 9878 - DNA, 122 bp, Homo sapiens
  misc_feature (61)..(62): /note="This region represents a CpG dinucleotide"
  misc_feature (61)..(61): /note="Nucleotide may be methylated to form 5-methylcytosine"
tccctgttgcctgtgggtcatttcctcatggagcctgtgggcagctggggtgacgcggtgcgaagccagccgatgacatcttggtttgtgtgtctcagtgtttgttctgtggtttttcggtg

SEQ ID NO: 9879 - DNA, 122 bp, Homo sapiens
  misc_feature (61)..(62): /note="This region represents a CpG dinucleotide"
  misc_feature (61)..(61): /note="Nucleotide may be methylated to form 5-methylcytosine"
tttcatgattttttaaaaataaagcaaacactctatccccaatgctttctgctgcatatacgtttatttctttagattcaggtcactttgtccttgcttagtcttgatctctgctgtatcct

SEQ ID NO: 9880 - DNA, 122 bp, Homo sapiens
  misc_feature (61)..(62): /note="This region represents a CpG dinucleotide"
  misc_feature (61)..(61): /note="Nucleotide may be methylated to form 5-methylcytosine"
gagcaagcaggagaggccacttccggttttctgcaggtcccagtgagcatgtgaagcctgcgcctgggcaagaggttggatactgggaggaagaagcttttccagtaccctttcccaaagac

SEQ ID NO: 9881 - DNA, 122 bp, Homo sapiens
  misc_feature (61)..(62): /note="This region represents a CpG dinucleotide"
  misc_feature (61)..(61): /note="Nucleotide may be methylated to form 5-methylcytosine"
aatagatggagagagatggatcagggcagggcaggggtggagaagtgagctagtgcagtccgggcggatgctttagaaataccctggaagtggtaataaaggcctaagttagtatgactgca

SEQ ID NO: 9882 - DNA, 122 bp, Homo sapiens
  misc_feature (61)..(62): /note="This region represents a CpG dinucleotide"
  misc_feature (61)..(61): /note="Nucleotide may be methylated to form 5-methylcytosine"
ttatgtcatagaaaccaatggaaaaaggaaatcagattccccagattccacccccgccctcgccccaggtagtgaaaagttagtgagacttcttgaaaaacaatagggtgtttccaggttaa

SEQ ID NO: 9883 - DNA, 122 bp, Homo sapiens
  misc_feature (61)..(62): /note="This region represents a CpG dinucleotide"
  misc_feature (61)..(61): /note="Nucleotide may be methylated to form 5-methylcytosine"
tttaaaatctttcatgcaacaatttaaaaattaatataaagcgtcctttctttttttccacgtgctctaaaatgcctgacccacacctccttccatgctccaagccctgcttggcagctcac

SEQ ID NO: 9884 - DNA, 122 bp, Homo sapiens
  misc_feature (61)..(62): /note="This region represents a CpG dinucleotide"
  misc_feature (61)..(61): /note="Nucleotide may be methylated to form 5-methylcytosine"
agggtctagaggagggtgggaagctagtggggctggccgtgcgggggattcgcaggggcgcggggaggatgctggggatggagatacaggaggcggcgggggaggaaagagggaacgggagg

SEQ ID NO: 9885 - DNA, 122 bp, Homo sapiens
  misc_feature (61)..(62): /note="This region represents a CpG dinucleotide"
  misc_feature (61)..(61): /note="Nucleotide may be methylated to form 5-methylcytosine"
aaacagtgttgcatgaggaagtgatgccaggagctgtgaccatccttgcaaccacaaggacggaagccaatagaagaatagtgtgagaaggatagaaacagcctcagtccttagtgatgctg

SEQ ID NO: 9886 - DNA, 122 bp, Homo sapiens
  misc_feature (61)..(62): /note="This region represents a CpG dinucleotide"
  misc_feature (61)..(61): /note="Nucleotide may be methylated to form 5-methylcytosine"
tgtctagatcttgggaagaagacatcagtatgtttgcaggaggatcatgaagcacatgatcgttgcatgaaaaatgttgcttcctgcctgttcaaactgtccaattttggagggtggggtgg

SEQ ID NO: 9887 - DNA, 122 bp, Homo sapiens
  misc_feature (61)..(62): /note="This region represents a CpG dinucleotide"
  misc_feature (61)..(61): /note="Nucleotide may be methylated to form 5-methylcytosine"
gttgaatttgggctccacctttctttctttgtgactgggagagtcagttaatctctgaagcgtctcctcagttttctaatccatgactggagtgcataagcctgaatgtgtattaaataaga

SEQ ID NO: 9888 - DNA, 122 bp, Homo sapiens
  misc_feature (61)..(62): /note="This region represents a CpG dinucleotide"
  misc_feature (61)..(61): /note="Nucleotide may be methylated to form 5-methylcytosine"
tccttccttgaagaataggtggaacctgtgatgaacatgatcacactggtgtgattattacgttgtatggtaaaataaatttttttaaatgtaattaatgtttcagatcaattgatgttaag

SEQ ID NO: 9889 - DNA, 122 bp, Homo sapiens
  misc_feature (61)..(62): /note="This region represents a CpG dinucleotide"
  misc_feature (61)..(61): /note="Nucleotide may be methylated to form 5-methylcytosine"
ggggccttcctatgcctcatgcatcaggccctttggagccctgggagcagacggccatggcggctgaagctgcagtggatgcactcatgatgatgaggataataatagttgctaacatttct

SEQ ID NO: 9890 - DNA, 122 bp, Homo sapiens
  misc_feature (61)..(62): /note="This region represents a CpG dinucleotide"
  misc_feature (61)..(61): /note="Nucleotide may be methylated to form 5-methylcytosine"
aatgttgccccttgactccaagctcagagaggcttgtatttgaagatgtcagcagcctcccgctccacaaatgaatcatgagaaggagggaatgaaggtggttgaagtaggtgtgggccttt

SEQ ID NO: 9891 - DNA, 122 bp, Homo sapiens
  misc_feature (61)..(62): /note="This region represents a CpG dinucleotide"
  misc_feature (61)..(61): /note="Nucleotide may be methylated to form 5-methylcytosine"
acattgaccttaaaaggtaaagtcacaagttttcctcacccataagaaaatattcactggcgtgacctgacatataatctcatgggtttcatggatctgtatccctgggcatttatgccctc

SEQ ID NO: 9892 - DNA, 122 bp, Homo sapiens
  misc_feature (61)..(62): /note="This region represents a CpG dinucleotide"
  misc_feature (61)..(61): /note="Nucleotide may be methylated to form 5-methylcytosine"
tgtgctataaagcctgaataaagccttcagactttacccagacaatggtcaaaattgctacgaagctgtttccacctgccttgactccagggaggagcaggaagaggcctccataacttgta

SEQ ID NO: 9893 - DNA, 122 bp, Homo sapiens
  misc_feature (61)..(62): /note="This region represents a CpG dinucleotide"
  misc_feature (61)..(61): /note="Nucleotide may be methylated to form 5-methylcytosine"
ttaccctaagaacaaggaatacactgttaatttttcagtgactaataactgatgaggccacgttaaggaagatgatacaactatcattgtactaaactattttgtaatcattcaagggaatg

SEQ ID NO: 9894 - DNA, 122 bp, Homo sapiens
  misc_feature (61)..(62): /note="This region represents a CpG dinucleotide"
  misc_feature (61)..(61): /note="Nucleotide may be methylated to form 5-methylcytosine"
accacttgaaaattcactattggcatcgggcatgtgagtacttggaatgattgcagaagacgtatcagaaaatgttccatcattttttctacccttcatcttatcttttaactttgcaaaag

SEQ ID NO: 9895 - DNA, 122 bp, Homo sapiens
  misc_feature (61)..(62): /note="This region represents a CpG dinucleotide"
  misc_feature (61)..(61): /note="Nucleotide may be methylated to form 5-methylcytosine"
aaggagcttagagtaatcttagctaacctgttttgtagttttgccaagggccagccctagcgggtaggttaagcaagatgccagcattgtgggttgattggccttcttttggtgctttttta

SEQ ID NO: 9896 - DNA, 122 bp, Homo sapiens
  misc_feature (61)..(62): /note="This region represents a CpG dinucleotide"
  misc_feature (61)..(61): /note="Nucleotide may be methylated to form 5-methylcytosine"
tgagagattaaactccttcaatggcagtaaaaacaaggatgttttgcatacatcagagcacgggcatgatgctttagagagcaaatgttgcattttgcagttccagtgtagactggaggtga

SEQ ID NO: 9897 - DNA, 122 bp, Homo sapiens
  misc_feature (61)..(62): /note="This region represents a CpG dinucleotide"
  misc_feature (61)..(61): /note="Nucleotide may be methylated to form 5-methylcytosine"
tgtcctgatagagtgattcagctgtgataaaacggtggagtcaggtttagttctcctcttcgcgagctagttctcacacaatgagttgaatacagttctcagaaatcattcttactttcttc

SEQ ID NO: 9898 - DNA, 122 bp, Homo sapiens
  misc_feature (61)..(62): /note="This region represents a CpG dinucleotide"
  misc_feature (61)..(61): /note="Nucleotide may be methylated to form 5-methylcytosine"
catcagaggaaaacagtgacaacattaattggcagaaagccaaacctacccaaaagtttccgcattttctataaatgatgaacaaaataatgaatggaaaagtccctctatattttatcaat

SEQ ID NO: 9899 - DNA, 122 bp, Homo sapiens
  misc_feature (61)..(62): /note="This region represents a CpG dinucleotide"
  misc_feature (61)..(61): /note="Nucleotide may be methylated to form 5-methylcytosine"
gattcagagaagttgacgaaggaaatcctgcacaagctgaaggagaggtaggcttggcagcggcactatgccaagatcatgagtgacgacagtgcctaatgatatgactcttaacttccaaa

SEQ ID NO: 9900 - DNA, 122 bp, Homo sapiens
  misc_feature (61)..(62): /note="This region represents a CpG dinucleotide"
  misc_feature (61)..(61): /note="Nucleotide may be methylated to form 5-methylcytosine"
ctcattgctcttctgcagtttgctgcactgttcctgtctttagcagatagcagcatttgacgatgatggcttggaagaattgctgccaatatgattcttatgtaagactggcatagaggaat

SEQ ID NO: 9901 - DNA, 122 bp, Homo sapiens
  misc_feature (61)..(62): /note="This region represents a CpG dinucleotide"
  misc_feature (61)..(61): /note="Nucleotide may be methylated to form 5-methylcytosine"
gttcttatttttccttcacccactttcatatcagcttgccagcttcccctttactcagtgcgtcatgagcttcataaacacagcatagtgctagatatacaggcaaaaccccattgtagtgt

SEQ ID NO: 9902 - DNA, 122 bp, Homo sapiens
  misc_feature (61)..(62): /note="This region represents a CpG dinucleotide"
  misc_feature (61)..(61): /note="Nucleotide may be methylated to form 5-methylcytosine"
catggtaggtagttactattcgataccacaaaaatgtctcttgcccttaaaaccagaacacgaggctcaccagacagatgactgaatggagtatggaaaatctttatttctgtttttcttag

SEQ ID NO: 9903 - DNA, 122 bp, Homo sapiens
  misc_feature (61)..(62): /note="This region represents a CpG dinucleotide"
  misc_feature (61)..(61): /note="Nucleotide may be methylated to form 5-methylcytosine"
gcaaacatgctatttgtctgaggctctttgtccagtcagctggttgacaaatactgatcacgcccagtgtgcacagggacctcagttaagaataccagggctagagcaaagaacgaacatag

SEQ ID NO: 9904 - DNA, 122 bp, Homo sapiens
  misc_feature (61)..(62): /note="This region represents a CpG dinucleotide"
  misc_feature (61)..(61): /note="Nucleotide may be methylated to form 5-methylcytosine"
agaaaagatgtctttttctttttacatcccagggctacatttttacctttttgttttaatcgaggttgtatgaggaaaatagttttctctttgaaatgtatccattgacttggcacctaact

SEQ ID NO: 9905 - DNA, 122 bp, Homo sapiens
  misc_feature (61)..(62): /note="This region represents a CpG dinucleotide"
  misc_feature (61)..(61): /note="Nucleotide may be methylated to form 5-methylcytosine"
gacatgctttgtttgcatgtctaatgggtgtatcttttactaccacaattgtttccatgacggagcactggcatacataaatagaccaacagacatatagacttatgcatatatgtactgag

SEQ ID NO: 9906 - DNA, 122 bp, Homo sapiens
  misc_feature (61)..(62): /note="This region represents a CpG dinucleotide"
  misc_feature (61)..(61): /note="Nucleotide may be methylated to form 5-methylcytosine"
agggcctatatgtgttgaacacaagatacttacctgtgactgtttctaatcccactatggcgtctccaaatgactcatgtgctagcttctcacattttgaataagtgtgcactgaatgtcat

SEQ ID NO: 9907 - DNA, 122 bp, Homo sapiens
  misc_feature (61)..(62): /note="This region represents a CpG dinucleotide"
  misc_feature (61)..(61): /note="Nucleotide may be methylated to form 5-methylcytosine"
tgtaatcagtttaactgtttgtgtccaaggttcagaagaacacactatcatcttcacaaccgagcaatgactctattccacaattttaggaactacatattgataagaatcaagacctttcc

SEQ ID NO: 9908 - DNA, 122 bp, Homo sapiens
  misc_feature (61)..(62): /note="This region represents a CpG dinucleotide"
  misc_feature (61)..(61): /note="Nucleotide may be methylated to form 5-methylcytosine"
aggggactgacctattacccccaccccaggagctggtgctggaacctgcgcagaggcgggcgcgcctggaggggctacgctacacggcagtgctgaagcagcaggcaacgcagcactccatg

SEQ ID NO: 9909 - DNA, 122 bp, Homo sapiens
  misc_feature (61)..(62): /note="This region represents a CpG dinucleotide"
  misc_feature (61)..(61): /note="Nucleotide may be methylated to form 5-methylcytosine"
tcattcccattttacagatgagcaaactgaatctcagggtgagtaattttcccaaggccacgaagctagaaaatgacagaactcagaatgtgagcccaaatgtgtctgatttcaaaagctat

SEQ ID NO: 9910 - DNA, 122 bp, Homo sapiens
  misc_feature (61)..(62): /note="This region represents a CpG dinucleotide"
  misc_feature (61)..(61): /note="Nucleotide may be methylated to form 5-methylcytosine"
ctccaaatctcaatgaagccagctcacagtgctgtgtgccccggtcacctagcaagctgccgaaccaaaagaatttgcaccccgctgcgggcccacgtggttggggccctgccctggcaggg

SEQ ID NO: 9911 - DNA, 122 bp, Homo sapiens
  misc_feature (61)..(62): /note="This region represents a CpG dinucleotide"
  misc_feature (61)..(61): /note="Nucleotide may be methylated to form 5-methylcytosine"
ccacctctgcctaaatcataaaaagatcgaggagtgcaatgaacttcaggaatcatgcaccgtttccctgaagcctgtccaggaacctaacttctggacccagaaacttctgcaaagacaga

SEQ ID NO: 9912 - DNA, 122 bp, Homo sapiens
  misc_feature (61)..(62): /note="This region represents a CpG dinucleotide"
  misc_feature (61)..(61): /note="Nucleotide may be methylated to form 5-methylcytosine"
gggaactacaaactacttggtcaagttagtggtgtggtgctttcccccagtcagcagttccgtgttaacacagatgtttgtgcatcaccaacttcactgtacaatggtttcactactgccat

SEQ ID NO: 9913 - DNA, 122 bp, Homo sapiens
  misc_feature (61)..(62): /note="This region represents a CpG dinucleotide"
  misc_feature (61)..(61): /note="Nucleotide may be methylated to form 5-methylcytosine"
ctccactttctttgctggtcttctccaaggcagctgctgcagctttgcaaacttcctgagcgccaagcctcaggactccctgtgagaagggcatgataaagatgccttctactgtttacaca

SEQ ID NO: 9914 - DNA, 122 bp, Homo sapiens
  misc_feature (61)..(62): /note="This region represents a CpG dinucleotide"
  misc_feature (61)..(61): /note="Nucleotide may be methylated to form 5-methylcytosine"
tgttcaagaaatcatttactaagggacagcttagtatttgtccatcagttggcttattgacgtaacctgtgtgctaaattcactggaatgtggcgtaatcaaatctggctccttccacttct

SEQ ID NO: 9915 - DNA, 122 bp, Homo sapiens
  misc_feature (61)..(62): /note="This region represents a CpG dinucleotide"
  misc_feature (61)..(61): /note="Nucleotide may be methylated to form 5-methylcytosine"
tttttggcagttcaagttttcctacattgtcatagtatgtaacattctgtcatcctcattcgcacctttatttttcctattcctagccttatttttgtttgttttagatctggagttaaaaa

SEQ ID NO: 9916 - DNA, 122 bp, Homo sapiens
  misc_feature (61)..(62): /note="This region represents a CpG dinucleotide"
  misc_feature (61)..(61): /note="Nucleotide may be methylated to form 5-methylcytosine"
agtgccatcagggcgctccggcaccttcaggagggaggtgactgcagggcgcacagacagcgcccccgctacatggtttatggctttgctctgcgcgtgaagcattaattaaagggggacca

SEQ ID NO: 9917 - DNA, 122 bp, Homo sapiens
  misc_feature (61)..(62): /note="This region represents a CpG dinucleotide"
  misc_feature (61)..(61): /note="Nucleotide may be methylated to form 5-methylcytosine"
agcacttaagaacaactgacaccaaagggtttggtttcatgtacttgaacttgggtgacacgaatatttcagtggtgaatcagtcctagaaaggggaggtgggtaaggtagggagtgtttat

SEQ ID NO: 9918 - DNA, 122 bp, Homo sapiens
  misc_feature (61)..(62): /note="This region represents a CpG dinucleotide"
  misc_feature (61)..(61): /note="Nucleotide may be methylated to form 5-methylcytosine"
agtgctttttggcggggtagtgcagtgtgttccgggcggacgggcgtcagtttacgtgtgcgtttctcatccttgcaggtacctggccccgggcactcaggtggcagggacattttgctgtt

SEQ ID NO: 9919 - DNA, 122 bp, Homo sapiens
  misc_feature (61)..(62): /note="This region represents a CpG dinucleotide"
  misc_feature (61)..(61): /note="Nucleotide may be methylated to form 5-methylcytosine"
agtgtcaactaaagcttcacaccaggaaacaggagccaactctgactccttcctggtgaacggtggcattaaataaccacagcacaaagagagatacgaagtgctcagcccttctttcgctg

SEQ ID NO: 9920 - DNA, 122 bp, Homo sapiens
  misc_feature (61)..(62): /note="This region represents a CpG dinucleotide"
  misc_feature (61)..(61): /note="Nucleotide may be methylated to form 5-methylcytosine"
gccaagtataagagccataacaaagtccttcagatttacactgtagatagaaggaggaagcgagaaggcatgttcccagcacatggcaattctaagaatggtgtcatgattacaagtaacct

SEQ ID NO: 9921 - DNA, 122 bp, Homo sapiens
  misc_feature (61)..(62): /note="This region represents a CpG dinucleotide"
  misc_feature (61)..(61): /note="Nucleotide may be methylated to form 5-methylcytosine"
ctgagtgaaggagtaaatgagcaaatgaacagtgtaatgccttatgaattcagcaaaagccgaatcatcatctgtttgttccagtgcagacaggcttggctttgaacagcatccagctccac

SEQ ID NO: 9922 - DNA, 122 bp, Homo sapiens
  misc_feature (61)..(62): /note="This region represents a CpG dinucleotide"
  misc_feature (61)..(61): /note="Nucleotide may be methylated to form 5-methylcytosine"
tctgggagagggaggggccaggcccaaatggtggctgcagaggtatttaccagctggttccgtgctctgcagaaggttggtgaacatgtaaatgcgggtagtaggctcacatctgcttctgt

SEQ ID NO: 9923 - DNA, 122 bp, Homo sapiens
  misc_feature (61)..(62): /note="This region represents a CpG dinucleotide"
  misc_feature (61)..(61): /note="Nucleotide may be methylated to form 5-methylcytosine"
cttggactaagacagggcttgtcttttatacatgcatgggccatctagtggcgcaaagctcgtggtgcaagtaagcaggctcacagaagcagaacagaggcagttaatcaaacagtgacagg

SEQ ID NO: 9924 - DNA, 122 bp, Homo sapiens
  misc_feature (61)..(62): /note="This region represents a CpG dinucleotide"
  misc_feature (61)..(61): /note="Nucleotide may be methylated to form 5-methylcytosine"
tgattaactaaaatgaaagccccgggcatttaaaaataagattcctccctcttgctgtttcgccaggaattgtccttcaggtctttgtgtcctgagatcattaaaccaaggatgactcaaaa

SEQ ID NO: 9925 - DNA, 122 bp, Homo sapiens
  misc_feature (61)..(62): /note="This region represents a CpG dinucleotide"
  misc_feature (61)..(61): /note="Nucleotide may be methylated to form 5-methylcytosine"
aacctgtctcaaaaaaaaatttaaaaatggcatgcttgctgacccacccaaatatgtccacgggcccagccacaggcctgcccttgccattgtctgacagatcaggaagtgaccttggggct

SEQ ID NO: 9926 - DNA, 122 bp, Homo sapiens
  misc_feature (61)..(62): /note="This region represents a CpG dinucleotide"
  misc_feature (61)..(61): /note="Nucleotide may be methylated to form 5-methylcytosine"
tatccataactggtatgacagggaatctcaaaaaaggaaatatcctgttctgaggtctcccgctggattaagtgctcatgactcacagaggccctgccttagctctcagtttcagtgactta

SEQ ID NO: 9927 - DNA, 122 bp, Homo sapiens
  misc_feature (61)..(62): /note="This region represents a CpG dinucleotide"
  misc_feature (61)..(61): /note="Nucleotide may be methylated to form 5-methylcytosine"
tataaactgaatacaaatataagggagcatcagccggctcattcaattagtcactatatacgctcctaagaaaggtaatgagaaaaattatggaatgacctggctgaatacttgaacccaca

SEQ ID NO: 9928 - DNA, 122 bp, Homo sapiens
  misc_feature (61)..(62): /note="This region represents a CpG dinucleotide"
  misc_feature (61)..(61): /note="Nucleotide may be methylated to form 5-methylcytosine"
aatgtggaagcagaaagaccacatgactgacagtttaaagtatagtcatgtgtcacttaacggtgaggatatgttccgagaaatgcctccttaggcaattctgttgtgtgcacatcacagag

SEQ ID NO: 9929 - DNA, 122 bp, Homo sapiens
  misc_feature (61)..(62): /note="This region represents a CpG dinucleotide"
  misc_feature (61)..(61): /note="Nucleotide may be methylated to form 5-methylcytosine"
cccctctggactttgctcctcgagtcttatccaagagactctgggaattgtttgggtttacgcagcccaggtaactggataatcagccttcatggaggacacagaaagtcacgtctacatgc

SEQ ID NO: 9930 - DNA, 122 bp, Homo sapiens
  misc_feature (61)..(62): /note="This region represents a CpG dinucleotide"
  misc_feature (61)..(61): /note="Nucleotide may be methylated to form 5-methylcytosine"
acacaatcaggttgagcaaagcccccgagtgacagagaaaggatgagaagagatcagatacgctggaaataactttatgtaacacagaagacatgggcaatagtctggctagtgagtactac

SEQ ID NO: 9931 - DNA, 122 bp, Homo sapiens
  misc_feature (61)..(62): /note="This region represents a CpG dinucleotide"
  misc_feature (61)..(61): /note="Nucleotide may be methylated to form 5-methylcytosine"
acagaaagccagacaaatgtgcaatacaatcggtcctctcatagtggaagagaaatggcacgtacactggcagagttgacaagtccagtaattgaatcctgcagaaaaataaagcatatcaa

SEQ ID NO: 9932 - DNA, 122 bp, Homo sapiens
  misc_feature (61)..(62): /note="This region represents a CpG dinucleotide"
  misc_feature (61)..(61): /note="Nucleotide may be methylated to form 5-methylcytosine"
agaagggtttacttcgcttgtttcatccttgcttctaatttcttcttgacttcagttcatcgtacagacagccactgagttaactcttctccaagcagtagttggcttctgggatgatgctg

SEQ ID NO: 9933 - DNA, 122 bp, Homo sapiens
  misc_feature (61)..(62): /note="This region represents a CpG dinucleotide"
  misc_feature (61)..(61): /note="Nucleotide may be methylated to form 5-methylcytosine"
tccatggaaggcaactacagcagcgctgggaagacaaccagcagggcacagaggtgactgcgaggctggaatgaagcaacctgaattacaggcaaatcaatactattaatgattatgtatgg

SEQ ID NO: 9934 - DNA, 122 bp, Homo sapiens
  misc_feature (61)..(62): /note="This region represents a CpG dinucleotide"
  misc_feature (61)..(61): /note="Nucleotide may be methylated to form 5-methylcytosine"
gagtgctgggattacagacgtgagtcaccgtgcccagctaggttttacttttatatgttgcgtaagtgaataaagtctcagcatttggaatgcttttcccttcaaattgctatgtggaactg

SEQ ID NO: 9935 - DNA, 122 bp, Homo sapiens
  misc_feature (61)..(62): /note="This region represents a CpG dinucleotide"
  misc_feature (61)..(61): /note="Nucleotide may be methylated to form 5-methylcytosine"
tcattgttttgacaatccttggaacagtacttcaaggcagacatttcacagataaggaaacgaagcctcagaacaggcaaggaacactgacctgtcacaggtgggcttccctttgagagaaa

SEQ ID NO: 9936 - DNA, 122 bp, Homo sapiens
  misc_feature (61)..(62): /note="This region represents a CpG dinucleotide"
  misc_feature (61)..(61): /note="Nucleotide may be methylated to form 5-methylcytosine"
gcaaatctcattaaatctgattaaaatctttcagtgactctaactgcccaagataagtttcgaactctataagcatactttacaaagtccttcaaaaggaccccgcttctatcttttagact

SEQ ID NO: 9937 - DNA, 122 bp, Homo sapiens
  misc_feature (61)..(62): /note="This region represents a CpG dinucleotide"
  misc_feature (61)..(61): /note="Nucleotide may be methylated to form 5-methylcytosine"
ggttgaatccaccatgccctaggagttagctaggggatgagctggggaagaggactcagtcgtttgatgcctgaccttgaaatatgtccaggtgataatttgagcattattccaagtgtttc

SEQ ID NO: 9938 - DNA, 122 bp, Homo sapiens
  misc_feature (61)..(62): /note="This region represents a CpG dinucleotide"
  misc_feature (61)..(61): /note="Nucleotide may be methylated to form 5-methylcytosine"
tcaaatgtttccctcccgaatgtatcatcatgactcgacagagattaaatagttcatgaacggtgctgcagagtcaaacaggaatataatgccaattagtgagagaaatgatgactggggac

SEQ ID NO: 9939 - DNA, 122 bp, Homo sapiens
  misc_feature (61)..(62): /note="This region represents a CpG dinucleotide"
  misc_feature (61)..(61): /note="Nucleotide may be methylated to form 5-methylcytosine"
ggctgaaggaggatccgaaaggctgatacagcggggctgaggggggatccgcggggttggcgggggctgagaaatgaccctgtagttcacagcaaaatggagtaatttatgtcacaacgtaa

SEQ ID NO: 9940 - DNA, 122 bp, Homo sapiens
  misc_feature (61)..(62): /note="This region represents a CpG dinucleotide"
  misc_feature (61)..(61): /note="Nucleotide may be methylated to form 5-methylcytosine"
tctccgtctgcgtcggcctcccacagtgctggggtgacaggtgtgagccgctgcgccggccgcatgtgtgctcttgagagcacttctctggggagcatcccggatctgaactgctggttgtc

SEQ ID NO: 9941 - DNA, 122 bp, Homo sapiens
  misc_feature (61)..(62): /note="This region represents a CpG dinucleotide"
  misc_feature (61)..(61): /note="Nucleotide may be methylated to form 5-methylcytosine"
aactatatacccaagtcaaaaccacttcctgccagagtaactacaacatacccatcagagcgctgtaaaatcattacttgcaaagtaaagagtaagacagacttctcctctcattaataata

SEQ ID NO: 9942 - DNA, 122 bp, Homo sapiens
  misc_feature (61)..(62): /note="This region represents a CpG dinucleotide"
  misc_feature (61)..(61): /note="Nucleotide may be methylated to form 5-methylcytosine"
gaaatggctctgtcattttctagatgacagctcctattttccactggcttctggcacatgcgctatcatccgtctatgtcaagaagacacttgcttatctggttgctagaaatgcttttgtt

SEQ ID NO: 9943 - DNA, 122 bp, Homo sapiens
  misc_feature (61)..(62): /note="This region represents a CpG dinucleotide"
  misc_feature (61)..(61): /note="Nucleotide may be methylated to form 5-methylcytosine"
tgcacctgttgaaaccttacccttcctgcaggtcctggctccagctcaccccattcattccgcaaacatttgctgaatgaaaatcatgcatcaggcacctccccacaaagcctgccccagtc

SEQ ID NO: 9944 - DNA, 122 bp, Homo sapiens
  misc_feature (61)..(62): /note="This region represents a CpG dinucleotide"
  misc_feature (61)..(61): /note="Nucleotide may be methylated to form 5-methylcytosine"
tttcactgtttatatgcaagaagtgtagtgggtctgctcacgtaggaataaataaaaagccgaacaaactgctcggcagctaccatgtgaaaagaaaagacctctagtggccacaggctgaa

SEQ ID NO: 9945 - DNA, 122 bp, Homo sapiens
  misc_feature (61)..(62): /note="This region represents a CpG dinucleotide"
  misc_feature (61)..(61): /note="Nucleotide may be methylated to form 5-methylcytosine"
gaactgtgggaaaaaccctgccttcaagggtttccaggccatgggaagcctaggatataacgcaggcaacttcagaatcatcagtccaccttgggatggtcagcccataaggatgaagaaac

SEQ ID NO: 9946 - DNA, 122 bp, Homo sapiens
  misc_feature (61)..(62): /note="This region represents a CpG dinucleotide"
  misc_feature (61)..(61): /note="Nucleotide may be methylated to form 5-methylcytosine"
tcagcaaaaagaggactaaagtagaaatatcaaccgccagctttcatctgtgcctgggggcggtccttcctgtgctcgtggcacgtgtttatactatgattgacaacccttaaggagaaagg

SEQ ID NO: 9947 - DNA, 122 bp, Homo sapiens
  misc_feature (61)..(62): /note="This region represents a CpG dinucleotide"
  misc_feature (61)..(61): /note="Nucleotide may be methylated to form 5-methylcytosine"
cctgggcgacagagcaagactctgtctcaaaacaaaaccaaacaaaacaaaaaactcacccgaaagtaacctttattggccttattaaattgacagtggttgctttttgttctgcttttggt

SEQ ID NO: 9948 - DNA, 122 bp, Homo sapiens
  misc_feature (61)..(62): /note="This region represents a CpG dinucleotide"
  misc_feature (61)..(61): /note="Nucleotide may be methylated to form 5-methylcytosine"
ttgttgacattcccccgggccttccaagcaggaatgtttgctttggaggtattggatagacgtggtaaaatcaagggctttccatcagcttcctagctgtccatcacccagtgccacgtctc

SEQ ID NO: 9949 - DNA, 122 bp, Homo sapiens
  misc_feature (61)..(62): /note="This region represents a CpG dinucleotide"
  misc_feature (61)..(61): /note="Nucleotide may be methylated to form 5-methylcytosine"
ggtaaaatcctttgtgcaacactcttactccctgaatgttttgctgtgctggaacttgtgcgtgccagacaaggccaagctgggtgaaagagcaatcagccacctctgcaacctgccacctc

SEQ ID NO: 9950 - DNA, 122 bp, Homo sapiens
  misc_feature (61)..(62): /note="This region represents a CpG dinucleotide"
  misc_feature (61)..(61): /note="Nucleotide may be methylated to form 5-methylcytosine"
acctgtgggtgcaggccacacgcaggctgcacagacccgggacaggtctgagctctgaggcgtgcggcccatctccgcggcaggagcttctgtctgagcctggggaggaaaagcctccacct

SEQ ID NO: 9951 - DNA, 122 bp, Homo sapiens
  misc_feature (61)..(62): /note="This region represents a CpG dinucleotide"
  misc_feature (61)..(61): /note="Nucleotide may be methylated to form 5-methylcytosine"
ttccttctttctctgcacattctcagcattacttacatgctcctgttgttctgtgcctgacgtcttctccttgcagatgccactaggccaagttgctctaacagccattgcattagctattt

SEQ ID NO: 9952 - DNA, 122 bp, Homo sapiens
  misc_feature (61)..(62): /note="This region represents a CpG dinucleotide"
  misc_feature (61)..(61): /note="Nucleotide may be methylated to form 5-methylcytosine"
cacactcacccttgcttgctctgcttcaaccacaggggcagacttgcctttctgtgaacacgccaagcatgctgtcactgcaaggattcatatgtcctgtcccctctgctgagatgctcttc

SEQ ID NO: 9953 - DNA, 122 bp, Homo sapiens
  misc_feature (61)..(62): /note="This region represents a CpG dinucleotide"
  misc_feature (61)..(61): /note="Nucleotide may be methylated to form 5-methylcytosine"
acagtaaggtagtggcagtgggactggatcgtggatctcctggtgccctgtattggcccacgtgtcagccatggactcgtattcccactggtggagccaagaggtttttgctgtctgcaggg

SEQ ID NO: 9954 - DNA, 122 bp, Homo sapiens
  misc_feature (61)..(62): /note="This region represents a CpG dinucleotide"
  misc_feature (61)..(61): /note="Nucleotide may be methylated to form 5-methylcytosine"
cagggaacaatgaagaatcggctctgaaggaagctgccaactctgcctgagtcagaggaccggaaatcagtaagcttccccctgaaccgtttgctctgggaacgacctagggattaggaaga

SEQ ID NO: 9955 - DNA, 122 bp, Homo sapiens
  misc_feature (61)..(62): /note="This region represents a CpG dinucleotide"
  misc_feature (61)..(61): /note="Nucleotide may be methylated to form 5-methylcytosine"
aacctctctaatttccttgatgctaagacccttaacatccaaacttctaatcctggtgttcgaggctccccacagttgatcgataacaccacatttggtggtcccctcccctctgcctcttc

SEQ ID NO: 9956 - DNA, 122 bp, Homo sapiens
  misc_feature (61)..(62): /note="This region represents a CpG dinucleotide"
  misc_feature (61)..(61): /note="Nucleotide may be methylated to form 5-methylcytosine"
atattgattaaacaaaccgagtaatgaatcatgtgtgctgcaagtgtgggtgcttggtaacgtggaaacatacaagtgagctggattctccaatctgcagggcagaaactggatgaaagaca

SEQ ID NO: 9957 - DNA, 122 bp, Homo sapiens
  misc_feature (61)..(62): /note="This region represents a CpG dinucleotide"
  misc_feature (61)..(61): /note="Nucleotide may be methylated to form 5-methylcytosine"
aaataggaggaggagctgaggcgcgaacaactactggatccaacactcaaggatgggcggcgactcagggaagatgtgcagattccagggtaaagatggaaaacaagaaagtagagctgagt

SEQ ID NO: 9958 - DNA, 122 bp, Homo sapiens
  misc_feature (61)..(62): /note="This region represents a CpG dinucleotide"
  misc_feature (61)..(61): /note="Nucleotide may be methylated to form 5-methylcytosine"
gcatttaacacatcctattgtgattgattatatgtttgactcctcaccagacaagatctccgttaattcagtcattcgttcacacattcattcagcgcatactgagccttttctgtgtcagg

SEQ ID NO: 9959 - DNA, 122 bp, Homo sapiens
  misc_feature (61)..(62): /note="This region represents a CpG dinucleotide"
  misc_feature (61)..(61): /note="Nucleotide may be methylated to form 5-methylcytosine"
tgggagatcgccacactggccgagcagccctaccagggcttgtccaacgagcaagtccttcgcttcgtcatggagggcggccttctggacaagccagacaactgtcctgacatgctgtacgt

SEQ ID NO: 9960 - DNA, 122 bp, Homo sapiens
  misc_feature (61)..(62): /note="This region represents a CpG dinucleotide"
  misc_feature (61)..(61): /note="Nucleotide may be methylated to form 5-methylcytosine"
gaatgtcttccccttattacatccatccatggaaaccccacccttcagagggtaagtaaacgtgatacatccatacggtgcagtggtcagccagggccatatgtttcaacaagaatagggcc

SEQ ID NO: 9961 - DNA, 122 bp, Homo sapiens
  misc_feature (61)..(62): /note="This region represents a CpG dinucleotide"
  misc_feature (61)..(61): /note="Nucleotide may be methylated to form 5-methylcytosine"
ctttcagtcccatctcgtcttctgctcagtgaacagtttttgcactggcaggagccaggtcgaacagttccataaactgcttttttatggttctcagtagagcagaggtttgaaattagaga

SEQ ID NO: 9962 - DNA, 122 bp, Homo sapiens
  misc_feature (61)..(62): /note="This region represents a CpG dinucleotide"
  misc_feature (61)..(61): /note="Nucleotide may be methylated to form 5-methylcytosine"
gaatgcctgggccagggttggtgctcagttatttcccaattgccatgattaatatttgttcggtaagaacagctccaggttcaggccggggggctccaggttcaagcgcctcttgtttactc

SEQ ID NO: 9963 - DNA, 122 bp, Homo sapiens
  misc_feature (61)..(62): /note="This region represents a CpG dinucleotide"
  misc_feature (61)..(61): /note="Nucleotide may be methylated to form 5-methylcytosine"
atctggacaagccacagcagagactctgatttggagacttcatggacactcctgccagtgcgctgctgctattgctgctacttccagatgctggtagaaccatttaggtctcttgctttcag

SEQ ID NO: 9964 - DNA, 122 bp, Homo sapiens
  misc_feature (61)..(62): /note="This region represents a CpG dinucleotide"
  misc_feature (61)..(61): /note="Nucleotide may be methylated to form 5-methylcytosine"
tagcactgaatagagggtttaccagattgttggcactggataagtggtactgggcacaatcgtcctctttcataagcaggagggaagtttcctttcctaggattgagagagctggctgactt

SEQ ID NO: 9965 - DNA, 122 bp, Homo sapiens
  misc_feature (61)..(62): /note="This region represents a CpG dinucleotide"
  misc_feature (61)..(61): /note="Nucleotide may be methylated to form 5-methylcytosine"
ctttgtaggggaggtatatgtcatacttacgcatcaagtaggacagcagaagcccagggacgtagcggcccaagacagccaaaaaggtcagtatcccacagctcagcaagcagaactgggga

SEQ ID NO: 9966 - DNA, 122 bp, Homo sapiens
  misc_feature (61)..(62): /note="This region represents a CpG dinucleotide"
  misc_feature (61)..(61): /note="Nucleotide may be methylated to form 5-methylcytosine"
tttttacacatgacatctgcttcctaaacattccagttaagcccatgagtaatgcccgtccgttcctctggttgctcttccttcactgcccactttcactgctccacttttcccctacctgc

SEQ ID NO: 9967 - DNA, 122 bp, Homo sapiens
  misc_feature (61)..(62): /note="This region represents a CpG dinucleotide"
  misc_feature (61)..(61): /note="Nucleotide may be methylated to form 5-methylcytosine"
gttatttattttcttccctcatatttatttcaaagcaatgatttcatttttccagaagcacgatggtcactcttcattcttcaaagatagctgtttaaaaacatctctttaaacagaaaaca

SEQ ID NO: 9968 - DNA, 122 bp, Homo sapiens
  misc_feature (61)..(62): /note="This region represents a CpG dinucleotide"
  misc_feature (61)..(61): /note="Nucleotide may be methylated to form 5-methylcytosine"
ttgcgtaaaggtggtttctatatgtttacctaatctgtccatttagtaatctcttcctaccgttaaaagctataggactgctgaagtggctaagttcacttttgggtctgggttgaggtttg

SEQ ID NO: 9969 - DNA, 122 bp, Homo sapiens
  misc_feature (61)..(62): /note="This region represents a CpG dinucleotide"
  misc_feature (61)..(61): /note="Nucleotide may be methylated to form 5-methylcytosine"
aaggagataacacccttaatctattcattgctggtgcgcttacccagtctggtttagaaccgtttaacaaaggcttagaatcataatgtctatgattattacctcttagctcctagttttac

SEQ ID NO: 9970 - DNA, 122 bp, Homo sapiens
  misc_feature (61)..(62): /note="This region represents a CpG dinucleotide"
  misc_feature (61)..(61): /note="Nucleotide may be methylated to form 5-methylcytosine"
cccacatgacacccgctaattccatacccacagctctccttctccaaacaaacagcagcacggtttgcagaaagaagaaaatgccttcccaagaggagctgcagagaaaggccaggtcataa

SEQ ID NO: 9971 - DNA, 122 bp, Homo sapiens
  misc_feature (61)..(62): /note="This region represents a CpG dinucleotide"
  misc_feature (61)..(61): /note="Nucleotide may be methylated to form 5-methylcytosine"
gaccagcctgggcaacacagggaaacccctctctccaaacaatacaaaaaattagccaagcgtggtagcgcatgcctgtagtcccagctactcaggaggctgagatgggggtatcgcttgag

SEQ ID NO: 9972 - DNA, 122 bp, Homo sapiens
  misc_feature (61)..(62): /note="This region represents a CpG dinucleotide"
  misc_feature (61)..(61): /note="Nucleotide may be methylated to form 5-methylcytosine"
ggcagcgggacctggtagaactggcctcagggctcagtggagttgccagactagactggccgagagaggagccaggacagaatttccaggcagggaagcaggaaatttacttcaaatcactt

SEQ ID NO: 9973 - DNA, 122 bp, Homo sapiens
  misc_feature (61)..(62): /note="This region represents a CpG dinucleotide"
  misc_feature (61)..(61): /note="Nucleotide may be methylated to form 5-methylcytosine"
agtccggggagtccaggtatggaatgggaggcagaaagttcaatcaagggactgggatttcggaatgaataatgaagggagatggactgggtccatgccgaaggtttctccctggtttctca

SEQ ID NO: 9974 - DNA, 122 bp, Homo sapiens
  misc_feature (61)..(62): /note="This region represents a CpG dinucleotide"
  misc_feature (61)..(61): /note="Nucleotide may be methylated to form 5-methylcytosine"
gatctgaagtcttccatgaatttgaatatcccatgctagatatacagttttcaaatagggcggagctgagatatttgaacattttcttctccccattttctttccccctagactctgttcca

SEQ ID NO: 9975 - DNA, 122 bp, Homo sapiens
  misc_feature (61)..(62): /note="This region represents a CpG dinucleotide"
  misc_feature (61)..(61): /note="Nucleotide may be methylated to form 5-methylcytosine"
ggagaatcctcatttaatcactcagaaaaacatcccaacagaagaaataaaccagtcattcggatgatcacatagacatgtttcctcaggatcctaaggttttacattcttttccaaaatca

SEQ ID NO: 9976 - DNA, 122 bp, Homo sapiens
  misc_feature (61)..(62): /note="This region represents a CpG dinucleotide"
  misc_feature (61)..(61): /note="Nucleotide may be methylated to form 5-methylcytosine"
tgaagaaatgaggatgagacagcagagtaatatgtccaagatcacacagcaccctgagcacgtactctgtgtacttaatcaccacatggagtccttcctggggccatcaaatgatcccccca

SEQ ID NO: 9977 - DNA, 122 bp, Homo sapiens
  misc_feature (61)..(62): /note="This region represents a CpG dinucleotide"
  misc_feature (61)..(61): /note="Nucleotide may be methylated to form 5-methylcytosine"
agagcaaacactgagttaaccaccttggaaaatagtgaggcagtttctttcaaagttaaacgtacacctctgctgtattctgagtgtctgtccccagcgttcgtatgttgaaaccctaaccc

SEQ ID NO: 9978 - DNA, 122 bp, Homo sapiens
  misc_feature (61)..(62): /note="This region represents a CpG dinucleotide"
  misc_feature (61)..(61): /note="Nucleotide may be methylated to form 5-methylcytosine"
acaaatatttccccaatgaaagataaagtagcagacaaattctacaaaaacacaagaaatcgaggccctgtgagtgaaaaagtaaatactagagggagcaaacatatctcctgtcccacccc

SEQ ID NO: 9979 - DNA, 122 bp, Homo sapiens
  misc_feature (61)..(62): /note="This region represents a CpG dinucleotide"
  misc_feature (61)..(61): /note="Nucleotide may be methylated to form 5-methylcytosine"
agagtatagaaaagctagctccaaggagctcaggcagcaggagggtatggtgctggagggcgctttgtggagagagcttgagagcccacccatgtaactctgatgatggaataataatattt

SEQ ID NO: 9980 - DNA, 122 bp, Homo sapiens
  misc_feature (61)..(62): /note="This region represents a CpG dinucleotide"
  misc_feature (61)..(61): /note="Nucleotide may be methylated to form 5-methylcytosine"
acaccaaggattgttgggagctgtcacatgcagttagctgagaaatacaactcatcctgacgagtcaggtaatgacatgaagcacaggcagccactcactctgaccagacacctgaagccat

SEQ ID NO: 9981 - DNA, 122 bp, Homo sapiens
  misc_feature (61)..(62): /note="This region represents a CpG dinucleotide"
  misc_feature (61)..(61): /note="Nucleotide may be methylated to form 5-methylcytosine"
agcgagaaaggggagccggcgcagctcgctgccctgttccagaactcagaatttgagaggcgagagttcggtaagccgtgcgaccagacgaccgaggacgcgcgcagagaaacccccgccgt

SEQ ID NO: 9982 - DNA, 122 bp, Homo sapiens
  misc_feature (61)..(62): /note="This region represents a CpG dinucleotide"
  misc_feature (61)..(61): /note="Nucleotide may be methylated to form 5-methylcytosine"
tcccacttgagacctgcctggagtgacagtggaggaatgctcttccccaggctcaccccacggttcacaggaggaaatggccttctgcaccagtgggtgtgcctgcctgagacaccccagac

SEQ ID NO: 9983 - DNA, 122 bp, Homo sapiens
  misc_feature (61)..(62): /note="This region represents a CpG dinucleotide"
  misc_feature (61)..(61): /note="Nucleotide may be methylated to form 5-methylcytosine"
atgcacatacagagtcagtatttaagcaactgaaatgtatgctgaacagtagccagttcccgtcccttagcaaagtcatttccctgggattgttcatctcccatggcaacaatacacagtag

SEQ ID NO: 9984 - DNA, 122 bp, Homo sapiens
  misc_feature (61)..(62): /note="This region represents a CpG dinucleotide"
  misc_feature (61)..(61): /note="Nucleotide may be methylated to form 5-methylcytosine"
ctccagaaaaaaacatttggtttctaatgaggcctggaatcttattcttgacctggggagcggaatccctttttgcagtactcccgggccctctgttggggcctccccttcctctccagggt

SEQ ID NO: 9985 - DNA, 122 bp, Homo sapiens
  misc_feature (61)..(62): /note="This region represents a CpG dinucleotide"
  misc_feature (61)..(61): /note="Nucleotide may be methylated to form 5-methylcytosine"
tatttgagacattttttgtgtgtgactagttaattttgcaggatgtgccatatcattgaacggaactaaagtctgtgacagtggatatagctgctggaccattccatcttatatgtaaagaa

SEQ ID NO: 9986 - DNA, 122 bp, Homo sapiens
  misc_feature (61)..(62): /note="This region represents a CpG dinucleotide"
  misc_feature (61)..(61): /note="Nucleotide may be methylated to form 5-methylcytosine"
caaaacattgaacacccctgtcttacttccaggctctgtggtccagaatagagacatttccgagtttcatctaaaccactaaaactctaaaaataaagttttaaaagtagataaaggtagaa

SEQ ID NO: 9987 - DNA, 122 bp, Homo sapiens
  misc_feature (61)..(62): /note="This region represents a CpG dinucleotide"
  misc_feature (61)..(61): /note="Nucleotide may be methylated to form 5-methylcytosine"
caacagggcttctcaagctctaatgtgcacccgctcctgaatccctggggatcttgtcaacgtaaattctgattcaataagtctagggtggggcctgtgattctgcattttttcttttcttt

SEQ ID NO: 9988 - DNA, 122 bp, Homo sapiens
  misc_feature (61)..(62): /note="This region represents a CpG dinucleotide"
  misc_feature (61)..(61): /note="Nucleotide may be methylated to form 5-methylcytosine"
ctgttctttctggcttcccttgccgctaggtgtggccaaatatgactaagtcctcacctccggactggaaacagaagtgatgcaaaccacctctggatctaactcttgcacactctttccat

SEQ ID NO: 9989 - DNA, 122 bp, Homo sapiens
  misc_feature (61)..(62): /note="This region represents a CpG dinucleotide"
  misc_feature (61)..(61): /note="Nucleotide may be methylated to form 5-methylcytosine"
ttgttctttctttgacacagacccagacaaaagctgagtgtagcaaggaaacagacagaacgcctccagtagtggcccccgcctggctccaggatttgtaaacagaaacatcccaggctcca

SEQ ID NO: 9990 - DNA, 122 bp, Homo sapiens
  misc_feature (61)..(62): /note="This region represents a CpG dinucleotide"
  misc_feature (61)..(61): /note="Nucleotide may be methylated to form 5-methylcytosine"
attaaaacttaaccaaactattcacttttacaagatacacgttagattcaagaacaataacgtgatcttttttgcctttcaggattaaagaatcgggttagtcagtcttggtggtgcatgcc

SEQ ID NO: 9991 - DNA, 122 bp, Homo sapiens
  misc_feature (61)..(62): /note="This region represents a CpG dinucleotide"
  misc_feature (61)..(61): /note="Nucleotide may be methylated to form 5-methylcytosine"
gatcctgtttggtccccaggtcctgcagcatcagcactaatgggactttgatctggagtgcgtgtcttcaccctctttgctgtttttattgacactgtgcagtaagagcagtgcaatttcct

SEQ ID NO: 9992 - DNA, 122 bp, Homo sapiens
  misc_feature (61)..(62): /note="This region represents a CpG dinucleotide"
  misc_feature (61)..(61): /note="Nucleotide may be methylated to form 5-methylcytosine"
tgagttattctgtcttcagtatggtgtttcctaatgcccaagtggatctcttgcacaacacgtacaacagacggaaggtgcaagaatgtccttaaaacagtttacaataatcaaaacctgga

SEQ ID NO: 9993 - DNA, 122 bp, Homo sapiens
  misc_feature (61)..(62): /note="This region represents a CpG dinucleotide"
  misc_feature (61)..(61): /note="Nucleotide may be methylated to form 5-methylcytosine"
ggtttctgtggcgtgggggtgagtgacagtccaggatgtggagtggactggattagtcgccgttttcagtcgagaggctgcctgagtcagaggctgtgtgagtacttgaataacagggaaac

SEQ ID NO: 9994 - DNA, 122 bp, Homo sapiens
  misc_feature (61)..(62): /note="This region represents a CpG dinucleotide"
  misc_feature (61)..(61): /note="Nucleotide may be methylated to form 5-methylcytosine"
tgtttgccaaaagcgttttgccaatttatatatccactagcagtatatgaaaatgtctctcgcagcccaataaataggattgtttaatctgtataatctactatctctgttttaatctagct

SEQ ID NO: 9995 - DNA, 122 bp, Homo sapiens
  misc_feature (61)..(62): /note="This region represents a CpG dinucleotide"
  misc_feature (61)..(61): /note="Nucleotide may be methylated to form 5-methylcytosine"
gtgcatttctgtctactgagaaacaccaggtagaaaactgcaccaagctgaattgagcttcgtggtaatacacaaaaaatgcacacagctcagctcaacaagtgcactgagtcacaccaaac

SEQ ID NO: 9996 - DNA, 122 bp, Homo sapiens
  misc_feature (61)..(62): /note="This region represents a CpG dinucleotide"
  misc_feature (61)..(61): /note="Nucleotide may be methylated to form 5-methylcytosine"
ctcttctgtggtcctgctagatttggagattgtcatttactgtctgacctagttcacacacgtgttccctgtgaaccaacttagatgtctgtcttaatgtaactgatagctcatttacttac

SEQ ID NO: 9997 - DNA, 122 bp, Homo sapiens
  misc_feature (61)..(62): /note="This region represents a CpG dinucleotide"
  misc_feature (61)..(61): /note="Nucleotide may be methylated to form 5-methylcytosine"
tgccctttgcatgtggcctgataaacaattatgccctccagacaccagggctgtgaattccgcctttttaaacaggcccagagtcagcttatttggagattttcagcaccgtggacagaggc

SEQ ID NO: 9998 - DNA, 122 bp, Homo sapiens
  misc_feature (61)..(62): /note="This region represents a CpG dinucleotide"
  misc_feature (61)..(61): /note="Nucleotide may be methylated to form 5-methylcytosine"
agaagtagtagttagtgaagtgggagaggaaccaaaacctaacagcgtcttgggaagccacgaacaggaagaaaacttcacacaaactgtgcaaagcaatgataacaatcttattgtttaat

SEQ ID NO: 9999 - DNA, 122 bp, Homo sapiens
  misc_feature (61)..(62): /note="This region represents a CpG dinucleotide"
  misc_feature (61)..(61): /note="Nucleotide may be methylated to form 5-methylcytosine"
cagtacacatgcttgtgcctgccctcttaccgatgctgagtgtgttgaatgtgaacgaggcgtgtgggaccatggtgagtcattagacacaagtaatgagctttgttataggtgaatgttga

SEQ ID NO: 10000 - DNA, 122 bp, Homo sapiens
  misc_feature (61)..(62): /note="This region represents a CpG dinucleotide"
  misc_feature (61)..(61): /note="Nucleotide may be methylated to form 5-methylcytosine"
aagcagggaatgagatgtgctgtgaggtgtaactgactcaggttccatctggcagcctctcggaggagctgccgagtagcccagtccctctctgtcaagcctaattctctccttctctttcc

SEQ ID NO: 10001 - DNA, 122 bp, Homo sapiens
  misc_feature (61)..(62): /note="This region represents a CpG dinucleotide"
  misc_feature (61)..(61): /note="Nucleotide may be methylated to form 5-methylcytosine"
cattcaccaaagtgtgaattactcagtctataaaccactagtgtagcagcaatacagtcacggttaacctttgcccagcctcatcaaattctcttttctctgtgaagattaggcaagcatgt

SEQ ID NO: 10002 - DNA, 122 bp, Homo sapiens
  misc_feature (61)..(62): /note="This region represents a CpG dinucleotide"
  misc_feature (61)..(61): /note="Nucleotide may be methylated to form 5-methylcytosine"
ctgccagcgcagctgcagctcctgcgggcaggcacgggcggctgtcaggggtcgtcggggcgtccaggcccaagccccctgccctccgggccccccactcacgttggccctcaccccatcct

SEQ ID NO: 10003 - DNA, 122 bp, Homo sapiens
  misc_feature (61)..(62): /note="This region represents a CpG dinucleotide"
  misc_feature (61)..(61): /note="Nucleotide may be methylated to form 5-methylcytosine"
ccacttgccaaacccgactgaatcactccttcttgccatgacaggtttattgtcttagttcgggtccccatcctccctcccccaagagcctaatgctctgtgacctttcacaaataactcaa

SEQ ID NO: 10004 - DNA, 122 bp, Homo sapiens
  misc_feature (61)..(62): /note="This region represents a CpG dinucleotide"
  misc_feature (61)..(61): /note="Nucleotide may be methylated to form 5-methylcytosine"
gctatattcccagaattgtgttaacttcctgagttcaagtcaaggctctatgatttacttcgtgatttctggtaaattacttaatcccacctgtaacattgtgaaaccaatacttcctactt

SEQ ID NO: 10005 - DNA, 122 bp, Homo sapiens
  misc_feature (61)..(62): /note="This region represents a CpG dinucleotide"
  misc_feature (61)..(61): /note="Nucleotide may be methylated to form 5-methylcytosine"
ttgtgtcattctgcaaagagcactatgacttctgggtttccctgagtcaaactggatcatcgtggcctaattagtgtggtgccagcccattcccaaccatctgccagatgcctccaagcccc

SEQ ID NO: 10006 - DNA, 122 bp, Homo sapiens
  misc_feature (61)..(62): /note="This region represents a CpG dinucleotide"
  misc_feature (61)..(61): /note="Nucleotide may be methylated to form 5-methylcytosine"
ctgctcgaggtctgtttttctctccttgcctctcaacccctgaaagcaaagcccggacatcggaaagggaaaggggccagctaagggcagctggaaaagaagggaactgctcaggggagagt

SEQ ID NO: 10007 - DNA, 122 bp, Homo sapiens
  misc_feature (61)..(62): /note="This region represents a CpG dinucleotide"
  misc_feature (61)..(61): /note="Nucleotide may be methylated to form 5-methylcytosine"
tttacctattcctgtgataacagtatctcagttttcctttgtggaaccacccacgtctcacgctccattcatgcagttccatgaggctgacctcacccatgggctccaggagtggaagtttt

SEQ ID NO: 10008 - DNA, 122 bp, Homo sapiens
  misc_feature (61)..(62): /note="This region represents a CpG dinucleotide"
  misc_feature (61)..(61): /note="Nucleotide may be methylated to form 5-methylcytosine"
taaatgactcccaggagctcttccagctgtgctccagaattccttaagcagtgccaacctcgctgttcctccgaccgcttcttccctttccagcccttccctccagcggcttctgttctcta

SEQ ID NO: 10009 - DNA, 122 bp, Homo sapiens
  misc_feature (61)..(62): /note="This region represents a CpG dinucleotide"
  misc_feature (61)..(61): /note="Nucleotide may be methylated to form 5-methylcytosine"
tcctgacattaagattacacagtaaagatatggaggcaggatgccagcccagacatgtctcgttccaaagtcctaattctgaaccactagccatactgctgtcttccctttcggcctctacc

SEQ ID NO: 10010 - DNA, 122 bp, Homo sapiens
  misc_feature (61)..(62): /note="This region represents a CpG dinucleotide"
  misc_feature (61)..(61): /note="Nucleotide may be methylated to form 5-methylcytosine"
cctgatggctggtgagcttcagcctgatcctggtttctgcacagagaacactcactcttacgtcaagattcagagaatcacttgtacaaacttttctcattctcttagttacatatgaactc

SEQ ID NO: 10011 - DNA, 122 bp, Homo sapiens
  misc_feature (61)..(62): /note="This region represents a CpG dinucleotide"
  misc_feature (61)..(61): /note="Nucleotide may be methylated to form 5-methylcytosine"
ggaaggcggatatcagctctggttgctcggttagtttgccctatttgagctgacgactttcgttaatgaatttcacctctagtgctcagtggtttatctgaaagaaaaggctggactagaga

SEQ ID NO: 10012 - DNA, 122 bp, Homo sapiens
  misc_feature (61)..(62): /note="This region represents a CpG dinucleotide"
  misc_feature (61)..(61): /note="Nucleotide may be methylated to form 5-methylcytosine"
tgcggggcagcaacttggggcgacccaaatctttaaaataacaaccccccgacccccgcgcgcaaacaaaaattgtgctcaggaaaggcacgactcaatatttaaagtaaaaagcctttgtc

SEQ ID NO: 10013 - DNA, 122 bp, Homo sapiens
  misc_feature (61)..(62): /note="This region represents a CpG dinucleotide"
  misc_feature (61)..(61): /note="Nucleotide may be methylated to form 5-methylcytosine"
gctgctgcagcggcaggtgctgggtcgggggcgctgggggctgctggtagccggggcccccgcccgggccgccgtctgcgccgcccgagccgctgtgctgcgcgtactcctcgaagggaggg

SEQ ID NO: 10014 - DNA, 122 bp, Homo sapiens
  misc_feature (61)..(62): /note="This region represents a CpG dinucleotide"
  misc_feature (61)..(61): /note="Nucleotide may be methylated to form 5-methylcytosine"
cccctgggcaaaggcagagataacattggcacaatctgcctttcagctttcattgtcatgcgggagtcaccatgctttgtaagacatttaatctataagacttgattagttttgctaccttt

SEQ ID NO: 10015 - DNA, 122 bp, Homo sapiens
  misc_feature (61)..(62): /note="This region represents a CpG dinucleotide"
  misc_feature (61)..(61): /note="Nucleotide may be methylated to form 5-methylcytosine"
acataataagcccaagtaaataaaataagcatacccagcttatttctagtttctttaaaacgcctgaggaaatacatcatggaggcataaagctgtgcattttcaccttgggtaggcaggaa

SEQ ID NO: 10016 - DNA, 122 bp, Homo sapiens
  misc_feature (61)..(62): /note="This region represents a CpG dinucleotide"
  misc_feature (61)..(61): /note="Nucleotide may be methylated to form 5-methylcytosine"
cacatagcacatactattcttcctggtctcttcagttaaatcttgggtttcgttttgtttcgttttttcatgaacaatatacctcagaggctatttcacctcagtgagcaaagaactgcctc

SEQ ID NO: 10017 - DNA, 122 bp, Homo sapiens
  misc_feature (61)..(62): /note="This region represents a CpG dinucleotide"
  misc_feature (61)..(61): /note="Nucleotide may be methylated to form 5-methylcytosine"
attgtttactactttactaatgtctgtgatctgatggtatctctgtttcaggagtggtgacgcctaagctatcactggacatatcaaggacttcactaaattagcaggtaccactggtcttc

SEQ ID NO: 10018 - DNA, 122 bp, Homo sapiens
  misc_feature (61)..(62): /note="This region represents a CpG dinucleotide"
  misc_feature (61)..(61): /note="Nucleotide may be methylated to form 5-methylcytosine"
ctccctatgaagcttattgcacattttcaggtatttccagtttactcacacatgcacatacgtattaagcaaacggtaagaattataaagaaatctgcatgtaaacagaattccccaagaat

SEQ ID NO: 10019 - DNA, 122 bp, Homo sapiens
  misc_feature (61)..(62): /note="This region represents a CpG dinucleotide"
  misc_feature (61)..(61): /note="Nucleotide may be methylated to form 5-methylcytosine"
gaaacctacaagggagtgtggtaacccaaggttagaaaagcagaaccactgccactcccacgcctcaaaggaggaaatggttactcaaatccagaactagagagaatgaggagaaaagctgt

SEQ ID NO: 10020 - DNA, 122 bp, Homo sapiens
  misc_feature (61)..(62): /note="This region represents a CpG dinucleotide"
  misc_feature (61)..(61): /note="Nucleotide may be methylated to form 5-methylcytosine"
agtttttgttagttgtctccctctcttcttctggaatggagccttccagagttcttgggtcgttctggagtttgttgagcattaccctgtatctgccttatctttgttttctgagtggtaag

SEQ ID NO: 10021 - DNA, 122 bp, Homo sapiens
  misc_feature (61)..(62): /note="This region represents a CpG dinucleotide"
  misc_feature (61)..(61): /note="Nucleotide may be methylated to form 5-methylcytosine"
aagtgacttctgttttccaaaatgtagcttgggggtcatagaaacaatggagatttatgacgataagaactgggcttgaattctggtgtggtttatttattagctgtgtagttcataagaaa

SEQ ID NO: 10022 - DNA, 122 bp, Homo sapiens
  misc_feature (61)..(62): /note="This region represents a CpG dinucleotide"
  misc_feature (61)..(61): /note="Nucleotide may be methylated to form 5-methylcytosine"
ttagagatgacaccagtaacgataggtttctactcttagctatgcctggggcagcttgaccgccactttgttgatcacattaatttacctcttcctgcctttatttccctttctgtaaaatg

SEQ ID NO: 10023 - DNA, 122 bp, Homo sapiens
  misc_feature (61)..(62): /note="This region represents a CpG dinucleotide"
  misc_feature (61)..(61): /note="Nucleotide may be methylated to form 5-methylcytosine"
gaactgtaatctccataatccctacgtgccaggtagggacctggtaggaggtgattggcccgtggtggcagtttccctcatgctgttctcgtgatagcacgtgagttctcgtgagatctgat

SEQ ID NO: 10024 - DNA, 122 bp, Homo sapiens
  misc_feature (61)..(62): /note="This region represents a CpG dinucleotide"
  misc_feature (61)..(61): /note="Nucleotide may be methylated to form 5-methylcytosine"
tataagccccctcacctcattttccccttctgagatgctaccgaaactcttcctcagtggcgatagatgaactgagctttgtgtaatcaccaggtctctgtggtccgccttgcacggaagca

SEQ ID NO: 10025 - DNA, 122 bp, Homo sapiens
  misc_feature (61)..(62): /note="This region represents a CpG dinucleotide"
  misc_feature (61)..(61): /note="Nucleotide may be methylated to form 5-methylcytosine"
ataccaggctgccattgtgcttagaattctctggatgctcatagattttctgtgttgacacgagaagtcaatgtcatttattaatatcttcacaagatcactctttcagattaacttcctag

SEQ ID NO: 10026 - DNA, 122 bp, Homo sapiens
  misc_feature (61)..(62): /note="This region represents a CpG dinucleotide"
  misc_feature (61)..(61): /note="Nucleotide may be methylated to form 5-methylcytosine"
tgacactcaagcaggagtacctcaacccaagagtaatccagctgttgaccttgacaaaatcgtgttggcttgacagagagagagaaagctgtgtctgtgcctttgctgggaagctggtgata

SEQ ID NO: 10027 - DNA, 122 bp, Homo sapiens
  misc_feature (61)..(62): /note="This region represents a CpG dinucleotide"
  misc_feature (61)..(61): /note="Nucleotide may be methylated to form 5-methylcytosine"
ccttgcatggccttgcccaatgcactgccatctgcctgcatgtggaaactatgcaccctccgcctcctctttcatatcagagtgtcacctctcatagtccctttctgactagttttctgaca

SEQ ID NO: 10028 - DNA, 122 bp, Homo sapiens
  misc_feature (61)..(62): /note="This region represents a CpG dinucleotide"
  misc_feature (61)..(61): /note="Nucleotide may be methylated to form 5-methylcytosine"
atcttgtaactccctcttaatttacaatctgtttgctgtttcagatgtttggaaagaaaacgccttagtcagcagccctagaaagcctcattttcagtaaaatctggacacttcttttccac

SEQ ID NO: 10029 - DNA, 122 bp, Homo sapiens
  misc_feature (61)..(62): /note="This region represents a CpG dinucleotide"
  misc_feature (61)..(61): /note="Nucleotide may be methylated to form 5-methylcytosine"
ctggagggaggaaggtgtggggggacccaggggtcctgtctccaagcctggttgctcttacgcgaaaagttgggacactgaggtgtcacagcttctcttttgaaatggagaggaggtaggag

SEQ ID NO: 10030 - DNA, 122 bp, Homo sapiens
  misc_feature (61)..(62): /note="This region represents a CpG dinucleotide"
  misc_feature (61)..(61): /note="Nucleotide may be methylated to form 5-methylcytosine"
gaccggttataccaacacatttttggaggacaagagcaataacttattcagtccttacagcgtgacagacattgttctaagtgttttacacattgttcactcctttaaacaacctaaaaggt

SEQ ID NO: 10031 - DNA, 122 bp, Homo sapiens
  misc_feature (61)..(62): /note="This region represents a CpG dinucleotide"
  misc_feature (61)..(61): /note="Nucleotide may be methylated to form 5-methylcytosine"
gaatatccaagcaccctatgcacacaaacacacacacacacacacacacacacacacacacgaacccactcatcagagagctgctaaggattaaaaggagatggtgaaacacatccacacaa

SEQ ID NO: 10032 - DNA, 122 bp, Homo sapiens
  misc_feature (61)..(62): /note="This region represents a CpG dinucleotide"
  misc_feature (61)..(61): /note="Nucleotide may be methylated to form 5-methylcytosine"
ctgtttacattcttgtcagaaagcccgctattttaagtcagcgcctctcaaacgtgaatgcgcataaggatcacccagggatcttgccacagcctaagtcctgatttgggagttctaggtca

SEQ ID NO: 10033 - DNA, 122 bp, Homo sapiens
  misc_feature (61)..(62): /note="This region represents a CpG dinucleotide"
  misc_feature (61)..(61): /note="Nucleotide may be methylated to form 5-methylcytosine"
gaaacccaaggttatggatgggaacaatgaatcattggtgtgattacattatcctttaaccgtaatgggtttgccttgcattaagtaaccagagggaaagaaagcacctgttccttaactct

SEQ ID NO: 10034 - DNA, 122 bp, Homo sapiens
  misc_feature (61)..(62): /note="This region represents a CpG dinucleotide"
  misc_feature (61)..(61): /note="Nucleotide may be methylated to form 5-methylcytosine"
tggcggaggaagattaagagaaatcgcgagcagggctcggctgccattggtgtgtgcaaacgccgaggaggaagggagagggagagtgagagtgaggaaggggggagagaagggggaaaaac

SEQ ID NO: 10035 - DNA, 122 bp, Homo sapiens
  misc_feature (61)..(62): /note="This region represents a CpG dinucleotide"
  misc_feature (61)..(61): /note="Nucleotide may be methylated to form 5-methylcytosine"
taacttttcactggaaaaccttgatctatacttagatttcatgaagttgacagtttaaaacgtagattcaggccagatgcaatggctcacatctataatcccaaaactttgggaggccaaac

SEQ ID NO: 10036 - DNA, 122 bp, Homo sapiens
  misc_feature (61)..(62): /note="This region represents a CpG dinucleotide"
  misc_feature (61)..(61): /note="Nucleotide may be methylated to form 5-methylcytosine"
ggtgtgtccagcctcgatgtaggaggaacagggagaaactgatttgctattcataaaatgcgtctgcagaaacagattaactcctgatccactttcacggctgaagcagagcctgccttgta

SEQ ID NO: 10037 - DNA, 122 bp, Homo sapiens
  misc_feature (61)..(62): /note="This region represents a CpG dinucleotide"
  misc_feature (61)..(61): /note="Nucleotide may be methylated to form 5-methylcytosine"
aaggtgaaacatggctcattgcatcatattaatagcatgcaaatctaagcccagtgatgccgtgcaatggctacgatcaagggcaatagaatggatcgtgcatgagctcccaggccacacac

SEQ ID NO: 10038 - DNA, 122 bp, Homo sapiens
  misc_feature (61)..(62): /note="This region represents a CpG dinucleotide"
  misc_feature (61)..(61): /note="Nucleotide may be methylated to form 5-methylcytosine"
cacagcccgcacagtgcccacacagcacacacagcacacatggtgcccacacagcccgcacggtgcctgcacagcacacacagcccgcacggtgccctcacagcccgcacggtgcccgcaca

SEQ ID NO: 10039 - DNA, 122 bp, Homo sapiens
  misc_feature (61)..(62): /note="This region represents a CpG dinucleotide"
  misc_feature (61)..(61): /note="Nucleotide may be methylated to form 5-methylcytosine"
tttttaaaaagatgatgtttattgggttaagtattagcagaatacataaatcatttagtacgtttcctgtttgcgtgaattctatttatgttggtcacattttgcaaattaatgttaaaacc

SEQ ID NO: 10040 - DNA, 122 bp, Homo sapiens
  misc_feature (61)..(62): /note="This region represents a CpG dinucleotide"
  misc_feature (61)..(61): /note="Nucleotide may be methylated to form 5-methylcytosine"
agccactgcaccagcctgtttttttcttttaaatcatcttgacctcaacatcttagtcaacgcttatatgaaattttagcaaaacagtgattgaaaagcggagaatgtaaagtcccagagtt

SEQ ID NO: 10041 - DNA, 122 bp, Homo sapiens
  misc_feature (61)..(62): /note="This region represents a CpG dinucleotide"
  misc_feature (61)..(61): /note="Nucleotide may be methylated to form 5-methylcytosine"
aatgtatccaaaacataaattgaattgatgaaaggataaagggatagatgggtgacaagacgtatgttcaagcaataaagcaaactattgattgtagaatctaggtggtggcttatgggtgt

SEQ ID NO: 10042 - DNA, 122 bp, Homo sapiens
  misc_feature (61)..(62): /note="This region represents a CpG dinucleotide"
  misc_feature (61)..(61): /note="Nucleotide may be methylated to form 5-methylcytosine"
cccccctcccggcagaaacctggaagtggaaatctcgggcattcaccgtttgggtgaagacggaggcgggttctggacagacgtaggctgtcagggagtgtttacttcgcctccacttctgt

SEQ ID NO: 10043 - DNA, 122 bp, Homo sapiens
  misc_feature (61)..(62): /note="This region represents a CpG dinucleotide"
  misc_feature (61)..(61): /note="Nucleotide may be methylated to form 5-methylcytosine"
tgagagaagggaatgggagatctgagttccttgtttttctccccaacagaagactacttacgtgtggcgagaacccaagctatgctctggtggcatttctctgcctgagcagagagtcacca

SEQ ID NO: 10044 - DNA, 122 bp, Homo sapiens
  misc_feature (61)..(62): /note="This region represents a CpG dinucleotide"
  misc_feature (61)..(61): /note="Nucleotide may be methylated to form 5-methylcytosine"
agaagccaaggcccttaatctcacagtcacaagaaaaatgacttgtgccaacaacccaagcgagcttggaagtggttccattgccagttgagcttccagataagaactgagccccagatgac

SEQ ID NO: 10045 - DNA, 122 bp, Homo sapiens
  misc_feature (61)..(62): /note="This region represents a CpG dinucleotide"
  misc_feature (61)..(61): /note="Nucleotide may be methylated to form 5-methylcytosine"
ggacgcggccctgcgtctcctttcctgagatgcgaggttatttccatctttcagcagtctcggcgctttgtcttgttctggaagcaattgctagatagacatttctggccgtgaatactatt

SEQ ID NO: 10046 - DNA, 122 bp, Homo sapiens
  misc_feature (61)..(62): /note="This region represents a CpG dinucleotide"
  misc_feature (61)..(61): /note="Nucleotide may be methylated to form 5-methylcytosine"
cagaaatttaccgacgtcctgctggaagccatgaatgtgcctgacaagagactgaaacagcggttggcagagacatgaataaaagaccagtgtcttggtttaatcacctggctctaaggtgg

SEQ ID NO: 10047 - DNA, 122 bp, Homo sapiens
  misc_feature (61)..(62): /note="This region represents a CpG dinucleotide"
  misc_feature (61)..(61): /note="Nucleotide may be methylated to form 5-methylcytosine"
caacttccaggcccacccaggaacacccacaggtggagcagagaaacgcagagatgtggacggtctctcttcagaagctttattctccctgggaggggcacacctcacccagccaagggctg

SEQ ID NO: 10048 - DNA, 122 bp, Homo sapiens
  misc_feature (61)..(62): /note="This region represents a CpG dinucleotide"
  misc_feature (61)..(61): /note="Nucleotide may be methylated to form 5-methylcytosine"
ggtgagatgagagtaagatacagaactcaaggacaaaatccctgccctgcctagtcttaccgagaagtctagaggaatccacatctaaactaagcaagagcactatttaattaagcatttct

SEQ ID NO: 10049 - DNA, 122 bp, Homo sapiens
  misc_feature (61)..(62): /note="This region represents a CpG dinucleotide"
  misc_feature (61)..(61): /note="Nucleotide may be methylated to form 5-methylcytosine"
aaaccaagtgagattgcacaaggggctctcacttcctgtgcttgtgagcatggctttcagcgtgtgctaaccacagctcctaagtacatggcccacattgagtttcatctgtgtctagattc

SEQ ID NO: 10050 - DNA, 122 bp, Homo sapiens
  misc_feature (61)..(62): /note="This region represents a CpG dinucleotide"
  misc_feature (61)..(61): /note="Nucleotide may be methylated to form 5-methylcytosine"
tgaagtggcaacaatgactgtcatttcctcctcaaatataatgtaaggacatttccaagtcgcttcagtcatttcttcctcctccaccctaccatgtgcttacaaaagtatgctgtaggaga

SEQ ID NO: 10051 - DNA, 122 bp, Homo sapiens
  misc_feature (61)..(62): /note="This region represents a CpG dinucleotide"
  misc_feature (61)..(61): /note="Nucleotide may be methylated to form 5-methylcytosine"
cagtggtctgaagttcagggggagaagtcaaggtctgagctatcatttttttggtgtcatcggtatacaaatatagagattgcatgaaaccatcaaagactatatagagaaaagaatttgta

SEQ ID NO: 10052 - DNA, 122 bp, Homo sapiens
  misc_feature (61)..(62): /note="This region represents a CpG dinucleotide"
  misc_feature (61)..(61): /note="Nucleotide may be methylated to form 5-methylcytosine"
tccagatactcaaattttcccccttgtgtaaacatggtctttatcatgaaaccgaacaaacgtttttctaaattcgtctctcaggagcatacccacgctgcacatcatggaacattttatcc

SEQ ID NO: 10053 - DNA, 122 bp, Homo sapiens
  misc_feature (61)..(62): /note="This region represents a CpG dinucleotide"
  misc_feature (61)..(61): /note="Nucleotide may be methylated to form 5-methylcytosine"
ttttttatattactgaggagtcatagagcactctcacagagatcaaccctgaattaatgacgttgggatgatgaatgagcaattcatctaaagcttcctttggataggcaaacagtcttaga

SEQ ID NO: 10054 - DNA, 122 bp, Homo sapiens
  misc_feature (61)..(62): /note="This region represents a CpG dinucleotide"
  misc_feature (61)..(61): /note="Nucleotide may be methylated to form 5-methylcytosine"
cgtttctttccaacttcccttcccctcccatctcagtaatcagttttctttctgggcaaacgcaaagtggattctgtctacagcactgcggtaggcaatagtaaaacagaaaaaatggaggg

SEQ ID NO: 10055 - DNA, 122 bp, Homo sapiens
  misc_feature (61)..(62): /note="This region represents a CpG dinucleotide"
  misc_feature (61)..(61): /note="Nucleotide may be methylated to form 5-methylcytosine"
tacagggtttctccacgggaactgccaaaaacatctaagctccttcccgcagttgggaatcgctgccctgcaaatgaaaaaggagactaaacaagagcagggaggcggtgcaggcccccgac

SEQ ID NO: 10056 - DNA, 122 bp, Homo sapiens
  misc_feature (61)..(62): /note="This region represents a CpG dinucleotide"
  misc_feature (61)..(61): /note="Nucleotide may be methylated to form 5-methylcytosine"
tgccctccgggtcttgggagcacagtagttatcgggagcgtcgcctccggcgtgggctctcgggcgcgagtttcggacgaggcctgggcgcggtggcaggggtctgcccacgccgggatctc

SEQ ID NO: 10057 - DNA, 122 bp, Homo sapiens
  misc_feature (61)..(62): /note="This region represents a CpG dinucleotide"
  misc_feature (61)..(61): /note="Nucleotide may be methylated to form 5-methylcytosine"
gaaaactctagcccctgggtggtccagatggtcagaggcctttgcacaatgaacagaggccgctgctccatatgtgacttctttgccacggaagtcatcccatgaaaaactacaagcaggaa

SEQ ID NO: 10058 - DNA, 122 bp, Homo sapiens
  misc_feature (61)..(62): /note="This region represents a CpG dinucleotide"
  misc_feature (61)..(61): /note="Nucleotide may be methylated to form 5-methylcytosine"
accagcaggctcgggctgccacatgctctcagatcccagagtgttgggtttggtgtctagcgcaagagtggcacagggccccagggccctgccctcgacacacagtgctgagtcccatggcc

SEQ ID NO: 10059 - DNA, 122 bp, Homo sapiens
  misc_feature (61)..(62): /note="This region represents a CpG dinucleotide"
  misc_feature (61)..(61): /note="Nucleotide may be methylated to form 5-methylcytosine"
ctgttgggtgctctgtgaaactaataaggcagtgtgaaatactgtacttatttcagagaccggctgtgaggcttaagtagaggtgcagcattcataagtgtaatagagaataaccttcatgg

SEQ ID NO: 10060 - DNA, 122 bp, Homo sapiens
  misc_feature (61)..(62): /note="This region represents a CpG dinucleotide"
  misc_feature (61)..(61): /note="Nucleotide may be methylated to form 5-methylcytosine"
ctcttataagctgggtttagaacttgtacttctacctcttcctattggtcagagtatgtccgtaggtctgccaagactcaaagcacagagaaatagatgtttcctcttgttgagtggcatat

SEQ ID NO: 10061 - DNA, 122 bp, Homo sapiens
  misc_feature (61)..(62): /note="This region represents a CpG dinucleotide"
  misc_feature (61)..(61): /note="Nucleotide may be methylated to form 5-methylcytosine"
aagaaagttacatattgattgctgttgctcgcggcatgttcgtaccagcgcgggcagaaacgggctcacgagcgccctcgaattcacacacactcaccgaaatacacatctcagcccgtgga

SEQ ID NO: 10062 - DNA, 122 bp, Homo sapiens
  misc_feature (61)..(62): /note="This region represents a CpG dinucleotide"
  misc_feature (61)..(61): /note="Nucleotide may be methylated to form 5-methylcytosine"
ctgggagaacatcatcatgcaaggacaaactgggcagaagaaagaacgaggaaagttcaacgtgcagtgatccctactgtctagattggacatggaaagaaagctcagaactctagtggagg

SEQ ID NO: 10063 - DNA, 122 bp, Homo sapiens
  misc_feature (61)..(62): /note="This region represents a CpG dinucleotide"
  misc_feature (61)..(61): /note="Nucleotide may be methylated to form 5-methylcytosine"
taagtattaaagccagaatgcaaacaagcccaagactgagtccaaaaagcctaggctcttcgccactgccttctactctgagcactcttcttcttgtttgcctttcccctggggatccctga

SEQ ID NO: 10064 - DNA, 122 bp, Homo sapiens
  misc_feature (61)..(62): /note="This region represents a CpG dinucleotide"
  misc_feature (61)..(61): /note="Nucleotide may be methylated to form 5-methylcytosine"
gccccaggctgtctgactctagagcccaccccctcagcttcagcaggctgcctccctccccgccacctgctagggaagcagctgactcatggcttttgattcattcagttctcttctgcatt

SEQ ID NO: 10065 - DNA, 122 bp, Homo sapiens
  misc_feature (61)..(62): /note="This region represents a CpG dinucleotide"
  misc_feature (61)..(61): /note="Nucleotide may be methylated to form 5-methylcytosine"
ggagtctagatttggttcatagtcatgaaaaatattttattcatgtgatagctttttggacgattgtattctgcactgtattacaatggcacaataaattgctgaatatactgtctgctgaa

SEQ ID NO: 10066 - DNA, 122 bp, Homo sapiens
  misc_feature (61)..(62): /note="This region represents a CpG dinucleotide"
  misc_feature (61)..(61): /note="Nucleotide may be methylated to form 5-methylcytosine"
gacttctctgggagaggctgctgtaatctaagccgttagggaatcccgcccttcagtttacgttctggagtgaagccacacaggtgcgtcgctgatcatggccaccgaggtaagaggtagga

SEQ ID NO: 10067 - DNA, 122 bp, Homo sapiens
  misc_feature (61)..(62): /note="This region represents a CpG dinucleotide"
  misc_feature (61)..(61): /note="Nucleotide may be methylated to form 5-methylcytosine"
gcccgtctccctgcctagcacccaccatcccggaaacagggggccccagaggtacggccccgccccacccgcacacctcccatgttgcatctgtggcaggcgaggctgcgccgcggggcccc

SEQ ID NO: 10068 - DNA, 122 bp, Homo sapiens
  misc_feature (61)..(62): /note="This region represents a CpG dinucleotide"
  misc_feature (61)..(61): /note="Nucleotide may be methylated to form 5-methylcytosine"
ggaagaggaagggacagcagaagaaaaaaagagaccacatgaagatgaaactttttaagacgagtaagcaggagattgttagttataggaaggaacccattaaaagctgccgcagaactcta

SEQ ID NO: 10069 - DNA, 122 bp, Homo sapiens
  misc_feature (61)..(62): /note="This region represents a CpG dinucleotide"
  misc_feature (61)..(61): /note="Nucleotide may be methylated to form 5-methylcytosine"
gagtatctcccggacgcgggctggacaggaatgcccaagaaggcacaatgtccattaagccggtgaatggcagggagagttcctgcagcccaaagtccttataatgacttttaaaaattact

SEQ ID NO: 10070 - DNA, 122 bp, Homo sapiens
  misc_feature (61)..(62): /note="This region represents a CpG dinucleotide"
  misc_feature (61)..(61): /note="Nucleotide may be methylated to form 5-methylcytosine"
gtgataggcaggtttgtggagtttctatcaggcctgcaggctgccctgggacattgctcacgggtgtggagactgtcaagatagcctgaatattaaccaagttgatcatccaagtccatact

SEQ ID NO: 10071 - DNA, 122 bp, Homo sapiens
  misc_feature (61)..(62): /note="This region represents a CpG dinucleotide"
  misc_feature (61)..(61): /note="Nucleotide may be methylated to form 5-methylcytosine"
ttaaaaatgagcaggaagctcatgtatgtttgcatttcagtgagccgggtcctgacctgccgccacccatcacggtcagcgtggtgcatcttaccgaggaggcgcaggcctggattcttttg

SEQ ID NO: 10072 - DNA, 122 bp, Homo sapiens
  misc_feature (61)..(62): /note="This region represents a CpG dinucleotide"
  misc_feature (61)..(61): /note="Nucleotide may be methylated to form 5-methylcytosine"
agagattgaaaatttatgacaaaagtccaggccattgtaaacattgctttctcctacatgcgtaacaggcatgcattttttgccaccagaatcactaatctactatagggtaataagactat

SEQ ID NO: 10073 - DNA, 122 bp, Homo sapiens
  misc_feature (61)..(62): /note="This region represents a CpG dinucleotide"
  misc_feature (61)..(61): /note="Nucleotide may be methylated to form 5-methylcytosine"
agcaggctcctgaggtgagggcgagtgtgtgggaaatctggcgagcgtgccacgtgcatgcgtgagtgtggatatgtggggagcatgcgtgcgcgtgaatatgcggggagcagccgcacctt

SEQ ID NO: 10074 - DNA, 122 bp, Homo sapiens
  misc_feature (61)..(62): /note="This region represents a CpG dinucleotide"
  misc_feature (61)..(61): /note="Nucleotide may be methylated to form 5-methylcytosine"
atctctgtctttctctgtgtgtctctttgtctgcctgtctgtatttctgtttctctgtctcgctgtctctgtctctctctctgcctgtctgtctgtaggtctctctctccctgtgtgtctgt

SEQ ID NO: 10075 - DNA, 122 bp, Homo sapiens
  misc_feature (61)..(62): /note="This region represents a CpG dinucleotide"
  misc_feature (61)..(61): /note="Nucleotide may be methylated to form 5-methylcytosine"
tttgtatgtaaatatgaggactgctccggtgtagactttcggtaatttgataccaatgcgcgttgcctagtcgggtaaccaagacagccttcatgtagggagagagcgaagtgctacattta

SEQ ID NO: 10076 - DNA, 122 bp, Homo sapiens
  misc_feature (61)..(62): /note="This region represents a CpG dinucleotide"
  misc_feature (61)..(61): /note="Nucleotide may be methylated to form 5-methylcytosine"
acctgaggatcaggccgtcaccttttgcaacttttcttctaaagggaaataagatgatatcgttcctatcctggggagcttgctctccaagttagtagtagttccagcagagagattgggga

SEQ ID NO: 10077 - DNA, 122 bp, Homo sapiens
  misc_feature (61)..(62): /note="This region represents a CpG dinucleotide"
  misc_feature (61)..(61): /note="Nucleotide may be methylated to form 5-methylcytosine"
tttaacagctcagtctctgaattactcccacttctcatttcccctggtagaaagacactacgcctaactgggtaaaccttgcaaaggggacaaataagccttagactcacagtaactttgac

SEQ ID NO: 10078 - DNA, 122 bp, Homo sapiens
  misc_feature (61)..(62): /note="This region represents a CpG dinucleotide"
  misc_feature (61)..(61): /note="Nucleotide may be methylated to form 5-methylcytosine"
ctgtaatactgaaccttttcaggcatcacctgtaaaatggacatgattcatctgccttcccgtgggctctggggggtggggggatgacatccccgacatgtcctgtgcccaggatagactgc

SEQ ID NO: 10079 - DNA, 122 bp, Homo sapiens
  misc_feature (61)..(62): /note="This region represents a CpG dinucleotide"
  misc_feature (61)..(61): /note="Nucleotide may be methylated to form 5-methylcytosine"
ctccttgagctctctgtggagcaatctcagagagcagtaaggtgtgacgcgaggctctgccggcttcgcagcaccgcctgcggaaagagcgcaggatggcggaggaagattaagagaaatcg

SEQ ID NO: 10080 - DNA, 122 bp, Homo sapiens
  misc_feature (61)..(62): /note="This region represents a CpG dinucleotide"
  misc_feature (61)..(61): /note="Nucleotide may be methylated to form 5-methylcytosine"
cacatgaagtcaacagcacatgtttactgggcaaattgaatgatgcacaatacccagcaccgtgctgatgcataagtattcagcatgctgaaagtactgagcatgtatttccctggaataaa

SEQ ID NO: 10081 - DNA, 122 bp, Homo sapiens
  misc_feature (61)..(62): /note="This region represents a CpG dinucleotide"
  misc_feature (61)..(61): /note="Nucleotide may be methylated to form 5-methylcytosine"
ccacacaacttgctcaccctccccactggctcctgtcagaatcactcccttctttctcagcgctcctgggtggtgtgtagcacttgcaagtttggccttaagtactcccttcttttcccaac

SEQ ID NO: 10082 - DNA, 122 bp, Homo sapiens
  misc_feature (61)..(62): /note="This region represents a CpG dinucleotide"
  misc_feature (61)..(61): /note="Nucleotide may be methylated to form 5-methylcytosine"
tccaccttgccataggctgttagtccaaaggcaacttacgccagcttgcagccagatggccgggggagccactgtgccttacgccctaactactgtaaaggctgcatgtggattcaggaaga

SEQ ID NO: 10083 - DNA, 122 bp, Homo sapiens
  misc_feature (61)..(62): /note="This region represents a CpG dinucleotide"
  misc_feature (61)..(61): /note="Nucleotide may be methylated to form 5-methylcytosine"
aatcaggtcctgaggtaggtagcccaggagagggaccgccctggaaggcaagcagacacacgctaggattggcatccaaacagatgaggagattgtcactaagaaccatcttattccctgga

SEQ ID NO: 10084 - DNA, 122 bp, Homo sapiens
  misc_feature (61)..(62): /note="This region represents a CpG dinucleotide"
  misc_feature (61)..(61): /note="Nucleotide may be methylated to form 5-methylcytosine"
gctgtgtggcccggttcctaacaggccatggaccagtcagtggcccagggtctaaattgacgttaggacttgcagtttgaaaaataccacctccaggagacaagaaatctagtgtgatttcc

SEQ ID NO: 10085 - DNA, 122 bp, Homo sapiens
  misc_feature (61)..(62): /note="This region represents a CpG dinucleotide"
  misc_feature (61)..(61): /note="Nucleotide may be methylated to form 5-methylcytosine"
ctgcatcttttcctcattgttgtttgggccagtttgcagaggaacatcttattataccaccgtttgttgatctggaagctgtttatctacccgtaaagaaggtgtttatttattgatgtgct

SEQ ID NO: 10086 - DNA, 122 bp, Homo sapiens
  misc_feature (61)..(62): /note="This region represents a CpG dinucleotide"
  misc_feature (61)..(61): /note="Nucleotide may be methylated to form 5-methylcytosine"
gctgcaattaatctgctccatggctccaatcaaagcaaggattctgtaggatggattctccgccttcctgcaggaaagggggctctagctctctagtgacagcatccttcagagggaccctt

SEQ ID NO: 10087 - DNA, 122 bp, Homo sapiens
  misc_feature (61)..(62): /note="This region represents a CpG dinucleotide"
  misc_feature (61)..(61): /note="Nucleotide may be methylated to form 5-methylcytosine"
gtggaaagctgggaaacgcgtgtgtgtgtgctcactgcagtgacacagcatggccatatccgtttgctgtggaggtggggttgacagaggagagaaccgaggcccaagaggtgaagcagctt

SEQ ID NO: 10088 - DNA, 122 bp, Homo sapiens
  misc_feature (61)..(62): /note="This region represents a CpG dinucleotide"
  misc_feature (61)..(61): /note="Nucleotide may be methylated to form 5-methylcytosine"
acctaattattaagagcattaaacattagaagattgccacccttcgtactggctgcagatcgtttgtcttacttgtcaaacacaagttcgtttttgacactgatttcttaaatttccgctga

SEQ ID NO: 10089 - DNA, 122 bp, Homo sapiens
  misc_feature (61)..(62): /note="This region represents a CpG dinucleotide"
  misc_feature (61)..(61): /note="Nucleotide may be methylated to form 5-methylcytosine"
caaacgccaaccccatcctggtccagtcatctacctgggctctgcaataacagtggtgcacgagtgaaaaagtgagcagatgcaagctcccccagaacgtttcagtcccagagcagcttagt

SEQ ID NO: 10090 - DNA, 122 bp, Homo sapiens
  misc_feature (61)..(62): /note="This region represents a CpG dinucleotide"
  misc_feature (61)..(61): /note="Nucleotide may be methylated to form 5-methylcytosine"
ttgtatgttatgagactctggatcttatttaagtctgttttagtgatcatcctttgacaccgcactagttgagcaaagagggtgctgcctcactgctgtcaggttgggggagaggcccaggt

SEQ ID NO: 10091 - DNA, 122 bp, Homo sapiens
  misc_feature (61)..(62): /note="This region represents a CpG dinucleotide"
  misc_feature (61)..(61): /note="Nucleotide may be methylated to form 5-methylcytosine"
tagtacaatgtcctcagcaccaagcgtcagagacctccgcgcaattggcagcatcttctgcgtgtagctacaggtccctgagagagaccggcgcgcctctcccacaggggcgatcctccctc

SEQ ID NO: 10092 - DNA, 122 bp, Homo sapiens
  misc_feature (61)..(62): /note="This region represents a CpG dinucleotide"
  misc_feature (61)..(61): /note="Nucleotide may be methylated to form 5-methylcytosine"
tttcttgtctttttttgtttttcatcttcttcctctctacctataccccaggagggacatcgtcctaaaagtcaggccaggctaaacttattatgatattaagtctttcagataaatatgtt

SEQ ID NO: 10093 - DNA, 122 bp, Homo sapiens
  misc_feature (61)..(62): /note="This region represents a CpG dinucleotide"
  misc_feature (61)..(61): /note="Nucleotide may be methylated to form 5-methylcytosine"
agctgcccctgagctttctcataaaatattgatttccccattggaaatttccaagaagaccgtatatgaccatctagcagcaatgttgttgagagattcttgctttgggtgggaaaccagac

SEQ ID NO: 10094 - DNA, 122 bp, Homo sapiens
  misc_feature (61)..(62): /note="This region represents a CpG dinucleotide"
  misc_feature (61)..(61): /note="Nucleotide may be methylated to form 5-methylcytosine"
tctaacatcacctgtgctcatttctaaaatggagagaatactgattagacatatcttatacgatttgggggctactaaataagataatgcatgaaaagtactatgaatcatatttacaacat

SEQ ID NO: 10095 - DNA, 122 bp, Homo sapiens
  misc_feature (61)..(62): /note="This region represents a CpG dinucleotide"
  misc_feature (61)..(61): /note="Nucleotide may be methylated to form 5-methylcytosine"
gtgtattttcaatggctaacatagttaaaaccaaagtgaaatttttattatgtacataatcgaatgcaaattgtgtcaggctagtttaaaaaatatgaatgtcagtcctggcttggcaattt

SEQ ID NO: 10096 - DNA, 122 bp, Homo sapiens
  misc_feature (61)..(62): /note="This region represents a CpG dinucleotide"
  misc_feature (61)..(61): /note="Nucleotide may be methylated to form 5-methylcytosine"
accagcacacaaggaagggagtgaccacacaggctgacgtaattgaccctgatcataaggcgataaggctgtgtaatgctgtgagggcagagaagaatttcaaattcatgtaatccactgag

SEQ ID NO: 10097 - DNA, 122 bp, Homo sapiens
  misc_feature (61)..(62): /note="This region represents a CpG dinucleotide"
  misc_feature (61)..(61): /note="Nucleotide may be methylated to form 5-methylcytosine"
ggtaaaacctctaagaccatgaacattcatttatatttaggccaatctcattttcccatccgcgaacaggcacttttccttataatagtattgacagtggaagaaaccacaaaattattgtg

SEQ ID NO: 10098 - DNA, 122 bp, Homo sapiens
  misc_feature (61)..(62): /note="This region represents a CpG dinucleotide"
  misc_feature (61)..(61): /note="Nucleotide may be methylated to form 5-methylcytosine"
ctcaggaattaaacaaacttccatgtcttttcatatatttgattctcatatgaacctttgcgagaagaaggatggatgggtattatcttggagccaaggctggggatttaatgagcattctg

SEQ ID NO: 10099 - DNA, 122 bp, Homo sapiens
  misc_feature (61)..(62): /note="This region represents a CpG dinucleotide"
  misc_feature (61)..(61): /note="Nucleotide may be methylated to form 5-methylcytosine"
cacctgtaaactggaagactggacccctgaagatccttctggtccaaacaatcagacttacgtatgtcagccacccatactgccacctctgaaatggcggtaatgaaattgctgtccccctc

SEQ ID NO: 10100 - DNA, 122 bp, Homo sapiens
  misc_feature (61)..(62): /note="This region represents a CpG dinucleotide"
  misc_feature (61)..(61): /note="Nucleotide may be methylated to form 5-methylcytosine"
atgcccttcaccctggggtgtccctctgccagctcagcctgcaaaccatgatcccttgtacgactgcagcccagctgtgttgcagaagtaaaggtgtctgcccccatgaagccagcccagag

SEQ ID NO: 10101 - DNA, 122 bp, Homo sapiens
  misc_feature (61)..(62): /note="This region represents a CpG dinucleotide"
  misc_feature (61)..(61): /note="Nucleotide may be methylated to form 5-methylcytosine"
ctaaaaatttgctgctcaaggaaatcaactttttatttctcctattaggcgtctgttcatcgtgtgtggttcaaggaggaaattcgtggctgcagagatttgaaaaccacagacgaggggaa

SEQ ID NO: 10102 - DNA, 122 bp, Homo sapiens
  misc_feature (61)..(62): /note="This region represents a CpG dinucleotide"
  misc_feature (61)..(61): /note="Nucleotide may be methylated to form 5-methylcytosine"
acccgcaccaggaagcaaagtagctaagcatgttaatacaaatgcaagtcacaagataaacgtttgaaaaagatcatcctcaagtatcagatggaaacaaaaattcctgtggtggggcgtaa

SEQ ID NO: 10103 - DNA, 122 bp, Homo sapiens
  misc_feature (61)..(62): /note="This region represents a CpG dinucleotide"
  misc_feature (61)..(61): /note="Nucleotide may be methylated to form 5-methylcytosine"
atgcagcaatgcagacgtgccccacttatacaaggatactcgtgtatatgcatgtatgcacgtatgtatgtactggattcagcaatgacatccgcaaagcctctgtgaggagtacaaatcta

SEQ ID NO: 10104 - DNA, 122 bp, Homo sapiens
  misc_feature (61)..(62): /note="This region represents a CpG dinucleotide"
  misc_feature (61)..(61): /note="Nucleotide may be methylated to form 5-methylcytosine"
atgcctttctgatttatccaagttgttgcaggtatcaatacttccctttctggctgggcacggtggctcatgcctgtaattccagcacttttggaggtgagtcaggggggatcacttgaggt

SEQ ID NO: 10105 - DNA, 122 bp, Homo sapiens
  misc_feature (61)..(62): /note="This region represents a CpG dinucleotide"
  misc_feature (61)..(61): /note="Nucleotide may be methylated to form 5-methylcytosine"
tctcctcatctagatgggggtgtgactcgggggagctcagaattccctgagaagaggtcacgggcacgtagaatcaattttaacgtggttccccaagcacgccaaagaagatgctgttctag

SEQ ID NO: 10106 - DNA, 122 bp, Homo sapiens
  misc_feature (61)..(62): /note="This region represents a CpG dinucleotide"
  misc_feature (61)..(61): /note="Nucleotide may be methylated to form 5-methylcytosine"
ctacgttctaaaaataaaaagaacacagacattttaaggagcaattcagtatcaattgttcgtagtgtattattatttgaaagctattgtattagactgcttaggctgccataacagactac

SEQ ID NO: 10107 - DNA, 122 bp, Homo sapiens
  misc_feature (61)..(62): /note="This region represents a CpG dinucleotide"
  misc_feature (61)..(61): /note="Nucleotide may be methylated to form 5-methylcytosine"
tgcagggatttcaaaacacttaacaaaaattgctctaagtaggccgggcacagtggctgacgcatgtaatcccagtactttaggaggccggggtgggcggatcacctgaggtcaggagttcg

SEQ ID NO: 10108 - DNA, 122 bp, Homo sapiens
  misc_feature (61)..(62): /note="This region represents a CpG dinucleotide"
  misc_feature (61)..(61): /note="Nucleotide may be methylated to form 5-methylcytosine"
atttggtttctttcatggtctgggttaattttggaaacactttgggtacgtcattctgaacgagaacatttggtttagccttcagatgatctcattcataagaagggcttaaatgagttgtg

SEQ ID NO: 10109 - DNA, 122 bp, Homo sapiens
  misc_feature (61)..(62): /note="This region represents a CpG dinucleotide"
  misc_feature (61)..(61): /note="Nucleotide may be methylated to form 5-methylcytosine"
ttgggttacagggaactgcaaacatgcaattagatcagagatacctacaggtgcacaagccggtcaaagtcacacgcagacacaggtgccggcacactgtcagactatagataggccagtca

SEQ ID NO: 10110 - DNA, 122 bp, Homo sapiens
  misc_feature (61)..(62): /note="This region represents a CpG dinucleotide"
  misc_feature (61)..(61): /note="Nucleotide may be methylated to form 5-methylcytosine"
tgcatttttattctttcctttcacacaagagagcttatcaacagctctgacagctcatttcgtatttggtttctggttatcttgtactcatctaataggtggtagtggtggttttcagttca

SEQ ID NO: 10111 - DNA, 122 bp, Homo sapiens
  misc_feature (61)..(62): /note="This region represents a CpG dinucleotide"
  misc_feature (61)..(61): /note="Nucleotide may be methylated to form 5-methylcytosine"
ttagctttttttattctcctatggcacagtcacatctattctcaaggctatgatgacccacgtgtgctgaggcctctgggcagaagtgccacattagagctttcattggacagatcaagagc

SEQ ID NO: 10112 - DNA, 122 bp, Homo sapiens
  misc_feature (61)..(62): /note="This region represents a CpG dinucleotide"
  misc_feature (61)..(61): /note="Nucleotide may be methylated to form 5-methylcytosine"
atttttcttccttagtaaaaacaaccccttggtcttagattctgctcttgtacagtcatccgtacagtggccagggcttaagctctggtactgtatgagtatgcaaacaagcagatttcaca

SEQ ID NO: 10113 - DNA, 122 bp, Homo sapiens
  misc_feature (61)..(62): /note="This region represents a CpG dinucleotide"
  misc_feature (61)..(61): /note="Nucleotide may be methylated to form 5-methylcytosine"
ctgtggttactgtatagctacttattatccaaacaaccctgaaacaaaagacctgaaattcgctgttttggatgctgcttcctgctgccaggaggaggtgtgtttaacttacaagagactga

SEQ ID NO: 10114 - DNA, 122 bp, Homo sapiens
  misc_feature (61)..(62): /note="This region represents a CpG dinucleotide"
  misc_feature (61)..(61): /note="Nucleotide may be methylated to form 5-methylcytosine"
ttctctgaatttacaaccctggagacaattttggtttattttgctgccctgaaagaggcccgaggcagtttgttatcttaacccctatgcatagtgacaccaagcagaattccagacatttc

SEQ ID NO: 10115 - DNA, 122 bp, Homo sapiens
  misc_feature (61)..(62): /note="This region represents a CpG dinucleotide"
  misc_feature (61)..(61): /note="Nucleotide may be methylated to form 5-methylcytosine"
cacagtcacacacgttcacgcccaggcgctgtgcctgcggggcagaggatgcgggaactccgctcagtctctatcaacccgaaactgctctgatggtcaggcctactaatgttaaaaatatt

SEQ ID NO: 10116 - DNA, 122 bp, Homo sapiens
  misc_feature (61)..(62): /note="This region represents a CpG dinucleotide"
  misc_feature (61)..(61): /note="Nucleotide may be methylated to form 5-methylcytosine"
tggtaatcttatgggactatcatcatatatgtggtccatcattgacatcattgatccaaacgtccttatgcggctcatgattatttccctaggaccacagtcagggaggaaaaagatgtact

SEQ ID NO: 10117 - DNA, 122 bp, Homo sapiens
  misc_feature (61)..(62): /note="This region represents a CpG dinucleotide"
  misc_feature (61)..(61): /note="Nucleotide may be methylated to form 5-methylcytosine"
ttgcacaagcaaatgaaaattgttactgctcaaagcatttttgaaattcttttgagattacgtgtacgtagtttccatggcatgtaagaaaatcttggtcgggcacagtggcttaagcctgt

SEQ ID NO: 10118 - DNA, 122 bp, Homo sapiens
  misc_feature (61)..(62): /note="This region represents a CpG dinucleotide"
  misc_feature (61)..(61): /note="Nucleotide may be methylated to form 5-methylcytosine"
tttttttttgagatatctttcagactaaccccacccagactcctgactcaccccatcctgcggcctcacccagaggtggactcagaactaaggaccattttccaaaaccttatgacttcttc

SEQ ID NO: 10119 - DNA, 122 bp, Homo sapiens
  misc_feature (61)..(62): /note="This region represents a CpG dinucleotide"
  misc_feature (61)..(61): /note="Nucleotide may be methylated to form 5-methylcytosine"
ccagccccactcccaaccccccaaccctgttgtaatgtgtgatctgttttcttccagtctcgtttcctctcagtccatccacccttcatggggccagagccctctctccagaatctgagcag

SEQ ID NO: 10120 - DNA, 122 bp, Homo sapiens
  misc_feature (61)..(62): /note="This region represents a CpG dinucleotide"
  misc_feature (61)..(61): /note="Nucleotide may be methylated to form 5-methylcytosine"
gctctgaactgcctttgggagatgccggccaggatcccggagaaccgagggggtggcgcccgtgcccaaggcctggggggacctggggccctggcgcgggacgcacagggagggcgggggct

SEQ ID NO: 10121 - DNA, 122 bp, Homo sapiens
  misc_feature (61)..(62): /note="This region represents a CpG dinucleotide"
  misc_feature (61)..(61): /note="Nucleotide may be methylated to form 5-methylcytosine"
cccaaagcactgggattacagacgtgagccaccacacccgaccaacacacacctttttaacgtatcattgaatgacatgggaagcacgcatgaagccctcctgcacacgaaataccacagtc

SEQ ID NO: 10122 - DNA, 122 bp, Homo sapiens
  misc_feature (61)..(62): /note="This region represents a CpG dinucleotide"
  misc_feature (61)..(61): /note="Nucleotide may be methylated to form 5-methylcytosine"
tggtgttaaatgttagctagaatgtcacaaggccagtccttagggacagtgtgacacacacgtcaccttgaccaccagatgagtaagctgcaccacgtgctgttttcagacttttgaaatct

SEQ ID NO: 10123 - DNA, 122 bp, Homo sapiens
  misc_feature (61)..(62): /note="This region represents a CpG dinucleotide"
  misc_feature (61)..(61): /note="Nucleotide may be methylated to form 5-methylcytosine"
aaaaacatactaaacagtgaaaatggatgacccagtccttagcctatgttatggagttagcgaagcaagctccagtgccctgtggcttagtcatacaataaatacttactgtcacacagtgg

SEQ ID NO: 10124 - DNA, 122 bp, Homo sapiens
  misc_feature (61)..(62): /note="This region represents a CpG dinucleotide"
  misc_feature (61)..(61): /note="Nucleotide may be methylated to form 5-methylcytosine"
tatgtttttctctctcccgggaactctcctcttccttgaaagtataaattctgctaagtgcgctactgccttacttctggtaaaccttctctattacctaggctgaattaggtgacttgctg

SEQ ID NO: 10125 - DNA, 122 bp, Homo sapiens
  misc_feature (61)..(62): /note="This region represents a CpG dinucleotide"
  misc_feature (61)..(61): /note="Nucleotide may be methylated to form 5-methylcytosine"
ctaatagtgacaattatgcttttttttttttttacgttttggttattaacaaaagtttttcgcattcaaagaacattaaaaaacaaatggtgaacagagtgtgataccagactatgtccaac

SEQ ID NO: 10126 - DNA, 122 bp, Homo sapiens
  misc_feature (61)..(62): /note="This region represents a CpG dinucleotide"
  misc_feature (61)..(61): /note="Nucleotide may be methylated to form 5-methylcytosine"
gggactggactccagctccctacagtccggcacctacttccctgtggcctcagagggcagcgagccggccctactgcacagctgggcctcagctgagaagccctacctgaaggaaaaatcca

SEQ ID NO: 10127 - DNA, 122 bp, Homo sapiens
  misc_feature (61)..(62): /note="This region represents a CpG dinucleotide"
  misc_feature (61)..(61): /note="Nucleotide may be methylated to form 5-methylcytosine"
gtcgattccctgttaacatggatatcagttctgcctcacatttcccacttgaggttgaggcgtactggagacaacacctcagaccatctgaaccccatcagtggacgaaaatggggctgtta

SEQ ID NO: 10128 - DNA, 122 bp, Homo sapiens
  misc_feature (61)..(62): /note="This region represents a CpG dinucleotide"
  misc_feature (61)..(61): /note="Nucleotide may be methylated to form 5-methylcytosine"
cccaggctgggtgcgtagcgcgatcatggctcactgcagcctcggactcccgggctcaagcgatcctcctgcttggaggatcagattttttatccttgcagaagtgataatatggcttcttc

SEQ ID NO: 10129 - DNA, 122 bp, Homo sapiens
  misc_feature (61)..(62): /note="This region represents a CpG dinucleotide"
  misc_feature (61)..(61): /note="Nucleotide may be methylated to form 5-methylcytosine"
tcacagttttggaggctgggaagtccaagatccaggcactgatagattcagcgtctggtccgctccatagatggcgccttgtgcctgtgtcctcacatggtagaatgagtaaaagcagggag

SEQ ID NO: 10130 - DNA, 122 bp, Homo sapiens
  misc_feature (61)..(62): /note="This region represents a CpG dinucleotide"
  misc_feature (61)..(61): /note="Nucleotide may be methylated to form 5-methylcytosine"
gcttagcttcagcaaatattgccaaatcatttcccaagtggttgaagcaattaacactcccgccagcagtgcaagagttctggtagctagctccaagctcttgccaaaattcagaattatca

SEQ ID NO: 10131 - DNA, 122 bp, Homo sapiens
  misc_feature (61)..(62): /note="This region represents a CpG dinucleotide"
  misc_feature (61)..(61): /note="Nucleotide may be methylated to form 5-methylcytosine"
agattactcaactgtaaaacgtgttctgtgggccaactgtgacactgggagtgtggcaatcgtcactcatttgtttattccacaaacatgtattgagcaactacttcctgtcaccagtaagg

SEQ ID NO: 10132 - DNA, 122 bp, Homo sapiens
  misc_feature (61)..(62): /note="This region represents a CpG dinucleotide"
  misc_feature (61)..(61): /note="Nucleotide may be methylated to form 5-methylcytosine"
ggattaaatatttttttgttggtgtttgttgtttgacattagattgccaaagacatggaacgctgggctaagagtttgaataagcagaaagaaaactttaaaaatagctttcagcctgtcaa

SEQ ID NO: 10133 - DNA, 122 bp, Homo sapiens
  misc_feature (61)..(62): /note="This region represents a CpG dinucleotide"
  misc_feature (61)..(61): /note="Nucleotide may be methylated to form 5-methylcytosine"
ggtatctgagctgaaaacagatttcactgtcagatagaaatgtagataccaagacaatttcggtatcacactattaaaagtaatcatggctgcaacagctgggagttaggaagaatattgct

SEQ ID NO: 10134 - DNA, 122 bp, Homo sapiens
  misc_feature (61)..(62): /note="This region represents a CpG dinucleotide"
  misc_feature (61)..(61): /note="Nucleotide may be methylated to form 5-methylcytosine"
cagctttcctttgccacttcataccctatactcagtgtcttccactttctgcagtctctgcgaaggttgggaagaacctgtgcttcctgattgttgtaattgccttgtcatttatctagcac

SEQ ID NO: 10135 - DNA, 122 bp, Homo sapiens
  misc_feature (61)..(62): /note="This region represents a CpG dinucleotide"
  misc_feature (61)..(61): /note="Nucleotide may be methylated to form 5-methylcytosine"
ggcatgctcaagtgggagtggccaaggagagtttaaaggaagggttagaaagaagtgagccggatcgggagaccattatgggatggggaagcctttaccatacctaggcctgggaggttgag

SEQ ID NO: 10136 - DNA, 122 bp, Homo sapiens
  misc_feature (61)..(62): /note="This region represents a CpG dinucleotide"
  misc_feature (61)..(61): /note="Nucleotide may be methylated to form 5-methylcytosine"
taatgacagagaggaagcacagctgtgtgccttggctctcttgtgggaccaagtgaatttcgtcaagggatctgtagcatctattgtgagggtggaggagctgattcatttaatgacacatg

SEQ ID NO: 10137 - DNA, 122 bp, Homo sapiens
  misc_feature (61)..(62): /note="This region represents a CpG dinucleotide"
  misc_feature (61)..(61): /note="Nucleotide may be methylated to form 5-methylcytosine"
tgtagaaacataattttatgtgtgtgctctgtggaggaagaagattgtcagagggagggtcggggttacaaacataggaatgtggttccctaggtgaatgcatatgaaaaaggaccccaagc

SEQ ID NO: 10138 - DNA, 122 bp, Homo sapiens
  misc_feature (61)..(62): /note="This region represents a CpG dinucleotide"
  misc_feature (61)..(61): /note="Nucleotide may be methylated to form 5-methylcytosine"
tgagtcatttccccaatcctggaggcaggtttatccttagagcatctggagttccctgcccgctaggaactccagcccacactggtaagaagcattggtagatttagcaaccagcacctcag

SEQ ID NO: 10139 - DNA, 122 bp, Homo sapiens
  misc_feature (61)..(62): /note="This region represents a CpG dinucleotide"
  misc_feature (61)..(61): /note="Nucleotide may be methylated to form 5-methylcytosine"
tcaaaacaacccattgatcctgaggcaaaccgctttcaaaaccaccacatagttcctggacgtcctggcttcctcatgacacttggggaagaggagtcttttgaaattttaaattttattat

SEQ ID NO: 10140 - DNA, 122 bp, Homo sapiens
  misc_feature (61)..(62): /note="This region represents a CpG dinucleotide"
  misc_feature (61)..(61): /note="Nucleotide may be methylated to form 5-methylcytosine"
acactgtaaaaagtatttccagaacagaaggttcaaaatgacagactctgtcacaggtctcgcccacaaggcaatccctcctgagcaacttcattatttccacttgctcaggaattgacgag

SEQ ID NO: 10141 - DNA, 122 bp, Homo sapiens
  misc_feature (61)..(62): /note="This region represents a CpG dinucleotide"
  misc_feature (61)..(61): /note="Nucleotide may be methylated to form 5-methylcytosine"
aatgagtcagtaccaccctgctcttcatggcctctctgaggtcagcacctccaggatatccgttcacccaaccaggcagaggcaaggagtttagaaagtgaaattaactatggggtatacct

SEQ ID NO: 10142 - DNA, 122 bp, Homo sapiens
  misc_feature (61)..(62): /note="This region represents a CpG dinucleotide"
  misc_feature (61)..(61): /note="Nucleotide may be methylated to form 5-methylcytosine"
gggatttaagcgatctctaaacgttcaagtttttacacattgtgaacatcagagcatccccgtgcacgtgcggtgtatgtgttttacacctgacaaaaatgactgatgctttgacttcaaag

SEQ ID NO: 10143 - DNA, 122 bp, Homo sapiens
  misc_feature (61)..(62): /note="This region represents a CpG dinucleotide"
  misc_feature (61)..(61): /note="Nucleotide may be methylated to form 5-methylcytosine"
ttccatctccagcgagacagatgcgaggaagggaagagggatgccctgtgtgcatctgcccgcactgcgagtccttgccactccttagatcaacggagccagagatcttgccaccaacacac

SEQ ID NO: 10144 - DNA, 122 bp, Homo sapiens
  misc_feature (61)..(62): /note="This region represents a CpG dinucleotide"
  misc_feature (61)..(61): /note="Nucleotide may be methylated to form 5-methylcytosine"
agttctgggagagcctgctctgggagagtagtcacctgaatactgccatggacatgaagacgcagcacttggaggttgtccactaactacactccttgcagcaggttctcttggagggaggt

SEQ ID NO: 10145 - DNA, 122 bp, Homo sapiens
  misc_feature (61)..(62): /note="This region represents a CpG dinucleotide"
  misc_feature (61)..(61): /note="Nucleotide may be methylated to form 5-methylcytosine"
tgacagactaagcatcctggaatgtcagtatcatcatgtcattcttctgggctccttaaccgccaatcacaccagactcaggttcccttaattggttccaaccaatctcactttccaattct

SEQ ID NO: 10146 - DNA, 122 bp, Homo sapiens
  misc_feature (61)..(62): /note="This region represents a CpG dinucleotide"
  misc_feature (61)..(61): /note="Nucleotide may be methylated to form 5-methylcytosine"
gactagttaagaatatttcatctatgtaagataatgaccagtagagttggacatgtcccccgaacagggatgacgtgacgctgaaaaggagagttgagacctgccatcacatgaaggaagca

SEQ ID NO: 10147 - DNA, 122 bp, Homo sapiens
  misc_feature (61)..(62): /note="This region represents a CpG dinucleotide"
  misc_feature (61)..(61): /note="Nucleotide may be methylated to form 5-methylcytosine"
gagtagctttgacgtgctgaaaaggtgggagagacatacttcttccttctacttttagaacgctgaagtttataagccaaagaccccagtccacatgtgtaaggaagcagccactgatgctg

SEQ ID NO: 10148 - DNA, 122 bp, Homo sapiens
  misc_feature (61)..(62): /note="This region represents a CpG dinucleotide"
  misc_feature (61)..(61): /note="Nucleotide may be methylated to form 5-methylcytosine"
aaaaaaataaaatgtcctttagttcaagccaaacttctgttggtgccacttcagtgggcacgtgtgctaggagatgggtcctccatgccgagagtcactcctgccggcttctgcaagagagc

SEQ ID NO: 10149 - DNA, 122 bp, Homo sapiens
  misc_feature (61)..(62): /note="This region represents a CpG dinucleotide"
  misc_feature (61)..(61): /note="Nucleotide may be methylated to form 5-methylcytosine"
atcttggcctctcctgctgaatcagagcgcgctgcttaacacgctcccgggtgactcgtacgtagtcagtgctgggaagcgctggtctacagtcatgtttctcaagcttgaatgcacatccg

SEQ ID NO: 10150 - DNA, 122 bp, Homo sapiens
  misc_feature (61)..(62): /note="This region represents a CpG dinucleotide"
  misc_feature (61)..(61): /note="Nucleotide may be methylated to form 5-methylcytosine"
tcccaccaatcccagcccccacggccttaagcccctatggctccctcccaagattccaaacgtaagaaaagaacacacaccacagtccaaaggcttcttgtctggaatagccaaccctgggg

SEQ ID NO: 10151 - DNA, 122 bp, Homo sapiens
  misc_feature (61)..(62): /note="This region represents a CpG dinucleotide"
  misc_feature (61)..(61): /note="Nucleotide may be methylated to form 5-methylcytosine"
cgaaggctggaggttcacaggtggagatgttgcccaggggccctggaggcgtggccacagcgtctgggtctctcctgtgccccgaggcccaggcagcagctggagacactcagctccacctt

SEQ ID NO: 10152 - DNA, 122 bp, Homo sapiens
  misc_feature (61)..(62): /note="This region represents a CpG dinucleotide"
  misc_feature (61)..(61): /note="Nucleotide may be methylated to form 5-methylcytosine"
ccttgtcttggcatctgtaaactgttgtggcactggtgagggtatctcatagcatgctaacgtattaaaattagcatataatgagcagtcatgataaccagaggttattctggtcgccatct

SEQ ID NO: 10153 - DNA, 122 bp, Homo sapiens
  misc_feature (61)..(62): /note="This region represents a CpG dinucleotide"
  misc_feature (61)..(61): /note="Nucleotide may be methylated to form 5-methylcytosine"
caaactcctgacctcaggtgatcagcctgcctccacctcctaaactgctgggattataggcgtgagccaccgccccgactttggattgaggatactcattgattagtttcagatgtccctta

SEQ ID NO: 10154 - DNA, 122 bp, Homo sapiens
  misc_feature (61)..(62): /note="This region represents a CpG dinucleotide"
  misc_feature (61)..(61): /note="Nucleotide may be methylated to form 5-methylcytosine"
ttgagctgctttcccctaggcctttctggttcagtcaccctttctctggcagcaccagcccgagccccgagacctctcctgaaggtgggcttcacagattcctccaccccatcaggagggaa

SEQ ID NO: 10155 - DNA, 122 bp, Homo sapiens
  misc_feature (61)..(62): /note="This region represents a CpG dinucleotide"
  misc_feature (61)..(61): /note="Nucleotide may be methylated to form 5-methylcytosine"
acagatctgtggcagcagataggctttaaagaataagcaggagttattaactaagtgaaacggcattgattctatttctaaaacatatatatgaggttggtgcaagagtaattgcggttttt

SEQ ID NO: 10156 - DNA, 122 bp, Homo sapiens
  misc_feature (61)..(62): /note="This region represents a CpG dinucleotide"
  misc_feature (61)..(61): /note="Nucleotide may be methylated to form 5-methylcytosine"
tttcatagtttggcttgtcactgaagagagccatccctcatttgcttttttaaaagagtacgacaaaaatcccttcaaatcttgctctcaaaaaggccagaagaaatattactgagatttct

SEQ ID NO: 10157 - DNA, 122 bp, Homo sapiens
  misc_feature (61)..(62): /note="This region represents a CpG dinucleotide"
  misc_feature (61)..(61): /note="Nucleotide may be methylated to form 5-methylcytosine"
tgtatactaagtgccagttgttctaagtccttttacgtgtattaactcatttaatccttacgagagccctgtaggtcttatccacattttgcaatgaagaaacagggacagaaagattacat

SEQ ID NO: 10158 - DNA, 122 bp, Homo sapiens
  misc_feature (61)..(62): /note="This region represents a CpG dinucleotide"
  misc_feature (61)..(61): /note="Nucleotide may be methylated to form 5-methylcytosine"
gggtcaggatctgccattctttacaagtttccttaacgtattgcgtcaaagcgagacaaccgagtcttactcaaacttgttttaaccggagatggagggttgctgctgtgtcaccgcctgca

SEQ ID NO: 10159 - DNA, 122 bp, Homo sapiens
  misc_feature (61)..(62): /note="This region represents a CpG dinucleotide"
  misc_feature (61)..(61): /note="Nucleotide may be methylated to form 5-methylcytosine"
cagttttccaaacaagaaaaaggaaatcacaaggtcacataacaaatgaggcaatttaggcgatgttctttggaattatgcacacttatgtttgagtccctgttttaaagttgctagttctg

SEQ ID NO: 10160 - DNA, 122 bp, Homo sapiens
  misc_feature (61)..(62): /note="This region represents a CpG dinucleotide"
  misc_feature (61)..(61): /note="Nucleotide may be methylated to form 5-methylcytosine"
tcctcggaggaacgcaaactcccctgcgtggaggaagtggtggagaagtaactgagcctgcgcttgagaccttctccacgcagcaggaagatcccaccgacccttcctggcctaatccttta

SEQ ID NO: 10161 - DNA, 122 bp, Homo sapiens
  misc_feature (61)..(62): /note="This region represents a CpG dinucleotide"
  misc_feature (61)..(61): /note="Nucleotide may be methylated to form 5-methylcytosine"
agagggcaaggtgtgactcaaccaactttatccagtgcaagcactttgtaggattagctccgagagccctatggggtaggcacagctgtcactgttttagagatgagaaaattgaggtgcaa

SEQ ID NO: 10162 - DNA, 122 bp, Homo sapiens
  misc_feature (61)..(62): /note="This region represents a CpG dinucleotide"
  misc_feature (61)..(61): /note="Nucleotide may be methylated to form 5-methylcytosine"
atccatgaggcaccacccactgaaatcaggcatctccatccaggatcgcatgggacagcacgtttctgacccagcctgtggctctgctccttccacaagcacttggggccaggcccatccac

SEQ ID NO: 10163 - DNA, 122 bp, Homo sapiens
  misc_feature (61)..(62): /note="This region represents a CpG dinucleotide"
  misc_feature (61)..(61): /note="Nucleotide may be methylated to form 5-methylcytosine"
tgtggctccttctccaggagcggggtcagtttatcttccctgccttgttacttctttcagcgtctgagtctacctttagcacatcttttccctgaggcacgcactgagttcatgccatctgc

SEQ ID NO: 10164 - DNA, 122 bp, Homo sapiens
  misc_feature (61)..(62): /note="This region represents a CpG dinucleotide"
  misc_feature (61)..(61): /note="Nucleotide may be methylated to form 5-methylcytosine"
gaatatgtctccagtctacctaactttgaggaagtaaatactgtaaatagatgtttcaaacgcattttaaagcaatgatcctagcatgtctttaagctacagtattgtgctgtctttgaaat

SEQ ID NO: 10165 - DNA, 122 bp, Homo sapiens
  misc_feature (61)..(62): /note="This region represents a CpG dinucleotide"
  misc_feature (61)..(61): /note="Nucleotide may be methylated to form 5-methylcytosine"
ccttgggtgcagattacatctaaataacatatacagcaaatcacactgccagtgctgaagcgtttcaaagtaaattcagacataaacaaagtaaacagagaacataacttacctatctcttc

SEQ ID NO: 10166 - DNA, 122 bp, Homo sapiens
  misc_feature (61)..(62): /note="This region represents a CpG dinucleotide"
  misc_feature (61)..(61): /note="Nucleotide may be methylated to form 5-methylcytosine"
cctaggcacatagcaaccctgcaggctgtcagacacctgccgcagagagtgctttccacacgctctctgggacatgaggcacagttcccaggagtgcctgagaaatctcagttgcctggcat

SEQ ID NO: 10167 - DNA, 122 bp, Homo sapiens
  misc_feature (61)..(62): /note="This region represents a CpG dinucleotide"
  misc_feature (61)..(61): /note="Nucleotide may be methylated to form 5-methylcytosine"
acacgatctgtgtttgctgctgggatcatttgtcacttctctgaagctcttctctttgtgcgctatctaggcagcaccaaggaatttgagccaaggctactaaagctgttgttgaagaagat

SEQ ID NO: 10168 - DNA, 122 bp, Homo sapiens
  misc_feature (61)..(62): /note="This region represents a CpG dinucleotide"
  misc_feature (61)..(61): /note="Nucleotide may be methylated to form 5-methylcytosine"
ccctttcatcacttgggtcacttgaaagccctctacaagagaggtaaacaaaccatggcccgaaggccaaatcttgcccaaggtaagattgttttacattttttaagggttgttaaacaaca

SEQ ID NO: 10169 - DNA, 122 bp, Homo sapiens
  misc_feature (61)..(62): /note="This region represents a CpG dinucleotide"
  misc_feature (61)..(61): /note="Nucleotide may be methylated to form 5-methylcytosine"
caatatgaaattactagacattctgtcctttataaacacaaatacattaattctgcataccgtaatatgtgaaccggttttggagactggagagtagtaacataaatgccatacaggagctt

SEQ ID NO: 10170 - DNA, 122 bp, Homo sapiens
  misc_feature (61)..(62): /note="This region represents a CpG dinucleotide"
  misc_feature (61)..(61): /note="Nucleotide may be methylated to form 5-methylcytosine"
agcttgagcctaggatggatgaaatctgtaatccacttgaaaatgtgcactgtcagaatacgattaggcaagattgatgaatattctacttacttacttggaaaccaattctctacctttgt

SEQ ID NO: 10171 - DNA, 122 bp, Homo sapiens
  misc_feature (61)..(62): /note="This region represents a CpG dinucleotide"
  misc_feature (61)..(61): /note="Nucleotide may be methylated to form 5-methylcytosine"
tcctggggtaaaagtaccacctttggatcaaggcttgctggctgcggctcagaggatctgcgcagaggaagcagtgtgtcctcaggagatcctgaaggaggggaggggggactcttcctact

SEQ ID NO: 10172 - DNA, 122 bp, Homo sapiens
  misc_feature (61)..(62): /note="This region represents a CpG dinucleotide"
  misc_feature (61)..(61): /note="Nucleotide may be methylated to form 5-methylcytosine"
cctcccctctgcctcagtgtgccaggcatcagcactcactcacagaggcaggctggatggcgggtgggacaacagcttccgcagcccctcctgttcccactttgcagggagaaaagaacacc

SEQ ID NO: 10173 - DNA, 122 bp, Homo sapiens
  misc_feature (61)..(62): /note="This region represents a CpG dinucleotide"
  misc_feature (61)..(61): /note="Nucleotide may be methylated to form 5-methylcytosine"
tgtttaaagaattcgtcctcttgccctcaatgccccatcggctccctaattagcagcgcgcggcgcgattacacattctctgcagctcgctgggtccggcccccgcaatgagtgtttgtgga

SEQ ID NO: 10174 - DNA, 122 bp, Homo sapiens
  misc_feature (61)..(62): /note="This region represents a CpG dinucleotide"
  misc_feature (61)..(61): /note="Nucleotide may be methylated to form 5-methylcytosine"
agaagggacgctttctccgggaggaggccttgggagagccggcctttgtagtgaaatgggcgtcttggagaggaatgggcggttctgggatgaagcaggtggtctgagaggaggggcatttt

SEQ ID NO: 10175 - DNA, 122 bp, Homo sapiens
  misc_feature (61)..(62): /note="This region represents a CpG dinucleotide"
  misc_feature (61)..(61): /note="Nucleotide may be methylated to form 5-methylcytosine"
gagtgatttacccttcttgttgcccctgaaccttgctggagaaactggttctttctatttcgtggagggaatggctcttttcttgaagattcacttcccttctcctggcctcagtctcatca

SEQ ID NO: 10176 - DNA, 122 bp, Homo sapiens
  misc_feature (61)..(62): /note="This region represents a CpG dinucleotide"
  misc_feature (61)..(61): /note="Nucleotide may be methylated to form 5-methylcytosine"
gccactgggccaggcccagagcagacactcacgacagatgataagaatgacagctgcctgcgtttgagcaggcactctaggtgactgttgtacacagtgcttttcaagcataatctacccta

SEQ ID NO: 10177 - DNA, 122 bp, Homo sapiens
  misc_feature (61)..(62): /note="This region represents a CpG dinucleotide"
  misc_feature (61)..(61): /note="Nucleotide may be methylated to form 5-methylcytosine"
caaactcctgacctcggatgattcacctacctcggcctcccaaagtgctgggattacaggcgtgagccatcgcatgtggccaggaaatgatatttaaaggaaacataaacgtattagccaac

SEQ ID NO: 10178 - DNA, 122 bp, Homo sapiens
  misc_feature (61)..(62): /note="This region represents a CpG dinucleotide"
  misc_feature (61)..(61): /note="Nucleotide may be methylated to form 5-methylcytosine"
aaaactgactgactcataagtgaatgttcacaaaggtgcaagaataaagcaattcctctgcgtaatctaggagggtggatgattaactgaccaacatctgctaaggccagtctagccttaaa

SEQ ID NO: 10179 - DNA, 122 bp, Homo sapiens
  misc_feature (61)..(62): /note="This region represents a CpG dinucleotide"
  misc_feature (61)..(61): /note="Nucleotide may be methylated to form 5-methylcytosine"
taagatgccatacatggtgaaaaagtcaccttaccacagtgaaatgatgtgatgactaagcggacagacagatgttaatgaggaacatggtccagctgctgcaaagtagcaaagcttcccag

SEQ ID NO: 10180 - DNA, 122 bp, Homo sapiens
  misc_feature (61)..(62): /note="This region represents a CpG dinucleotide"
  misc_feature (61)..(61): /note="Nucleotide may be methylated to form 5-methylcytosine"
gaggcggaggcggaggcagaggcccctaggagggcgaaggccggcgggttaacgaggaggcgctgagtgcacggctgggctccacgctgatttctcctaatgaattaataatggcgctcggg

SEQ ID NO: 10181 - DNA, 122 bp, Homo sapiens
  misc_feature (61)..(62): /note="This region represents a CpG dinucleotide"
  misc_feature (61)..(61): /note="Nucleotide may be methylated to form 5-methylcytosine"
atcaccacattagggaccgtaaacaaagtactcagcaaggcttaaacacaattaagggaccggagacaatttggcaagaggaaatcccttaaatgctgctggattttactctgttgtcctcc

SEQ ID NO: 10182 - DNA, 122 bp, Homo sapiens
  misc_feature (61)..(62): /note="This region represents a CpG dinucleotide"
  misc_feature (61)..(61): /note="Nucleotide may be methylated to form 5-methylcytosine"
taaagtagaagtcaggagtcttagattctagacctgtttttgctgttctgaaaggcttcacgttctgcatcagataaaattttaaggttattgaggtagaatagtgtctaaggtgctgttta

SEQ ID NO: 10183 - DNA, 122 bp, Homo sapiens
  misc_feature (61)..(62): /note="This region represents a CpG dinucleotide"
  misc_feature (61)..(61): /note="Nucleotide may be methylated to form 5-methylcytosine"
cccacctccaccctacacaggggcctcctaagatctgaggaacagtaaactttatcttatcggctgtttgggaaaaaactgtcatttgatctgtttatttggaagccagccctgctgagctc

SEQ ID NO: 10184 - DNA, 122 bp, Homo sapiens
  misc_feature (61)..(62): /note="This region represents a CpG dinucleotide"
  misc_feature (61)..(61): /note="Nucleotide may be methylated to form 5-methylcytosine"
gagtcctctcccaatggaatcacacaggatgcacttaattcccctagcagtgatttgttacgacatgtgaatgagttgtctactggacaaggtcactacagactcagtgcccaaagttttta

SEQ ID NO: 10185 - DNA, 122 bp, Homo sapiens
  misc_feature (61)..(62): /note="This region represents a CpG dinucleotide"
  misc_feature (61)..(61): /note="Nucleotide may be methylated to form 5-methylcytosine"
tgtgtaaagttttgcaaactgtttctgttcaaatatgtcctgctgaaatggggtcccaggcggggttccataactgtcaggtcagtgaactgcataacatctgagaatgtattcaccatgca

SEQ ID NO: 10186 - DNA, 122 bp, Homo sapiens
  misc_feature (61)..(62): /note="This region represents a CpG dinucleotide"
  misc_feature (61)..(61): /note="Nucleotide may be methylated to form 5-methylcytosine"
ggaaacatgctagaaaaaagtcaacttgagacaaatgtgacaacagcaaacccaagagcgcgggtacccttgggtgagccacctaccacacagcttcagcgagtttcaaaccaaatcaacag

SEQ ID NO: 10187 - DNA, 122 bp, Homo sapiens
  misc_feature (61)..(62): /note="This region represents a CpG dinucleotide"
  misc_feature (61)..(61): /note="Nucleotide may be methylated to form 5-methylcytosine"
cccagcatgaaaaccaacagaatcctagggtgccagagggcagagatgccaggacagccacgcctggaaacagccggttccatctgtgagcacagggctccttaaagcaccctcccccacaa

SEQ ID NO: 10188 - DNA, 122 bp, Homo sapiens
  misc_feature (61)..(62): /note="This region represents a CpG dinucleotide"
  misc_feature (61)..(61): /note="Nucleotide may be methylated to form 5-methylcytosine"
ctgcctgcctgtctggcgctccgttcctgtttatacttaatgacctcaaaatttgtatgtcgttaacaccgtgtactgaagtgggagagaacacggtttgggagggagaagactccctgtct

SEQ ID NO: 10189 - DNA, 122 bp, Homo sapiens
  misc_feature (61)..(62): /note="This region represents a CpG dinucleotide"
  misc_feature (61)..(61): /note="Nucleotide may be methylated to form 5-methylcytosine"
ctgctgtgttgtaaatgcataaacatggaactcagttaatcatcattcactcaacagcatcggtctatcttcctgcccacagggttctgcatccaacctcaggcaaaggtgcaagtcatggg

SEQ ID NO: 10190 - DNA, 122 bp, Homo sapiens
  misc_feature (61)..(62): /note="This region represents a CpG dinucleotide"
  misc_feature (61)..(61): /note="Nucleotide may be methylated to form 5-methylcytosine"
aatcctataataggttctttctaatattctcttgctgagataacccacagttttctcttgcgtatgttttctgtctcatgcaatgagaactcagctttttaaaaaaaactcagctttttaaa

SEQ ID NO: 10191 - DNA, 122 bp, Homo sapiens
  misc_feature (61)..(62): /note="This region represents a CpG dinucleotide"
  misc_feature (61)..(61): /note="Nucleotide may be methylated to form 5-methylcytosine"
ttgttctggagctgtagaagtcctgagtgttccacttcatctgcttcctctttctaggttcgaagcatactgtgggcataggtccatcatctacatgacatgccttactcaacctaaggagc

SEQ ID NO: 10192 - DNA, 122 bp, Homo sapiens
  misc_feature (61)..(62): /note="This region represents a CpG dinucleotide"
  misc_feature (61)..(61): /note="Nucleotide may be methylated to form 5-methylcytosine"
tttctgcctcccaactttgttctaataaagcatgacaggaacgttgccaattggcaacggcgtccaggaaatgtagcatgcaggctttaagtgccagtatcagagtctagaatggtggtggc

SEQ ID NO: 10193 - DNA, 122 bp, Homo sapiens
  misc_feature (61)..(62): /note="This region represents a CpG dinucleotide"
  misc_feature (61)..(61): /note="Nucleotide may be methylated to form 5-methylcytosine"
ctgtatgccaggttgccctgtgaagaattaggcttcttggcaatcaagaaactcagacatcgtaggcccttagaaaactgacacattaaggacttggtgctttcacttccccttctagaagg

SEQ ID NO: 10194 - DNA, 122 bp, Homo sapiens
  misc_feature (61)..(62): /note="This region represents a CpG dinucleotide"
  misc_feature (61)..(61): /note="Nucleotide may be methylated to form 5-methylcytosine"
ggttactcaccagctcttcagaacaattgtggctgaaacgtggcagctggcagacttctacgtatatgaagttaatccatggggcataagagcacagtggtgaagagagaacattctgtagc

SEQ ID NO: 10195 - DNA, 122 bp, Homo sapiens
  misc_feature (61)..(62): /note="This region represents a CpG dinucleotide"
  misc_feature (61)..(61): /note="Nucleotide may be methylated to form 5-methylcytosine"
gctgagagtgataagaagataacagcaagacagacagagtgagagcgacaggctgacttacgtaacctggtggaaagtgatacaggcagattcgctgatgggaaacaaacagaaagggagtc

SEQ ID NO: 10196 - DNA, 122 bp, Homo sapiens
  misc_feature (61)..(62): /note="This region represents a CpG dinucleotide"
  misc_feature (61)..(61): /note="Nucleotide may be methylated to form 5-methylcytosine"
aaaagctaaagagattagctaagaagtgcctatatttagatctgctattgagctgggaagcggaggcacagttgtgctgaaatacctctgtaccccatgaaacagtggctgctctgagcttc

SEQ ID NO: 10197 - DNA, 122 bp, Homo sapiens
  misc_feature (61)..(62): /note="This region represents a CpG dinucleotide"
  misc_feature (61)..(61): /note="Nucleotide may be methylated to form 5-methylcytosine"
cggcaacaaatattgattactggcccttgtgctgaacactgtacatcttagctcatcctgcgctggggcaggaagcggagggtggggcaggaagcggagggcagagcagcacacatcagtgg

SEQ ID NO: 10198 - DNA, 122 bp, Homo sapiens
  misc_feature (61)..(62): /note="This region represents a CpG dinucleotide"
  misc_feature (61)..(61): /note="Nucleotide may be methylated to form 5-methylcytosine"
aaaacaaaaaccctggaacatagaagttcagaactttcctctcttcacagagttcctcctcgcatcatttcatgttgatcctcttatccccagtgtcttctgcctgaaggcctattttgtct

SEQ ID NO: 10199 - DNA, 122 bp, Homo sapiens
  misc_feature (61)..(62): /note="This region represents a CpG dinucleotide"
  misc_feature (61)..(61): /note="Nucleotide may be methylated to form 5-methylcytosine"
atggagtgagccacaatcctaattaatccattaatcacagaggcggtgattaataatggtcgacttttttcacaaagttttgttatggagcacatatataaaacagaacagtttaataaacc

SEQ ID NO: 10200 - DNA, 122 bp, Homo sapiens
  misc_feature (61)..(62): /note="This region represents a CpG dinucleotide"
  misc_feature (61)..(61): /note="Nucleotide may be methylated to form 5-methylcytosine"
tactggggattaggatttcagcatatgaatttagggcaagggaggaggacataattcagacgtagaaggcagattagttgactgtactggtgtaagtttctacacgaatgagccttgaatga

SEQ ID NO: 10201 - DNA, 122 bp, Homo sapiens
  misc_feature (61)..(62): /note="This region represents a CpG dinucleotide"
  misc_feature (61)..(61): /note="Nucleotide may be methylated to form 5-methylcytosine"
gtgcttagcacagacctatcattgtgtagctgtcaatgccttagctttagaagaataaaacgcatatctccacctcctatgtcatttgacagcttattaataaaacttgataatcattatgc

SEQ ID NO: 10202 - DNA, 122 bp, Homo sapiens
  misc_feature (61)..(62): /note="This region represents a CpG dinucleotide"
  misc_feature (61)..(61): /note="Nucleotide may be methylated to form 5-methylcytosine"
caacttcacagtcccctcagctccaagagtcccgactgaggagactggtggcttgtgaggcggagaaggacaagcacaagtgtgcagaaggcagcaagcaagttgcgttgccgaaggaaggg

SEQ ID NO: 10203 - DNA, 122 bp, Homo sapiens
  misc_feature (61)..(62): /note="This region represents a CpG dinucleotide"
  misc_feature (61)..(61): /note="Nucleotide may be methylated to form 5-methylcytosine"
ctccaagctcaacatgtggcaaaggtcggtgagttcctcctgccccagggaccctgtgcccgtcgtgtcaaaactgtcaaacagctccttgagtcgggcctcatgctggtcctgctccacct

SEQ ID NO: 10204 - DNA, 122 bp, Homo sapiens
  misc_feature (61)..(62): /note="This region represents a CpG dinucleotide"
  misc_feature (61)..(61): /note="Nucleotide may be methylated to form 5-methylcytosine"
actctccaccacaggaaggggcagggggtgtgactcgtgcatgaaaaaaaacctgagttccggagcaattataggaaatgctgtcattcaccgaagatctactcattaggcaacagacactt

SEQ ID NO: 10205 - DNA, 122 bp, Homo sapiens
  misc_feature (61)..(62): /note="This region represents a CpG dinucleotide"
  misc_feature (61)..(61): /note="Nucleotide may be methylated to form 5-methylcytosine"
acaagttggtaaccagtacacagtgaacctgattcacaacttgtagtattactgattcaacgtttttcttatatcaacttgcttattaaatttttgctaagctgtatctgtgaaataaaatg

SEQ ID NO: 10206 - DNA, 122 bp, Homo sapiens
  misc_feature (61)..(62): /note="This region represents a CpG dinucleotide"
  misc_feature (61)..(61): /note="Nucleotide may be methylated to form 5-methylcytosine"
gctacaacatggataaacctttaggatgctatgctcagtgaaaacaggctggtcacaaaacgacaaatgtattaattccactgagatgaggtatgtagaatagtaaaattaataaaaacaga

SEQ ID NO: 10207 - DNA, 122 bp, Homo sapiens
  misc_feature (61)..(62): /note="This region represents a CpG dinucleotide"
  misc_feature (61)..(61): /note="Nucleotide may be methylated to form 5-methylcytosine"
aaacaaaagggaatgtctgcctcaagaaatgatcacatcaggaccgggcatggtggctcacgcctgtaatcccagcactttgggagtccaaggtgggcagatcacgaggtcaggagttcaag

SEQ ID NO: 10208 - DNA, 122 bp, Homo sapiens
  misc_feature (61)..(62): /note="This region represents a CpG dinucleotide"
  misc_feature (61)..(61): /note="Nucleotide may be methylated to form 5-methylcytosine"
ttcatgacaaagttacagatgacgtaacatcttaggacatttcataacccccttagagtccgggaaaatcttaaaaatcaccaactgcaagtctctgtggtggagctctctctgattttctc

SEQ ID NO: 10209 - DNA, 122 bp, Homo sapiens
  misc_feature (61)..(62): /note="This region represents a CpG dinucleotide"
  misc_feature (61)..(61): /note="Nucleotide may be methylated to form 5-methylcytosine"
aatccaggaacctgggcagccctcggcacagtttggcacaggccatgtcaaataaacctacgataaaaccaaagagaaaataaaatgacttctggcttctgatacattttattcttgagtta

SEQ ID NO: 10210 - DNA, 122 bp, Homo sapiens
  misc_feature (61)..(62): /note="This region represents a CpG dinucleotide"
  misc_feature (61)..(61): /note="Nucleotide may be methylated to form 5-methylcytosine"
cccggggcagaatgtggtctagttctcccctttactgtggaaaacaccctgttgctgatccgtgcaacagctctcaaagatactttaatcatttccatcaagggccaatggtccagttaaaa

SEQ ID NO: 10211 - DNA, 122 bp, Homo sapiens
  misc_feature (61)..(62): /note="This region represents a CpG dinucleotide"
  misc_feature (61)..(61): /note="Nucleotide may be methylated to form 5-methylcytosine"
gagctgcacccaccatttcaaggaatattaaaaccacatgaggtttttcagttcctcttacgtcgatcaccacctttgattaaacatcctctcttgcaaattttttttttcttttttgagac

SEQ ID NO: 10212 - DNA, 122 bp, Homo sapiens
  misc_feature (61)..(62): /note="This region represents a CpG dinucleotide"
  misc_feature (61)..(61): /note="Nucleotide may be methylated to form 5-methylcytosine"
ctgtccaaggtcccatgtgagcatcacaaacaatctctgagtgacacaagggatgacgggcgcaaccaaaccttgttttaacaaggcattctacccctcctgccctcactcagagaagtaaa

SEQ ID NO: 10213 - DNA, 122 bp, Homo sapiens
  misc_feature (61)..(62): /note="This region represents a CpG dinucleotide"
  misc_feature (61)..(61): /note="Nucleotide may be methylated to form 5-methylcytosine"
aacccttcaaataaccttcttctctatcattctgtgtaaaatctttgaaataactaatgacgtcctgaaaggtgcaaagggcaaagctcacacactgaattgaggcaagtcatcaagcagga

SEQ ID NO: 10214 - DNA, 122 bp, Homo sapiens
  misc_feature (61)..(62): /note="This region represents a CpG dinucleotide"
  misc_feature (61)..(61): /note="Nucleotide may be methylated to form 5-methylcytosine"
acaaatctgtgttttagaaaaatcacattggctacactccaggaagcagtcgaacaacagcgaaagcttttgggaaactgtaatcccatagaaagacaaaggattataagtattatggaaag

SEQ ID NO: 10215 - DNA, 122 bp, Homo sapiens
  misc_feature (61)..(62): /note="This region represents a CpG dinucleotide"
  misc_feature (61)..(61): /note="Nucleotide may be methylated to form 5-methylcytosine"
ttttggattctcttctctgcagggtgagaaaccttctgggaattttgaggagagaggtggcgtcataggattaacttctccaaaggctacattggctgctgtgtgcagggtggattctagga

SEQ ID NO: 10216 - DNA, 122 bp, Homo sapiens
  misc_feature (61)..(62): /note="This region represents a CpG dinucleotide"
  misc_feature (61)..(61): /note="Nucleotide may be methylated to form 5-methylcytosine"
gccctgagcatttgattcagctgacattggcaactgttcacagtgagtttctgctcccatcgtggtcaagacaatcctccaagcactgtggcccctaaggccaagcccagaagttgcagggc

SEQ ID NO: 10217 - DNA, 122 bp, Homo sapiens
  misc_feature (61)..(62): /note="This region represents a CpG dinucleotide"
  misc_feature (61)..(61): /note="Nucleotide may be methylated to form 5-methylcytosine"
agggtccgctccaggagggtgtgggttccgatgcctgggtcctggaggtccggggagtcgcggagggacctccctccggtaaccgacggattggggacaaatgctctgcccagtctgatccc

SEQ ID NO: 10218 - DNA, 122 bp, Homo sapiens
  misc_feature (61)..(62): /note="This region represents a CpG dinucleotide"
  misc_feature (61)..(61): /note="Nucleotide may be methylated to form 5-methylcytosine"
taattaggttgacctctctctcctgtagaccaggaccaagcattcagtgagcatacatgacgtgtcagatactgttcagggacagcaaaggtaaacaacaggacacctgcagccttcagagg

SEQ ID NO: 10219 - DNA, 122 bp, Homo sapiens
  misc_feature (61)..(62): /note="This region represents a CpG dinucleotide"
  misc_feature (61)..(61): /note="Nucleotide may be methylated to form 5-methylcytosine"
gttggcaggacccgttttggagaaagattattttctgtggctggggagagctggactaaacgtggatgagactcaggcttaaagcctgtgacatcatcggaagatactaagggagacatcat

SEQ ID NO: 10220 - DNA, 122 bp, Homo sapiens
  misc_feature (61)..(62): /note="This region represents a CpG dinucleotide"
  misc_feature (61)..(61): /note="Nucleotide may be methylated to form 5-methylcytosine"
acctgcaaggcaaagcccatgcagctctctctttgtccctcgcgtccagctcagggcactcgagttcagggtggccttatacaggggcaaggccaggggtcatctccacaggctggttcaag

SEQ ID NO: 10221 - DNA, 122 bp, Homo sapiens
  misc_feature (61)..(62): /note="This region represents a CpG dinucleotide"
  misc_feature (61)..(61): /note="Nucleotide may be methylated to form 5-methylcytosine"
cttacacaaatacattctaactcaattaactgggaggtgaaggaaaaaagaaagacaatacggaaatgtcaagtcatttggaaccatctgctgtaagagagctcctgagtgtctgtacacaa

SEQ ID NO: 10222 - DNA, 122 bp, Homo sapiens
  misc_feature (61)..(62): /note="This region represents a CpG dinucleotide"
  misc_feature (61)..(61): /note="Nucleotide may be methylated to form 5-methylcytosine"
attataggcgtgagccaccgtgcctggcctgtaattcctttttaatacctgcttcacatgcgatgatttgttcaggatctatttacaccaggaggctgtctgctcccagtggacagggtctg

SEQ ID NO: 10223 - DNA, 122 bp, Homo sapiens
  misc_feature (61)..(62): /note="This region represents a CpG dinucleotide"
  misc_feature (61)..(61): /note="Nucleotide may be methylated to form 5-methylcytosine"
cctagaaagtaccaagtctgtagttgcaaggtgattacacagcatttgcatttgggcagccgggtggaaggatgattcagaatgagatacttgcttttgttcgcaaaacagatgcgatgtgc

SEQ ID NO: 10224 - DNA, 122 bp, Homo sapiens
  misc_feature (61)..(62): /note="This region represents a CpG dinucleotide"
  misc_feature (61)..(61): /note="Nucleotide may be methylated to form 5-methylcytosine"
gaaaagaaaaattttgtccctagctattcatcacagctaatgttctgaccctaaatctaacgtgtagagcgaatggtctttatagtaacacactgtaccaagtagaatggccttttcacttc

SEQ ID NO: 10225 - DNA, 122 bp, Homo sapiens
  misc_feature (61)..(62): /note="This region represents a CpG dinucleotide"
  misc_feature (61)..(61): /note="Nucleotide may be methylated to form 5-methylcytosine"
agctaatgcacaccatgtgaatactgtttcgaaaagttacctggagaacttacccacacacgttccctcatctgaaaactggtagccctccacacactcgcagcggaaggttcctgggtgat

SEQ ID NO: 10226 - DNA, 122 bp, Homo sapiens
  misc_feature (61)..(62): /note="This region represents a CpG dinucleotide"
  misc_feature (61)..(61): /note="Nucleotide may be methylated to form 5-methylcytosine"
aacagttgcaatgcttagtgggattcacccttgtcgtcaccaaccctgctactccagccacgtgagttttccgcctgtcagccaagcaaaatggccttcctgcagtcgcacggccctttggt

SEQ ID NO: 10227 - DNA, 122 bp, Homo sapiens
  misc_feature (61)..(62): /note="This region represents a CpG dinucleotide"
  misc_feature (61)..(61): /note="Nucleotide may be methylated to form 5-methylcytosine"
agggagaacttcttatggtgccacccccttgtgccacactctgactcctagggcagggcacgagaatttcgtggtggagctgagtcatggctttgccctagcaatcagggaggccaaggaaa

SEQ ID NO: 10228 - DNA, 122 bp, Homo sapiens
  misc_feature (61)..(62): /note="This region represents a CpG dinucleotide"
  misc_feature (61)..(61): /note="Nucleotide may be methylated to form 5-methylcytosine"
tgagcaaggtgccttgcccatagtcaattgttattgaaaacaagcaccccactttttcctcgtatctaaatttctttcagattccacccaggtcatccaaattctgatctgggatcaacact

SEQ ID NO: 10229 - DNA, 122 bp, Homo sapiens
  misc_feature (61)..(62): /note="This region represents a CpG dinucleotide"
  misc_feature (61)..(61): /note="Nucleotide may be methylated to form 5-methylcytosine"
aagaaagatagcaagcacgtgtaaggtacttagcttatgccaagaactgttctaagcacacgtgtgttaactcattgctttcttgtaacaatcctgtgaggtggtaatgctactatcttcct

SEQ ID NO: 10230 - DNA, 122 bp, Homo sapiens
  misc_feature (61)..(62): /note="This region represents a CpG dinucleotide"
  misc_feature (61)..(61): /note="Nucleotide may be methylated to form 5-methylcytosine"
ctttttttttttttttttgagacagggtctcactctgctgcccaggctggagtacagagacgtgatcacagcacacggcgacctacctacacctcccgggctcaagctatgctcctgcctca

SEQ ID NO: 10231 - DNA, 122 bp, Homo sapiens
  misc_feature (61)..(62): /note="This region represents a CpG dinucleotide"
  misc_feature (61)..(61): /note="Nucleotide may be methylated to form 5-methylcytosine"
cacactgcattaaacttatcagacccatcatattcacttctgtttgcaaacatctgcagacgtaactgttcttcaatgcctgaatcattcattcctgcgtttaaagcccctcactgtcagtt

SEQ ID NO: 10232 - DNA, 122 bp, Homo sapiens
  misc_feature (61)..(62): /note="This region represents a CpG dinucleotide"
  misc_feature (61)..(61): /note="Nucleotide may be methylated to form 5-methylcytosine"
actgtgtacaatagcttctgaagttttggagggtattggtgtagctgttatttctgagaccggagaaaatgacggtagagtgacagtttctctaatcatcagttttcaaagagtatgttttt

SEQ ID NO: 10233 - DNA, 122 bp, Homo sapiens
  misc_feature (61)..(62): /note="This region represents a CpG dinucleotide"
  misc_feature (61)..(61): /note="Nucleotide may be methylated to form 5-methylcytosine"
cagcctcggtgaaacacaataaaggaagagaactacagttcttttattaaaagctcttagcgcacatatttcccaggtaaagataatccacaggaggatagatttgggcaaatttcatcata

SEQ ID NO: 10234 - DNA, 122 bp, Homo sapiens
  misc_feature (61)..(62): /note="This region represents a CpG dinucleotide"
  misc_feature (61)..(61): /note="Nucleotide may be methylated to form 5-methylcytosine"
cagtatcaccccacgggctggcctcctatccaggttctgcctgatgatgggttgagctgtcgcaccagccaggccctgtctgtgctgtcctctcggctgtaaaataaagaggccgtggtctg

SEQ ID NO: 10235 - DNA, 122 bp, Homo sapiens
  misc_feature (61)..(62): /note="This region represents a CpG dinucleotide"
  misc_feature (61)..(61): /note="Nucleotide may be methylated to form 5-methylcytosine"
cagaaggagattaaaaagatgcccctcaagatggctgtgcctgtcagctgcatggagcttcgttcaagtattttctgagcctgatggatttacagtgatcttcagtggtctggggaataacg

SEQ ID NO: 10236 - DNA, 122 bp, Homo sapiens
  misc_feature (61)..(62): /note="This region represents a CpG dinucleotide"
  misc_feature (61)..(61): /note="Nucleotide may be methylated to form 5-methylcytosine"
catgcctttttgtttgtggttattaaaacctggccttcaagaatagccataccagttttccggggattgtgaaatcttctggaaaacagaggcactcatcaactaagacactgcacaaattt

SEQ ID NO: 10237 - DNA, 122 bp, Homo sapiens
  misc_feature (61)..(62): /note="This region represents a CpG dinucleotide"
  misc_feature (61)..(61): /note="Nucleotide may be methylated to form 5-methylcytosine"
cacctgctgggaatgtagtcagcagccttcagatgccagtcttttcagggacagcctcaacgggagatggacagcctcaacaggagatggccaccctgaccttcccaagggtggccttccca

SEQ ID NO: 10238 - DNA, 122 bp, Homo sapiens
  misc_feature (61)..(62): /note="This region represents a CpG dinucleotide"
  misc_feature (61)..(61): /note="Nucleotide may be methylated to form 5-methylcytosine"
attttctctgttcattggctcttcacttgttgcttggtgttttccttagtcttctgagatcggttgcttcattagttgttcaaaaaatatttattgagcacttagaatgtgcaaaacactat

SEQ ID NO: 10239 - DNA, 122 bp, Homo sapiens
  misc_feature (61)..(62): /note="This region represents a CpG dinucleotide"
  misc_feature (61)..(61): /note="Nucleotide may be methylated to form 5-methylcytosine"
catcaggaatatgatgatgaataataagatgccttctctggcttcaataaactacagcctcgtggggataacagctggattaaactaacaatgatgcacttaaatgagcttagtgtaaaggc

SEQ ID NO: 10240 - DNA, 122 bp, Homo sapiens
  misc_feature (61)..(62): /note="This region represents a CpG dinucleotide"
  misc_feature (61)..(61): /note="Nucleotide may be methylated to form 5-methylcytosine"
tttgaaaattttcagttggggctcttccaaataattgggactcccccaaaaagccagtcacgtttaccacaacagacactgagtggaagctctatcctctgcttccttgaagccggttgtca

SEQ ID NO: 10241 - DNA, 122 bp, Homo sapiens
  misc_feature (61)..(62): /note="This region represents a CpG dinucleotide"
  misc_feature (61)..(61): /note="Nucleotide may be methylated to form 5-methylcytosine"
ctccttatctgatttctaagtttgctccctcattcagccttatcttatctgaaatggatccgtgaagtaaaaacaatttcctgtggtttttaccttgtttttcctctaactagaagttaaat

SEQ ID NO: 10242 - DNA, 122 bp, Homo sapiens
  misc_feature (61)..(62): /note="This region represents a CpG dinucleotide"
  misc_feature (61)..(61): /note="Nucleotide may be methylated to form 5-methylcytosine"
caggcaaggccgtgacccaaatggaggcttttaaacccgagctcagaggtaagaagcccacggccagcacctcccggccctctgcgccctggccgcctcctccgcaccaccctcccggccgg

SEQ ID NO: 10243 - DNA, 122 bp, Homo sapiens
  misc_feature (61)..(62): /note="This region represents a CpG dinucleotide"
  misc_feature (61)..(61): /note="Nucleotide may be methylated to form 5-methylcytosine"
tcattggcctttataaactgacttagtgctcttaatttgatccctggtcatcagtgttcccggtaaccaccatctgtaagtagtcctcaaaacaaaggattaaactgaatagagtcaaatga

SEQ ID NO: 10244 - DNA, 122 bp, Homo sapiens
  misc_feature (61)..(62): /note="This region represents a CpG dinucleotide"
  misc_feature (61)..(61): /note="Nucleotide may be methylated to form 5-methylcytosine"
tcagccccggctgctgaagctgccggcaggtgggcggctccatggagtcctgtgggtaggcgcaggcgcctcctaatcaaatgcagaggatgagcacaactgtttggagaacatggggcctc

SEQ ID NO: 10245 - DNA, 122 bp, Homo sapiens
  misc_feature (61)..(62): /note="This region represents a CpG dinucleotide"
  misc_feature (61)..(61): /note="Nucleotide may be methylated to form 5-methylcytosine"
gaggaagctcccgcacccagggtttcccctggcgagtgaccgagcccctctgaccaaacgcgcgctcaggcgccttatggatcacacggttccaatggcccgggagacaagcaaacgtgcca

SEQ ID NO: 10246 - DNA, 122 bp, Homo sapiens
  misc_feature (61)..(62): /note="This region represents a CpG dinucleotide"
  misc_feature (61)..(61): /note="Nucleotide may be methylated to form 5-methylcytosine"
ctgcataaggtcagcaccctccgtatgaccccaccccaaatccagccactccgggtatgtcgtgatgaactaagcattagagcatggggcctaacgatggcatggctgcaggccaaatcctg

SEQ ID NO: 10247 - DNA, 122 bp, Homo sapiens
  misc_feature (61)..(62): /note="This region represents a CpG dinucleotide"
  misc_feature (61)..(61): /note="Nucleotide may be methylated to form 5-methylcytosine"
gaatattcagagaagtaggcctcataaactttagagctctaataagtcagaaacaggaaacgtttatttaaatagtgtagtcttaatttctttaatataaaacccccccaaatctgatgaaa

SEQ ID NO: 10248 - DNA, 122 bp, Homo sapiens
  misc_feature (61)..(62): /note="This region represents a CpG dinucleotide"
  misc_feature (61)..(61): /note="Nucleotide may be methylated to form 5-methylcytosine"
tcccatgtccttctgtgagagcctgcacttcctgtttcataggaatcataggacttaccacgtgattatagctttcggtaatatgtcttctctacactctgagaaccataactaaaccatta

SEQ ID NO: 10249 - DNA, 122 bp, Homo sapiens
  misc_feature (61)..(62): /note="This region represents a CpG dinucleotide"
  misc_feature (61)..(61): /note="Nucleotide may be methylated to form 5-methylcytosine"
gagaaatatgtacctggtgtcgagatggtgctataatcccgctcctctgaacctcttctgcgtcacccccacagtgaagcaaccacacatcacactgcagccacactgaattagctgccaaa

SEQ ID NO: 10250 - DNA, 122 bp, Homo sapiens
  misc_feature (61)..(62): /note="This region represents a CpG dinucleotide"
  misc_feature (61)..(61): /note="Nucleotide may be methylated to form 5-methylcytosine"
tttgaattgctagagggcaggaactgactcatggtcatctttgtatctcccagcttctggcgaaagtagatgcctaataaatgtgtattgaacaaatggaaacaaacacaagtgtttctgtt

SEQ ID NO: 10251 - DNA, 122 bp, Homo sapiens
  misc_feature (61)..(62): /note="This region represents a CpG dinucleotide"
  misc_feature (61)..(61): /note="Nucleotide may be methylated to form 5-methylcytosine"
taacttcttccacattgcctaactgcctgtatggctggcctttgaagacaatcaacgtatcgtgacattcatgatacattctctggtcaaaatgctcctctcaaggagcataactttagact

SEQ ID NO: 10252 - DNA, 122 bp, Homo sapiens
  misc_feature (61)..(62): /note="This region represents a CpG dinucleotide"
  misc_feature (61)..(61): /note="Nucleotide may be methylated to form 5-methylcytosine"
cggttggagggctggcggttggagggctggcggttggagggcaggcggttggagggcaggcggttggctttctggtcttagtcactcccagtctgaagacaaggcagaggcctagtgattcc

SEQ ID NO: 10253 - DNA, 122 bp, Homo sapiens
  misc_feature (61)..(62): /note="This region represents a CpG dinucleotide"
  misc_feature (61)..(61): /note="Nucleotide may be methylated to form 5-methylcytosine"
agcattcaatctggtggcttcagcacccaccacacctcctagaacccagtaagctcttgacgcatgtctgtgggatgcatggaagaatgagtcaccctacctcaagaaatgttgatgactct

SEQ ID NO: 10254 - DNA, 122 bp, Homo sapiens
  misc_feature (61)..(62): /note="This region represents a CpG dinucleotide"
  misc_feature (61)..(61): /note="Nucleotide may be methylated to form 5-methylcytosine"
accggcgggagacggcggcttgggagctggctgtgctgcaggtgttgggtcgggtcgggtcgggacgggcgggagaggacgagacgggtcgggataggttggggcggggcggggcggcacta

SEQ ID NO: 10255 - DNA, 122 bp, Homo sapiens
  misc_feature (61)..(62): /note="This region represents a CpG dinucleotide"
  misc_feature (61)..(61): /note="Nucleotide may be methylated to form 5-methylcytosine"
atctgtgatcaaatatccctgaataaccatatgtaaatattctctttaagtatttaccaccgtaaatgaaggaaagccatccacggcttgggctgatgtaaccaggaagtattccaatgatg

SEQ ID NO: 10256 - DNA, 122 bp, Homo sapiens
  misc_feature (61)..(62): /note="This region represents a CpG dinucleotide"
  misc_feature (61)..(61): /note="Nucleotide may be methylated to form 5-methylcytosine"
caagtcattagcttcctctttggggcctgaagtcaagcttgtctgggtagctgaaaggaccggtagcactgtttacttaaagacctctggacagtacctataaattaattcctgtgcatgac

SEQ ID NO: 10257 - DNA, 122 bp, Homo sapiens
  misc_feature (61)..(62): /note="This region represents a CpG dinucleotide"
  misc_feature (61)..(61): /note="Nucleotide may be methylated to form 5-methylcytosine"
aaaagtgcttttctgggtttccacgactgcctcccttcctccccaaaacgattctccatccgaggaatatttgaaacagctgctgcccgtcctaatgtgccagggctgagattgctgctgga

SEQ ID NO: 10258 - DNA, 122 bp, Homo sapiens
  misc_feature (61)..(62): /note="This region represents a CpG dinucleotide"
  misc_feature (61)..(61): /note="Nucleotide may be methylated to form 5-methylcytosine"
ttgtcagtttaattaactttggccgccagaggaggccattcttatctacaggacaagcaccgcggctgtaccagcctctgagttccgactcgggtcctgcaggtgtggcttcctggcgcacg

SEQ ID NO: 10259 - DNA, 122 bp, Homo sapiens
  misc_feature (61)..(62): /note="This region represents a CpG dinucleotide"
  misc_feature (61)..(61): /note="Nucleotide may be methylated to form 5-methylcytosine"
agcctgggcattgaggccagataaacctagttcaaatctctactctgccaactgacctctcgaactttgttttccttatctgtgaaattgcaattgtagtgagatttaaatggattattgtg

SEQ ID NO: 10260 - DNA, 122 bp, Homo sapiens
  misc_feature (61)..(62): /note="This region represents a CpG dinucleotide"
  misc_feature (61)..(61): /note="Nucleotide may be methylated to form 5-methylcytosine"
gcccttcatccaccagctcttccatggcctacagagaaaagtgtctgtgtggtgcagaaacgaacccagaaaggacaggatcagaagtgtcgtttgcaccagtttaacgggtcctgccctca

SEQ ID NO: 10261 - DNA, 122 bp, Homo sapiens
  misc_feature (61)..(62): /note="This region represents a CpG dinucleotide"
  misc_feature (61)..(61): /note="Nucleotide may be methylated to form 5-methylcytosine"
ctgtgtccctgtcaaatctcatgtaaaattgtaatccccagtgttggaagtggggcctggcgggaagtatttggatcacgagggcagatcattcatgaatggcttaaagccatccccttggt

SEQ ID NO: 10262 - DNA, 122 bp, Homo sapiens
  misc_feature (61)..(62): /note="This region represents a CpG dinucleotide"
  misc_feature (61)..(61): /note="Nucleotide may be methylated to form 5-methylcytosine"
actggatttgcaaatgatgtgcttcattaactgttaaaaagaaaatgatttaaaaaaatacgtatcaaagaaggttgttatgaggattatatgagaatagcttagctcagtgactaatacac

SEQ ID NO: 10263 - DNA, 122 bp, Homo sapiens
  misc_feature (61)..(62): /note="This region represents a CpG dinucleotide"
  misc_feature (61)..(61): /note="Nucleotide may be methylated to form 5-methylcytosine"
gacatgcacagacacagacacataaggagatgatatatcaatgactcttacacacacccacgagtcacagcccctgaagtgatatggtgaactagaagtgtcagcccccattcctgtggact

SEQ ID NO: 10264 - DNA, 122 bp, Homo sapiens
  misc_feature (61)..(62): /note="This region represents a CpG dinucleotide"
  misc_feature (61)..(61): /note="Nucleotide may be methylated to form 5-methylcytosine"
agcagcggggtcttgaacttgtgttcctcccacagtgcggagccttctgccaggtgaccacgacactggcactccccatcactgacctggctactacaggaacggcgttccctccgggaaaa

SEQ ID NO: 10265 - DNA, 122 bp, Homo sapiens
  misc_feature (61)..(62): /note="This region represents a CpG dinucleotide"
  misc_feature (61)..(61): /note="Nucleotide may be methylated to form 5-methylcytosine"
ttagaggtaagttgacaatctccttgtaaagatattagcaaaacagtattattatgaccccgcaacaccttagaaatattttcactataatccatcttgtgataattacacctgttttactg

SEQ ID NO: 10266 - DNA, 122 bp, Homo sapiens
  misc_feature (61)..(62): /note="This region represents a CpG dinucleotide"
  misc_feature (61)..(61): /note="Nucleotide may be methylated to form 5-methylcytosine"
cagactagctgaagcatttcacagtaaactgcagacactctagctcttcactcttacatacgtcagcattccttttcataaaatgatgttttccaccagaaccacaatgggagtagactgaa

SEQ ID NO: 10267 - DNA, 122 bp, Homo sapiens
  misc_feature (61)..(62): /note="This region represents a CpG dinucleotide"
  misc_feature (61)..(61): /note="Nucleotide may be methylated to form 5-methylcytosine"
taaactggggcaaagtatggtcaccagactaaccattgtccttttttacccctcctgtgacggggctactacaggttacaaaatcgcgctcttcctcctagctactgtgttactctgagata

SEQ ID NO: 10268 - DNA, 122 bp, Homo sapiens
  misc_feature (61)..(62): /note="This region represents a CpG dinucleotide"
  misc_feature (61)..(61): /note="Nucleotide may be methylated to form 5-methylcytosine"
cccatgtaaatgagtcaattcatccaaacaaaggaagagtttaattctaaaggaacacatcgaccctactgggacttcagatataatgtgatgggtgttggttcatgcctcggccataggct

SEQ ID NO: 10269 - DNA, 122 bp, Homo sapiens
  misc_feature (61)..(62): /note="This region represents a CpG dinucleotide"
  misc_feature (61)..(61): /note="Nucleotide may be methylated to form 5-methylcytosine"
tggctgggaaaaggatgatggaatcgttgagcaggctggttcctggaaagtcaactttaacgacagtctgaggaatgaatccctacattcagatgatttcgagaagctgtggaccgggcgca

SEQ ID NO: 10270 - DNA, 122 bp, Homo sapiens
  misc_feature (61)..(62): /note="This region represents a CpG dinucleotide"
  misc_feature (61)..(61): /note="Nucleotide may be methylated to form 5-methylcytosine"
ttagagtcgtctctcaaaggctctcagcaaatatctagagacgtggttacatccagtttacgaagactgtcggtgacttcggggtcatacagtacatggacaacgaaagaacagcaattgaa

SEQ ID NO: 10271 - DNA, 122 bp, Homo sapiens
  misc_feature (61)..(62): /note="This region represents a CpG dinucleotide"
  misc_feature (61)..(61): /note="Nucleotide may be methylated to form 5-methylcytosine"
cccaggccttctctctctggtccttgcagtagcagagttttattctggccttccccgccccgataaagcaaggtgcctcccttccctctgtcaagtttttccgtcagactccctgctcgcag

SEQ ID NO: 10272 - DNA, 122 bp, Homo sapiens
  misc_feature (61)..(62): /note="This region represents a CpG dinucleotide"
  misc_feature (61)..(61): /note="Nucleotide may be methylated to form 5-methylcytosine"
gaacttgtgcttaatctcctagtgacagtgagacttctgccctttgtggctggatctgcacgtgacttgttgaatgattttaagtctgtgtcaccctgtgttatgattactcctaagtgggt

SEQ ID NO: 10273 - DNA, 122 bp, Homo sapiens
  misc_feature (61)..(62): /note="This region represents a CpG dinucleotide"
  misc_feature (61)..(61): /note="Nucleotide may be methylated to form 5-methylcytosine"
cagagtgccatgcaagaagcagacccaactgttgaggagtggcagtcataaagcccgatccgccagaaaaaaacctaccaggaaatgaattcaccttagacttctgatccctcaaataatac

SEQ ID NO: 10274 - DNA, 122 bp, Homo sapiens
  misc_feature (61)..(62): /note="This region represents a CpG dinucleotide"
  misc_feature (61)..(61): /note="Nucleotide may be methylated to form 5-methylcytosine"
gaatttcaaagtctacaagttttgagatgagttgagtattaattcacctgccacaagagccgtgaggtgtagagcaagcttgtccaacctgcggttcatgcggcccaggatggctttgaata

SEQ ID NO: 10275 - DNA, 122 bp, Homo sapiens
  misc_feature (61)..(62): /note="This region represents a CpG dinucleotide"
  misc_feature (61)..(61): /note="Nucleotide may be methylated to form 5-methylcytosine"
atgcccagctcttctttcatctgtattagtttcattctcaagtatgctttcctgacaactcggcagagattacataagttcacagcaaactggtttcagtgaaaagagtggcccccgttctg

SEQ ID NO: 10276 - DNA, 122 bp, Homo sapiens
  misc_feature (61)..(62): /note="This region represents a CpG dinucleotide"
  misc_feature (61)..(61): /note="Nucleotide may be methylated to form 5-methylcytosine"
ggtaggtgaagcaatgcacccaaagctacagagctaggaagcggtggggcagtgtggctacgcctgtgccctgaaccacaaaagtaacaggcacacggctgactggggaaaacgtgagaaca

SEQ ID NO: 10277 - DNA, 122 bp, Homo sapiens
  misc_feature (61)..(62): /note="This region represents a CpG dinucleotide"
  misc_feature (61)..(61): /note="Nucleotide may be methylated to form 5-methylcytosine"
tgacaataattttttaccaggtacaatgtgcttttaggaggatttcttccttttctcccccgtttttatgttcagtctgacctggttgatgactgtgactcagatgatagacggactacttg

SEQ ID NO: 10278 - DNA, 122 bp, Homo sapiens
  misc_feature (61)..(62): /note="This region represents a CpG dinucleotide"
  misc_feature (61)..(61): /note="Nucleotide may be methylated to form 5-methylcytosine"
ctgtccagctagtgcctttctcagtgcctaatccaggatgtgcactcaaacctttttctccgggatgcatgaatgagagcaagtaaacaacttcagttcttttttcttttctttttttttaa

SEQ ID NO: 10279 - DNA, 122 bp, Homo sapiens
  misc_feature (61)..(62): /note="This region represents a CpG dinucleotide"
  misc_feature (61)..(61): /note="Nucleotide may be methylated to form 5-methylcytosine"
cagcaaggatgatgatactaccctgtattgattaagcattcattgtgtgccaggcaggcacggtgctcagccttttagaggcacttatctcatgcaacccatcctgacagcagccctccgag

SEQ ID NO: 10280 - DNA, 122 bp, Homo sapiens
  misc_feature (61)..(62): /note="This region represents a CpG dinucleotide"
  misc_feature (61)..(61): /note="Nucleotide may be methylated to form 5-methylcytosine"
agacgcacaggtgtcaacatgcaggccaggcggagggacagcagtggggctcggcgtggccggagcctggggagggacatggacaagtcctctatggacaagaggggctggagagtttaatc

SEQ ID NO: 10281 - DNA, 122 bp, Homo sapiens
  misc_feature (61)..(62): /note="This region represents a CpG dinucleotide"
  misc_feature (61)..(61): /note="Nucleotide may be methylated to form 5-methylcytosine"
agactttaagggaagtggcagcttctgccttggtctctgggagccctgagtcactcactccgtaagaagactgactggagagaccacatggagattacgtggggaagggagaagggcacact

SEQ ID NO: 10282 - DNA, 122 bp, Homo sapiens
  misc_feature (61)..(62): /note="This region represents a CpG dinucleotide"
  misc_feature (61)..(61): /note="Nucleotide may be methylated to form 5-methylcytosine"
gctaaatttcttttagctgaggcactcttgctacattggcattttaatgttcttggaacccgtatggacaaagagttgaaagaaacatatactcattttaatataaatttttctatcttata

SEQ ID NO: 10283 - DNA, 122 bp, Homo sapiens
  misc_feature (61)..(62): /note="This region represents a CpG dinucleotide"
  misc_feature (61)..(61): /note="Nucleotide may be methylated to form 5-methylcytosine"
ttttatttcttggcacttattttaaaagccttattctctcctcctcccagtgcaaacccacgccatatccctgaatctgttgtggaagaacagactggaagacatctgcctcttgccttatt

SEQ ID NO: 10284 - DNA, 122 bp, Homo sapiens
  misc_feature (61)..(62): /note="This region represents a CpG dinucleotide"
  misc_feature (61)..(61): /note="Nucleotide may be methylated to form 5-methylcytosine"
aaatagttaagatcaactggtaaacccagtggagaaaccaatctggttagtcaggtataccgtacaattaacagtttcatcccaataaataaaacaaattttgggatatatatttgcttgcc

SEQ ID NO: 10285 - DNA, 122 bp, Homo sapiens
  misc_feature (61)..(62): /note="This region represents a CpG dinucleotide"
  misc_feature (61)..(61): /note="Nucleotide may be methylated to form 5-methylcytosine"
aattggcaagactttggtgtgtacaagaattaaaattctggaagttaaaaaccacctgtacggctaagtggctttccaaatgcttgtaacaagtgtaaactcatcagaaaactatgaaaaca

SEQ ID NO: 10286 - DNA, 122 bp, Homo sapiens
  misc_feature (61)..(62): /note="This region represents a CpG dinucleotide"
  misc_feature (61)..(61): /note="Nucleotide may be methylated to form 5-methylcytosine"
agccaagttaattgcctgtatttgcttcctgtggaaatatttcacaagacaccctgttatcgtgggcccagcatttgtacttgtgttttgctgatccgtttagcttttttgaaaattttggg

SEQ ID NO: 10287 - DNA, 122 bp, Homo sapiens
  misc_feature (61)..(62): /note="This region represents a CpG dinucleotide"
  misc_feature (61)..(61): /note="Nucleotide may be methylated to form 5-methylcytosine"
gcgctggttggtgaaacagagatgtcaggtgagtcctgcctgcctgggagcctccagcagcgtgggcgggagggagatgccagcagttcccacaggagccctcggtcctggccgttggcaaa

SEQ ID NO: 10288 - DNA, 122 bp, Homo sapiens
  misc_feature (61)..(62): /note="This region represents a CpG dinucleotide"
  misc_feature (61)..(61): /note="Nucleotide may be methylated to form 5-methylcytosine"
acccaagacggaacccactcgcgttgcgcccgaggaggtgcgaggctggtccgccagacccgcccagcacgtcaccaacacacctaaggaagccggctccggtgccgcctccgtggggcgca

SEQ ID NO: 10289 - DNA, 122 bp, Homo sapiens
  misc_feature (61)..(62): /note="This region represents a CpG dinucleotide"
  misc_feature (61)..(61): /note="Nucleotide may be methylated to form 5-methylcytosine"
cacagatcaccccatctgtgtgctgcttatgacttcatgtgttctaatcgcctgtacacacgtcaactatattcaggtatcctttaaatgcctttactttcaaatccctagagcatttcata

SEQ ID NO: 10290 - DNA, 122 bp, Homo sapiens
  misc_feature (61)..(62): /note="This region represents a CpG dinucleotide"
  misc_feature (61)..(61): /note="Nucleotide may be methylated to form 5-methylcytosine"
tgctgctttcagtttatagctattacagaaaaggttctgaatattcccgtgtgtgtctctcggagcacatgtgtacttttcatttggttacatagctaggagtggcattgttggctcatagt

SEQ ID NO: 10291 - DNA, 122 bp, Homo sapiens
  misc_feature (61)..(62): /note="This region represents a CpG dinucleotide"
  misc_feature (61)..(61): /note="Nucleotide may be methylated to form 5-methylcytosine"
agggagagggcaggattatctcacactgacacacacacagcctttagactgagctatttgcgtggcttatttaaaagcagcaaaacaatgttctgtctctctcttcatttttctaccggaaa

SEQ ID NO: 10292 - DNA, 122 bp, Homo sapiens
  misc_feature (61)..(62): /note="This region represents a CpG dinucleotide"
  misc_feature (61)..(61): /note="Nucleotide may be methylated to form 5-methylcytosine"
taacaagggtgataatgagcatagtggatttactaactagacaccagtgatcaagtaggtcggaaattaagcctttgtagttgacaaggaaactaaagtggttagctaaggttaaaagacac

SEQ ID NO: 10293 - DNA, 122 bp, Homo sapiens
  misc_feature (61)..(62): /note="This region represents a CpG dinucleotide"
  misc_feature (61)..(61): /note="Nucleotide may be methylated to form 5-methylcytosine"
aagggtagcggcttcttgtgtgtctttcagagacaggctatgtgtgtgcgagcgcacactcgtgtttgtgtgtgtgtgtgtctgtatttttaatcccttgggagtatttctggatcaaggga

SEQ ID NO: 10294 - DNA, 122 bp, Homo sapiens
  misc_feature (61)..(62): /note="This region represents a CpG dinucleotide"
  misc_feature (61)..(61): /note="Nucleotide may be methylated to form 5-methylcytosine"
ccaacaagttaacagcttataataggaaagcactctccagacttctgcccatctccatcacgccgcggaaacttgtctgaaaggagaatttggatgcaacagggcaacggagcgacgtttct

SEQ ID NO: 10295 - DNA, 122 bp, Homo sapiens
  misc_feature (61)..(62): /note="This region represents a CpG dinucleotide"
  misc_feature (61)..(61): /note="Nucleotide may be methylated to form 5-methylcytosine"
aatcattattcatcaccaaaattctactgaattttaccttatggaaattcatcacatctgcgtagaaaatatattaaagagagttctgtgctaggaatcaagaaatccaggttctacttctg

SEQ ID NO: 10296 - DNA, 122 bp, Homo sapiens
  misc_feature (61)..(62): /note="This region represents a CpG dinucleotide"
  misc_feature (61)..(61): /note="Nucleotide may be methylated to form 5-methylcytosine"
gattctcattgttcattatcctcccttagggctgggtgaggtggctcattcctgtaaacccggcacttgaagaggctgaggtgggaggattgcttgagcccaagagttcaagaccagcctgg

SEQ ID NO: 10297 - DNA, 122 bp, Homo sapiens
  misc_feature (61)..(62): /note="This region represents a CpG dinucleotide"
  misc_feature (61)..(61): /note="Nucleotide may be methylated to form 5-methylcytosine"
gctgcccaagactggaagggaaggcagctcttaagaagcaaagcaagtgaatgggaattacgctccacactaagggaaatgcattgggagagggatacatttggggaggaagaatgaaataa

SEQ ID NO: 10298 - DNA, 122 bp, Homo sapiens
  misc_feature (61)..(62): /note="This region represents a CpG dinucleotide"
  misc_feature (61)..(61): /note="Nucleotide may be methylated to form 5-methylcytosine"
gttataacctatgtaatagccaaatttcaacaaccaatgccaaacactgtgattctgagtcgtattttgaatgttcttcatgacttctccatatttttgtaaatgaaatgctaacttagagc

SEQ ID NO: 10299 - DNA, 122 bp, Homo sapiens
  misc_feature (61)..(62): /note="This region represents a CpG dinucleotide"
  misc_feature (61)..(61): /note="Nucleotide may be methylated to form 5-methylcytosine"
cttttgggtacctgaatacaatttcatggatggctagacctgggcactctaaaagatttacgactcattttgttaactataggtgccccggaaatgaattaaagcctcagtaaaataattaa

SEQ ID NO: 10300 - DNA, 122 bp, Homo sapiens
  misc_feature (61)..(62): /note="This region represents a CpG dinucleotide"
  misc_feature (61)..(61): /note="Nucleotide may be methylated to form 5-methylcytosine"
ggagataaactaaacagccactctggctgggtttgttttaccaaacaaacatagcaagtccgcaaacatttgctggtgtgtggtatatgccaggcactatgttagagtcccaagatccaaag

SEQ ID NO: 10301 - DNA, 122 bp, Homo sapiens
  misc_feature (61)..(62): /note="This region represents a CpG dinucleotide"
  misc_feature (61)..(61): /note="Nucleotide may be methylated to form 5-methylcytosine"
tttacaaccctccctttcacccttggtttactagttaatgttgaataagctacttgtagacgaaggaagacaaaattattgattgctcagctttagttttgtagagagatatatattataaa

SEQ ID NO: 10302 - DNA, 122 bp, Homo sapiens
  misc_feature (61)..(62): /note="This region represents a CpG dinucleotide"
  misc_feature (61)..(61): /note="Nucleotide may be methylated to form 5-methylcytosine"
cttgacttataagccaccacagcatgggcagaattcgccataatcacagtgtgtgaagagcgctataggattttagagagattcagcccggacaatcagggttggcttcacggaggaggggg

SEQ ID NO: 10303 - DNA, 122 bp, Homo sapiens
  misc_feature (61)..(62): /note="This region represents a CpG dinucleotide"
  misc_feature (61)..(61): /note="Nucleotide may be methylated to form 5-methylcytosine"
actgctcaattattgttatgctgatactatagatgaagctactgagactcagagaagtcacggcggcagcaagttgcagagctggaaacaaacacaaatctctttgactcccaagctccttc

SEQ ID NO: 10304 - DNA, 122 bp, Homo sapiens
  misc_feature (61)..(62): /note="This region represents a CpG dinucleotide"
  misc_feature (61)..(61): /note="Nucleotide may be methylated to form 5-methylcytosine"
gaacaaatttcaaccaacatgaaaagccctggtgagtgtgttagttggatgtcttagactcggaggtaacaaaatgcagagactacctgcagggatagaattgctgattgcatgccctattc

SEQ ID NO: 10305 - DNA, 122 bp, Homo sapiens
  misc_feature (61)..(62): /note="This region represents a CpG dinucleotide"
  misc_feature (61)..(61): /note="Nucleotide may be methylated to form 5-methylcytosine"
tttgcattccaattacttaaactgagatgttcttgatcagttgaacatactgtgagtagacgatctctttctcagagaaacaagatggagagatcttcagagaatggccccactgaagctca

SEQ ID NO: 10306 - DNA, 122 bp, Homo sapiens
  misc_feature (61)..(62): /note="This region represents a CpG dinucleotide"
  misc_feature (61)..(61): /note="Nucleotide may be methylated to form 5-methylcytosine"
ctgaaagtctggtgagaagacacggcgagaatcggggtccagcacagatgatggcgacagcggagaagggaaggtaagggagggggctcaagcttttatcgttatgggacctcctgtgtcta

SEQ ID NO: 10307 - DNA, 122 bp, Homo sapiens
  misc_feature (61)..(62): /note="This region represents a CpG dinucleotide"
  misc_feature (61)..(61): /note="Nucleotide may be methylated to form 5-methylcytosine"
aacatgttaagggtcaaatgtctcagttcctgaattttgatggtgcaatacaaagcagaccgcttggtttgaaggcagctttgatcctgttataagatgatcaaaggctcaaaagatttttc

SEQ ID NO: 10308 - DNA, 122 bp, Homo sapiens
  misc_feature (61)..(62): /note="This region represents a CpG dinucleotide"
  misc_feature (61)..(61): /note="Nucleotide may be methylated to form 5-methylcytosine"
ctgtggtttctacaaaataaccggccagcattccttcctgataagagaccatggaggatgcgcagtaagggttttcatgtcctctgcttcaacttttgacctcagagggctgaaaactcctc

SEQ ID NO: 10309 - DNA, 122 bp, Homo sapiens
  misc_feature (61)..(62): /note="This region represents a CpG dinucleotide"
  misc_feature (61)..(61): /note="Nucleotide may be methylated to form 5-methylcytosine"
catacctgagggcggagggctggggtgtgggagtgctcatagcagacaggcctggctgggcgttctgatgaaggggatggcgagggcgggggtggagggctcctcacctctgcaggaatttg

SEQ ID NO: 10310 - DNA, 122 bp, Homo sapiens
  misc_feature (61)..(62): /note="This region represents a CpG dinucleotide"
  misc_feature (61)..(61): /note="Nucleotide may be methylated to form 5-methylcytosine"
gaaatagaacaagaaagacctctagccacagtggcaggcaccatagcagcagccgggccacgctcagccaacccaccagagcgttttcgtgcaaaatgttatcgatgtgctgcacatcttca

SEQ ID NO: 10311 - DNA, 122 bp, Homo sapiens
  misc_feature (61)..(62): /note="This region represents a CpG dinucleotide"
  misc_feature (61)..(61): /note="Nucleotide may be methylated to form 5-methylcytosine"
tggatgtacaaagcagcccgggaacctgcagccacttcaaagaggggcagagtgtgaaaccgggggatcgaacccctccatgcccagcacgcaacagtaagaaacggacacacgcagcgacg

SEQ ID NO: 10312 - DNA, 122 bp, Homo sapiens
  misc_feature (61)..(62): /note="This region represents a CpG dinucleotide"
  misc_feature (61)..(61): /note="Nucleotide may be methylated to form 5-methylcytosine"
gacctggtgaaatcctatttcagacctaatctgggagcctgcaagtgacaacagcctttgcggtccttagacagcttggcctggaggagaacacatgaaagaaaggtttgtttctgcttaat

SEQ ID NO: 10313 - DNA, 122 bp, Homo sapiens
  misc_feature (61)..(62): /note="This region represents a CpG dinucleotide"
  misc_feature (61)..(61): /note="Nucleotide may be methylated to form 5-methylcytosine"
aatccatgtttctttccccagaggattccagatggagtgaactcagtagaggcggtgcttcgacggctgatgatcttgcggagaggagagaggagcattagttacggttttaagtcccggct

SEQ ID NO: 10314 - DNA, 122 bp, Homo sapiens
  misc_feature (61)..(62): /note="This region represents a CpG dinucleotide"
  misc_feature (61)..(61): /note="Nucleotide may be methylated to form 5-methylcytosine"
ggaggctgcaggtacctggtggagggtgcgagttgaatagttcaggttctcaccaccccccgccccccctcaggagtccctgaggattcactgagacaatgagtagaaaatgtccaaggaag

SEQ ID NO: 10315 - DNA, 122 bp, Homo sapiens
  misc_feature (61)..(62): /note="This region represents a CpG dinucleotide"
  misc_feature (61)..(61): /note="Nucleotide may be methylated to form 5-methylcytosine"
aaaaagtgaaactactaagggaggaggggtgaggggaccccttcccatgctcctttatcacgttaaggtgcttcacagcttaaacatcccatgattattagttaactccctgcagtctgaga

SEQ ID NO: 10316 - DNA, 122 bp, Homo sapiens
  misc_feature (61)..(62): /note="This region represents a CpG dinucleotide"
  misc_feature (61)..(61): /note="Nucleotide may be methylated to form 5-methylcytosine"
tctttaattctttcctgatctagactagacctgtggtacattattcaatgactctatccccgttatacttccattccactttccagaaaaactctaaccctgggtcaattcgattgcacctg

SEQ ID NO: 10317 - DNA, 122 bp, Homo sapiens
  misc_feature (61)..(62): /note="This region represents a CpG dinucleotide"
  misc_feature (61)..(61): /note="Nucleotide may be methylated to form 5-methylcytosine"
gctctgtggacatcactgcccatgaagccagaaaattcatgtctaagccatgtgaggtcacgctgaagaaacaactcatggtcagaacaataggagaggttattaagagatattaactgcct

SEQ ID NO: 10318 - DNA, 122 bp, Homo sapiens
  misc_feature (61)..(62): /note="This region represents a CpG dinucleotide"
  misc_feature (61)..(61): /note="Nucleotide may be methylated to form 5-methylcytosine"
aaggattagcctagaataaacatcaaggcagagctcctaaatgagtgaaacagcctgacacgccatagagggatgatactgagtgacagattgtggcatactagaaaatgcatggcctatct

SEQ ID NO: 10319 - DNA, 122 bp, Homo sapiens
  misc_feature (61)..(62): /note="This region represents a CpG dinucleotide"
  misc_feature (61)..(61): /note="Nucleotide may be methylated to form 5-methylcytosine"
ctgtctattaatctatccaatgaaaccacagtgctggacatcaataaaggaatcacagagcgtgaaatacatgctggtagaaagaaagcagatggacaaatatgaaaagcaaacaaaagtaa

SEQ ID NO: 10320 - DNA, 122 bp, Homo sapiens
  misc_feature (61)..(62): /note="This region represents a CpG dinucleotide"
  misc_feature (61)..(61): /note="Nucleotide may be methylated to form 5-methylcytosine"
agaaggcttggaggggtgggtacttatccccagtcagtcatcagagagcccttcaggagacgtcactcatttctgtctcataatgaaactgaaagttgagacctctacggaataaaatagga

SEQ ID NO: 10321 - DNA, 122 bp, Homo sapiens
  misc_feature (61)..(62): /note="This region represents a CpG dinucleotide"
  misc_feature (61)..(61): /note="Nucleotide may be methylated to form 5-methylcytosine"
cctgcctccaggaaggaagagattattgcagttccctctattttaaaatcttttcaatgccgattttgtttttgatatattattattgcctgaggctttagtcaggagactgagatcacaca

SEQ ID NO: 10322 - DNA, 122 bp, Homo sapiens
  misc_feature (61)..(62): /note="This region represents a CpG dinucleotide"
  misc_feature (61)..(61): /note="Nucleotide may be methylated to form 5-methylcytosine"
ccctggcattttgtagctgtgcaacctacaagtacagggcttacatttgctcaaggggcacgtgctgacagaaatggaggagcacgaaaacaagaagagattattccaaagactgtgactat

SEQ ID NO: 10323 - DNA, 122 bp, Homo sapiens
  misc_feature (61)..(62): /note="This region represents a CpG dinucleotide"
  misc_feature (61)..(61): /note="Nucleotide may be methylated to form 5-methylcytosine"
tccccacctagaggcagattcagtgtatgaggaccattttccacactcctaagattacatcgccaatcagcagcatccattccctagtcctgtgcccaccaaactatccttgaaaaacctta

SEQ ID NO: 10324 - DNA, 122 bp, Homo sapiens
  misc_feature (61)..(62): /note="This region represents a CpG dinucleotide"
  misc_feature (61)..(61): /note="Nucleotide may be methylated to form 5-methylcytosine"
gtgaagtcagccccttacacctcctccaggcacagctgtggggagcatgtcccgagaaggcgcaggaagaggcccaggccacgtgtcccgtgtggtcagcctggggaccagagttaaaacca

SEQ ID NO: 10325 - DNA, 122 bp, Homo sapiens
  misc_feature (61)..(62): /note="This region represents a CpG dinucleotide"
  misc_feature (61)..(61): /note="Nucleotide may be methylated to form 5-methylcytosine"
ctcctgctcccttcagttcaggcagcctcatttgttatgtctctgctaaaattaactccacgttaatttctggaggctttggagtttattgctgggaaaaaaaaaaggttatttgctggcag

SEQ ID NO: 10326 - DNA, 122 bp, Homo sapiens
  misc_feature (61)..(62): /note="This region represents a CpG dinucleotide"
  misc_feature (61)..(61): /note="Nucleotide may be methylated to form 5-methylcytosine"
agtaacctggatgcttatgaaacctcaattacataatttcctacagcacagattgcaatccgcagacaagggtttccctgaatctcctctccaattcctgccccatcttattcttacaaaac

SEQ ID NO: 10327 - DNA, 122 bp, Homo sapiens
  misc_feature (61)..(62): /note="This region represents a CpG dinucleotide"
  misc_feature (61)..(61): /note="Nucleotide may be methylated to form 5-methylcytosine"
cttgtcaaaagtgaggaagcactcacatttctgtttactcttccagaaggctgcttactacgagtttgttgctggaagaaaaatagtactccatttcctgtagaaaagagagacagccgatg

SEQ ID NO: 10328 - DNA, 122 bp, Homo sapiens
  misc_feature (61)..(62): /note="This region represents a CpG dinucleotide"
  misc_feature (61)..(61): /note="Nucleotide may be methylated to form 5-methylcytosine"
ctgtctctgcagcttatgtatgactctttgttaagcatttcaaaatattacatgttactgcgttgtaatactttgcttgtatctagcacctcttatttttagaacttagtgtttaaacaaat

SEQ ID NO: 10329 - DNA, 122 bp, Homo sapiens
  misc_feature (61)..(62): /note="This region represents a CpG dinucleotide"
  misc_feature (61)..(61): /note="Nucleotide may be methylated to form 5-methylcytosine"
tgctagggagggagcaggggtgaggtctgggggcttaggctgggctttggtgggagccaccgctgtgatggcccctggcaccaggctgattcctaccagactgggcatgtgaggagcccctt

SEQ ID NO: 10330 - DNA, 122 bp, Homo sapiens
  misc_feature (61)..(62): /note="This region represents a CpG dinucleotide"
  misc_feature (61)..(61): /note="Nucleotide may be methylated to form 5-methylcytosine"
tcaggtcagctgtcggccaccaggccagggtttgccactggcaagttggattttgtgttacgtgcctaaccaggagttgtcaccgcttgaggcttaacctggttctgggcggctcggtgtgt

SEQ ID NO: 10331 - DNA, 122 bp, Homo sapiens
  misc_feature (61)..(62): /note="This region represents a CpG dinucleotide"
  misc_feature (61)..(61): /note="Nucleotide may be methylated to form 5-methylcytosine"
cactagacatttagcaacccagaagccaaacccacaagggaaaggtgtgaccagggaccacgcagtggacaagtttcagtgactgatggaaagctcgttataaccaaatgacatctcttcac

SEQ ID NO: 10332 - DNA, 122 bp, Homo sapiens
  misc_feature (61)..(62): /note="This region represents a CpG dinucleotide"
  misc_feature (61)..(61): /note="Nucleotide may be methylated to form 5-methylcytosine"
tcataggtgaaatgacacatagcctatgactagaaatcctacttcctggtgagcacagaacgatgtgggtaagaggatttctcagtaatgtttgtaacagtgaaaatgttggaaacaacaaa

SEQ ID NO: 10333 - DNA, 122 bp, Homo sapiens
  misc_feature (61)..(62): /note="This region represents a CpG dinucleotide"
  misc_feature (61)..(61): /note="Nucleotide may be methylated to form 5-methylcytosine"
gcctatctcaggttatggttggggcatgctctgggcttcctagaatcaggaagtcaaatacgtagcaaatgttcaataatcatgttaaattgaagtcagcatggccttggaactcaagtgtt

SEQ ID NO: 10334 - DNA, 122 bp, Homo sapiens
  misc_feature (61)..(62): /note="This region represents a CpG dinucleotide"
  misc_feature (61)..(61): /note="Nucleotide may be methylated to form 5-methylcytosine"
agtgattcacctgcctcggcctcccgaagtgctgggattacaggcgtgagccaccacccccggccaactgctattgttgtaatagattgtaacaaagccagtggtaatgggtagcccaacga

SEQ ID NO: 10335 - DNA, 122 bp, Homo sapiens
  misc_feature (61)..(62): /note="This region represents a CpG dinucleotide"
  misc_feature (61)..(61): /note="Nucleotide may be methylated to form 5-methylcytosine"
ggacctcagctaagcactccatggccagcccactggaggcacaggcttcaaaacaggaaacgaaaagggcctgcttctgcagttgacagctttgatgccttcctcactgagaaggccttagg

SEQ ID NO: 10336 - DNA, 122 bp, Homo sapiens
  misc_feature (61)..(62): /note="This region represents a CpG dinucleotide"
  misc_feature (61)..(61): /note="Nucleotide may be methylated to form 5-methylcytosine"
ttcaataaaaattttaaaaatagattcaaacaagagataaaggattagataataaaagaacgtgacagcagagaggaaactggtagagagaagcagaaataaaaagggaactagatgagacc

SEQ ID NO: 10337 - DNA, 122 bp, Homo sapiens
  misc_feature (61)..(62): /note="This region represents a CpG dinucleotide"
  misc_feature (61)..(61): /note="Nucleotide may be methylated to form 5-methylcytosine"
tttgaagtcagctgcttagtaaccttaattgcatctgaaaatccctcacagcagtagatccgtgtttgactgaataggggataaggttcttggggaacatttaaaagttaatcctatcacag

SEQ ID NO: 10338 - DNA, 122 bp, Homo sapiens
  misc_feature (61)..(62): /note="This region represents a CpG dinucleotide"
  misc_feature (61)..(61): /note="Nucleotide may be methylated to form 5-methylcytosine"
acttaagaattatgggaaatttcttgaggagtatacctctcaactgagaagaattgaggacgctctggatgactcaattggagatgtttgggatttcaatcttgatcctatagcattaaagg

SEQ ID NO: 10339 - DNA, 122 bp, Homo sapiens
  misc_feature (61)..(62): /note="This region represents a CpG dinucleotide"
  misc_feature (61)..(61): /note="Nucleotide may be methylated to form 5-methylcytosine"
agaatgaccactgcactctagcctgagtgacagggtaagactttgaaaaaaaaaaagttgcgagtgatcatccacaccaaatgctggtggttttgcattttgactctggacagagttaggcc

SEQ ID NO: 10340 - DNA, 122 bp, Homo sapiens
  misc_feature (61)..(62): /note="This region represents a CpG dinucleotide"
  misc_feature (61)..(61): /note="Nucleotide may be methylated to form 5-methylcytosine"
ataggcaataatttgtcattttcctatgacacagatctaatctctatttgttgctaagcccgtgttttatgaattaagttatataaacacaggtacaaagaaaagtaatagcaagatttcct

SEQ ID NO: 10341 - DNA, 122 bp, Homo sapiens
  misc_feature (61)..(62): /note="This region represents a CpG dinucleotide"
  misc_feature (61)..(61): /note="Nucleotide may be methylated to form 5-methylcytosine"
catttaatgatttgaggtgatagggaaatgttttttattgtatttgcttctttgatcttgcggtagatttttaaagcagagagcatggactagtcagaagaccagttgacttaaactcttat

SEQ ID NO: 10342 - DNA, 122 bp, Homo sapiens
  misc_feature (61)..(62): /note="This region represents a CpG dinucleotide"
  misc_feature (61)..(61): /note="Nucleotide may be methylated to form 5-methylcytosine"
aactgttagtggcttaaagacaaaatatgccatctcttatcatgaatgttagggaatgaacgaaagatgccaaggctaccgaagtcatgtcattaaagaatcaatgtttgaaaatcctgttt

SEQ ID NO: 10343 - DNA, 122 bp, Homo sapiens
  misc_feature (61)..(62): /note="This region represents a CpG dinucleotide"
  misc_feature (61)..(61): /note="Nucleotide may be methylated to form 5-methylcytosine"
ctagacagtcagcctggagttgttaattttttcaatgatagatcttcctgctagattatacgttctttgctgcagagactgccttaggcttgtttgtatcctttgtgcgcttagcaagcttt

SEQ ID NO: 10344 - DNA, 122 bp, Homo sapiens
  misc_feature (61)..(62): /note="This region represents a CpG dinucleotide"
  misc_feature (61)..(61): /note="Nucleotide may be methylated to form 5-methylcytosine"
aaaattaaaaatagtcttccccagtgacctttagttatcttctctgtatttgcctggggtcgttcttgaaatgcctgcgtgacttgcgattatgaaatgttagtatgccaacataagatagc

SEQ ID NO: 10345 - DNA, 122 bp, Homo sapiens
  misc_feature (61)..(62): /note="This region represents a CpG dinucleotide"
  misc_feature (61)..(61): /note="Nucleotide may be methylated to form 5-methylcytosine"
tgagcattcacaattcccaaagtgggtggagagtgacctaaaggaaaatttccagcaatccgcaaaagactgagtcagaatggagttacttcaaaatctctgagaacacttttaaaatgtaa

SEQ ID NO: 10346 - DNA, 122 bp, Homo sapiens
  misc_feature (61)..(62): /note="This region represents a CpG dinucleotide"
  misc_feature (61)..(61): /note="Nucleotide may be methylated to form 5-methylcytosine"
agtaataccgtagtgtgatagatgagggaacaatagcatgagtttggccaaatcgctattcgtaatgtttgtttaacagatgaagaagtcaggtgacattttccattggtgtgttgtgcaat

SEQ ID NO: 10347 - DNA, 122 bp, Homo sapiens
  misc_feature (61)..(62): /note="This region represents a CpG dinucleotide"
  misc_feature (61)..(61): /note="Nucleotide may be methylated to form 5-methylcytosine"
cccagagctaagtcagctctgagcaggactctacaaggccacatcaaaaatgacaacaggcgggccagtgtgatgaggcatcggtgggaggttcaccccgggtgaggattctgtcatggcac

SEQ ID NO: 10348 - DNA, 122 bp, Homo sapiens
  misc_feature (61)..(62): /note="This region represents a CpG dinucleotide"
  misc_feature (61)..(61): /note="Nucleotide may be methylated to form 5-methylcytosine"
agccatgtatttgctgtgaaattcacactctgtgtgactactaaagacagttcagctactcgtacttcactccatttcctttgtgaaatctgaagaactctaggtgaatcaggtgatggttg

SEQ ID NO: 10349 - DNA, 122 bp, Homo sapiens
  misc_feature (61)..(62): /note="This region represents a CpG dinucleotide"
  misc_feature (61)..(61): /note="Nucleotide may be methylated to form 5-methylcytosine"
ccactgctggcatgattgggtggcctgtgagaaaccaagggtacaagacactctacaatgcgtgggtcatctcacaataggggactgtcttgcattccacgtgactttcgaatgtctctcag

SEQ ID NO: 10350 - DNA, 122 bp, Homo sapiens
  misc_feature (61)..(62): /note="This region represents a CpG dinucleotide"
  misc_feature (61)..(61): /note="Nucleotide may be methylated to form 5-methylcytosine"
tgatctggaaaactgcctgtcctctgtgaaaattaccagcttcaggggctatgacttctacggtcttaaggtatctttcaaactgttaactatggggtttgactttttcttttcgttttttg

SEQ ID NO: 10351 - DNA, 122 bp, Homo sapiens
  misc_feature (61)..(62): /note="This region represents a CpG dinucleotide"
  misc_feature (61)..(61): /note="Nucleotide may be methylated to form 5-methylcytosine"
tttcagttactgctggcatgggaaaatgagtcaccaaaattcacagattcctcctcattgcgtaataactaaaacgaatgtttgggtttccggtggcaccagctcttatttctcagttcagc

SEQ ID NO: 10352 - DNA, 122 bp, Homo sapiens
  misc_feature (61)..(62): /note="This region represents a CpG dinucleotide"
  misc_feature (61)..(61): /note="Nucleotide may be methylated to form 5-methylcytosine"
atctgcaaaagtacatattgaaatatgcaaatggtatatagcatgtgagtgtcagattcacggaaattaaatcaaatacaggggagagaaaagaaacagagtgcattaaagctaactttatg

SEQ ID NO: 10353 - DNA, 122 bp, Homo sapiens
  misc_feature (61)..(62): /note="This region represents a CpG dinucleotide"
  misc_feature (61)..(61): /note="Nucleotide may be methylated to form 5-methylcytosine"
ctcaaaacttaatttttctcttgtcaactatctgccataagtcactgcctcaagaaaaatcgattttgaattcatccctagtgatatgctcaaagctactgctctcctgcctttccccctaa

SEQ ID NO: 10354 - DNA, 122 bp, Homo sapiens
  misc_feature (61)..(62): /note="This region represents a CpG dinucleotide"
  misc_feature (61)..(61): /note="Nucleotide may be methylated to form 5-methylcytosine"
tgacacaagtgactctattttgaatcatacaacttccaggacatgaacattaattgaacacgttcatcacaaggacaagattcgttttaagtccagttaacaatgcaactgactcctccaga

SEQ ID NO: 10355 - DNA, 122 bp, Homo sapiens
  misc_feature (61)..(62): /note="This region represents a CpG dinucleotide"
  misc_feature (61)..(61): /note="Nucleotide may be methylated to form 5-methylcytosine"
tttaatccacagatggggaacctgaggatatggaaggctgactaagagatggttcataagcggccttaaaaatataaaatgaggccgggcacggtggctcacgcctgtgatcccagcacttt

SEQ ID NO: 10356 - DNA, 122 bp, Homo sapiens
  misc_feature (61)..(62): /note="This region represents a CpG dinucleotide"
  misc_feature (61)..(61): /note="Nucleotide may be methylated to form 5-methylcytosine"
gactacagaggagagattccagcccccttcatgctgcagattgttagagctagggctgcacgttccctgggacagggacaagcccatgttaggaggctgcttctcacggggagtgccctgag

SEQ ID NO: 10357 - DNA, 122 bp, Homo sapiens
  misc_feature (61)..(62): /note="This region represents a CpG dinucleotide"
  misc_feature (61)..(61): /note="Nucleotide may be methylated to form 5-methylcytosine"
aaactgtcactagtcagctggctctttttcctatgaaatctatcagtacctttctccatccgttgttctcaatatgaccacagagcctgagtataccaagaaaaccaatattcgcattacag

SEQ ID NO: 10358 - DNA, 122 bp, Homo sapiens
  misc_feature (61)..(62): /note="This region represents a CpG dinucleotide"
  misc_feature (61)..(61): /note="Nucleotide may be methylated to form 5-methylcytosine"
gtaagaacgagagcagctgcagtggtgcgctcttgtcaggactcaccacgccaggcaccacggcaggactcaccacgccaggcagccaggccagaactcaccacaccaggaagccaggccag

SEQ ID NO: 10359 - DNA, 122 bp, Homo sapiens
  misc_feature (61)..(62): /note="This region represents a CpG dinucleotide"
  misc_feature (61)..(61): /note="Nucleotide may be methylated to form 5-methylcytosine"
ctcttgggctaatcagatgctggataacatcaacttcctagagttaaattattacatccacgtattataatgctagtcttcagcaagtgtctccaacccaccccattctcccctagtctcca

SEQ ID NO: 10360 - DNA, 122 bp, Homo sapiens
  misc_feature (61)..(62): /note="This region represents a CpG dinucleotide"
  misc_feature (61)..(61): /note="Nucleotide may be methylated to form 5-methylcytosine"
ctctaaataagattagcaaaacgataaattaacaggagaaaaatagagagtttattaacacgtgcagcacacatcacacaggagaaacctcagtgatgagtaactcaaagtttcaagagttt

SEQ ID NO: 10361 - DNA, 122 bp, Homo sapiens
  misc_feature (61)..(62): /note="This region represents a CpG dinucleotide"
  misc_feature (61)..(61): /note="Nucleotide may be methylated to form 5-methylcytosine"
atccttgttaattctctgagtcacatcttaagaagtacagtgtatcctgccttctagtgacgggtgtgctttgttgtaggagaaagtatgggcacaacagactgtagagggcagacgtctca

SEQ ID NO: 10362 - DNA, 122 bp, Homo sapiens
  misc_feature (61)..(62): /note="This region represents a CpG dinucleotide"
  misc_feature (61)..(61): /note="Nucleotide may be methylated to form 5-methylcytosine"
accatgttggccaggatggtctagatcgcttgactttgtgatccacccaccttggcctcccgaagtactgggaattacagatgtgagccaccacacccggccaagaccattgttcttaagca

SEQ ID NO: 10363 - DNA, 122 bp, Homo sapiens
  misc_feature (61)..(62): /note="This region represents a CpG dinucleotide"
  misc_feature (61)..(61): /note="Nucleotide may be methylated to form 5-methylcytosine"
ccagtcccgttaataaagacttagggtctgtctttacccatttgttcatttgaaattccccgtctttacttcccccataaccaggaaacagatctacacccatgtttaacttataaagagat

SEQ ID NO: 10364 - DNA, 122 bp, Homo sapiens
  misc_feature (61)..(62): /note="This region represents a CpG dinucleotide"
  misc_feature (61)..(61): /note="Nucleotide may be methylated to form 5-methylcytosine"
acatgattctcaaataaattctcatctgaaaagaaggctaccaagcatgttgtgaggtatcgctttagcttagtctttgtgctctgcctggctcagttgtcctgcagaacaacgacagtcca

SEQ ID NO: 10365 - DNA, 122 bp, Homo sapiens
  misc_feature (61)..(62): /note="This region represents a CpG dinucleotide"
  misc_feature (61)..(61): /note="Nucleotide may be methylated to form 5-methylcytosine"
ggaagtggtggaagttgcaatcactgtcagcttctgctgctttaatcatttctaaaaaagcgagggagaggaaacatgaatcaaaatagttcaaaataaaaacaataccattctacaagaag

SEQ ID NO: 10366 - DNA, 122 bp, Homo sapiens
  misc_feature (61)..(62): /note="This region represents a CpG dinucleotide"
  misc_feature (61)..(61): /note="Nucleotide may be methylated to form 5-methylcytosine"
acaaagccattttgaggacagaaggaagaatttcctttcctagaaagttggtttgaatcacgagattagtactaaagaggagatgagtaattgaccacttctgtacgattagaaatgagtaa

SEQ ID NO: 10367 - DNA, 122 bp, Homo sapiens
  misc_feature (61)..(62): /note="This region represents a CpG dinucleotide"
  misc_feature (61)..(61): /note="Nucleotide may be methylated to form 5-methylcytosine"
gaatgtacagtccttaagcatcacgaactgccactcccaaggccacgcatgtatcaacaacgccttatcaatcccaatgatgttatggggagtccagagacaggcagacaacgtggataaga

SEQ ID NO: 10368 - DNA, 122 bp, Homo sapiens
  misc_feature (61)..(62): /note="This region represents a CpG dinucleotide"
  misc_feature (61)..(61): /note="Nucleotide may be methylated to form 5-methylcytosine"
tgtcagcacgtaaactgagctattttaaggtcaaggccagggtgcagcccaacagaattgcgaaagcaaaatgtgtttgcttctgcagttggctttttaaatacatttttctttattaattg

SEQ ID NO: 10369 - DNA, 122 bp, Homo sapiens
  misc_feature (61)..(62): /note="This region represents a CpG dinucleotide"
  misc_feature (61)..(61): /note="Nucleotide may be methylated to form 5-methylcytosine"
ttttttcccatagttattcctcataaaattggccgagtcatagaaggaagtccggctgaccgctgtggaaaactgaaagttggagatcatatctctgcagtgaatgggcagtccattgttga

SEQ ID NO: 10370 - DNA, 122 bp, Homo sapiens
  misc_feature (61)..(62): /note="This region represents a CpG dinucleotide"
  misc_feature (61)..(61): /note="Nucleotide may be methylated to form 5-methylcytosine"
tctctaaaaataaacagtttcactgccgggctacacagaacttcctgcccgcctaggatgcgtccgggcccaggggcgcagtagggatagagggccgggtggaggcccaggaagtcctgggg

SEQ ID NO: 10371 - DNA, 122 bp, Homo sapiens
  misc_feature (61)..(62): /note="This region represents a CpG dinucleotide"
  misc_feature (61)..(61): /note="Nucleotide may be methylated to form 5-methylcytosine"
tgttacactatgacaaaacatctggcatatgataacacagcaaacgagagcgacagattacgcagctctagggcagagtttctcaaccttggcactgacttatacgtaaagcacttactaca

SEQ ID NO: 10372 - DNA, 122 bp, Homo sapiens
  misc_feature (61)..(62): /note="This region represents a CpG dinucleotide"
  misc_feature (61)..(61): /note="Nucleotide may be methylated to form 5-methylcytosine"
acctggccctggaggaaggttctgggtcagctgcaatgagagactggtgattaagggcaccgtgggcaggacacagtcctcgccttacccaccccatccttcctgttacccacagtctgctg

SEQ ID NO: 10373 - DNA, 122 bp, Homo sapiens
  misc_feature (61)..(62): /note="This region represents a CpG dinucleotide"
  misc_feature (61)..(61): /note="Nucleotide may be methylated to form 5-methylcytosine"
ggtctacctgcctgcaaacccatgtgcttaatgctacacacaatacctcttgtataacctcgcaacatttaaataataaaaacgaaccttactgatatgactttattagtccatataaattc

SEQ ID NO: 10374 - DNA, 122 bp, Homo sapiens
  misc_feature (61)..(62): /note="This region represents a CpG dinucleotide"
  misc_feature (61)..(61): /note="Nucleotide may be methylated to form 5-methylcytosine"
cctaggccttgctgccaacaagcgtcaatcttgatttttgaaaaggtccaaggatgattacgacgtgcgtaggttgcgaaccatcgaaaagcacccaccaatgtgtcaacctggcaactcag

SEQ ID NO: 10375 - DNA, 122 bp, Homo sapiens
  misc_feature (61)..(62): /note="This region represents a CpG dinucleotide"
  misc_feature (61)..(61): /note="Nucleotide may be methylated to form 5-methylcytosine"
tgatttaatggtctatgcctcagtttcctctcttgtaaaacagagataaagatcatatatcgtttatggggttaactgtgaaggctaacgggggtcacttttatggggtgcttcaccgagtg

SEQ ID NO: 10376 - DNA, 122 bp, Homo sapiens
  misc_feature (61)..(62): /note="This region represents a CpG dinucleotide"
  misc_feature (61)..(61): /note="Nucleotide may be methylated to form 5-methylcytosine"
tccatctgctcttaggggatgccagtgccacatgtggtcagatttgctccatgtcaggctcgcccttgtccctgtttgcatgtgtcccagaaagcagtgtcaggatgcaggagcccctgagc

SEQ ID NO: 10377 - DNA, 122 bp, Homo sapiens
  misc_feature (61)..(62): /note="This region represents a CpG dinucleotide"
  misc_feature (61)..(61): /note="Nucleotide may be methylated to form 5-methylcytosine"
gacccactgcccagccacccagcatggagtggggcactctgcacacctcccggcaacctccggatggtgtcaccacatggctggcccactgccaccaggccctgccctttgaggactcagta

SEQ ID NO: 10378 - DNA, 122 bp, Homo sapiens
  misc_feature (61)..(62): /note="This region represents a CpG dinucleotide"
  misc_feature (61)..(61): /note="Nucleotide may be methylated to form 5-methylcytosine"
cttgcttcctctcactctgacatatgatagacacagcaagaagcaggttggggccaggtgcggtggctcatgcctttaatctcagcaactggggaggccacggtgagtgaatcatctgaggt

SEQ ID NO: 10379 - DNA, 122 bp, Homo sapiens
  misc_feature (61)..(62): /note="This region represents a CpG dinucleotide"
  misc_feature (61)..(61): /note="Nucleotide may be methylated to form 5-methylcytosine"
aacctcatcttacctccagccaccaggcaggagtcaatgcgagcagcaaagtttcccgagcgctctcatccactgtgagtcacttaatactcaggacaaatgggtgaggtcactggggccca

SEQ ID NO: 10380 - DNA, 122 bp, Homo sapiens
  misc_feature (61)..(62): /note="This region represents a CpG dinucleotide"
  misc_feature (61)..(61): /note="Nucleotide may be methylated to form 5-methylcytosine"
agtctagtttcctccccataggaaatgtggtattacatacagtacaaagggctgcactcacgtggaagggttaatccaaggctgtcagagctgagaatgaccttggagactacccatttcta

SEQ ID NO: 10381 - DNA, 122 bp, Homo sapiens
  misc_feature (61)..(62): /note="This region represents a CpG dinucleotide"
  misc_feature (61)..(61): /note="Nucleotide may be methylated to form 5-methylcytosine"
ccatgtgggtgagtcatctcacaagcagatactcaagtatatcaagccttcagatgactgcggcccaagccaatatcttgagtgcatcttcttgagagaccctgagccaggaccatctagca

SEQ ID NO: 10382 - DNA, 122 bp, Homo sapiens
  misc_feature (61)..(62): /note="This region represents a CpG dinucleotide"
  misc_feature (61)..(61): /note="Nucleotide may be methylated to form 5-methylcytosine"
agcggtgtcaccttaaaacttacgaattgtttatttctggaattttccatttttggattacgtgcaatcaaaactgcaggaagcaaaacaacagattaaggggtactactgaacttattttt

SEQ ID NO: 10383 - DNA, 122 bp, Homo sapiens
  misc_feature (61)..(62): /note="This region represents a CpG dinucleotide"
  misc_feature (61)..(61): /note="Nucleotide may be methylated to form 5-methylcytosine"
tctatagctttcataacagcagtaaactttctttcatagcacatataaaatatttaaattcgtgaaagcctaaaactctgttggcctggactgaaatagagtttcttttaggaagatttttt

SEQ ID NO: 10384 - DNA, 122 bp, Homo sapiens
  misc_feature (61)..(62): /note="This region represents a CpG dinucleotide"
  misc_feature (61)..(61): /note="Nucleotide may be methylated to form 5-methylcytosine"
ataggataatatggcaaaagcgagtgtgtttggcagactataaataaagctctacagaaacgtaaggtattatattttaatcagcttaaggtaaggccctgcgggcttctagactttggttt

SEQ ID NO: 10385 - DNA, 122 bp, Homo sapiens
  misc_feature (61)..(62): /note="This region represents a CpG dinucleotide"
  misc_feature (61)..(61): /note="Nucleotide may be methylated to form 5-methylcytosine"
tgagcaaaccctcctgcagagggccctgtcatttattccacattgtgtgagctcctcttacgtgttagaccctgggaattacagtggcaaacagatgcaagctttgccttcactgagcctgt

SEQ ID NO: 10386 - DNA, 122 bp, Homo sapiens
  misc_feature (61)..(62): /note="This region represents a CpG dinucleotide"
  misc_feature (61)..(61): /note="Nucleotide may be methylated to form 5-methylcytosine"
acctctggcagaggtgctaatgaacagcagaatggccacaaggcagcatacccaacgtagcgaagaggcaagggagtgaggtaatcctccagctgaatataaaccactgataatgccagctt

SEQ ID NO: 10387 - DNA, 122 bp, Homo sapiens
  misc_feature (61)..(62): /note="This region represents a CpG dinucleotide"
  misc_feature (61)..(61): /note="Nucleotide may be methylated to form 5-methylcytosine"
gtaagctctttagagggaggagtcgtgattgtctctaacaaaaagaagaccatctgtttccggcagcctgctcagcagaaaccaccagggcttagactctgcatcctaacagctttccatat

SEQ ID NO: 10388 - DNA, 122 bp, Homo sapiens
  misc_feature (61)..(62): /note="This region represents a CpG dinucleotide"
  misc_feature (61)..(61): /note="Nucleotide may be methylated to form 5-methylcytosine"
tgcacagatattagacatggagaaatagggtgggcccttccagacaatgggcataatgcacgcagaaagactgaaaagtattgaaatgttggggaaatagaacttcaaagaggatggagcaa

SEQ ID NO: 10389 - DNA, 122 bp, Homo sapiens
  misc_feature (61)..(62): /note="This region represents a CpG dinucleotide"
  misc_feature (61)..(61): /note="Nucleotide may be methylated to form 5-methylcytosine"
tatgtgctcaataatttattttccttgttttcttttccatttccttcttctcctctaaggcgctccacatctccgtgatatagcgtgtactcctttcctcattttcttttctctgagacaaa

SEQ ID NO: 10390 - DNA, 122 bp, Homo sapiens
  misc_feature (61)..(62): /note="This region represents a CpG dinucleotide"
  misc_feature (61)..(61): /note="Nucleotide may be methylated to form 5-methylcytosine"
agcacagagcccaggcgtgggggcccctgtgggcaaacccagggtacacagaccacagcacgcacacccaacatggctgctgactattttcaaggtcctgaccttggcagcttctacagacg

SEQ ID NO: 10391 - DNA, 122 bp, Homo sapiens
  misc_feature (61)..(62): /note="This region represents a CpG dinucleotide"
  misc_feature (61)..(61): /note="Nucleotide may be methylated to form 5-methylcytosine"
cgcaatccttcctgtgaggatgggcgccttcgggtgttgaagcctgagtggtttcggggccgggacgtcctagatctgggctgcaatgtgggccatctgaccctgagcattgcctgcaagtg

SEQ ID NO: 10392 - DNA, 122 bp, Homo sapiens
  misc_feature (61)..(62): /note="This region represents a CpG dinucleotide"
  misc_feature (61)..(61): /note="Nucleotide may be methylated to form 5-methylcytosine"
aagtcaaggtggtattttggaaagcagctggagctagcaacggaaggtcggggtgcaaggcgtagctctgccactcacctcaagtcacttctctttggattttattatttataagaggaagc

SEQ ID NO: 10393 - DNA, 122 bp, Homo sapiens
  misc_feature (61)..(62): /note="This region represents a CpG dinucleotide"
  misc_feature (61)..(61): /note="Nucleotide may be methylated to form 5-methylcytosine"
tggggtaggggtgtagcagaggcagggctgtggcttgggctggtccagaagatgtttacacggaattggtgagcccacctagttttggtcaaagcaaacttagactgtggagtgagtccaag

SEQ ID NO: 10394 - DNA, 122 bp, Homo sapiens
  misc_feature (61)..(62): /note="This region represents a CpG dinucleotide"
  misc_feature (61)..(61): /note="Nucleotide may be methylated to form 5-methylcytosine"
catgaactcctgcctcatgaacccctatctgagataaaatctttaaccctggacaccacacgataagaaaaatgatgtctaagcagactactctgtgagagagagagagagacagaaaaggc

SEQ ID NO: 10395 - DNA, 122 bp, Homo sapiens
  misc_feature (61)..(62): /note="This region represents a CpG dinucleotide"
  misc_feature (61)..(61): /note="Nucleotide may be methylated to form 5-methylcytosine"
aattcccagtccctctcccttgctttccccacctactcctctatgtgactggcacagtgccgggcagtgctaaacacagtgattactgactggtgttagaagaatgatgtccccaacacttc

SEQ ID NO: 10396 - DNA, 122 bp, Homo sapiens
  misc_feature (61)..(62): /note="This region represents a CpG dinucleotide"
  misc_feature (61)..(61): /note="Nucleotide may be methylated to form 5-methylcytosine"
aacctcaaatgtgattccttttcttgttctttctggaagtttttagtatcttctcttcatcgttagttctgaaactgtacatgacgtgtcttgtgactacactttcactggactcaggatag

SEQ ID NO: 10397 - DNA, 122 bp, Homo sapiens
  misc_feature (61)..(62): /note="This region represents a CpG dinucleotide"
  misc_feature (61)..(61): /note="Nucleotide may be methylated to form 5-methylcytosine"
ccagttgggactcatgccacgcttaagctgagtaagttaaggactctgcctctggacccccgtcagcacatcctgtgctccagcttcagtgccagccccgggagaagccatggggagccacc

SEQ ID NO: 10398 - DNA, 122 bp, Homo sapiens
  misc_feature (61)..(62): /note="This region represents a CpG dinucleotide"
  misc_feature (61)..(61): /note="Nucleotide may be methylated to form 5-methylcytosine"
gctcagcatttattaaatgtctgtattgtagctaccggcttgctggtgccacagcatctgcgcatgctccctgtgacttcctggtctgcaatgtgttgctgttcctagcaccagctctccag

SEQ ID NO: 10399 - DNA, 122 bp, Homo sapiens
  misc_feature (61)..(62): /note="This region represents a CpG dinucleotide"
  misc_feature (61)..(61): /note="Nucleotide may be methylated to form 5-methylcytosine"
accctccagaaggctaaatcgccccgttcctactctatgattcaccgtcagcagagcacacgccagacaaggaaagcacaaagcctgacttggggtggggtaccttgattaaagaagtgtct

SEQ ID NO: 10400 - DNA, 122 bp, Homo sapiens
  misc_feature (61)..(62): /note="This region represents a CpG dinucleotide"
  misc_feature (61)..(61): /note="Nucleotide may be methylated to form 5-methylcytosine"
tggaggaaatgtcatcattggtaaaggaggacttggagaagaaactgtttaagccactctcgcagaatctgtacgagtttattgaaatagagttctccgtccaggacaggtattacctctgt

SEQ ID NO: 10401 - DNA, 122 bp, Homo sapiens
  misc_feature (61)..(62): /note="This region represents a CpG dinucleotide"
  misc_feature (61)..(61): /note="Nucleotide may be methylated to form 5-methylcytosine"
caagcaacagttataagtcaagagaaagacgaatgctagccaaggctagaggtagctaaccgccctgttgtgggtttggcgccgcctggcagagtcaaaccactgcagccctcactccaata

SEQ ID NO: 10402 - DNA, 122 bp, Homo sapiens
  misc_feature (61)..(62): /note="This region represents a CpG dinucleotide"
  misc_feature (61)..(61): /note="Nucleotide may be methylated to form 5-methylcytosine"
aaggcattcatggcagcagtgcccgagagaggggtggctgttctggatgccagggggaagcggcgggacttttaaagagggcaggttactgagtaacctggaagcctctgtcagtctcatct

SEQ ID NO: 10403 - DNA, 122 bp, Homo sapiens
  misc_feature (61)..(62): /note="This region represents a CpG dinucleotide"
  misc_feature (61)..(61): /note="Nucleotide may be methylated to form 5-methylcytosine"
ttgaaatcacacctatactaacagcttgcacatatgggtacttaataaacaactgttgaacgaataaatggctgaatgcacaaataaatgcataaaggaaggcacaggcagataaatagatt

SEQ ID NO: 10404 - DNA, 122 bp, Homo sapiens
  misc_feature (61)..(62): /note="This region represents a CpG dinucleotide"
  misc_feature (61)..(61): /note="Nucleotide may be methylated to form 5-methylcytosine"
tcattgtggttttactataaaatattataaagcaaaagaaacaccaactacctacctaagcgatgaaatccaaaggtgaatcttttggttggtgattttgatgatagccacaaagcaagcag

SEQ ID NO: 10405 - DNA, 122 bp, Homo sapiens
  misc_feature (61)..(62): /note="This region represents a CpG dinucleotide"
  misc_feature (61)..(61): /note="Nucleotide may be methylated to form 5-methylcytosine"
cgaaacttagatgcgtacaatccttcattccttgaggcaggattgtgtggtggttaaaagcggggactctggatcccgcctaacctgattgggttgacatcccagttctgccacttactagc

SEQ ID NO: 10406 - DNA, 122 bp, Homo sapiens
  misc_feature (61)..(62): /note="This region represents a CpG dinucleotide"
  misc_feature (61)..(61): /note="Nucleotide may be methylated to form 5-methylcytosine"
tccagcccttatcaaaattaggctgacttgagcctcttacccagcaagggtgtgttccttcgtggaacagaaccagctggctgctgcttaggcgatctttgaccagagctttccctgagagt

SEQ ID NO: 10407 - DNA, 122 bp, Homo sapiens
  misc_feature (61)..(62): /note="This region represents a CpG dinucleotide"
  misc_feature (61)..(61): /note="Nucleotide may be methylated to form 5-methylcytosine"
aagctgcagaacctctgtgcattcaacagtcacttcctgcgtttttgtgccattgtcacacgttgtgcttcagagacgccagaagacctgggcaaagacgtgagaactgcagccatcagctg

SEQ ID NO: 10408 - DNA, 122 bp, Homo sapiens
  misc_feature (61)..(62): /note="This region represents a CpG dinucleotide"
  misc_feature (61)..(61): /note="Nucleotide may be methylated to form 5-methylcytosine"
attgaaacctagctcttgctgtgttcctggaaaacattatttcattcttccgagcttcagcgttttcatctgtaccaaataaggagtaatatatatatcacaaagatactgcacatgttaaa

SEQ ID NO: 10409 - DNA, 122 bp, Homo sapiens
  misc_feature (61)..(62): /note="This region represents a CpG dinucleotide"
  misc_feature (61)..(61): /note="Nucleotide may be methylated to form 5-methylcytosine"
acaaggagtagtcagccagctcatagctgtgacttttctgttccgagggaaagcagcttgcgagctgcagtgtccaggagcagagaaaagcacagtcactgaaccctatgaaattttaacaa

SEQ ID NO: 10410 - DNA, 122 bp, Homo sapiens
  misc_feature (61)..(62): /note="This region represents a CpG dinucleotide"
  misc_feature (61)..(61): /note="Nucleotide may be methylated to form 5-methylcytosine"
agaatttctacaagatgaatttgagttgaaccttcagtctttccacgaagaaggtctgctcgccaccctcaaagccatctgcctttctgtctcagtttattcacagatcctttcagagacca

SEQ ID NO: 10411 - DNA, 122 bp, Homo sapiens
  misc_feature (61)..(62): /note="This region represents a CpG dinucleotide"
  misc_feature (61)..(61): /note="Nucleotide may be methylated to form 5-methylcytosine"
aagacattagtatgacggggttcaatactcattcattgttacaatccatgtccctagaagcgcatgtttgccagttcccatccctgacacttaatagccagtgacactgaacaagtcactca

SEQ ID NO: 10412 - DNA, 122 bp, Homo sapiens
  misc_feature (61)..(62): /note="This region represents a CpG dinucleotide"
  misc_feature (61)..(61): /note="Nucleotide may be methylated to form 5-methylcytosine"
tcctcctgtccctcaccctgctcagatcacactggccctgaacgctggttcccaatcacacgtcatatacttggcttgcaacagttttgttgactgagtgactgaatgcacagaagaattaa

SEQ ID NO: 10413 - DNA, 122 bp, Homo sapiens
  misc_feature (61)..(62): /note="This region represents a CpG dinucleotide"
  misc_feature (61)..(61): /note="Nucleotide may be methylated to form 5-methylcytosine"
cgcccatgcagaccaacataactcccatgtaagataaagtgcggaaaggagaccattacacgtgataaagcatgactccacaacagctggatgcaagccctgggcaagttccttaatcttct

SEQ ID NO: 10414 - DNA, 122 bp, Homo sapiens
  misc_feature (61)..(62): /note="This region represents a CpG dinucleotide"
  misc_feature (61)..(61): /note="Nucleotide may be methylated to form 5-methylcytosine"
gacaggaaatataacagcacacttcttgacactgtgataaacaatactgttttgagtccccgtgtaaacactattcattgatttacaaagttacagacaaagatgatggaattacaattaga

SEQ ID NO: 10415 - DNA, 122 bp, Homo sapiens
  misc_feature (61)..(62): /note="This region represents a CpG dinucleotide"
  misc_feature (61)..(61): /note="Nucleotide may be methylated to form 5-methylcytosine"
ggattctttgaaggtggattttccacctttaattctcctttcaagctgtgaaactcaacacggcctcgcctaggattcctaacttgtctagccagtaggcagagagcttttctctgatgaaa

SEQ ID NO: 10416 - DNA, 122 bp, Homo sapiens
  misc_feature (61)..(62): /note="This region represents a CpG dinucleotide"
  misc_feature (61)..(61): /note="Nucleotide may be methylated to form 5-methylcytosine"
aacttcctattgagattctgaagacctacctgggattagccaaccctgggcaggggcctgcgtcacataacatagacatggctaccaagtctcaatacagaaaagtgagatcacataggtta

SEQ ID NO: 10417 - DNA, 122 bp, Homo sapiens
  misc_feature (61)..(62): /note="This region represents a CpG dinucleotide"
  misc_feature (61)..(61): /note="Nucleotide may be methylated to form 5-methylcytosine"
gtgggaccttgggcgagtcgtcaaggctctctgaatattagtttcatcctttaaaaacctcggattatcacacctacttgataggctgacgtgagtgccacatgaggtcattcccacatagg

SEQ ID NO: 10418 - DNA, 122 bp, Homo sapiens
  misc_feature (61)..(62): /note="This region represents a CpG dinucleotide"
  misc_feature (61)..(61): /note="Nucleotide may be methylated to form 5-methylcytosine"
tcacactcaatgagtcttgacttgtactctctggtttggatctctctagctcttccctcccgccaactaccgcccccagcaaactgctgatccttccctgccatcaatttcccccacttggt

SEQ ID NO: 10419 - DNA, 122 bp, Homo sapiens
  misc_feature (61)..(62): /note="This region represents a CpG dinucleotide"
  misc_feature (61)..(61): /note="Nucleotide may be methylated to form 5-methylcytosine"
gtaataatacctacaactaatacctaagtcacgggattactataaggcttaaagaagtaacgtacagcacaggccatgttgcctgacacaaggaaaagtgtcgagttctgtcactttcaaga

SEQ ID NO: 10420 - DNA, 122 bp, Homo sapiens
  misc_feature (61)..(62): /note="This region represents a CpG dinucleotide"
  misc_feature (61)..(61): /note="Nucleotide may be methylated to form 5-methylcytosine"
aacagagtcctccatcgctgaagagacttaaccaaggtcaccagcctgtcctcttccactcgcacttacacagtgcatgtaaggagtccaggagctttttatggaactaactaatgaaggaa

SEQ ID NO: 10421 - DNA, 122 bp, Homo sapiens
  misc_feature (61)..(62): /note="This region represents a CpG dinucleotide"
  misc_feature (61)..(61): /note="Nucleotide may be methylated to form 5-methylcytosine"
taaagtgctgcctaatagattttcaagctcagatttgcttcccgctcccatataatacagcggatagtaacgagaaaacacctaatttctagacatgctctaaacctaattatgagtcagca

SEQ ID NO: 10422 - DNA, 122 bp, Homo sapiens
  misc_feature (61)..(62): /note="This region represents a CpG dinucleotide"
  misc_feature (61)..(61): /note="Nucleotide may be methylated to form 5-methylcytosine"
tggttctacctgcctttcaagtcgtgcctcagcgaatgcatccccttcccttaggtgggacgcgatttgtgaggtctctgacctcctttccttcccatctcgagcgctttctccactttgca

SEQ ID NO: 10423 - DNA, 122 bp, Homo sapiens
  misc_feature (61)..(62): /note="This region represents a CpG dinucleotide"
  misc_feature (61)..(61): /note="Nucleotide may be methylated to form 5-methylcytosine"
tatatgcatgagccactgtgcccagccctcaatcctttgaattgtatgaaagttgagtcacgctgctcagcagcataatggaaaagaaataattctaactttggcatgaagacctaaagtac

SEQ ID NO: 10424 - DNA, 122 bp, Homo sapiens
  misc_feature (61)..(62): /note="This region represents a CpG dinucleotide"
  misc_feature (61)..(61): /note="Nucleotide may be methylated to form 5-methylcytosine"
attttattttaccctttaggggaagtcatgatcagtatttttatctggaaatggcttctgcgaaatatgccactaggattattatgaatgggtctgttataaatggagttcttgatcaacat

SEQ ID NO: 10425 - DNA, 122 bp, Homo sapiens
  misc_feature (61)..(62): /note="This region represents a CpG dinucleotide"
  misc_feature (61)..(61): /note="Nucleotide may be methylated to form 5-methylcytosine"
cagtctgggattatcttggagagctgcacgatccagttgttgatcttgtctcggcggcgacgctccactgtggggcaaagtggaggacaaggtgactcagtgaaaactcgccacaagtccca

SEQ ID NO: 10426 - DNA, 122 bp, Homo sapiens
  misc_feature (61)..(62): /note="This region represents a CpG dinucleotide"
  misc_feature (61)..(61): /note="Nucleotide may be methylated to form 5-methylcytosine"
tgtcttccatgaaagggttaaccttaggaagcctgtaaaggcagcactgcttcccttctgcgttcaagggctgataggctgctgggctaaccatattaggagtgtgtgaagatttagctctg

SEQ ID NO: 10427 - DNA, 122 bp, Homo sapiens
  misc_feature (61)..(62): /note="This region represents a CpG dinucleotide"
  misc_feature (61)..(61): /note="Nucleotide may be methylated to form 5-methylcytosine"
ctaatacaaagacttggttctgttcctcctcagtgaagatccccttttccttctcctcctcgtctttacagtatccagtgcagtggtttcaggacaataaatgctacttactgaagaggaag

SEQ ID NO: 10428 - DNA, 122 bp, Homo sapiens
  misc_feature (61)..(62): /note="This region represents a CpG dinucleotide"
  misc_feature (61)..(61): /note="Nucleotide may be methylated to form 5-methylcytosine"
ggtttggcatacgttattgcatttagtccacaaaatagatatcatcaatattgtcatccacgctacaagggaggttaaagaatccaatacacaattgtttagagcctgggccactccaattc

SEQ ID NO: 10429 - DNA, 122 bp, Homo sapiens
  misc_feature (61)..(62): /note="This region represents a CpG dinucleotide"
  misc_feature (61)..(61): /note="Nucleotide may be methylated to form 5-methylcytosine"
cctccaaaaaagacaaaatcttaagctgcaccaagcaaaacaggatgtgtgttcattctacgtgtttagtgctatgagtaatgtagtaggtcctcaataaatacatgttccctttcccttcc

SEQ ID NO: 10430 - DNA, 122 bp, Homo sapiens
  misc_feature (61)..(62): /note="This region represents a CpG dinucleotide"
  misc_feature (61)..(61): /note="Nucleotide may be methylated to form 5-methylcytosine"
ttcaagaacattcctgtgtgttgagagtggcaggagcagtggagatccccaggcctgaaacgtgatgttgatggggaccacagaacagagtagccgggagagtgcacagagcataaccagca

SEQ ID NO: 10431 - DNA, 122 bp, Homo sapiens
  misc_feature (61)..(62): /note="This region represents a CpG dinucleotide"
  misc_feature (61)..(61): /note="Nucleotide may be methylated to form 5-methylcytosine"
ggttatataaagcctattgctgtgacctgcattgctttgaggctgtgcctcactgtcttgcgtcctctgtcacaatatgtcatcagttcagacattcacacacacacacccccgggtctctg

SEQ ID NO: 10432 - DNA, 122 bp, Homo sapiens
  misc_feature (61)..(62): /note="This region represents a CpG dinucleotide"
  misc_feature (61)..(61): /note="Nucleotide may be methylated to form 5-methylcytosine"
caaggattcaggtttgtagctcaatggggaagttggggctgaagataacgaccttaagagcgatcagcacagaaatatgagctgagcctataggcatgggtgggatcattaaggaaacatct

SEQ ID NO: 10433 - DNA, 122 bp, Homo sapiens
  misc_feature (61)..(62): /note="This region represents a CpG dinucleotide"
  misc_feature (61)..(61): /note="Nucleotide may be methylated to form 5-methylcytosine"
ctttgctgctaattcaggaggccaggctttgattagctacagagtggcccttgcagcaggcgctggcagggtggaagacctggcagtgcctgatgctgcaggaatggccagacactgaccca

SEQ ID NO: 10434 - DNA, 122 bp, Homo sapiens
  misc_feature (61)..(62): /note="This region represents a CpG dinucleotide"
  misc_feature (61)..(61): /note="Nucleotide may be methylated to form 5-methylcytosine"
accccatcccaatctgatttttgagacgtgcattttcaggtagtcctaaactgtgaacagcgagctttgtgtgttatctagtgggggtggggatgaaaggggaggagactcccactgcccgt

SEQ ID NO: 10435 - DNA, 122 bp, Homo sapiens
  misc_feature (61)..(62): /note="This region represents a CpG dinucleotide"
  misc_feature (61)..(61): /note="Nucleotide may be methylated to form 5-methylcytosine"
ggtgggggccccaggacggcatctgtgctcagtgcgaacgctgagcttccttttatggtgcgtgcacgcctgcgcgtgtgtggggtgtggtggtggtggtggtggtgcagggcaggccttcc

SEQ ID NO: 10436 - DNA, 122 bp, Homo sapiens
  misc_feature (61)..(62): /note="This region represents a CpG dinucleotide"
  misc_feature (61)..(61): /note="Nucleotide may be methylated to form 5-methylcytosine"
ggattaaaaacgaaccaacagttataatgattaacattacaacattaacattattattaacggtatttggacaatatgggtatgatagattgcaaaaatggctgtgattgttcatgcccctg

SEQ ID NO: 10437 - DNA, 122 bp, Homo sapiens
  misc_feature (61)..(62): /note="This region represents a CpG dinucleotide"
  misc_feature (61)..(61): /note="Nucleotide may be methylated to form 5-methylcytosine"
gggagctaaactaggtcacagtagctctcacctgtcatctctattgctcaatggtctattcgttcttcaacgacaatctccagctacgaccaactcatatatctcccatgacaaaacttcct

SEQ ID NO: 10438 - DNA, 122 bp, Homo sapiens
  misc_feature (61)..(62): /note="This region represents a CpG dinucleotide"
  misc_feature (61)..(61): /note="Nucleotide may be methylated to form 5-methylcytosine"
cccctagggtgtgtccttgctaacatgtgcagagctgttgctgccacatctgtgtgcaaccggcagggacggcaagagagaaaggccagggtggctaacttccttttaagcatgtggggctg

SEQ ID NO: 10439 - DNA, 122 bp, Homo sapiens
  misc_feature (61)..(62): /note="This region represents a CpG dinucleotide"
  misc_feature (61)..(61): /note="Nucleotide may be methylated to form 5-methylcytosine"
ctttagaggctgctgcccctggattcaatgattatcattttcatcacagcatttactgagcgtttatgacatacctggaaatatctcaagacccagcctcttcacttactagctatgtaacc

SEQ ID NO: 10440 - DNA, 122 bp, Homo sapiens
  misc_feature (61)..(62): /note="This region represents a CpG dinucleotide"
  misc_feature (61)..(61): /note="Nucleotide may be methylated to form 5-methylcytosine"
ctgaatctaatacccatctgataatgcaacttagttcagtgcctcctttagtgcttaaaacgtgttgtcttttctgcttaattaatctgccttgatcacttctccttattctcattgttcag

SEQ ID NO: 10441 - DNA, 122 bp, Homo sapiens
  misc_feature (61)..(62): /note="This region represents a CpG dinucleotide"
  misc_feature (61)..(61): /note="Nucleotide may be methylated to form 5-methylcytosine"
tgcagttttgaaaactgaaatctctggacaatttcaactagtcataacttggaaccacaccgaccatgggaagtccttgtcaaccggcacagatcaaaatgtcactccttgactctcaaagc

SEQ ID NO: 10442 - DNA, 122 bp, Homo sapiens
  misc_feature (61)..(62): /note="This region represents a CpG dinucleotide"
  misc_feature (61)..(61): /note="Nucleotide may be methylated to form 5-methylcytosine"
cacacacctgctcagttcatacctagctggtgtcagtttacatccttaaattcatcctgccgctcctccccgctttttatttattcatgcccttgccttgtcccagaaagcgtttctataaa

SEQ ID NO: 10443 - DNA, 122 bp, Homo sapiens
  misc_feature (61)..(62): /note="This region represents a CpG dinucleotide"
  misc_feature (61)..(61): /note="Nucleotide may be methylated to form 5-methylcytosine"
ttctctctgtactgctggtcacactcacaggcctgtaaaacaagtgtattagaaattccccgccccacacagagtggctggagcctggggccccagggcatcctgggagcgacttcttgttc

SEQ ID NO: 10444 - DNA, 122 bp, Homo sapiens
  misc_feature (61)..(62): /note="This region represents a CpG dinucleotide"
  misc_feature (61)..(61): /note="Nucleotide may be methylated to form 5-methylcytosine"
tgtacacaaaagagccatccttgccctaaatgtctgtgtgatgagctgtaagaccctacacggcactttaggaaggggcactgattatctgaggctaccaccacccatctccccagagtacc

SEQ ID NO: 10445 - DNA, 122 bp, Homo sapiens
  misc_feature (61)..(62): /note="This region represents a CpG dinucleotide"
  misc_feature (61)..(61): /note="Nucleotide may be methylated to form 5-methylcytosine"
gacaaacttgtctgcagcactcaggaggctcagggaattaaccaggagggaacagtagcccggttaaaatagtttctgtacttccagaggaagcaattaaatctcagcgtctaccatggcaa

SEQ ID NO: 10446 - DNA, 122 bp, Homo sapiens
  misc_feature (61)..(62): /note="This region represents a CpG dinucleotide"
  misc_feature (61)..(61): /note="Nucleotide may be methylated to form 5-methylcytosine"
attttggaggaaatggattaaagcaactaggaaagaggttagaggactcaagagatccaacggctctggcctgtgagcagacgggccattcataactttgtagtttctcattcagagcagcc

SEQ ID NO: 10447 - DNA, 122 bp, Homo sapiens
  misc_feature (61)..(62): /note="This region represents a CpG dinucleotide"
  misc_feature (61)..(61): /note="Nucleotide may be methylated to form 5-methylcytosine"
cttatcttttatcagtaaataaacatgagttcttgatattctttttcctgtggagcccctcgtttggacaatactatagtctcattttaaggtacaaaattcagtgcctgcttagaggatta

SEQ ID NO: 10448 - DNA, 122 bp, Homo sapiens
  misc_feature (61)..(62): /note="This region represents a CpG dinucleotide"
  misc_feature (61)..(61): /note="Nucleotide may be methylated to form 5-methylcytosine"
gtccactaagttctctgctgcatatatgcacagactaggatcaatcctggatatttggaccgtttatgaagctccctatggttgtcttacctcccagaacttgccccaaacaggtttggtga

SEQ ID NO: 10449 - DNA, 122 bp, Homo sapiens
  misc_feature (61)..(62): /note="This region represents a CpG dinucleotide"
  misc_feature (61)..(61): /note="Nucleotide may be methylated to form 5-methylcytosine"
catgtagaaggagtcagcactacttcatgaaatgtctatttcagttacataagtactgtacgtgtatgtgagcatattggttgtgatgtaaaattaacttcacatgatagatcagtcaaaag

SEQ ID NO: 10450 - DNA, 122 bp, Homo sapiens
  misc_feature (61)..(62): /note="This region represents a CpG dinucleotide"
  misc_feature (61)..(61): /note="Nucleotide may be methylated to form 5-methylcytosine"
caactggaattcatttttatctccttcgaaacgtctaactgtggcttgggcatatagacgcgtaggaaacaaaagaaggattgaccgctgaatggtcagatgccgttgaatacaactgagta

SEQ ID NO: 10451 - DNA, 122 bp, Homo sapiens
  misc_feature (61)..(62): /note="This region represents a CpG dinucleotide"
  misc_feature (61)..(61): /note="Nucleotide may be methylated to form 5-methylcytosine"
tgcaacacagacgggaacagggcacagccctgtgctggagacttcctacttgggtgctatcgtttggaaatctgtcctcccaaatctcatgctgaaatgtaatccccagtgttggaggtggg

SEQ ID NO: 10452 - DNA, 122 bp, Homo sapiens
  misc_feature (61)..(62): /note="This region represents a CpG dinucleotide"
  misc_feature (61)..(61): /note="Nucleotide may be methylated to form 5-methylcytosine"
aggccgaagggagaaaaccaaatgttttctcttgacggatggccgggactccttggccctcgcctggctttccacccctcctggcttcccgcaccagccgggcccgcagctcacctgccggc

SEQ ID NO: 10453 - DNA, 122 bp, Homo sapiens
  misc_feature (61)..(62): /note="This region represents a CpG dinucleotide"
  misc_feature (61)..(61): /note="Nucleotide may be methylated to form 5-methylcytosine"
ttgaatgaatcacctaagaataaagatggttctggtggaaagagttgatttcctgtgtggcgagagaagactacacgtaacttggtggttagtcatcttaaaataaaatgtctgggccagac

SEQ ID NO: 10454 - DNA, 122 bp, Homo sapiens
  misc_feature (61)..(62): /note="This region represents a CpG dinucleotide"
  misc_feature (61)..(61): /note="Nucleotide may be methylated to form 5-methylcytosine"
ctcatcatgagaaaatgctgcacccaaactgagggatgctcaccacagtcctggccagtgcgtctcaagtgtccaggtcttgaaagacagggaggctcagaatttcctgcaggcaggtggcc

SEQ ID NO: 10455 - DNA, 122 bp, Homo sapiens
  misc_feature (61)..(62): /note="This region represents a CpG dinucleotide"
  misc_feature (61)..(61): /note="Nucleotide may be methylated to form 5-methylcytosine"
cttacagaattaaaagacaaggtgtgactctcctggtgtctgttgtgtattaacagggaccgtctgacaaatggtaacttaatccagaagaagagtaaatctaggttgttctgtgcaggctt

SEQ ID NO: 10456 - DNA, 122 bp, Homo sapiens
  misc_feature (61)..(62): /note="This region represents a CpG dinucleotide"
  misc_feature (61)..(61): /note="Nucleotide may be methylated to form 5-methylcytosine"
tacaggactgacaggtaactttcagaaacaattccagggttcagagtatgcacacctgtacgtatcagcagaatgaataatgagagagcaatgaacaatattagataaaagctaggagaact

SEQ ID NO: 10457 - DNA, 122 bp, Homo sapiens
  misc_feature (61)..(62): /note="This region represents a CpG dinucleotide"
  misc_feature (61)..(61): /note="Nucleotide may be methylated to form 5-methylcytosine"
gctggtgaggaccctccacagcccgggacccgcctgagtccttacctctgcgtgagggtccgcagctcgcgccttccgctccaccagaaacaagttcaagcgcagcaggcgcaaagcgaatg

SEQ ID NO: 10458 - DNA, 122 bp, Homo sapiens
  misc_feature (61)..(62): /note="This region represents a CpG dinucleotide"
  misc_feature (61)..(61): /note="Nucleotide may be methylated to form 5-methylcytosine"
ctggagacgggggaagtagagggtgcccgcggagatctgagcgcagagaccctaggagggcgggttccagatcccataaatgagataattaacgggatttacagcactcctaggcggggctc

SEQ ID NO: 10459 - DNA, 122 bp, Homo sapiens
  misc_feature (61)..(62): /note="This region represents a CpG dinucleotide"
  misc_feature (61)..(61): /note="Nucleotide may be methylated to form 5-methylcytosine"
ttccccgcggccgggcgtctaggactcagcagccacgccatcattgccacacctccacctcgagcagccctgccctgtactctccaagccacccacagcagcaaagggctgaggagcgtccc

SEQ ID NO: 10460 - DNA, 122 bp, Homo sapiens
  misc_feature (61)..(62): /note="This region represents a CpG dinucleotide"
  misc_feature (61)..(61): /note="Nucleotide may be methylated to form 5-methylcytosine"
agaactcttgaagataaaggcccactgaaagtgttggtggtctcagcccattgaactggacgagaactggcccaggttgctggaaacaagtgaagcaaccattacaatgtgccttgtgttat

SEQ ID NO: 10461 - DNA, 122 bp, Homo sapiens
  misc_feature (61)..(62): /note="This region represents a CpG dinucleotide"
  misc_feature (61)..(61): /note="Nucleotide may be methylated to form 5-methylcytosine"
gccacgcgggggccaacctcacagacctgccaacaggccctgacaacacttctacctgctcgtctgcaccctggctgtcagtagagagatttagtgatctcactatgggaaaaaacatgaga

SEQ ID NO: 10462 - DNA, 122 bp, Homo sapiens
  misc_feature (61)..(62): /note="This region represents a CpG dinucleotide"
  misc_feature (61)..(61): /note="Nucleotide may be methylated to form 5-methylcytosine"
gatcttgcagttccatcccccatcaacattcatgggtgaaggctgcatgtgtgtgtgacacgataggtaagaattagctgctttccaaattaagacagagtgagtttcacttctgaataata

SEQ ID NO: 10463 - DNA, 122 bp, Homo sapiens
  misc_feature (61)..(62): /note="This region represents a CpG dinucleotide"
  misc_feature (61)..(61): /note="Nucleotide may be methylated to form 5-methylcytosine"
cagatctgggattgaatgactttcttgactgtgtattcactcattcagcaaatatgtattcggtaactgtggtgtatcaggttatatgatttgtgctagggataccaaatatgtcagcatta

SEQ ID NO: 10464 - DNA, 122 bp, Homo sapiens
  misc_feature (61)..(62): /note="This region represents a CpG dinucleotide"
  misc_feature (61)..(61): /note="Nucleotide may be methylated to form 5-methylcytosine"
tagatcttaggttgaaagggctttctgccaatttccagcagaatttaatagacttgcacccgtagttaatggtacatctggacaatcagaagcctctgctgtgttccttctgggcaaaaagc

SEQ ID NO: 10465 - DNA, 122 bp, Homo sapiens
  misc_feature (61)..(62): /note="This region represents a CpG dinucleotide"
  misc_feature (61)..(61): /note="Nucleotide may be methylated to form 5-methylcytosine"
aaatgcgtgatgcttttgatgtttcaacagaatattgtttctaagattatgtatcttgcacgtttggcacttgagggggtgctcatcttttgattccgctattgaggtagaggcgggacggg

SEQ ID NO: 10466 - DNA, 122 bp, Homo sapiens
  misc_feature (61)..(62): /note="This region represents a CpG dinucleotide"
  misc_feature (61)..(61): /note="Nucleotide may be methylated to form 5-methylcytosine"
ctccgcgctcagcgggaggaggcgctcggtcccgcttcttacaaccagcggcgctcacggcgggcccggggatcagcatcccgggagcttctcaggaatgcagattcccaggccctcactgc

SEQ ID NO: 10467 - DNA, 122 bp, Homo sapiens
  misc_feature (61)..(62): /note="This region represents a CpG dinucleotide"
  misc_feature (61)..(61): /note="Nucleotide may be methylated to form 5-methylcytosine"
gaaagcaggtgaggtttactgtatagatgggtgtgcccctaccccacactgaggcttcctcgtctgagcaaactgaggcccagagaggggaaggaagcaggactaccatggtgactcaaaga

SEQ ID NO: 10468 - DNA, 122 bp, Homo sapiens
  misc_feature (61)..(62): /note="This region represents a CpG dinucleotide"
  misc_feature (61)..(61): /note="Nucleotide may be methylated to form 5-methylcytosine"
ggggagaggtataaggtgtgcggctaacaagtttatttttctagtcgcagaatttggactcgtgaaagattttagtctaatgcagtttgttcacaaatataaggaggggggcctcagactag

SEQ ID NO: 10469 - DNA, 122 bp, Homo sapiens
  misc_feature (61)..(62): /note="This region represents a CpG dinucleotide"
  misc_feature (61)..(61): /note="Nucleotide may be methylated to form 5-methylcytosine"
agcttataaatcgtcttcatacagtggggacgtttatgtttgtgagtatatgtgcatatacgcacacatttgtttgttgggagagtgagaattatcagaataccagaatattctggacattc

SEQ ID NO: 10470 - DNA, 122 bp, Homo sapiens
  misc_feature (61)..(62): /note="This region represents a CpG dinucleotide"
  misc_feature (61)..(61): /note="Nucleotide may be methylated to form 5-methylcytosine"
tcccagtgactgagttttgcaagccagtaacactaaagaagaaacatttatattctctttcgcagtagagttatgttgaataaaaggcctcaatgctaacagagaaaatatgtgctttctac

SEQ ID NO: 10471 - DNA, 122 bp, Homo sapiens
  misc_feature (61)..(62): /note="This region represents a CpG dinucleotide"
  misc_feature (61)..(61): /note="Nucleotide may be methylated to form 5-methylcytosine"
agcaagctcatgaaaaatacaaaggaacaagttattagattaatgggttgaatgagaatgcgatcagcaaaatctggcatgccggaagttctacaggacaaatgaaccaatgtcttcaacaa

SEQ ID NO: 10472 - DNA, 122 bp, Homo sapiens
  misc_feature (61)..(62): /note="This region represents a CpG dinucleotide"
  misc_feature (61)..(61): /note="Nucleotide may be methylated to form 5-methylcytosine"
ccctcttgtcctaaccatcatccttcctccccaacattctccgatccaggtcctctgggacggggcacttaaggagacaaatgggtctcctgctgttgaaaaacacccagttttcaaactca

SEQ ID NO: 10473 - DNA, 122 bp, Homo sapiens
  misc_feature (61)..(62): /note="This region represents a CpG dinucleotide"
  misc_feature (61)..(61): /note="Nucleotide may be methylated to form 5-methylcytosine"
aagtcaattatgctccaattttcaaagccctgcaagcacccaaccagattcctttccttacgcagatcacaggttcgtactgcaactcactactgtctcagaactaaagctttcctgtttct

SEQ ID NO: 10474 - DNA, 122 bp, Homo sapiens
  misc_feature (61)..(62): /note="This region represents a CpG dinucleotide"
  misc_feature (61)..(61): /note="Nucleotide may be methylated to form 5-methylcytosine"
gtgggactcaggcaaactagaggccaaagtggttgcatgcagaagtccctcccacatgaacgttttccagaattgctcctggggtttgaatattctgcttggaacacacttctccagagatt

SEQ ID NO: 10475 - DNA, 122 bp, Homo sapiens
  misc_feature (61)..(62): /note="This region represents a CpG dinucleotide"
  misc_feature (61)..(61): /note="Nucleotide may be methylated to form 5-methylcytosine"
tgctgcctaccacaccctgtaccggtgggtcttttgcagcatttgtaaatattccctgagcgccaactctgggccacaggccaggtacacctgtgaagccctagttcctatatgatgcgggg

SEQ ID NO: 10476 - DNA, 122 bp, Homo sapiens
  misc_feature (61)..(62): /note="This region represents a CpG dinucleotide"
  misc_feature (61)..(61): /note="Nucleotide may be methylated to form 5-methylcytosine"
gtaggagaatgtggtagcttgagctagagaagttgcctctttccggcagtggtcctcacccggtgagtcacagacactctgtgacactctggtcacaggcagctgcaatacatgaaaggacc

SEQ ID NO: 10477 - DNA, 122 bp, Homo sapiens
  misc_feature (61)..(62): /note="This region represents a CpG dinucleotide"
  misc_feature (61)..(61): /note="Nucleotide may be methylated to form 5-methylcytosine"
aaatctacctggccaaatttcttacaggctctctcaggacatctcctagagcaaagctcacggtgtaaagtactattgtaagacaataagggccaggtgctatagctcatgcctgtaatccc

SEQ ID NO: 10478 - DNA, 122 bp, Homo sapiens
  misc_feature (61)..(62): /note="This region represents a CpG dinucleotide"
  misc_feature (61)..(61): /note="Nucleotide may be methylated to form 5-methylcytosine"
gacacagggaaggaagccacaggacaagagcttggcaatgccgtgtcctcagggctccggcgcctacccatggatgtagtgctcgccctcccaaggccggtgtcctggtgacgatgccacta

SEQ ID NO: 10479 - DNA, 122 bp, Homo sapiens
  misc_feature (61)..(62): /note="This region represents a CpG dinucleotide"
  misc_feature (61)..(61): /note="Nucleotide may be methylated to form 5-methylcytosine"
ttggggttttcagagcagtttaaagaaaacagtctgtcatctgaagctgaaaagccagtgcggtaatatctgattgtcactgggtattgtctggcctaggaatgaaagtgactgggcagaaa

SEQ ID NO: 10480 - DNA, 122 bp, Homo sapiens
  misc_feature (61)..(62): /note="This region represents a CpG dinucleotide"
  misc_feature (61)..(61): /note="Nucleotide may be methylated to form 5-methylcytosine"
ttgttgattggctgggggagggaaatgaaatcatcaggatgtggaaactgcattcgtgggcgagtcagcttcttgggtgcttctgaccatctgagtcaggagttgcattggtatgcagtacc

SEQ ID NO: 10481 - DNA, 122 bp, Homo sapiens
  misc_feature (61)..(62): /note="This region represents a CpG dinucleotide"
  misc_feature (61)..(61): /note="Nucleotide may be methylated to form 5-methylcytosine"
tggcctcggccctctgtggacgtgggcggatgggtggccctggactggtgaaggactggccgggagttctgtagggcccccacctcctgccagcgcccagcccacagtcgaccactgcctgc

SEQ ID NO: 10482 - DNA, 122 bp, Homo sapiens
  misc_feature (61)..(62): /note="This region represents a CpG dinucleotide"
  misc_feature (61)..(61): /note="Nucleotide may be methylated to form 5-methylcytosine"
ggcaaatatttgcttttgttatcaaaggtactatgcttgctgggccctggaacaccagtgcgtggtcatgggaatcagagacttcaatgggtgcatatttctaaaggcttttgccctcggag

SEQ ID NO: 10483 - DNA, 122 bp, Homo sapiens
  misc_feature (61)..(62): /note="This region represents a CpG dinucleotide"
  misc_feature (61)..(61): /note="Nucleotide may be methylated to form 5-methylcytosine"
tgaaggtcatttgaagctgataacagatgactcagcacaacacgaagaggcccaggcttgcgaatgaatgagtaagtgaacctgaatccctgaacacttgaggtagccacattttcacacag

SEQ ID NO: 10484 - DNA, 122 bp, Homo sapiens
  misc_feature (61)..(62): /note="This region represents a CpG dinucleotide"
  misc_feature (61)..(61): /note="Nucleotide may be methylated to form 5-methylcytosine"
taagaaggatgagagggtgcagagaatgaatctttgattttgcaatggcccagagtcatacggtataaaactacagctgtgcaatgatctggaggtattttaaaggttacaaatagaattta

SEQ ID NO: 10485 - DNA, 122 bp, Homo sapiens
  misc_feature (61)..(62): /note="This region represents a CpG dinucleotide"
  misc_feature (61)..(61): /note="Nucleotide may be methylated to form 5-methylcytosine"
cttttcttgatgaatttgagggcctgtttgaccttggagaccttcagtaactccatgccacgccactcgttaggggtgaagccacacacctctgggatcatgtcccacacaaatttagtgag

SEQ ID NO: 10486 - DNA, 122 bp, Homo sapiens
  misc_feature (61)..(62): /note="This region represents a CpG dinucleotide"
  misc_feature (61)..(61): /note="Nucleotide may be methylated to form 5-methylcytosine"
gtttcatatggagctggagagaaaacaacaggaagcagagacaggagtggacaggatgcacgtcgggtactcaaactcatcagatttgacagaagtgcaagaatgtgagagcaagggggttg

SEQ ID NO: 10487 - DNA, 122 bp, Homo sapiens
  misc_feature (61)..(62): /note="This region represents a CpG dinucleotide"
  misc_feature (61)..(61): /note="Nucleotide may be methylated to form 5-methylcytosine"
aagaactctaccaactccaaaaggaaacaatgcccagttctgctccgtcaagggcccacccgggctccttccaacctggagaaatctttactaacatggggcccagggcacacaccacactg

SEQ ID NO: 10488 - DNA, 122 bp, Homo sapiens
  misc_feature (61)..(62): /note="This region represents a CpG dinucleotide"
  misc_feature (61)..(61): /note="Nucleotide may be methylated to form 5-methylcytosine"
tcattttcaccataatggctcagcgtttgttcctctaacaacgtgcagttaacagctgtgcgctggctcttacattcaaagccaaaaagcaagttcttcacattaaagaaatcgttaaagac

SEQ ID NO: 10489 - DNA, 122 bp, Homo sapiens
  misc_feature (61)..(62): /note="This region represents a CpG dinucleotide"
  misc_feature (61)..(61): /note="Nucleotide may be methylated to form 5-methylcytosine"
aatgttatattcagctcactgccttttttaaaaatactcatgcaaatgtcattaatcatacgtgtggtgttgttgttcacccaaagtattgtgcaagcatacatcaactctggataagactg

SEQ ID NO: 10490 - DNA, 122 bp, Homo sapiens
  misc_feature (61)..(62): /note="This region represents a CpG dinucleotide"
  misc_feature (61)..(61): /note="Nucleotide may be methylated to form 5-methylcytosine"
gagctcaacagggacctaattaactgacagttggtctgattgccaagctgaggggcggggcggggaggggggcggtcagttgctgcttggctcacgtagcaaggagggcaacttttcatttc

SEQ ID NO: 10491 - DNA, 122 bp, Homo sapiens
  misc_feature (61)..(62): /note="This region represents a CpG dinucleotide"
  misc_feature (61)..(61): /note="Nucleotide may be methylated to form 5-methylcytosine"
aggaagaaggaattccacctccagatggtcctcgggctccgccacagcatcagctttcctcggggcctccagccacctgggctcctctatcagattccgggcttaccaagcctctacaatca

SEQ ID NO: 10492 - DNA, 122 bp, Homo sapiens
  misc_feature (61)..(62): /note="This region represents a CpG dinucleotide"
  misc_feature (61)..(61): /note="Nucleotide may be methylated to form 5-methylcytosine"
aaatgaagaggattacataattgttttgaaatgattatttttggctacaaggatcaacaacgagggtgatgtcagtccgacactggataggcagttactgggtagatgtcctcgcagtagct

SEQ ID NO: 10493 - DNA, 122 bp, Homo sapiens
  misc_feature (61)..(62): /note="This region represents a CpG dinucleotide"
  misc_feature (61)..(61): /note="Nucleotide may be methylated to form 5-methylcytosine"
aggtagggacaggggcttgtgcccaatgtggggccactctgcagagaaccacatgagctgcgcccatccaggatgctgccaggagcctgcatccagacaccctcagcggttgtgaaccagcc

SEQ ID NO: 10494 - DNA, 122 bp, Homo sapiens
  misc_feature (61)..(62): /note="This region represents a CpG dinucleotide"
  misc_feature (61)..(61): /note="Nucleotide may be methylated to form 5-methylcytosine"
aggtaaaagagttctggggaagcagcaaggaattgggcagtattctagggttagttactgcgagcaaatgagagggagtaatcccttccaacagcaagcagttttcaagctttagtatgcat

SEQ ID NO: 10495 - DNA, 122 bp, Homo sapiens
  misc_feature (61)..(62): /note="This region represents a CpG dinucleotide"
  misc_feature (61)..(61): /note="Nucleotide may be methylated to form 5-methylcytosine"
tgtcttaccagcagtttggtgtctttgatgacgcagagcaacttggtccactggccgaaccgcttcttccgcagcaggaaggcgcagattttggcgtccttgaccaggtccatggaggcctc

SEQ ID NO: 10496 - DNA, 122 bp, Homo sapiens
  misc_feature (61)..(62): /note="This region represents a CpG dinucleotide"
  misc_feature (61)..(61): /note="Nucleotide may be methylated to form 5-methylcytosine"
acagaatgtacccaaatggctttaatgctaaatggcccagccagaagggtgaggcacctccgcttgtcaggtcagagtgggaaggaacagtgaacaactgctgacattctctcaccgtatgc

SEQ ID NO: 10497 - DNA, 122 bp, Homo sapiens
  misc_feature (61)..(62): /note="This region represents a CpG dinucleotide"
  misc_feature (61)..(61): /note="Nucleotide may be methylated to form 5-methylcytosine"
gtacagagctggaaatccatacatggctgaccaccctgtaagggctgcagacacagtgagcgttcactttgccctggcaactggaactgtctcctccagtcctcaccacaaccgttttacag

SEQ ID NO: 10498 - DNA, 122 bp, Homo sapiens
  misc_feature (61)..(62): /note="This region represents a CpG dinucleotide"
  misc_feature (61)..(61): /note="Nucleotide may be methylated to form 5-methylcytosine"
tttgcgtaaggacactttgatgtttatgcaacaacaaaacagtctcatgacacatctttccggacataaccctgttataaggcaatgcatgactatattacacttaatttgtgagaatggaa

SEQ ID NO: 10499 - DNA, 122 bp, Homo sapiens
  misc_feature (61)..(62): /note="This region represents a CpG dinucleotide"
  misc_feature (61)..(61): /note="Nucleotide may be methylated to form 5-methylcytosine"
tcaccaagacttccttccccaaagcccttctatctctcaccactgttactttcccaccctcggctggcctcatcgccatacacccagactgtgtcaggggctctcactaagtggattcgaga

SEQ ID NO: 10500 - DNA, 122 bp, Homo sapiens
  misc_feature (61)..(62): /note="This region represents a CpG dinucleotide"
  misc_feature (61)..(61): /note="Nucleotide may be methylated to form 5-methylcytosine"
taaaggaaaattgaaccaaagccactgggaagttcctttttcagaggattaacttcgtttcgtttcatacataagcaatgaaggtatgtatagatccatgtcatttctcaggtcgagttaaa

SEQ ID NO: 10501 - DNA, 122 bp, Homo sapiens
  misc_feature (61)..(62): /note="This region represents a CpG dinucleotide"
  misc_feature (61)..(61): /note="Nucleotide may be methylated to form 5-methylcytosine"
cattagttttaaacagcatgccattctgagtagtgtgatgaaatctctcttgccgtcctgcgtatgtcatgaatcatctctttgctcggtgtctccacactgagtctgctacatgcccttta

SEQ ID NO: 10502 - DNA, 122 bp, Homo sapiens
  misc_feature (61)..(62): /note="This region represents a CpG dinucleotide"
  misc_feature (61)..(61): /note="Nucleotide may be methylated to form 5-methylcytosine"
catggttaacccgaacatcctgacttagctcacctccaagggaggggcatgctccctcagcggcaagaccaggaacggggtggacagctacataatgggacagatttactcagtaagaggga

SEQ ID NO: 10503 - DNA, 122 bp, Homo sapiens
  misc_feature (61)..(62): /note="This region represents a CpG dinucleotide"
  misc_feature (61)..(61): /note="Nucleotide may be methylated to form 5-methylcytosine"
aaagcagactgggttcaagtttgcaaggcctagaaggtcatgactaccagagcctggctacgtttctcctttcctcgcgtgactcagctggactgcattcccccagcttctcccacagttaa

SEQ ID NO: 10504 - DNA, 122 bp, Homo sapiens
  misc_feature (61)..(62): /note="This region represents a CpG dinucleotide"
  misc_feature (61)..(61): /note="Nucleotide may be methylated to form 5-methylcytosine"
gtcaaatagattagggttcagctctcacagctgccacttactggttatgaatttgagtcacgtttcttaatcctactgaagtaggctgataatgactccaacaatttgtccacatcctaatc

SEQ ID NO: 10505 - DNA, 122 bp, Homo sapiens
  misc_feature (61)..(62): /note="This region represents a CpG dinucleotide"
  misc_feature (61)..(61): /note="Nucleotide may be methylated to form 5-methylcytosine"
tcattactaacaggacatgattcccagcctctgccatcagttgtttagcaattataataacgacattaagcttccttcaatattctctactaaatgcctgctttcagtaagtcattgctcta

SEQ ID NO: 10506 - DNA, 122 bp, Homo sapiens
  misc_feature (61)..(62): /note="This region represents a CpG dinucleotide"
  misc_feature (61)..(61): /note="Nucleotide may be methylated to form 5-methylcytosine"
aaagcttccctagtcacaagtggccatcaagtactcaagatatacttgttcaagccctggcgctaaatttttgatgttatcttaattgatttaaacttacataaataaccacatgtggctag

SEQ ID NO: 10507 - DNA, 122 bp, Homo sapiens
  misc_feature (61)..(62): /note="This region represents a CpG dinucleotide"
  misc_feature (61)..(61): /note="Nucleotide may be methylated to form 5-methylcytosine"
ctcatatctatttatactcacttctgcttacttgttgcttagtttctgacctcactggctcgtcttgaactttgtttatgcctgtttctgaaaaaagaaaaagtcctgatgactgattccct

SEQ ID NO: 10508 - DNA, 122 bp, Homo sapiens
  misc_feature (61)..(62): /note="This region represents a CpG dinucleotide"
  misc_feature (61)..(61): /note="Nucleotide may be methylated to form 5-methylcytosine"
tgacacaaggaaagaaccattttgcaaaaggaaacaagacaagctgccgtcagctagatacgtttcgattgttcaggaaagtctgtacaggaactttgattggcatcctgcttgtctacctt

SEQ ID NO: 10509 - DNA, 122 bp, Homo sapiens
  misc_feature (61)..(62): /note="This region represents a CpG dinucleotide"
  misc_feature (61)..(61): /note="Nucleotide may be methylated to form 5-methylcytosine"
gagcaataaaataccctgcagataaggtcagacggcaggtgccagtgtgtcctgaaaagccgcaagtctacaagcagccggcaacctgcccggctatgctgtgtgcatccccacagggcgcc

SEQ ID NO: 10510 - DNA, 122 bp, Homo sapiens
  misc_feature (61)..(62): /note="This region represents a CpG dinucleotide"
  misc_feature (61)..(61): /note="Nucleotide may be methylated to form 5-methylcytosine"
gaaagaaagaagaaaggaaaagaaaagaaagaaagatgacagcagggtctaacaagttcacgtgccacctggaggcagtggtagtcatccatgccttctcggtgaggcactgtacgccagag

SEQ ID NO: 10511 - DNA, 122 bp, Homo sapiens
  misc_feature (61)..(62): /note="This region represents a CpG dinucleotide"
  misc_feature (61)..(61): /note="Nucleotide may be methylated to form 5-methylcytosine"
gaaggggcttgaggtgaggctgcaggtgctgagtacttggtcaagaagcttggcctcagccgccccgtccgggagggaggtgggggggtcggccccccgcccggccagccgccccgtccggg

SEQ ID NO: 10512 - DNA, 122 bp, Homo sapiens
  misc_feature (61)..(62): /note="This region represents a CpG dinucleotide"
  misc_feature (61)..(61): /note="Nucleotide may be methylated to form 5-methylcytosine"
ctggggaggtgcattgtagctttgtaaatatctcattccccatcaaactttcagtttactcgttcatttattgctatcagtatgaactcatagtttcctgttttattcaataagctgtgatt

SEQ ID NO: 10513 - DNA, 122 bp, Homo sapiens
  misc_feature (61)..(62): /note="This region represents a CpG dinucleotide"
  misc_feature (61)..(61): /note="Nucleotide may be methylated to form 5-methylcytosine"
tctgtctctggaattttaatcagttgccctaattgccttcaaattattggaagggaaaaacgccagcagagggtcctgacagatcccagctgtctagctgaggacttatcttctcattgttc

SEQ ID NO: 10514 - DNA, 122 bp, Homo sapiens
  misc_feature (61)..(62): /note="This region represents a CpG dinucleotide"
  misc_feature (61)..(61): /note="Nucleotide may be methylated to form 5-methylcytosine"
cttttaaaaattctatccagatattgttttcagctgaaaactcagcctgaggcctgttgtcgttattgaaaaggaggagaaacaaacacgggaaagtgtaaaagaattcaccttcttgctct

SEQ ID NO: 10515 - DNA, 122 bp, Homo sapiens
  misc_feature (61)..(62): /note="This region represents a CpG dinucleotide"
  misc_feature (61)..(61): /note="Nucleotide may be methylated to form 5-methylcytosine"
ggaaacacaagagaagaaagtcaattccccttagggcctccttcctccagtagctcacttcgtagtgcagtctctcttggatacggcctatcttgtgataggcaaaatttgggttacatgcc

SEQ ID NO: 10516 - DNA, 122 bp, Homo sapiens
  misc_feature (61)..(62): /note="This region represents a CpG dinucleotide"
  misc_feature (61)..(61): /note="Nucleotide may be methylated to form 5-methylcytosine"
ggcctttgagcatagcgtgcaccgctacggccagtccactggagagttcctgcaggtgggcggtaagtcacccatcctgtagggctggcccatccaaagtgacatggcatttcctgctggtt

SEQ ID NO: 10517 - DNA, 122 bp, Homo sapiens
  misc_feature (61)..(62): /note="This region represents a CpG dinucleotide"
  misc_feature (61)..(61): /note="Nucleotide may be methylated to form 5-methylcytosine"
ctaatgcttaaagccacgcattacacgaaggtttaccaggcagagcaaataaatggtcatcggagacatgctttcaaacagagatctctgttcttggcatgaaggttaaggttagtgaaaaa

SEQ ID NO: 10518 - DNA, 122 bp, Homo sapiens
  misc_feature (61)..(62): /note="This region represents a CpG dinucleotide"
  misc_feature (61)..(61): /note="Nucleotide may be methylated to form 5-methylcytosine"
tctgattttctcctcccctttgtgtacccgacgggtgttgctctgagatcaggaccatcccggcgggctgcggatgggatcatcgtgtgtgtatggccacagccctccgccccgctcgctcg

SEQ ID NO: 10519 - DNA, 122 bp, Homo sapiens
  misc_feature (61)..(62): /note="This region represents a CpG dinucleotide"
  misc_feature (61)..(61): /note="Nucleotide may be methylated to form 5-methylcytosine"
aatgtgaagtgcatacatcatgctgaaggattttgtctcagccacggaggtaatagtcagcgaggtcaggtcaaagagggttaaaccaagccaggatatagccaaagaaatacatcaaacgc

SEQ ID NO: 10520 - DNA, 122 bp, Homo sapiens
  misc_feature (61)..(62): /note="This region represents a CpG dinucleotide"
  misc_feature (61)..(61): /note="Nucleotide may be methylated to form 5-methylcytosine"
tggctatctagtttcagagtcttaggcacctagccacttgatacgctgcctctccctagacgtgtccgctaagaactagagtgagaacagactatgataagggcccagtaggaacataaata

SEQ ID NO: 10521 - DNA, 122 bp, Homo sapiens
  misc_feature (61)..(62): /note="This region represents a CpG dinucleotide"
  misc_feature (61)..(61): /note="Nucleotide may be methylated to form 5-methylcytosine"
agaagtagccttgtcaccagggacgctccgggggcaggcgaggtgggtgtcaggtggcggcgttcacatccgcttggcagcacggccagcgtggcagggcaaggtgcagctgggacaagggc

SEQ ID NO: 10522 - DNA, 122 bp, Homo sapiens
  misc_feature (61)..(62): /note="This region represents a CpG dinucleotide"
  misc_feature (61)..(61): /note="Nucleotide may be methylated to form 5-methylcytosine"
ttatattttagattgcatttccccaagtgaagctgctccagggaagggagctggcttccacgtacactttgttgctgtacttgtcatcgtctgaggggactcagaaattcagtcaccattaa

SEQ ID NO: 10523 - DNA, 122 bp, Homo sapiens
  misc_feature (61)..(62): /note="This region represents a CpG dinucleotide"
  misc_feature (61)..(61): /note="Nucleotide may be methylated to form 5-methylcytosine"
ggagtggacagctctgtagcttggggccctgcctcttcttctgaggcagtactgcctctgcgcccttggcctggggctcctggctctcaggggtggcaacagccttcccttcctgggcagcg

SEQ ID NO: 10524 - DNA, 122 bp, Homo sapiens
  misc_feature (61)..(62): /note="This region represents a CpG dinucleotide"
  misc_feature (61)..(61): /note="Nucleotide may be methylated to form 5-methylcytosine"
ttcatatgcagactctactttcctttgtggtttccttttctctgtgcagttgccttcagtcgagtttgatagagtggaagggtggggaaatagaggaaatggaagagaagaaagagagtgat

SEQ ID NO: 10525 - DNA, 122 bp, Homo sapiens
  misc_feature (61)..(62): /note="This region represents a CpG dinucleotide"
  misc_feature (61)..(61): /note="Nucleotide may be methylated to form 5-methylcytosine"
tagcctctaatttccctctatcacttttcttcataaaatatattcacctcccacagattacgcgaactgatggggcaagtttccggttggcaaacattcatatcagccaatttgccaatgag

SEQ ID NO: 10526 - DNA, 122 bp, Homo sapiens
  misc_feature (61)..(62): /note="This region represents a CpG dinucleotide"
  misc_feature (61)..(61): /note="Nucleotide may be methylated to form 5-methylcytosine"
gtgtgtgtgtgtacaggaatcacagagactcatcttgtaatgtttgtaatgtccatgtatcgtgtatgcacacatttttttctgacctattagaagcaaattacagagctaataccccttta

SEQ ID NO: 10527 - DNA, 122 bp, Homo sapiens
  misc_feature (61)..(62): /note="This region represents a CpG dinucleotide"
  misc_feature (61)..(61): /note="Nucleotide may be methylated to form 5-methylcytosine"
agagtggcagtggagtggcatcttgattgatttaacctcttctcaggggacctgggtctgcgagggaggatatggctgcggggttggaataggatctgtctgagctgccagggtcagggtgg

SEQ ID NO: 10528 - DNA, 122 bp, Homo sapiens
  misc_feature (61)..(62): /note="This region represents a CpG dinucleotide"
  misc_feature (61)..(61): /note="Nucleotide may be methylated to form 5-methylcytosine"
ttgagctgaaacagacattttaaacgagagaaggggaagtctcattaccctggtctgttacgcagtcccagaaggcactgctgtttctgctttggagcccagcatttggctagggtcctgtg

SEQ ID NO: 10529 - DNA, 122 bp, Homo sapiens
  misc_feature (61)..(62): /note="This region represents a CpG dinucleotide"
  misc_feature (61)..(61): /note="Nucleotide may be methylated to form 5-methylcytosine"
gagcagatatttggtcttcagctctttcatttccacctctttgcgatatgagacagcagacgttcccaaaaagggcttgcggtttatgttatcggtaacccatttcattcttccagatggtg

SEQ ID NO: 10530 - DNA, 122 bp, Homo sapiens
  misc_feature (61)..(62): /note="This region represents a CpG dinucleotide"
  misc_feature (61)..(61): /note="Nucleotide may be methylated to form 5-methylcytosine"
tttaagttctcattgcccaactgtatactctgagtcactgtcctgtcacagccatatttccggctggcattgtgtctgcaaccaagagtgtgactgcaagaacacaaggcactgtgcaaaga

SEQ ID NO: 10531 - DNA, 122 bp, Homo sapiens
  misc_feature (61)..(62): /note="This region represents a CpG dinucleotide"
  misc_feature (61)..(61): /note="Nucleotide may be methylated to form 5-methylcytosine"
gttgcttcccaggttgctggaaaaatcaacgtaggatagcatcggtagaggacgctaccgcggcgcaggtgaaagatgtaaacagtgcaatctaaatcttcaatgggatgcaagtcagactt

SEQ ID NO: 10532 - DNA, 122 bp, Homo sapiens
  misc_feature (61)..(62): /note="This region represents a CpG dinucleotide"
  misc_feature (61)..(61): /note="Nucleotide may be methylated to form 5-methylcytosine"
tttggaggtggtgtgttcatctagttggaaccaggggcagagatagcatcattcccactgcgcctgatttaacttggctttggatgatatcacaattggggttggaactttccacagtagat

SEQ ID NO: 10533 - DNA, 122 bp, Homo sapiens
  misc_feature (61)..(62): /note="This region represents a CpG dinucleotide"
  misc_feature (61)..(61): /note="Nucleotide may be methylated to form 5-methylcytosine"
gcctgttatgtaacagatgagtgtcacctggtttcctagtttcagccctgaacacgtctccgagtcacgctggaggcgtaaacaatggatagggcaggcaggtgaaacccatcttcccgccg

SEQ ID NO: 10534 - DNA, 122 bp, Homo sapiens
  misc_feature (61)..(62): /note="This region represents a CpG dinucleotide"
  misc_feature (61)..(61): /note="Nucleotide may be methylated to form 5-methylcytosine"
aagccttttctcaggccactgaatataggcttatgtaaacaggcagtataactcagtaggcggagatgaaacatttgcacttctctccaagcattataatgagaaagcaaaactctttatac

SEQ ID NO: 10535 - DNA, 122 bp, Homo sapiens
  misc_feature (61)..(62): /note="This region represents a CpG dinucleotide"
  misc_feature (61)..(61): /note="Nucleotide may be methylated to form 5-methylcytosine"
cgtgtgcagagttgtgaggctcctctgctgcgaactgcccattccagccttgctgtggaacgactcgccttctgtgggctggtgacacatatcctcacaaaggctgtgttgtcactcgtgtg

SEQ ID NO: 10536 - DNA, 122 bp, Homo sapiens
  misc_feature (61)..(62): /note="This region represents a CpG dinucleotide"
  misc_feature (61)..(61): /note="Nucleotide may be methylated to form 5-methylcytosine"
cctccctgaacttaacactgcacccctgtggcagatcagatcattatctcatttattgcacgccatagctttaggaagtaagttcttatattattcccatgttgtagctaatgaaactgagg

SEQ ID NO: 10537 - DNA, 122 bp, Homo sapiens
  misc_feature (61)..(62): /note="This region represents a CpG dinucleotide"
  misc_feature (61)..(61): /note="Nucleotide may be methylated to form 5-methylcytosine"
taatgtgggtaggccttatccaatcagctggagacctgaatagacaaaaagaccagcctccgggaggaaaaaagaaattctccagcagactgccttcagattttatctgcaacatttgccct

SEQ ID NO: 10538 - DNA, 122 bp, Homo sapiens
  misc_feature (61)..(62): /note="This region represents a CpG dinucleotide"
  misc_feature (61)..(61): /note="Nucleotide may be methylated to form 5-methylcytosine"
gccagtttcccaggtgaggctggtcctgcttcaagcgtgggagctccaaccactgctccacgctgcctccactcctgaacctgaaggtggaggagtttcccactgtctcaaataagcaccgg

SEQ ID NO: 10539 - DNA, 122 bp, Homo sapiens
  misc_feature (61)..(62): /note="This region represents a CpG dinucleotide"
  misc_feature (61)..(61): /note="Nucleotide may be methylated to form 5-methylcytosine"
cactctgggagaactgaagaagatgcgaaagtataaaacagtcctgcccttaggagcttacggattaattgaagacagggcataaacatttgaaaagttacccaacatcagagaatgagagg

SEQ ID NO: 10540 - DNA, 122 bp, Homo sapiens
  misc_feature (61)..(62): /note="This region represents a CpG dinucleotide"
  misc_feature (61)..(61): /note="Nucleotide may be methylated to form 5-methylcytosine"
gagagattaccaaattgctctcccgaggagacgctttggcatgacgcgcggtgtctgtcacggcactgttggttaccacacacacgtgttctcagcagacaggcagcatggccccgaagagc

SEQ ID NO: 10541 - DNA, 122 bp, Homo sapiens
  misc_feature (61)..(62): /note="This region represents a CpG dinucleotide"
  misc_feature (61)..(61): /note="Nucleotide may be methylated to form 5-methylcytosine"
accccagccgcgtcctctagcctcacaggacccgcctgcacctcttctggtttcttccctcgtggctcgggctcacccctggctcgtcaaacctcgcccgttgtccccgagaccccttcctg

SEQ ID NO: 10542 - DNA, 122 bp, Homo sapiens
  misc_feature (61)..(62): /note="This region represents a CpG dinucleotide"
  misc_feature (61)..(61): /note="Nucleotide may be methylated to form 5-methylcytosine"
accttcccccattttccctttctgtttttcctctgctttcttagagttaggtactgctttcgtcttgtctcacttctaacagctgccatccaacctccctaccctcgtttcaccacccctca

SEQ ID NO: 10543 - DNA, 122 bp, Homo sapiens
  misc_feature (61)..(62): /note="This region represents a CpG dinucleotide"
  misc_feature (61)..(61): /note="Nucleotide may be methylated to form 5-methylcytosine"
aacttagaaacatgtttatatttcttagctactagggtagatctaccagctcaatttacacgttaagcctaggaagtggaaattcttaaccctggatatggatctgcccaaacgtctgtctt

SEQ ID NO: 10544 - DNA, 122 bp, Homo sapiens
  misc_feature (61)..(62): /note="This region represents a CpG dinucleotide"
  misc_feature (61)..(61): /note="Nucleotide may be methylated to form 5-methylcytosine"
agttatacacccttcctgaatatgctgcatatgattctgcctccttgtgtctgcatttgccgtccctgcagtcaatatcctacagttcttcacaaactagttcagacatccatgaatccctc

SEQ ID NO: 10545 - DNA, 122 bp, Homo sapiens
  misc_feature (61)..(62): /note="This region represents a CpG dinucleotide"
  misc_feature (61)..(61): /note="Nucleotide may be methylated to form 5-methylcytosine"
tgggctggaaggctcggaagcaggtggaaccggtcaagcagcgtgtttttgttggggtgacgttatgtaggggctgcacagtcatggggacatcgtgaagctggcaggagggtggctgtgga

SEQ ID NO: 10546 - DNA, 122 bp, Homo sapiens
  misc_feature (61)..(62): /note="This region represents a CpG dinucleotide"
  misc_feature (61)..(61): /note="Nucleotide may be methylated to form 5-methylcytosine"
cttgaactcctgacctcatgatccacccacctcggcctcccaaagtgttgggattacaggcgtgagccaccacccctggcgtgttggggtttaaaaagaataaacttcaagttaatctcttc

SEQ ID NO: 10547 - DNA, 122 bp, Homo sapiens
  misc_feature (61)..(62): /note="This region represents a CpG dinucleotide"
  misc_feature (61)..(61): /note="Nucleotide may be methylated to form 5-methylcytosine"
tgcctgtgagatttccttctcctgtagtttgcaaacacaatccatgtcctagatgtgctgcgtttaaacaaagtatgttactccgttccttcagtggagagctgggattgtcaccatttggc

SEQ ID NO: 10548 - DNA, 122 bp, Homo sapiens
  misc_feature (61)..(62): /note="This region represents a CpG dinucleotide"
  misc_feature (61)..(61): /note="Nucleotide may be methylated to form 5-methylcytosine"
atgtaccttaacatctctgcatcttggcccctaatcatggcggacaactgggggtggtttcgaaaagcagtcatccagaagcccgggatattctgaatgatgtagttcctccgctccaggta

SEQ ID NO: 10549 - DNA, 122 bp, Homo sapiens
  misc_feature (61)..(62): /note="This region represents a CpG dinucleotide"
  misc_feature (61)..(61): /note="Nucleotide may be methylated to form 5-methylcytosine"
gaaacttatttctcacagttctagagactgagaagtcagaaatcaaggcaccagcagattcgttgactggtgaaggcccatttcctggttcatagatggcaccttctcattatgtcttcact

SEQ ID NO: 10550 - DNA, 122 bp, Homo sapiens
  misc_feature (61)..(62): /note="This region represents a CpG dinucleotide"
  misc_feature (61)..(61): /note="Nucleotide may be methylated to form 5-methylcytosine"
acctggagggggccctgttgaacagctaatcttaggaacacagcatgaggactgggagttcgagggagggccagtcaatggagtgcagactgtggactggcttgtttttttttaaccccgag

SEQ ID NO: 10551 - DNA, 122 bp, Homo sapiens
  misc_feature (61)..(62): /note="This region represents a CpG dinucleotide"
  misc_feature (61)..(61): /note="Nucleotide may be methylated to form 5-methylcytosine"
tttttcatctttctaaacagctctgagttcagatcctgtcaaggttaccttcctatgattcgtgaagatgtcatcctaaaatataaaaggaaagtacattggtaaaaagtcaacctttgaat

SEQ ID NO: 10552 - DNA, 122 bp, Homo sapiens
  misc_feature (61)..(62): /note="This region represents a CpG dinucleotide"
  misc_feature (61)..(61): /note="Nucleotide may be methylated to form 5-methylcytosine"
ttctgctcctctcatgttgaaggtctcttattccctgacagtctttgttcggtcatccagcgtccttccactcccatctcaagcggctggagagccacagcagtccttgtctcagtattgga

SEQ ID NO: 10553 - DNA, 122 bp, Homo sapiens
  misc_feature (61)..(62): /note="This region represents a CpG dinucleotide"
  misc_feature (61)..(61): /note="Nucleotide may be methylated to form 5-methylcytosine"
tcttactacaccacggaagaatggggtggtgggaggcggaacacaacaaaactagcttcgcggctgggcccaaggctggtcccatctagagtcatctttgagaccacaagagccaacatcat

SEQ ID NO: 10554 - DNA, 122 bp, Homo sapiens
  misc_feature (61)..(62): /note="This region represents a CpG dinucleotide"
  misc_feature (61)..(61): /note="Nucleotide may be methylated to form 5-methylcytosine"
tggccagaccgtgaaggttaccttgaccttgtctgcatgataaatacaactggagcggggcggaaggcacaccattcagaaaagcaaactgcttgcatcttctttatttttaatctcactcc

SEQ ID NO: 10555 - DNA, 122 bp, Homo sapiens
  misc_feature (61)..(62): /note="This region represents a CpG dinucleotide"
  misc_feature (61)..(61): /note="Nucleotide may be methylated to form 5-methylcytosine"
agcccccgccctgttcgaggaaggaaaggcccagaacttgcacacagcaggcaggcccagcggctgggtttctctagcacctcggcattgtctgcctgctcttccaggcgtgcagggcagtg

SEQ ID NO: 10556 - DNA, 122 bp, Homo sapiens
  misc_feature (61)..(62): /note="This region represents a CpG dinucleotide"
  misc_feature (61)..(61): /note="Nucleotide may be methylated to form 5-methylcytosine"
gcctgtttttcctgctagtgtgagtaacaatgagcaagaaagctattctgtcttgatgtacgtggcaggaccgaaacctgcttcagcagtattcccctactatgtctgccacacatggttgt

SEQ ID NO: 10557 - DNA, 122 bp, Homo sapiens
  misc_feature (61)..(62): /note="This region represents a CpG dinucleotide"
  misc_feature (61)..(61): /note="Nucleotide may be methylated to form 5-methylcytosine"
gttttgtttccttatccatattagttgttgctgaaagtgggaactgtatgaaatgagtcacgtgtccctatcctgagagtgaatgtgaaactgacaagggagaaagttctgagtctgatgta

SEQ ID NO: 10558 - DNA, 122 bp, Homo sapiens
  misc_feature (61)..(62): /note="This region represents a CpG dinucleotide"
  misc_feature (61)..(61): /note="Nucleotide may be methylated to form 5-methylcytosine"
ttcatttacaaaaacaggcagctagcccatgggccatagtttgcctacccttgagctagacgctctgcaaatagcaatgactttatttcccacattccattctttacaactctgatttctgt

SEQ ID NO: 10559 - DNA, 122 bp, Homo sapiens
  misc_feature (61)..(62): /note="This region represents a CpG dinucleotide"
  misc_feature (61)..(61): /note="Nucleotide may be methylated to form 5-methylcytosine"
aacaatcagtgaggaaactgagacacaggagggttcaggaactggcagctggccacatagcgagtggtagagccaagttttatgcccatgttcttcccaaaataccacaaaagcaaccacta

SEQ ID NO: 10560 - DNA, 122 bp, Homo sapiens
  misc_feature (61)..(62): /note="This region represents a CpG dinucleotide"
  misc_feature (61)..(61): /note="Nucleotide may be methylated to form 5-methylcytosine"
tcccttcccaaactgtgtggctgctctaaatgtagcagccaccaaggataggtggagctacgtctggattacaaagaatggcttagacaagtcacgacccacataaaaaatgttaggagcag

SEQ ID NO: 10561 - DNA, 122 bp, Homo sapiens
  misc_feature (61)..(62): /note="This region represents a CpG dinucleotide"
  misc_feature (61)..(61): /note="Nucleotide may be methylated to form 5-methylcytosine"
gtgcgatcttggctcactgcaacctccgcctcctgggttcaagcaattctcctgcctcagcgccccaggtagctaggattacaagcgtctgccaccaagcccagctaatttttgtattctta

SEQ ID NO: 10562 - DNA, 122 bp, Homo sapiens
  misc_feature (61)..(62): /note="This region represents a CpG dinucleotide"
  misc_feature (61)..(61): /note="Nucleotide may be methylated to form 5-methylcytosine"
agaagctcattacccatttgaaagactagggggaccgttaattatggaatccactgctgacgtttaggtaatcagaaaataaaggaatcacgggatcctgtggtgattcacaggaagtgggt

SEQ ID NO: 10563 - DNA, 122 bp, Homo sapiens
  misc_feature (61)..(62): /note="This region represents a CpG dinucleotide"
  misc_feature (61)..(61): /note="Nucleotide may be methylated to form 5-methylcytosine"
ttggaataatgaattagaaagtggatgttggtcattattaggaaaaggtactttgttacacgagacagtaattgcattgtggcaagagaaagaatctgactaattaatttgtcttttttttc

SEQ ID NO: 10564 - DNA, 122 bp, Homo sapiens
  misc_feature (61)..(62): /note="This region represents a CpG dinucleotide"
  misc_feature (61)..(61): /note="Nucleotide may be methylated to form 5-methylcytosine"
ttgagccagccgatctccctgcaaatctcaagatcgcccagttttgattatgaaagtcttcgaaaatgtttacacagttgagtgtttcctgtttccgcagttaattttttttaacgtttttt

SEQ ID NO: 10565 - DNA, 122 bp, Homo sapiens
  misc_feature (61)..(62): /note="This region represents a CpG dinucleotide"
  misc_feature (61)..(61): /note="Nucleotide may be methylated to form 5-methylcytosine"
tatttttgtgtttgtgagtgttactatgctatggcaaaaagggcctagactttgaattagcggatcttacttaatattcacagaagcctggaagtgtaaacactgctatccctattttatag

SEQ ID NO: 10566 - DNA, 122 bp, Homo sapiens
  misc_feature (61)..(62): /note="This region represents a CpG dinucleotide"
  misc_feature (61)..(61): /note="Nucleotide may be methylated to form 5-methylcytosine"
tccgaagtgctgagattacaggtgcgagtcaccgtgcctggcctattcctgttttcttaacgctcctctctcccactgggccgtgactgcctctaaggcagagatgtgttcatttttattat

SEQ ID NO: 10567 - DNA, 122 bp, Homo sapiens
  misc_feature (61)..(62): /note="This region represents a CpG dinucleotide"
  misc_feature (61)..(61): /note="Nucleotide may be methylated to form 5-methylcytosine"
gaagccaggtgacacgtggaaatcctagctgcatgagagtctggaaatgtcctctctagccgtccagcctctaaagtacaagaagtcatgatggaaagaaggaggtttggagaggggctgag

SEQ ID NO: 10568 - DNA, 122 bp, Homo sapiens
  misc_feature (61)..(62): /note="This region represents a CpG dinucleotide"
  misc_feature (61)..(61): /note="Nucleotide may be methylated to form 5-methylcytosine"
tgcttctggttccattcaatttaaaccacctactgggtgcttaatagtcttggccgggtgcgtggcacacgcctataatcccagcactttgggaggccgaggtgggtggatcacctgaggtc

SEQ ID NO: 10569 - DNA, 122 bp, Homo sapiens
  misc_feature (61)..(62): /note="This region represents a CpG dinucleotide"
  misc_feature (61)..(61): /note="Nucleotide may be methylated to form 5-methylcytosine"
agtaatgggtagagggagagttatttagctggaatgaggtacaaagagaggctgacacaacgagaacaagagttagaggccacagactcctcacagctgacctggggagcatcctgacaacc

SEQ ID NO: 10570 - DNA, 122 bp, Homo sapiens
  misc_feature (61)..(62): /note="This region represents a CpG dinucleotide"
  misc_feature (61)..(61): /note="Nucleotide may be methylated to form 5-methylcytosine"
ctcccgctacgggcactgggactttgctgataaccctggaggacgtgaatgacaatgccccgttcatttaccccacagtagctgaagtctgtgatgatgccaaaaacctcagtgtagtcatt

SEQ ID NO: 10571 - DNA, 122 bp, Homo sapiens
  misc_feature (61)..(62): /note="This region represents a CpG dinucleotide"
  misc_feature (61)..(61): /note="Nucleotide may be methylated to form 5-methylcytosine"
gtttggtgtctttcttgttaaggaactagtctccagtgatctcaggcttcatcttcataacgacaagaaatccagaccatgggtcagacaacctagtgattcatgtgtcttaatgactgacc

SEQ ID NO: 10572 - DNA, 122 bp, Homo sapiens
  misc_feature (61)..(62): /note="This region represents a CpG dinucleotide"
  misc_feature (61)..(61): /note="Nucleotide may be methylated to form 5-methylcytosine"
agcaaagactgcagtcaggagggctgagtccaaatcctgggtcaaagccacatgtcaactcgtatgacctgatatagtgagttaacctacctgagcctcagtttcctcatctgtaagggagg

SEQ ID NO: 10573 - DNA, 122 bp, Homo sapiens
  misc_feature (61)..(62): /note="This region represents a CpG dinucleotide"
  misc_feature (61)..(61): /note="Nucleotide may be methylated to form 5-methylcytosine"
tttattatttattctgtgctggaatccattaagtgcaaaggagaacatcataagcatatccgaatttcagaaggacacttgccacatgtattttgtcatctttgcttcagtcttctttactg

SEQ ID NO: 10574 - DNA, 122 bp, Homo sapiens
  misc_feature (61)..(62): /note="This region represents a CpG dinucleotide"
  misc_feature (61)..(61): /note="Nucleotide may be methylated to form 5-methylcytosine"
gagtttcagttgactggttacctgaaactagtcaagttacaactggaattgcacagccttcgtcatggtcggtgtgttaatagagcttgctgtgagtgcacctctccctctgatagtaatta

SEQ ID NO: 10575 - DNA, 122 bp, Homo sapiens
  misc_feature (61)..(62): /note="This region represents a CpG dinucleotide"
  misc_feature (61)..(61): /note="Nucleotide may be methylated to form 5-methylcytosine"
ctgcgctagacttatctggccgtcataatctttgcaaaggtgatgtcagtcgggcttcctcgcagcacggtatttgggttccgagaaaggaagtggaaacttcctgttctcttaatggtcag

SEQ ID NO: 10576 - DNA, 122 bp, Homo sapiens
  misc_feature (61)..(62): /note="This region represents a CpG dinucleotide"
  misc_feature (61)..(61): /note="Nucleotide may be methylated to form 5-methylcytosine"
ggtacgactctgttgacacattgatttcagacttctggcctccagagctccaagagactacgtatctattgctttaaaccaccacatgtgtggtaatttgtcatagacagcagccccaggaa

SEQ ID NO: 10577 - DNA, 122 bp, Homo sapiens
  misc_feature (61)..(62): /note="This region represents a CpG dinucleotide"
  misc_feature (61)..(61): /note="Nucleotide may be methylated to form 5-methylcytosine"
tggctgcgtgaacatcatgacaaagacctagatgaggcagcctactacacacctgtacaacgtgggactgtactgaatactgtaggcaattgtgacacaatggtaagtattaatatttgtgg

SEQ ID NO: 10578 - DNA, 122 bp, Homo sapiens
  misc_feature (61)..(62): /note="This region represents a CpG dinucleotide"
  misc_feature (61)..(61): /note="Nucleotide may be methylated to form 5-methylcytosine"
tgattctgtacttttgagtgcctctgcatggaagtgaaagaacttactcagcagaggcagcgtagcatagagagaagcttgtcagacatcttctgtcacaaacttgctatgtaagcttgggt

SEQ ID NO: 10579 - DNA, 122 bp, Homo sapiens
  misc_feature (61)..(62): /note="This region represents a CpG dinucleotide"
  misc_feature (61)..(61): /note="Nucleotide may be methylated to form 5-methylcytosine"
aagcgtccagaccagcttgcgatgctgatgaataagctgattttgatggggtgtgtgaaacggagatgccagcccaggggctcagcttgctcgtgctctcatttaaaagcagaaaatagcga

SEQ ID NO: 10580 - DNA, 122 bp, Homo sapiens
  misc_feature (61)..(62): /note="This region represents a CpG dinucleotide"
  misc_feature (61)..(61): /note="Nucleotide may be methylated to form 5-methylcytosine"
aagagggcactgtctatgaaccaggaagtggccctcaccagacacggcatctgccagcaccgtcctgtgaaatgaatagtggtttataagccacttggactgtggtggtttgccattgcagt

SEQ ID NO: 10581 - DNA, 122 bp, Homo sapiens
  misc_feature (61)..(62): /note="This region represents a CpG dinucleotide"
  misc_feature (61)..(61): /note="Nucleotide may be methylated to form 5-methylcytosine"
actgcctttggttgactaatcatgaaaaatctccccttgatgtggcaattctaattctgacgccatctccatggggaaaagaaaacttccaatttttctttaagaggaagtcagtgcctcag

SEQ ID NO: 10582 - DNA, 122 bp, Homo sapiens
  misc_feature (61)..(62): /note="This region represents a CpG dinucleotide"
  misc_feature (61)..(61): /note="Nucleotide may be methylated to form 5-methylcytosine"
tcatcataaaacgatcctcgctatgaattccatctcctctacacccaaatttctttccaacgtggtcctattttaggaagttgacagaaagcataggcccatgttgactggccgtggagttc

SEQ ID NO: 10583 - DNA, 122 bp, Homo sapiens
  misc_feature (61)..(62): /note="This region represents a CpG dinucleotide"
  misc_feature (61)..(61): /note="Nucleotide may be methylated to form 5-methylcytosine"
ttgctaagggaaatgaaaagcttacaagaaaacacattttggttgtgtaacagacacggacgatgccagacaactgtctgggttcatgtaaagtcagagggggaattacacaaacagggata

SEQ ID NO: 10584 - DNA, 122 bp, Homo sapiens
  misc_feature (61)..(62): /note="This region represents a CpG dinucleotide"
  misc_feature (61)..(61): /note="Nucleotide may be methylated to form 5-methylcytosine"
acaatgtacagtccctaccatcagcataatgtgctgtggataaatgcattggaactatttcggttgcaagtaaagcagtgtgtaaatgattggccttttaaataaggaaatgcaactgcttt

SEQ ID NO: 10585 - DNA, 122 bp, Homo sapiens
  misc_feature (61)..(62): /note="This region represents a CpG dinucleotide"
  misc_feature (61)..(61): /note="Nucleotide may be methylated to form 5-methylcytosine"
ggaaaacctggctacagcctacctgggggctgcttctcccagctgagcctctcctccccacgcagtgctccagccacgctgcactagtcagggctcccagcctgctggacacctgtctccgc

SEQ ID NO: 10586 - DNA, 122 bp, Homo sapiens
  misc_feature (61)..(62): /note="This region represents a CpG dinucleotide"
  misc_feature (61)..(61): /note="Nucleotide may be methylated to form 5-methylcytosine"
ctacagacaggaagtaggctgtgaaacaattcagctgtaacagacaacatattctggaaacggaagaataattcaagtgtaaaaccaggagcccaaagggtagaaccaagagctgaggagaa

SEQ ID NO: 10587 - DNA, 122 bp, Homo sapiens
  misc_feature (61)..(62): /note="This region represents a CpG dinucleotide"
  misc_feature (61)..(61): /note="Nucleotide may be methylated to form 5-methylcytosine"
aactgcgtgaaaatcattgctaaagctgattcaatagctaatgtcaacaatgttgacatacgctgttaactagtatgagaagctgatgcataaaaatgagtttacaagtttactttggcaat

SEQ ID NO: 10588 - DNA, 122 bp, Homo sapiens
  misc_feature (61)..(62): /note="This region represents a CpG dinucleotide"
  misc_feature (61)..(61): /note="Nucleotide may be methylated to form 5-methylcytosine"
gaatccatgctgcagctgcccctcaccctaccccatcccaccacatccattaggactaagcgtagaagatcacttaatatagctcagaccaatcctcttgtgagtggtaagtgatgggttca

SEQ ID NO: 10589 - DNA, 122 bp, Homo sapiens
  misc_feature (61)..(62): /note="This region represents a CpG dinucleotide"
  misc_feature (61)..(61): /note="Nucleotide may be methylated to form 5-methylcytosine"
gaacttggtttcaaagccttctgcagcccagggctttctcagggttccagagatgaggcacgatccccaccaggagtcacttgggggagttttcagattcatgagtattatttctacttgtg

SEQ ID NO: 10590 - DNA, 122 bp, Homo sapiens
  misc_feature (61)..(62): /note="This region represents a CpG dinucleotide"
  misc_feature (61)..(61): /note="Nucleotide may be methylated to form 5-methylcytosine"
tctctaggggcatgtgtgtgtgtttcccaatgagagactgggtttggcatgggaagagggcggaaggtaaagctaggtataaaggagcagatataatgtaaggcttattttcatcctgtttt

SEQ ID NO: 10591 - DNA, 122 bp, Homo sapiens
  misc_feature (61)..(62): /note="This region represents a CpG dinucleotide"
  misc_feature (61)..(61): /note="Nucleotide may be methylated to form 5-methylcytosine"
tgcctatcgacagaaactcacaaacaactgctcaattttcctcaaaattcaattaaacttcgtttattctggggatcgatccaattaaaagaaggaaaatttcagatggtctgagcaacacc

SEQ ID NO: 10592 - DNA, 122 bp, Homo sapiens
  misc_feature (61)..(62): /note="This region represents a CpG dinucleotide"
  misc_feature (61)..(61): /note="Nucleotide may be methylated to form 5-methylcytosine"
ggctacataattccaacgaactcatcttgttcagtctgccacaggccctgcccttgatgacgtcccacaggtcctgcccttgatgaggccccacaggacactcagaaagctgcatgaccagg

SEQ ID NO: 10593 - DNA, 122 bp, Homo sapiens
  misc_feature (61)..(62): /note="This region represents a CpG dinucleotide"
  misc_feature (61)..(61): /note="Nucleotide may be methylated to form 5-methylcytosine"
cactggggagaagtctgttctcagagtgaggagctctgcacgcgttggctaaaagggtggcgtggctttgtgaaattgagagctggaggagcccagcagaatgaaccaggttgttcagccct

SEQ ID NO: 10594 - DNA, 122 bp, Homo sapiens
  misc_feature (61)..(62): /note="This region represents a CpG dinucleotide"
  misc_feature (61)..(61): /note="Nucleotide may be methylated to form 5-methylcytosine"
gaattaacaagaggatccttgaagttctttcgagctctgacatcctcatccattgcaaagcggctgtgaaactggattatgtaaggtcctgtggccccaccaattgtttggcacatcctgtc

SEQ ID NO: 10595 - DNA, 122 bp, Homo sapiens
  misc_feature (61)..(62): /note="This region represents a CpG dinucleotide"
  misc_feature (61)..(61): /note="Nucleotide may be methylated to form 5-methylcytosine"
cttccctggatggaggggtgtcataaattgaactgtctctcccccaaattaatatgtgaacgtcccaactcgcaataactcagaatgtgaacttatttggaaattgtgtggtttgcagatat

SEQ ID NO: 10596 - DNA, 122 bp, Homo sapiens
  misc_feature (61)..(62): /note="This region represents a CpG dinucleotide"
  misc_feature (61)..(61): /note="Nucleotide may be methylated to form 5-methylcytosine"
ctgttggatatgatctcagtcattctagcaataacatggtcatttaaagttgtttttctacgtctagccaaaactggcctcctgtaactgccagctattggtgttagttctaattttgagaa

SEQ ID NO: 10597 - DNA, 122 bp, Homo sapiens
  misc_feature (61)..(62): /note="This region represents a CpG dinucleotide"
  misc_feature (61)..(61): /note="Nucleotide may be methylated to form 5-methylcytosine"
aagaatgggtgtataaatacctccactctttcctcccttgggtgagataactctgaggcacgtgtttgacattgcttcatggagttccccagcaggattaagttccagttgccctcagtggt

SEQ ID NO: 10598 - DNA, 122 bp, Homo sapiens
  misc_feature (61)..(62): /note="This region represents a CpG dinucleotide"
  misc_feature (61)..(61): /note="Nucleotide may be methylated to form 5-methylcytosine"
gctctgctggtcactgcagttgtcaggaatgtttcgcctcagaggcaaacggcttagggccgtctcaacttggagacagaaaaacccacctcctactcctggctcagacctttgctttctta

SEQ ID NO: 10599 - DNA, 122 bp, Homo sapiens
  misc_feature (61)..(62): /note="This region represents a CpG dinucleotide"
  misc_feature (61)..(61): /note="Nucleotide may be methylated to form 5-methylcytosine"
taggcaggtcactgggacagatttgaggacagctgtcaggtgattcagccattctacacacgtctgcccctagactaccaattccattagtcattagggcaatgcaaatcaaagccacaatc

SEQ ID NO: 10600 - DNA, 122 bp, Homo sapiens
  misc_feature (61)..(62): /note="This region represents a CpG dinucleotide"
  misc_feature (61)..(61): /note="Nucleotide may be methylated to form 5-methylcytosine"
aggcatcatgattatccctgtcttaaggatggggaaaggagacccagggtgactgggtaacgtgcctactggaggaaaagagggaggaaataaaccccagcaacctgccttctgtgcctata

SEQ ID NO: 10601 - DNA, 122 bp, Homo sapiens
  misc_feature (61)..(62): /note="This region represents a CpG dinucleotide"
  misc_feature (61)..(61): /note="Nucleotide may be methylated to form 5-methylcytosine"
actccaagtaatttagacgaagaaacttctggagctggacggatcccccagggtgcgccgcgcctggactgggaagggcccccggacccgcggcgcaggggagggccgggccgccagggggc

SEQ ID NO: 10602 - DNA, 122 bp, Homo sapiens
  misc_feature (61)..(62): /note="This region represents a CpG dinucleotide"
  misc_feature (61)..(61): /note="Nucleotide may be methylated to form 5-methylcytosine"
ctttattgggacaactggcagaactagaattcagtcagagggttgatggtaataacataccgatgttaatttcctgagtctgatggctgtgccggagaatgtcgttgttcataggaaatacc

SEQ ID NO: 10603 - DNA, 122 bp, Homo sapiens
  misc_feature (61)..(62): /note="This region represents a CpG dinucleotide"
  misc_feature (61)..(61): /note="Nucleotide may be methylated to form 5-methylcytosine"
ctgattctactcttcctgaagaactcctacttcctctttaaggtccagggcaaatgtcaccgctcatctgaagcagtcccttagctcagtgactcctctgggcaaaacaaatcatgtatcct

SEQ ID NO: 10604 - DNA, 122 bp, Homo sapiens
  misc_feature (61)..(62): /note="This region represents a CpG dinucleotide"
  misc_feature (61)..(61): /note="Nucleotide may be methylated to form 5-methylcytosine"
aacaagtgcatcagccatcggggagtgtgagaggaattaatgaaacactgaaagcattgccgatagtcagcatgaatttggagtggacacagaagtatgaaatggaaaatagccccacccca

SEQ ID NO: 10605 - DNA, 122 bp, Homo sapiens
  misc_feature (61)..(62): /note="This region represents a CpG dinucleotide"
  misc_feature (61)..(61): /note="Nucleotide may be methylated to form 5-methylcytosine"
attcacatataatgcgtctattctcctccattagcgcaggcaggaaatgcccctgagtgccgggcagggctttggaaagcgcaataaatggcggacagacacatggcgggagggcggcagct

SEQ ID NO: 10606 - DNA, 122 bp, Homo sapiens
  misc_feature (61)..(62): /note="This region represents a CpG dinucleotide"
  misc_feature (61)..(61): /note="Nucleotide may be methylated to form 5-methylcytosine"
acaacttgcctgatgtcacacagcttcatacagtggttaagcaacttgtctgaggccacacgtggcacacagaggttgaacttacctgaggccacacagctgcacagagagcttaagtaact

SEQ ID NO: 10607 - DNA, 122 bp, Homo sapiens
  misc_feature (61)..(62): /note="This region represents a CpG dinucleotide"
  misc_feature (61)..(61): /note="Nucleotide may be methylated to form 5-methylcytosine"
tcctcccaaccctaggatttgatggtccttattttctgagtaacattaggttcctaatggcggtcactcttagtggctatgactgagggaggtgtcaaattatgttctacagtgtgagttca

SEQ ID NO: 10608 - DNA, 122 bp, Homo sapiens
  misc_feature (61)..(62): /note="This region represents a CpG dinucleotide"
  misc_feature (61)..(61): /note="Nucleotide may be methylated to form 5-methylcytosine"
taagattagacagactattccctttgcacatgtctgagcaaacagaggggaatccctgaccgctgttggcccggtgaacatgggtgtgtgcagcctccccaacggatgaaatcttgcacaca

SEQ ID NO: 10609 - DNA, 122 bp, Homo sapiens
  misc_feature (61)..(62): /note="This region represents a CpG dinucleotide"
  misc_feature (61)..(61): /note="Nucleotide may be methylated to form 5-methylcytosine"
gcttccggagtgtggaaccaccattcaaagctgttaaagacatggaagtgccgtggatgacgccatagctcagctctgccagcaacttaaccaaggttccagttccggaatatccagccttt

SEQ ID NO: 10610 - DNA, 122 bp, Homo sapiens
  misc_feature (61)..(62): /note="This region represents a CpG dinucleotide"
  misc_feature (61)..(61): /note="Nucleotide may be methylated to form 5-methylcytosine"
acacccagccaataggtgattattttaaaactcttacaacattgcatgccactaactacccgcatctcattctctaagacagagattgggaaactatggcctgcaggcaaaatccagcctgc

SEQ ID NO: 10611 - DNA, 122 bp, Homo sapiens
  misc_feature (61)..(62): /note="This region represents a CpG dinucleotide"
  misc_feature (61)..(61): /note="Nucleotide may be methylated to form 5-methylcytosine"
ctttaaacttcaggaagtcacagtagaatcacaatgtcagacacagtctacgaaacgcttcgtatatgttacctcatttgatctttgtaatcaacccatgaggcaggtggggtgtggcgggt

SEQ ID NO: 10612 - DNA, 122 bp, Homo sapiens
  misc_feature (61)..(62): /note="This region represents a CpG dinucleotide"
  misc_feature (61)..(61): /note="Nucleotide may be methylated to form 5-methylcytosine"
tggacttcctgcagcaggccttgttctaagcactctacatatgctaaggtacacagtcctcgtgacaactcttctacatgggccatcatttgtccccatgacatggatgaggaaccagctct

SEQ ID NO: 10613 - DNA, 122 bp, Homo sapiens
  misc_feature (61)..(62): /note="This region represents a CpG dinucleotide"
  misc_feature (61)..(61): /note="Nucleotide may be methylated to form 5-methylcytosine"
actgaagaattcaaattcacaagatgtgaattgcctcattcatatctacaaggtttgaatcgtggttaagacttagaccgggtgtctgattatgaacaggctgtaagtgagagtgggtgttc

SEQ ID NO: 10614 - DNA, 122 bp, Homo sapiens
  misc_feature (61)..(62): /note="This region represents a CpG dinucleotide"
  misc_feature (61)..(61): /note="Nucleotide may be methylated to form 5-methylcytosine"
gcaaaggtggacctgtggttggtggaggggcttagcatctgcatatcccaacacacatctcgtgcatcattagcttataaaatctcacctaggggtgtgttttctactatcaaaatgaggaa

SEQ ID NO: 10615 - DNA, 122 bp, Homo sapiens
  misc_feature (61)..(62): /note="This region represents a CpG dinucleotide"
  misc_feature (61)..(61): /note="Nucleotide may be methylated to form 5-methylcytosine"
atgatgtattctagctcctgtattgctaggattgactaaaagggaatgttaagtatttaacgtaggaatttagaagaggaataagtgagtaactttgttgcattacaaataatcaacaatgc

SEQ ID NO: 10616 - DNA, 122 bp, Homo sapiens
  misc_feature (61)..(62): /note="This region represents a CpG dinucleotide"
  misc_feature (61)..(61): /note="Nucleotide may be methylated to form 5-methylcytosine"
aggtggggaggttctagtgggtcatcaaatctagcctctcccatctgatgcaagaatcggcgttacaacttctctgacgttgctcaaccagcttctccttgaacacccccagatgtgagcta

SEQ ID NO: 10617 - DNA, 122 bp, Homo sapiens
  misc_feature (61)..(62): /note="This region represents a CpG dinucleotide"
  misc_feature (61)..(61): /note="Nucleotide may be methylated to form 5-methylcytosine"
tgccgagtcagctccatgacagcgctgtaggactcagctaggaggtgctgctgctcctcacgctcccgctgtagggctgccttccagtcgggccctgcccgctccccggcccccttccctgt

SEQ ID NO: 10618 - DNA, 122 bp, Homo sapiens
  misc_feature (61)..(62): /note="This region represents a CpG dinucleotide"
  misc_feature (61)..(61): /note="Nucleotide may be methylated to form 5-methylcytosine"
aaaacttcatggattggactttcctgggctccttataacataatcgtgtgtccaggcaaacgcacactagtgtctgactggaaagctcaggaattttaatcttgcactgtttcccagggagc

SEQ ID NO: 10619 - DNA, 122 bp, Homo sapiens
  misc_feature (61)..(62): /note="This region represents a CpG dinucleotide"
  misc_feature (61)..(61): /note="Nucleotide may be methylated to form 5-methylcytosine"
aatatgatgaaaccctgcctctactaaaaatacaaacaattagtcgggcatggtggcacacgtctgtaatcccagctactcgggaagctgaggcacaagaatcgcttgaactcaggaagtgg

SEQ ID NO: 10620 - DNA, 122 bp, Homo sapiens
  misc_feature (61)..(62): /note="This region represents a CpG dinucleotide"
  misc_feature (61)..(61): /note="Nucleotide may be methylated to form 5-methylcytosine"
gttttaatgtgtgcctgggtgcagacgggctgaggcttaaaagggcatcagcaccaaatgcggacagggtagcagttttatagtctcctgtaaacaggaagtatctcagtctgatgtaactg

SEQ ID NO: 10621 - DNA, 122 bp, Homo sapiens
  misc_feature (61)..(62): /note="This region represents a CpG dinucleotide"
  misc_feature (61)..(61): /note="Nucleotide may be methylated to form 5-methylcytosine"
tgagtttgtttaggccttaaagccagccatccatggacttttcagttacatgagccaatacgtttccacttttctgtagctcagttgaattaggttattacgctttctgctactggcaatgg

SEQ ID NO: 10622 - DNA, 122 bp, Homo sapiens
  misc_feature (61)..(62): /note="This region represents a CpG dinucleotide"
  misc_feature (61)..(61): /note="Nucleotide may be methylated to form 5-methylcytosine"
gcttttggtgcctcatcataccttttgggatctgttaacctgtacacatttctgtagtctcgtcattaaactatcttgctgatgacctcttctgagtatttaatttacatcctgattgattt

SEQ ID NO: 10623 - DNA, 122 bp, Homo sapiens
  misc_feature (61)..(62): /note="This region represents a CpG dinucleotide"
  misc_feature (61)..(61): /note="Nucleotide may be methylated to form 5-methylcytosine"
ctctaaatcaagtgcaagaaatttcagggtaatgaagatatgctgctacacagggagtgacggatgtgggaaatgaaaataaaagatgaagtaagttgtaggaaaaattaacctactgtttc

SEQ ID NO: 10624 - DNA, 122 bp, Homo sapiens
  misc_feature (61)..(62): /note="This region represents a CpG dinucleotide"
  misc_feature (61)..(61): /note="Nucleotide may be methylated to form 5-methylcytosine"
tttagaccagattgtttgttatgtatataactgtttgcatttcacttacttatcctcaatcgtcacatacctgggagggaaggaggctgcacagagcccccggagccccagccccacgtggt

SEQ ID NO: 10625 - DNA, 122 bp, Homo sapiens
  misc_feature (61)..(62): /note="This region represents a CpG dinucleotide"
  misc_feature (61)..(61): /note="Nucleotide may be methylated to form 5-methylcytosine"
ccttgggttacctgccagacagacataccaagggccttgtttcttctctttctctactctcgcaccctcaacgtgagcttcattctgggattggctcccctcgtggttatacaggctggagg

SEQ ID NO: 10626 - DNA, 122 bp, Homo sapiens
  misc_feature (61)..(62): /note="This region represents a CpG dinucleotide"
  misc_feature (61)..(61): /note="Nucleotide may be methylated to form 5-methylcytosine"
gacagaaatgctgggacctcagcgttccagtccttctggtaactggttgaactttcattccgtgcaagcagcctattctgggttcactgtgtactgtacaaatattgttatttcctttattt

SEQ ID NO: 10627 - DNA, 122 bp, Homo sapiens
  misc_feature (61)..(62): /note="This region represents a CpG dinucleotide"
  misc_feature (61)..(61): /note="Nucleotide may be methylated to form 5-methylcytosine"
ggtcagacaggcagcattgcatttgctgtctccctttgctgaaggattgatgccctatgacgggaaatgggagcaacaggacacctagatgaagcagcaaacacaatgctggatgttgccaa

SEQ ID NO: 10628 - DNA, 122 bp, Homo sapiens
  misc_feature (61)..(62): /note="This region represents a CpG dinucleotide"
  misc_feature (61)..(61): /note="Nucleotide may be methylated to form 5-methylcytosine"
acatgccatgtattttccagagagactgtgaccttaagtgatcaacccataactatgcagcgaagcatgggagactaggaggagccctgtgcttttgtatctaaagcttatcgccatctcgc

SEQ ID NO: 10629 - DNA, 122 bp, Homo sapiens
  misc_feature (61)..(62): /note="This region represents a CpG dinucleotide"
  misc_feature (61)..(61): /note="Nucleotide may be methylated to form 5-methylcytosine"
ttgaaagaagatgataattccatcaaataattttgctgtatatttataaacagacagaagcgaagtttatgatgttagggcttaatttaatggattttggattgcatgtatagtgagttatg

SEQ ID NO: 10630 - DNA, 122 bp, Homo sapiens
  misc_feature (61)..(62): /note="This region represents a CpG dinucleotide"
  misc_feature (61)..(61): /note="Nucleotide may be methylated to form 5-methylcytosine"
aaatttggggatatagctatactgtaggcaaagatttggggaagagggagaagttgaggacgaagagtggtgggcctttagttgaactgaagaggcagccccagccaaaggtaccaaattca

SEQ ID NO: 10631 - DNA, 122 bp, Homo sapiens
  misc_feature (61)..(62): /note="This region represents a CpG dinucleotide"
  misc_feature (61)..(61): /note="Nucleotide may be methylated to form 5-methylcytosine"
ctgagtcgacctgcagtacagcgttattagtctttttatttgcttattgcatcttgggagcgcgtgggtgggtgaagggagcgaggataggaagtctatggagatttacaccagtttttttt

SEQ ID NO: 10632 - DNA, 122 bp, Homo sapiens
  misc_feature (61)..(62): /note="This region represents a CpG dinucleotide"
  misc_feature (61)..(61): /note="Nucleotide may be methylated to form 5-methylcytosine"
gagcagaaatgggctgtggtttctaatctgccccacatcattcagcacagggctgggctgcgtggcctgtgactaatcagcgctcacccataagaaatggtgtgcatctgcaaatgtcgtgg

SEQ ID NO: 10633 - DNA, 122 bp, Homo sapiens
  misc_feature (61)..(62): /note="This region represents a CpG dinucleotide"
  misc_feature (61)..(61): /note="Nucleotide may be methylated to form 5-methylcytosine"
cagcaggcgccgcttctgtgtccaccgagtcagctgggatccatgcagctggtggcttgtcggtggcaggccaaggcctgagtcatgtccccgtcacagccttcagtggagggctgacccac

SEQ ID NO: 10634 - DNA, 122 bp, Homo sapiens
  misc_feature (61)..(62): /note="This region represents a CpG dinucleotide"
  misc_feature (61)..(61): /note="Nucleotide may be methylated to form 5-methylcytosine"
tttccactcatatgtttgttcagctttctttgcttttctcccaaaccataacgaaatagacgctatcaattttcccaagatggcaacctaacagctagccaggtgttctcagataagaaggg

SEQ ID NO: 10635 - DNA, 122 bp, Homo sapiens
  misc_feature (61)..(62): /note="This region represents a CpG dinucleotide"
  misc_feature (61)..(61): /note="Nucleotide may be methylated to form 5-methylcytosine"
aatcggagatcagggtttacagacagctcccaggtgatggtgctgcacagctggggcctccgtatttttcctctgaatgcctgaggaggtgatcctgctgagccgccaaggcggggaacacc

SEQ ID NO: 10636 - DNA, 122 bp, Homo sapiens
  misc_feature (61)..(62): /note="This region represents a CpG dinucleotide"
  misc_feature (61)..(61): /note="Nucleotide may be methylated to form 5-methylcytosine"
tttccaaataaggaaggggcgtaggctgtaagccaggaaatgcctgggcatgttcagatacgtctgagcaggttataggccagaataaataacttggttgaagtacaaggacatagaatgta

SEQ ID NO: 10637 - DNA, 122 bp, Homo sapiens
  misc_feature (61)..(62): /note="This region represents a CpG dinucleotide"
  misc_feature (61)..(61): /note="Nucleotide may be methylated to form 5-methylcytosine"
cacccggcctaaatcttaccttcttaatgagcttcccaggccttcctatctaaaattgcacgtccctgctacactgtaacttcctaaacccttccctggtttattattctccttaaccctga

SEQ ID NO: 10638 - DNA, 122 bp, Homo sapiens
  misc_feature (61)..(62): /note="This region represents a CpG dinucleotide"
  misc_feature (61)..(61): /note="Nucleotide may be methylated to form 5-methylcytosine"
tgaagcactttctccataatgttcacttctttaatgacaggatagatgttgctgttctgacgactggagtattcagactgatgagaaccactggtgattctcagcagtcccaacatcacatg

SEQ ID NO: 10639 - DNA, 122 bp, Homo sapiens
  misc_feature (61)..(62): /note="This region represents a CpG dinucleotide"
  misc_feature (61)..(61): /note="Nucleotide may be methylated to form 5-methylcytosine"
tgccacagccacctgagtagccgggattacaggcgtgagccaccacgcccggcctcagcacgaattatagctgctgcaatgtatttattctcacaaagcacaagtggagctttttgtcttcg

SEQ ID NO: 10640 - DNA, 122 bp, Homo sapiens
  misc_feature (61)..(62): /note="This region represents a CpG dinucleotide"
  misc_feature (61)..(61): /note="Nucleotide may be methylated to form 5-methylcytosine"
cacatcttgggccccatataaagagcaacaatgcttcacaaccaagacagaagtgacgggcgaccatatctcttggttggtgggtgtgacagcagtgttccagccctgtaaaaatctcaggc

SEQ ID NO: 10641 - DNA, 122 bp, Homo sapiens
  misc_feature (61)..(62): /note="This region represents a CpG dinucleotide"
  misc_feature (61)..(61): /note="Nucleotide may be methylated to form 5-methylcytosine"
acagctgctgctccaaaaccacaatacctttaaaatgacattttaaggaaacagatacggcgtggctttagccatagttagatgtagctaacactgaattaaaggggcttttctttttatac

SEQ ID NO: 10642 - DNA, 122 bp, Homo sapiens
  misc_feature (61)..(62): /note="This region represents a CpG dinucleotide"
  misc_feature (61)..(61): /note="Nucleotide may be methylated to form 5-methylcytosine"
accggagccgcggggtaggcggggcagtgccgggggccgtcctggagccagtggctcgagcgccatctgtgcgcagcctcagcctcagcctggctgactcgggccacctgccggacgtgcat

SEQ ID NO: 10643 - DNA, 122 bp, Homo sapiens
  misc_feature (61)..(62): /note="This region represents a CpG dinucleotide"
  misc_feature (61)..(61): /note="Nucleotide may be methylated to form 5-methylcytosine"
tccaccctgagcctgacctttctgagtgacatgggtgtgccaggctagactaggaggttccggtgtctggaaaagcactttacagatgagattccctctcctcccccaccttcaagcaccct

SEQ ID NO: 10644 - DNA, 122 bp, Homo sapiens
  misc_feature (61)..(62): /note="This region represents a CpG dinucleotide"
  misc_feature (61)..(61): /note="Nucleotide may be methylated to form 5-methylcytosine"
ggcttatcatgccttcaggaaagagatggaggaggaagcaactgatcaagagataagatacgctgagtatgatatttggaagtccagcaataaaatggccaggcagatcaccttactgtgaa

SEQ ID NO: 10645 - DNA, 122 bp, Homo sapiens
  misc_feature (61)..(62): /note="This region represents a CpG dinucleotide"
  misc_feature (61)..(61): /note="Nucleotide may be methylated to form 5-methylcytosine"
gcaggcttccaggccaccagggcatgggcaggactcagcccgccatgggcgcctgctcagcgggaaatgcgattcccaggggtcactggttctcaactgggaggaaacacctgtcatctctt

SEQ ID NO: 10646 - DNA, 122 bp, Homo sapiens
  misc_feature (61)..(62): /note="This region represents a CpG dinucleotide"
  misc_feature (61)..(61): /note="Nucleotide may be methylated to form 5-methylcytosine"
gaaggaaggcacttctgcatttctcagggtgccctgcattaggctgggccacagggagggcgaagtggattcagtatggcttatcatgctgtgcctgcatgcacaactatagccatgctata

SEQ ID NO: 10647 - DNA, 122 bp, Homo sapiens
  misc_feature (61)..(62): /note="This region represents a CpG dinucleotide"
  misc_feature (61)..(61): /note="Nucleotide may be methylated to form 5-methylcytosine"
gggattggagggtgggcctttgatgctcctcaagcaataagccacatggagaacttgcatcgtaagtgttagcaagggctcacctcactgccttggaaacctaccatcctgtgactcgccct

SEQ ID NO: 10648 - DNA, 122 bp, Homo sapiens
  misc_feature (61)..(62): /note="This region represents a CpG dinucleotide"
  misc_feature (61)..(61): /note="Nucleotide may be methylated to form 5-methylcytosine"
tcccttgacttctctgagcctgcttactgtcttagctgctcttgctggaaacctgggagtcgtttctgactcattgtgcttcctcaatgcccacgtggaatcagctagcaaatcctactggc

SEQ ID NO: 10649 - DNA, 122 bp, Homo sapiens
  misc_feature (61)..(62): /note="This region represents a CpG dinucleotide"
  misc_feature (61)..(61): /note="Nucleotide may be methylated to form 5-methylcytosine"
gtatttggagtgagtcacctaacgcctaacactaacttatgaaatggacctgatttcagacgtcagggaagaaactggtaatctgaagcttcttttattggcaataggggctaccagtagag

SEQ ID NO: 10650 - DNA, 122 bp, Homo sapiens
  misc_feature (61)..(62): /note="This region represents a CpG dinucleotide"
  misc_feature (61)..(61): /note="Nucleotide may be methylated to form 5-methylcytosine"
aatttttctgccaattatttacatagtctgctgtttgtactgtggaatgcaaagcaactccggctactgcagcagtagctgtgacagcaatcaatcccataatgattttaaagtggcaacga

SEQ ID NO: 10651 - DNA, 122 bp, Homo sapiens
  misc_feature (61)..(62): /note="This region represents a CpG dinucleotide"
  misc_feature (61)..(61): /note="Nucleotide may be methylated to form 5-methylcytosine"
gctgcgcatgtgtaaaaaaggtgggggaggggtggggaagggggcgcgggggcgccggggcgccagaacaccatttggtgttcttattggtgctgctgcaggcacttcacctgcacaagcct

SEQ ID NO: 10652 - DNA, 122 bp, Homo sapiens
  misc_feature (61)..(62): /note="This region represents a CpG dinucleotide"
  misc_feature (61)..(61): /note="Nucleotide may be methylated to form 5-methylcytosine"
aatccatttaaccactttcttttgtaaattgcccagtgtctggtaagtctttatcagcagcgtgaaaattgactaatacaagtatgcattgagcaactagtatgttccaggcattgagccag

SEQ ID NO: 10653 - DNA, 122 bp, Homo sapiens
  misc_feature (61)..(62): /note="This region represents a CpG dinucleotide"
  misc_feature (61)..(61): /note="Nucleotide may be methylated to form 5-methylcytosine"
tattcaagctagccaataccctttcaggtacatgtataagagtcaagccctgtctttgttcggggctcagcctttggaagttaatccactgggcaggtagccacctaaataaaatcctctta

SEQ ID NO: 10654 - DNA, 122 bp, Homo sapiens
  misc_feature (61)..(62): /note="This region represents a CpG dinucleotide"
  misc_feature (61)..(61): /note="Nucleotide may be methylated to form 5-methylcytosine"
tgttcaggagcccatgttcttcctgctacagtgtgctaccatggtatcaccaggtttccacgttagccacttactcccaagtattacatatgtaaccagtgcttgcttcagtgatcctttaa

SEQ ID NO: 10655 - DNA, 122 bp, Homo sapiens
  misc_feature (61)..(62): /note="This region represents a CpG dinucleotide"
  misc_feature (61)..(61): /note="Nucleotide may be methylated to form 5-methylcytosine"
ccacgatgcctggatcacagatcctgtggctggcagaataaccagtgctgtttacacatccgtggagggtgaatcttcttctccggctatcagaagagcattgcatgctctgtaagagcaaa

SEQ ID NO: 10656 - DNA, 122 bp, Homo sapiens
  misc_feature (61)..(62): /note="This region represents a CpG dinucleotide"
  misc_feature (61)..(61): /note="Nucleotide may be methylated to form 5-methylcytosine"
acaaacctactgactcatgtttgtggtgacctggctgtaaacaaacctgtgttgccctcacgtagaagtctagcacatataattatgcacagcacataattcttggttatgataataaacgt

SEQ ID NO: 10657 - DNA, 122 bp, Homo sapiens
  misc_feature (61)..(62): /note="This region represents a CpG dinucleotide"
  misc_feature (61)..(61): /note="Nucleotide may be methylated to form 5-methylcytosine"
aagcactgaccccaccctgccttccactacgctgaggtgtgaagtgggtggagaagggggcgaggctcgagccctgctctccagaagcccatgccccaggacatgagaagatgtgggcacag

SEQ ID NO: 10658 - DNA, 122 bp, Homo sapiens
  misc_feature (61)..(62): /note="This region represents a CpG dinucleotide"
  misc_feature (61)..(61): /note="Nucleotide may be methylated to form 5-methylcytosine"
gctgacctctggcctcaagctaggatcatggtgtggtgtgatttatgctctacaactctgcgcaggttcaggctgaaactagactacagtggagactccttctttgattagctccttccctt

SEQ ID NO: 10659 - DNA, 122 bp, Homo sapiens
  misc_feature (61)..(62): /note="This region represents a CpG dinucleotide"
  misc_feature (61)..(61): /note="Nucleotide may be methylated to form 5-methylcytosine"
ccttccagcgatgatcccaccagccacatgaggtcaccaagctcttgaaaaccctggcaacgtgcattaagtgtgaaatgcacatgaggtttcaaagactgggaacaagagaagacatacgg

SEQ ID NO: 10660 - DNA, 122 bp, Homo sapiens
  misc_feature (61)..(62): /note="This region represents a CpG dinucleotide"
  misc_feature (61)..(61): /note="Nucleotide may be methylated to form 5-methylcytosine"
tgactcaagactctgatccttcagtgtttgtgggttcagagcagagcctgggaatgagcccgctggggagcaggacactgactccaccataggacagggctcaggatcattggttaatggtt

SEQ ID NO: 10661 - DNA, 122 bp, Homo sapiens
  misc_feature (61)..(62): /note="This region represents a CpG dinucleotide"
  misc_feature (61)..(61): /note="Nucleotide may be methylated to form 5-methylcytosine"
gtccgttcccacatggggagacttccatgttaacaataggttattgtagtgcggctggcccggaggactggggactgtgaaaataaattaagagtgggccggtcggagctgcaacagtcatc

SEQ ID NO: 10662 - DNA, 122 bp, Homo sapiens
  misc_feature (61)..(62): /note="This region represents a CpG dinucleotide"
  misc_feature (61)..(61): /note="Nucleotide may be methylated to form 5-methylcytosine"
gcaactaggaatcaataacaaaaggaaccttggaaagttcacaaacacatggaaattaaacgacatgctccggaacaaccaatgggtcaatgaaagaaattaagaaggaaatttaaaaattt

SEQ ID NO: 10663 - DNA, 122 bp, Homo sapiens
  misc_feature (61)..(62): /note="This region represents a CpG dinucleotide"
  misc_feature (61)..(61): /note="Nucleotide may be methylated to form 5-methylcytosine"
gagtaggagttagccaagcgaagagagtggagacatgttctggacaaagggaacagaatacgtctggaagcctgagagagcttatgttagagaaacatactaaggtacagctggggtaaggc

SEQ ID NO: 10664 - DNA, 122 bp, Homo sapiens
  misc_feature (61)..(62): /note="This region represents a CpG dinucleotide"
  misc_feature (61)..(61): /note="Nucleotide may be methylated to form 5-methylcytosine"
cattcagttttgcaagtctaatagtcatcctgaatcatcaccctagagcggcctgtattccgttccaactcgtggcttcagcttaccattcaagatgcaagaaagtaaaatattaatattgg

SEQ ID NO: 10665 - DNA, 122 bp, Homo sapiens
  misc_feature (61)..(62): /note="This region represents a CpG dinucleotide"
  misc_feature (61)..(61): /note="Nucleotide may be methylated to form 5-methylcytosine"
ccacggcctggcccctggggtgcaccagctaacctctccaaggccaagtttccccaaacacgggagaaagtcacagcacctacctcgtagggtcattgtgaaaatgaagtgagaaaatgccc

SEQ ID NO: 10666 - DNA, 122 bp, Homo sapiens
  misc_feature (61)..(62): /note="This region represents a CpG dinucleotide"
  misc_feature (61)..(61): /note="Nucleotide may be methylated to form 5-methylcytosine"
gggactatctaagagccccagatacacaaaggcaaggcagaatgactggttttccctccgcgccttcctggtggaaccacatgttcatgagatgtattagagcgtgtcacattattcaggta

SEQ ID NO: 10667 - DNA, 122 bp, Homo sapiens
  misc_feature (61)..(62): /note="This region represents a CpG dinucleotide"
  misc_feature (61)..(61): /note="Nucleotide may be methylated to form 5-methylcytosine"
caaaaacaaaagaagaaatgcctagcttgggatgtaaagaatctacatgacagatgggtgcgtctgtcatcccagtgtgagataagagaaaaatgtaagctgatgcagaagagaccttgagc

SEQ ID NO: 10668 - DNA, 122 bp, Homo sapiens
  misc_feature (61)..(62): /note="This region represents a CpG dinucleotide"
  misc_feature (61)..(61): /note="Nucleotide may be methylated to form 5-methylcytosine"
tgtgagaaatgcaattttgcctggagtatttcaacaggcaccctcagctgatgtgtttgccgttggcctggctgacactttcttagaaacacactgcagtttgctgcaggttgaattgcctt

SEQ ID NO: 10669 - DNA, 122 bp, Homo sapiens
  misc_feature (61)..(62): /note="This region represents a CpG dinucleotide"
  misc_feature (61)..(61): /note="Nucleotide may be methylated to form 5-methylcytosine"
tcctggcagaccctccttatttggaatgctggctaagcattttgccatctactctccacacggccaacagcagttgctagtgtgtgtttaagcttgttttgtttctgctttttaaaggaatc

SEQ ID NO: 10670 - DNA, 122 bp, Homo sapiens
  misc_feature (61)..(62): /note="This region represents a CpG dinucleotide"
  misc_feature (61)..(61): /note="Nucleotide may be methylated to form 5-methylcytosine"
tcattctgactgaaggaaaacttttgctttctgcatggagctttgtatagaaacccggcacgacagggcactttcgggtcatgccttgagtcttaagaaatattgaaaaatataatctaaca

SEQ ID NO: 10671 - DNA, 122 bp, Homo sapiens
  misc_feature (61)..(62): /note="This region represents a CpG dinucleotide"
  misc_feature (61)..(61): /note="Nucleotide may be methylated to form 5-methylcytosine"
acactggacactcgggcatggtgctggagtttgtcatctcttccatggccttctgtagaccgtagcacttacctcatgttagcactttatattctgcaaagagagaaacaagtggtccaaat

SEQ ID NO: 10672 - DNA, 122 bp, Homo sapiens
  misc_feature (61)..(62): /note="This region represents a CpG dinucleotide"
  misc_feature (61)..(61): /note="Nucleotide may be methylated to form 5-methylcytosine"
aatctttacaggcctctgttctactgtcattccagtgtttgtccaggtgtggctcctgaccgtctgtgtgcctttacctggatgcttggtgaaaatgcagattcatggcctcccctccactc

SEQ ID NO: 10673 - DNA, 122 bp, Homo sapiens
  misc_feature (61)..(62): /note="This region represents a CpG dinucleotide"
  misc_feature (61)..(61): /note="Nucleotide may be methylated to form 5-methylcytosine"
tttgctcttttgggcctgggatgctaacagtttcctgttcttgctggttccagatgcattcgtattccttgaagattcccttactactgtgtacacttctgaaagcagtcccttattaaaat

SEQ ID NO: 10674 - DNA, 122 bp, Homo sapiens
  misc_feature (61)..(62): /note="This region represents a CpG dinucleotide"
  misc_feature (61)..(61): /note="Nucleotide may be methylated to form 5-methylcytosine"
gtgccacccaccagcattttgagagcaggatgagcaagtgctctcggttcctcaatgacacgtctctgcctcacagctgcttcaggatccagcattatgctggaaaggtatgggggagctgt

SEQ ID NO: 10675 - DNA, 122 bp, Homo sapiens
  misc_feature (61)..(62): /note="This region represents a CpG dinucleotide"
  misc_feature (61)..(61): /note="Nucleotide may be methylated to form 5-methylcytosine"
aaagaaaagccaaagtagctggagttcagtgagtcaaaggaagtggtagaagttgagatacgatagctagacagggccagatacctagggctgcatagattttgttctaattctaatataag

SEQ ID NO: 10676 - DNA, 122 bp, Homo sapiens
  misc_feature (61)..(62): /note="This region represents a CpG dinucleotide"
  misc_feature (61)..(61): /note="Nucleotide may be methylated to form 5-methylcytosine"
ttaaagcctcagctctgctcctaactagtgactacggtcagatgccctcccttccctaagcgccagttttacattgctcatatgtaaaatacaggaatggggaaattggacaaatgatctca

SEQ ID NO: 10677 - DNA, 122 bp, Homo sapiens
  misc_feature (61)..(62): /note="This region represents a CpG dinucleotide"
  misc_feature (61)..(61): /note="Nucleotide may be methylated to form 5-methylcytosine"
tgtacatcaagggtgtcacctgtctagggtagggtaatatagagtagttgttctcaaatgcgagcattggagtgacctggagggcttgtaaaatacagaaggtcacctacattctcaggatt

SEQ ID NO: 10678 - DNA, 122 bp, Homo sapiens
  misc_feature (61)..(62): /note="This region represents a CpG dinucleotide"
  misc_feature (61)..(61): /note="Nucleotide may be methylated to form 5-methylcytosine"
ctcgctaaagccccgcagcctggattcagttgtccttattgcataaacctaaccgcattacggcacttggcatgcaaatcgcttctgtgctgcaggccgggtgctgggcagggctcgcggaa

SEQ ID NO: 10679 - DNA, 122 bp, Homo sapiens
  misc_feature (61)..(62): /note="This region represents a CpG dinucleotide"
  misc_feature (61)..(61): /note="Nucleotide may be methylated to form 5-methylcytosine"
tgatttaatgcctttcggtgcgatttattcacagtgttgtcccttatctttcataatctccgttattttttgaccttaacaaaagaatgaaaggaaaaccgcatccttgccttcccttgtta

SEQ ID NO: 10680 - DNA, 122 bp, Homo sapiens
  misc_feature (61)..(62): /note="This region represents a CpG dinucleotide"
  misc_feature (61)..(61): /note="Nucleotide may be methylated to form 5-methylcytosine"
gttacctagcagtgacttctggctttaaccttcaggcttctggccaagtgtggtgactcacgcctgtaatctcagcactttgggaggctgagatgggaggattgcttgagtccaggagttcg

SEQ ID NO: 10681 - DNA, 122 bp, Homo sapiens
  misc_feature (61)..(62): /note="This region represents a CpG dinucleotide"
  misc_feature (61)..(61): /note="Nucleotide may be methylated to form 5-methylcytosine"
ccagatcctggaaattatgaacccggtcccatttgtattaattaaaaactctttgaagtacgaattttcatgatacaagcaagagaagtcaggttaaaagaatggtaagaggaagagcaaag

SEQ ID NO: 10682 - DNA, 122 bp, Homo sapiens
  misc_feature (61)..(62): /note="This region represents a CpG dinucleotide"
  misc_feature (61)..(61): /note="Nucleotide may be methylated to form 5-methylcytosine"
tcatattgtggctttgatggggagaatactgtttgtaccttgtacttacttttcaatttacgaagagtaatggtaaagagtatcaaaaaatttgatgccaatcttgattgatacacaattaa

SEQ ID NO: 10683 - DNA, 122 bp, Homo sapiens
  misc_feature (61)..(62): /note="This region represents a CpG dinucleotide"
  misc_feature (61)..(61): /note="Nucleotide may be methylated to form 5-methylcytosine"
cagaagtaagtgcctgagtcatacctaggagtttggattgcaccacagagatgctgggagcgtacatcaaaagccttctcctcctccacagagattaggagagaaagagcacaggccgatgc

SEQ ID NO: 10684 - DNA, 122 bp, Homo sapiens
  misc_feature (61)..(62): /note="This region represents a CpG dinucleotide"
  misc_feature (61)..(61): /note="Nucleotide may be methylated to form 5-methylcytosine"
tttttccaacttggtagcatcccattgtgtcctcttacagggccaattagccatgttaaacgtctaatagcctggcaggatcagagctctcccaactcacatccctatactggtgaaagcat

SEQ ID NO: 10685 - DNA, 122 bp, Homo sapiens
  misc_feature (61)..(62): /note="This region represents a CpG dinucleotide"
  misc_feature (61)..(61): /note="Nucleotide may be methylated to form 5-methylcytosine"
cactcaaaatctggtccaagtcctggtgtggtcctgaaactgttgcttgctggtttaagacgagataagtactgaaactgagagtaagtgtatcttaatctgttcaggctactatagaagaa

SEQ ID NO: 10686 - DNA, 122 bp, Homo sapiens
  misc_feature (61)..(62): /note="This region represents a CpG dinucleotide"
  misc_feature (61)..(61): /note="Nucleotide may be methylated to form 5-methylcytosine"
agcaaatcagtctcctggagcgactgagagccttgccatgttgctcccactggagacattcggcagggggaaggggttggtcgtaatccgggtttaatttctccagggcctccattatgaat

SEQ ID NO: 10687 - DNA, 122 bp, Homo sapiens
  misc_feature (61)..(62): /note="This region represents a CpG dinucleotide"
  misc_feature (61)..(61): /note="Nucleotide may be methylated to form 5-methylcytosine"
aatgacttttgcttggaggctctctgcccctcttagggggctgcatggattctccatgggcgctgttgcccatgcatcttctctgtgcagcttcctgtgcctgactgtttagacctcaccgc

SEQ ID NO: 10688 - DNA, 122 bp, Homo sapiens
  misc_feature (61)..(62): /note="This region represents a CpG dinucleotide"
  misc_feature (61)..(61): /note="Nucleotide may be methylated to form 5-methylcytosine"
acccagaggaagtactggatatagcaaagctacatggatttaaaacaatgcctgtgtgggcgtcttgattagtggcctgatattcctcattacttccatattagggcaggcttagtgacata

SEQ ID NO: 10689 - DNA, 122 bp, Homo sapiens
  misc_feature (61)..(62): /note="This region represents a CpG dinucleotide"
  misc_feature (61)..(61): /note="Nucleotide may be methylated to form 5-methylcytosine"
aaggtgaatctcctgcctgacaccttgtagagattagtgtatccagctattctattgccacgatgcctctaaaaaccagactgactgggaacagcagtagggggttggccagtgagggcagg

SEQ ID NO: 10690 - DNA, 122 bp, Homo sapiens
  misc_feature (61)..(62): /note="This region represents a CpG dinucleotide"
  misc_feature (61)..(61): /note="Nucleotide may be methylated to form 5-methylcytosine"
agggtgtgctctggagcctggcctgggttctgtcccggctgagcaggtgacgataattcacgaatcggcagagctctgtgtgggcagtgctgtcacctgagccagtggttgggctgggagtc

SEQ ID NO: 10691 - DNA, 122 bp, Homo sapiens
  misc_feature (61)..(62): /note="This region represents a CpG dinucleotide"
  misc_feature (61)..(61): /note="Nucleotide may be methylated to form 5-methylcytosine"
tttagaaaaatgggggtactcggaaacaaagccagttatcccaatctgtggtcagcctatcgcccgtggagtcgtatcccttggtgggctgtgttttcatagcctctaggtaacacaggcac

SEQ ID NO: 10692 - DNA, 122 bp, Homo sapiens
  misc_feature (61)..(62): /note="This region represents a CpG dinucleotide"
  misc_feature (61)..(61): /note="Nucleotide may be methylated to form 5-methylcytosine"
tcatatggcaaaggtgaagggacttttcagatataattaagctctctaatcagttaacttcgggttaatcaaaagaagattctcttgggttttgaaggtgagcccttcaataaaaaacatag

SEQ ID NO: 10693 - DNA, 122 bp, Homo sapiens
  misc_feature (61)..(62): /note="This region represents a CpG dinucleotide"
  misc_feature (61)..(61): /note="Nucleotide may be methylated to form 5-methylcytosine"
aaaagctgtttggttcagcctagaaaggctagtaaacaactctgggtggtgcagggcctacggaaccaccctcacttcccctagcctgaatttgcacgtaaatccagcaggagacaaagtta

SEQ ID NO: 10694 - DNA, 122 bp, Homo sapiens
  misc_feature (61)..(62): /note="This region represents a CpG dinucleotide"
  misc_feature (61)..(61): /note="Nucleotide may be methylated to form 5-methylcytosine"
gcctgactcctgccatttaatggtaattaaaataaaatgatgggccggcaccgtggctcacgcctattaatcttggcactatgtgaggcctgaggcaggcttaagcctaggagtttgagacc

SEQ ID NO: 10695 - DNA, 122 bp, Homo sapiens
  misc_feature (61)..(62): /note="This region represents a CpG dinucleotide"
  misc_feature (61)..(61): /note="Nucleotide may be methylated to form 5-methylcytosine"
tctccatccaaaaagggtcacagatacagcgtttggtgaacgagtcacagtggccatggtcggaacagttcagctgacatgctgagagtggcagcaaagggaagaaagtcaacaagactcag

SEQ ID NO: 10696 - DNA, 122 bp, Homo sapiens
  misc_feature (61)..(62): /note="This region represents a CpG dinucleotide"
  misc_feature (61)..(61): /note="Nucleotide may be methylated to form 5-methylcytosine"
ctgtgtgaccttgggtgagtccctgtccctctctgaggctcactttcctcatttgtaaaacggagagctctcttaaatttttttttttttttgagacagtcttactctgttgcccaagctgg

SEQ ID NO: 10697 - DNA, 122 bp, Homo sapiens
  misc_feature (61)..(62): /note="This region represents a CpG dinucleotide"
  misc_feature (61)..(61): /note="Nucleotide may be methylated to form 5-methylcytosine"
ttgccatggaacatgtgacccatatgaataacgtctgcctggtgtgcggtgctgaataaacgtttgaggatccctgggccaactgccctcagggtgcttccagctgatataatcttgaattc

SEQ ID NO: 10698 - DNA, 122 bp, Homo sapiens
  misc_feature (61)..(62): /note="This region represents a CpG dinucleotide"
  misc_feature (61)..(61): /note="Nucleotide may be methylated to form 5-methylcytosine"
ctgtctttcaaaatgacaggcacaagacctgtccctttcactcctgctggtactcagtgacgtacagtcatgcatctttcaacatcaagaatatgttctgagaaatgtgtcatttggtgatt

SEQ ID NO: 10699 - DNA, 122 bp, Homo sapiens
  misc_feature (61)..(62): /note="This region represents a CpG dinucleotide"
  misc_feature (61)..(61): /note="Nucleotide may be methylated to form 5-methylcytosine"
ggagagtgctgattggttaggtcagagatgaagtcatagggagtggaagctgtccttttgcgctgagtcagttactgggtaggggccactagaccagatgagccagtctatcgatctgggtg

SEQ ID NO: 10700 - DNA, 122 bp, Homo sapiens
  misc_feature (61)..(62): /note="This region represents a CpG dinucleotide"
  misc_feature (61)..(61): /note="Nucleotide may be methylated to form 5-methylcytosine"
tcaagattccaactctggctgtctgacttcaaagctatcttcttctgtatctgtatctcacgttgatttgtgttaatttaaattagggaatgacttaacaatatgtaaagatagtaccttga

SEQ ID NO: 10701 - DNA, 122 bp, Homo sapiens
  misc_feature (61)..(62): /note="This region represents a CpG dinucleotide"
  misc_feature (61)..(61): /note="Nucleotide may be methylated to form 5-methylcytosine"
gtaaagtagaggggccaggtagagatcctgctgacctggcaagcacatgttccctccagtcggggcgttgaccgctcagcagcaggtctagtgtcacccagtctttctagttctcaggagaa

SEQ ID NO: 10702 - DNA, 122 bp, Homo sapiens
  misc_feature (61)..(62): /note="This region represents a CpG dinucleotide"
  misc_feature (61)..(61): /note="Nucleotide may be methylated to form 5-methylcytosine"
ttatatatagaaaaataaaacagatgctctcactacaaaactttcttggctaattcttaccgtaacataggataaaaattttatccaacatttctcaataacgtgttgttttttcagttgta

SEQ ID NO: 10703 - DNA, 122 bp, Homo sapiens
  misc_feature (61)..(62): /note="This region represents a CpG dinucleotide"
  misc_feature (61)..(61): /note="Nucleotide may be methylated to form 5-methylcytosine"
gcatgtggacaagtgaccagtctccagttgactgtaaaggctggctttcatcaccaccagcgggctaacctcctacatatatctgtgtgtctacggcaaggtcgacagaacccatatataag

SEQ ID NO: 10704 - DNA, 122 bp, Homo sapiens
  misc_feature (61)..(62): /note="This region represents a CpG dinucleotide"
  misc_feature (61)..(61): /note="Nucleotide may be methylated to form 5-methylcytosine"
attattgtcaaacatatagaagaccttcgtaattccctgagttaatctgtgtgattcattcgtcacaaattcctgcacctattgtaaccaaagctttcagtcacatcctctgcctcttttaa

SEQ ID NO: 10705 - DNA, 122 bp, Homo sapiens
  misc_feature (61)..(62): /note="This region represents a CpG dinucleotide"
  misc_feature (61)..(61): /note="Nucleotide may be methylated to form 5-methylcytosine"
ctgtccagaatctatctgttcaaccacctgaaatttccttccaccaaatgtgggctacatcgacaagaggggaaaggagatggcaaatgttgtgactggaacccattttggaagtctgagtc

SEQ ID NO: 10706 - DNA, 122 bp, Homo sapiens
  misc_feature (61)..(62): /note="This region represents a CpG dinucleotide"
  misc_feature (61)..(61): /note="Nucleotide may be methylated to form 5-methylcytosine"
gtgctctgagtgtgagagtccagctgtgcgttggtggagtgactcatttttccatggagacgtgtattcctatgaatcccaggggcctctgattggtatgaaagagcaatcagcacagatgt

SEQ ID NO: 10707 - DNA, 122 bp, Homo sapiens
  misc_feature (61)..(62): /note="This region represents a CpG dinucleotide"
  misc_feature (61)..(61): /note="Nucleotide may be methylated to form 5-methylcytosine"
gcccacttgacaaattccagagagtgtctggatccacccacacagctgtgaatggacaggcgtagggtaggggagaagagacacaaatcttggctctctccagcccgtccctatttctggac

SEQ ID NO: 10708 - DNA, 122 bp, Homo sapiens
  misc_feature (61)..(62): /note="This region represents a CpG dinucleotide"
  misc_feature (61)..(61): /note="Nucleotide may be methylated to form 5-methylcytosine"
gtagagcgaggacactttcggaatccaggaggccatctggaaggatcccagaccacacaacggagcaacgtgtgtatccccatatctgcagaatgtgtgcatgactgagatcattaacagac

SEQ ID NO: 10709 - DNA, 122 bp, Homo sapiens
  misc_feature (61)..(62): /note="This region represents a CpG dinucleotide"
  misc_feature (61)..(61): /note="Nucleotide may be methylated to form 5-methylcytosine"
tgaactcctgacctcaagcgatccacccgcctcagtctcccaaagtgctgggattccaggcgtgagccagcgtgcccagcctgctgactgtattcttacaatgtgacttaacatgtttgttt

SEQ ID NO: 10710 - DNA, 122 bp, Homo sapiens
  misc_feature (61)..(62): /note="This region represents a CpG dinucleotide"
  misc_feature (61)..(61): /note="Nucleotide may be methylated to form 5-methylcytosine"
accctgagctcaactcaggtcacagacacttatcaaacttggtgttgtccttcctggctgcgcctccctgggaaggaggggcccccgcagcagcagagcccacgtgatgtggggaaatcagt

SEQ ID NO: 10711 - DNA, 122 bp, Homo sapiens
  misc_feature (61)..(62): /note="This region represents a CpG dinucleotide"
  misc_feature (61)..(61): /note="Nucleotide may be methylated to form 5-methylcytosine"
cctaggataccactttctaccaaactgttacttggttggcattttctagtgttaggtcatcggttttctttggctttctttctctttcttcccccgggtgtttatccaacctgcctttcact

SEQ ID NO: 10712 - DNA, 122 bp, Homo sapiens
  misc_feature (61)..(62): /note="This region represents a CpG dinucleotide"
  misc_feature (61)..(61): /note="Nucleotide may be methylated to form 5-methylcytosine"
ctcaagtgatctgcctgcctcagcctcccaaagtgctaggattacaggcgtgagccaccacgagtggccaacgtctcttgaaagatagaaaccacactgagcgaaagccacatttgtgcact

SEQ ID NO: 10713 - DNA, 122 bp, Homo sapiens
  misc_feature (61)..(62): /note="This region represents a CpG dinucleotide"
  misc_feature (61)..(61): /note="Nucleotide may be methylated to form 5-methylcytosine"
accctgtgtgtgtgtgcatgctcaagcttgcatcactgtgtgcctgcacacatatgaacacgcatcgtgtctgcctgtctccatactttccagatagagtcccttccaggacctgggtcctt

SEQ ID NO: 10714 - DNA, 122 bp, Homo sapiens
  misc_feature (61)..(62): /note="This region represents a CpG dinucleotide"
  misc_feature (61)..(61): /note="Nucleotide may be methylated to form 5-methylcytosine"
caaattctaaaaaagctgtaacactgacaggttcgtcttttagtctttctactgcagatacgagcagtttacataccaaaattacagtgttataatattctgtgcttttctgtgtacttact

SEQ ID NO: 10715 - DNA, 122 bp, Homo sapiens
  misc_feature (61)..(62): /note="This region represents a CpG dinucleotide"
  misc_feature (61)..(61): /note="Nucleotide may be methylated to form 5-methylcytosine"
gctaaaagaattcagatatgcacattgtattgccataatggtaaactttatggggcttcacggttgacacgttctatcccagctagggctaccagttcatgaggtacttcctgttctggggc

SEQ ID NO: 10716 - DNA, 122 bp, Homo sapiens
  misc_feature (61)..(62): /note="This region represents a CpG dinucleotide"
  misc_feature (61)..(61): /note="Nucleotide may be methylated to form 5-methylcytosine"
aatatgtgagcatacacaacattatagatgattctcacaaacaatgttgagtagaaaaagcgaggtccaaggaataaagttcatattaagttccaaaacaggccaaattaacctatgctgtc

SEQ ID NO: 10717 - DNA, 122 bp, Homo sapiens
  misc_feature (61)..(62): /note="This region represents a CpG dinucleotide"
  misc_feature (61)..(61): /note="Nucleotide may be methylated to form 5-methylcytosine"
aggagaaggaggaaggtttttgtttcttctccagcagctggatttagaaaagaagacaggcgtgaaatgtgtgggtagatctgtttcaacaatggcaagaactaccaattgtgtaatccagt

SEQ ID NO: 10718 - DNA, 122 bp, Homo sapiens
  misc_feature (61)..(62): /note="This region represents a CpG dinucleotide"
  misc_feature (61)..(61): /note="Nucleotide may be methylated to form 5-methylcytosine"
gagggtcttgagtgcaagttgtccagattcttggggttttgaacaaagaattgaacaaaacgcactgcaaagcaaggaaagcagagatttattgaaagtgaaagtacacttcacagtgtggg

SEQ ID NO: 10719 - DNA, 122 bp, Homo sapiens
  misc_feature (61)..(62): /note="This region represents a CpG dinucleotide"
  misc_feature (61)..(61): /note="Nucleotide may be methylated to form 5-methylcytosine"
gagtgtccgtggggaaaggcaaacctgccgctgagttggaagacaacagctgctaacacacgaagcctcagaaagccctcgccaggactcagagattctctcgagtgactcgtgtggcaaac

SEQ ID NO: 10720 - DNA, 122 bp, Homo sapiens
  misc_feature (61)..(62): /note="This region represents a CpG dinucleotide"
  misc_feature (61)..(61): /note="Nucleotide may be methylated to form 5-methylcytosine"
atttgaaggaacagggaaatacaaattttaaaaagacaaattttctgtagttgtataaagcgacatctacatttaatggacatgctaggctgttgtgggagaaatgtggttagagatgagga

SEQ ID NO: 10721 - DNA, 122 bp, Homo sapiens
  misc_feature (61)..(62): /note="This region represents a CpG dinucleotide"
  misc_feature (61)..(61): /note="Nucleotide may be methylated to form 5-methylcytosine"
tccagacccagtggctacaaactcttaataagcacagaagctgcttttccttcctccaagcgaaacatcataaaaagtaagtgacagcaattgtgaccctatctgtagaagtttatgagaac

SEQ ID NO: 10722 - DNA, 122 bp, Homo sapiens
  misc_feature (61)..(62): /note="This region represents a CpG dinucleotide"
  misc_feature (61)..(61): /note="Nucleotide may be methylated to form 5-methylcytosine"
gttccttttgatcagagccacatcagtgtctcaggtttctagtctccatttatagctaaccggaagcatcaggtcctctcatgaatatacccctgtggtattaaagtgactgtgtctgaata

SEQ ID NO: 10723 - DNA, 122 bp, Homo sapiens
  misc_feature (61)..(62): /note="This region represents a CpG dinucleotide"
  misc_feature (61)..(61): /note="Nucleotide may be methylated to form 5-methylcytosine"
tggtaagagcctgggaagagatgctgtctgtggtgagcacgtgatagacattccacgacccgacctgtcggtgccctggttctcattgtttcttctcatttccagctgcatttatctcttgt

SEQ ID NO: 10724 - DNA, 122 bp, Homo sapiens
  misc_feature (61)..(62): /note="This region represents a CpG dinucleotide"
  misc_feature (61)..(61): /note="Nucleotide may be methylated to form 5-methylcytosine"
gggactgagcagcccctttctaaggaaagctaatgcttactgagcacttatatcagatatcgtgccaagtgccttatgcacactatctccttgaatcctcaaagcagccttacagaaagtct

SEQ ID NO: 10725 - DNA, 122 bp, Homo sapiens
  misc_feature (61)..(62): /note="This region represents a CpG dinucleotide"
  misc_feature (61)..(61): /note="Nucleotide may be methylated to form 5-methylcytosine"
gccattatagctcaaaagcaggcctagacgagacataaataaataggcagagctgtgttgcgcaaactttatttaccaaaacaagttgggtccagatttggcctgtgggctatagtttgtgg

SEQ ID NO: 10726 - DNA, 122 bp, Homo sapiens
  misc_feature (61)..(62): /note="This region represents a CpG dinucleotide"
  misc_feature (61)..(61): /note="Nucleotide may be methylated to form 5-methylcytosine"
ttgccttttaaagtagagtgtcataggtcatattgattacacaatttttgagttagtgtgcgtcttatgtgttgaatacattagctaaaagtaagatgcttggaaaatgtgtaaactgtgaa

SEQ ID NO: 10727 - DNA, 122 bp, Homo sapiens
  misc_feature (61)..(62): /note="This region represents a CpG dinucleotide"
  misc_feature (61)..(61): /note="Nucleotide may be methylated to form 5-methylcytosine"
gaggtgctgggctgccctttgcagctggctgcctagggctagaagctcttcgggaggaggcggagaaaggggggttgagcatagaaggtgcccacctcctgctctcagcaatgtggggatag

SEQ ID NO: 10728 - DNA, 122 bp, Homo sapiens
  misc_feature (61)..(62): /note="This region represents a CpG dinucleotide"
  misc_feature (61)..(61): /note="Nucleotide may be methylated to form 5-methylcytosine"
aggcgtgagccactgcgcccagccccagccaaggctttcttgtgatttctgctcagacagcgttggctaaaatggccacacctagctacaagggaagccgagaaatttcgagttgtgaaacc

SEQ ID NO: 10729 - DNA, 122 bp, Homo sapiens
  misc_feature (61)..(62): /note="This region represents a CpG dinucleotide"
  misc_feature (61)..(61): /note="Nucleotide may be methylated to form 5-methylcytosine"
gacagggggaggggatatctcaaaagttgttggaaatgccagatatggctcatccagtgccggatcttgctgggcacctgccagctgctaaggattgtgaggccatggctgaagctgggagg

SEQ ID NO: 10730 - DNA, 122 bp, Homo sapiens
  misc_feature (61)..(62): /note="This region represents a CpG dinucleotide"
  misc_feature (61)..(61): /note="Nucleotide may be methylated to form 5-methylcytosine"
tgggatccgtggaaacttgcatggtaaggaggcttgcctgagacatgcctgcagctgcaccggtaagggcaattacacagacagctacacagataggggaagtggttttttttttttttttt

SEQ ID NO: 10731 - DNA, 122 bp, Homo sapiens
  misc_feature (61)..(62): /note="This region represents a CpG dinucleotide"
  misc_feature (61)..(61): /note="Nucleotide may be methylated to form 5-methylcytosine"
tgtaaaaacttcaaaagatgtggagtatagaatataagcaggaaagtatcagagaacatgcggtattcagattctgaaggagtttaaggtccaattaagcaatttaggggaaacagatgcac

SEQ ID NO: 10732 - DNA, 122 bp, Homo sapiens
  misc_feature (61)..(62): /note="This region represents a CpG dinucleotide"
  misc_feature (61)..(61): /note="Nucleotide may be methylated to form 5-methylcytosine"
acttctgttccttactaccagttggcctttgagaggcccctcaggtcccagccatgtggccgtctctagagggcagcactcagcatagaggctggcttcatccaagtgaacaagtggagaga

SEQ ID NO: 10733 - DNA, 122 bp, Homo sapiens
  misc_feature (61)..(62): /note="This region represents a CpG dinucleotide"
  misc_feature (61)..(61): /note="Nucleotide may be methylated to form 5-methylcytosine"
aagtgatgtaaaccacttccaggtctggcccttaaaagtgaaagcagtgattggtatctgcgaaagttaaatgtatgctggccccatgacgtagcacatctactcttaggtatatgctcaag

SEQ ID NO: 10734 - DNA, 122 bp, Homo sapiens
  misc_feature (61)..(62): /note="This region represents a CpG dinucleotide"
  misc_feature (61)..(61): /note="Nucleotide may be methylated to form 5-methylcytosine"
tcagcgtggggtttgcttagaaaaatctcccacgcaatttgagcttaggttgggccaaaacggacatcctgggaagctcacattgtggacaataatttgtctggtggatttggagagttcat

SEQ ID NO: 10735 - DNA, 122 bp, Homo sapiens
  misc_feature (61)..(62): /note="This region represents a CpG dinucleotide"
  misc_feature (61)..(61): /note="Nucleotide may be methylated to form 5-methylcytosine"
gtttttgctttttgtaagtggttgtggttttcctgttcagcctgctgcgactggaccgtccgtctacataagtaccccctaataaaaacctgtcgtgtttgctggccctgggtctcttcttc

SEQ ID NO: 10736 - DNA, 122 bp, Homo sapiens
  misc_feature (61)..(62): /note="This region represents a CpG dinucleotide"
  misc_feature (61)..(61): /note="Nucleotide may be methylated to form 5-methylcytosine"
gtctctccttctctgttaaatggctttattgagatataattcataaataaaaaaactgcacgtttgatatgtgcagtttgatgtgtttggatctatgtatacattggcaatactatcaccac

SEQ ID NO: 10737 - DNA, 122 bp, Homo sapiens
  misc_feature (61)..(62): /note="This region represents a CpG dinucleotide"
  misc_feature (61)..(61): /note="Nucleotide may be methylated to form 5-methylcytosine"
atgcagataatacaggcatgatttctgcctcctgaaatgctcagatgatatgcacttctccgtccccctaaagatttaaggaagtacacatttatcatgggatgtaatgagtaggaaagagc

SEQ ID NO: 10738 - DNA, 122 bp, Homo sapiens
  misc_feature (61)..(62): /note="This region represents a CpG dinucleotide"
  misc_feature (61)..(61): /note="Nucleotide may be methylated to form 5-methylcytosine"
gatgggaaaggtgtggcacgttcaaatgaagcattttgtgtttttcctgccgtcatagtccgttcccaaagggcaacaggcattggaaggttgatggtgaacgtggttgaaggcatcgagtt

SEQ ID NO: 10739 - DNA, 122 bp, Homo sapiens
  misc_feature (61)..(62): /note="This region represents a CpG dinucleotide"
  misc_feature (61)..(61): /note="Nucleotide may be methylated to form 5-methylcytosine"
gagattcagcctcctagaagctgctcagtcagaggcctgacagtataactgcagagaacacgtgtccagcccaataagctgttctacctcgtcatataatctaaacgtacaggtacaaaaag

SEQ ID NO: 10740 - DNA, 122 bp, Homo sapiens
  misc_feature (61)..(62): /note="This region represents a CpG dinucleotide"
  misc_feature (61)..(61): /note="Nucleotide may be methylated to form 5-methylcytosine"
gggcctacctgtgcgtctgcccagagagcttcttcggctaccactgcgagacaggtagggcggcaggcctgcctgctccccgccctctgcccgcctgctccccgccctctgcccgcctgctg

SEQ ID NO: 10741 - DNA, 122 bp, Homo sapiens
  misc_feature (61)..(62): /note="This region represents a CpG dinucleotide"
  misc_feature (61)..(61): /note="Nucleotide may be methylated to form 5-methylcytosine"
ggctgctaggtgtgttgggctccaggagggccgtcagaaggagggctttttggcaccccccggggtcacagagtgtgcgcccagggcgtggggccggccagcggacgggcgggggcgtactg

SEQ ID NO: 10742 - DNA, 122 bp, Homo sapiens
  misc_feature (61)..(62): /note="This region represents a CpG dinucleotide"
  misc_feature (61)..(61): /note="Nucleotide may be methylated to form 5-methylcytosine"
gttcggcccctccccaggcccctccccgcccccccccccccccggcccggcctcaggccccgccctctctgcgcacaggcttctttgcctacacgtgcggccgcctggtggtggtggaggac

SEQ ID NO: 10743 - DNA, 122 bp, Homo sapiens
  misc_feature (61)..(62): /note="This region represents a CpG dinucleotide"
  misc_feature (61)..(61): /note="Nucleotide may be methylated to form 5-methylcytosine"
agtaacaaggtgctgggaccaatcaggaacttgtcttctcaggaacgtacctgtttattgcgtggatgggggggggtggggcacaggacagccgtgcacaggcgtagtagtcaccaatagac

SEQ ID NO: 10744 - DNA, 122 bp, Homo sapiens
  misc_feature (61)..(62): /note="This region represents a CpG dinucleotide"
  misc_feature (61)..(61): /note="Nucleotide may be methylated to form 5-methylcytosine"
tgttttggcagataaacctctcataatgaaggcccccgctgtgcttgcacctggcatcctcgtgctcctgtttaccttggtgcagaggagcaatggggagtgtaaagaggcactagcaaagt

SEQ ID NO: 10745 - DNA, 122 bp, Homo sapiens
  misc_feature (61)..(62): /note="This region represents a CpG dinucleotide"
  misc_feature (61)..(61): /note="Nucleotide may be methylated to form 5-methylcytosine"
ttctattgttgctccaggactccgaacccagtgattaagactgtgactagagccagatgtcgtggctcacgcctgtaatctcagcactttgggaggctgaggcgggtggatcacctgaggtc

SEQ ID NO: 10746 - DNA, 122 bp, Homo sapiens
  misc_feature (61)..(62): /note="This region represents a CpG dinucleotide"
  misc_feature (61)..(61): /note="Nucleotide may be methylated to form 5-methylcytosine"
aatatagcaaggaagtggactttagtcattgttccaatgctacgtaaatagatgcatcctcgctagctcagagatcagtttttcctgctctcatcaatccttgggagctcatcgcaaaagat

SEQ ID NO: 10747 - DNA, 122 bp, Homo sapiens
  misc_feature (61)..(62): /note="This region represents a CpG dinucleotide"
  misc_feature (61)..(61): /note="Nucleotide may be methylated to form 5-methylcytosine"
ttatttaggacattatatttaacgtcaattctggtgacccaatagaaggtctcatgacctcgtcttttttataccctcagatacatgaggtttgcacctctacttccttagtcactcttatg

SEQ ID NO: 10748 - DNA, 122 bp, Homo sapiens
  misc_feature (61)..(62): /note="This region represents a CpG dinucleotide"
  misc_feature (61)..(61): /note="Nucleotide may be methylated to form 5-methylcytosine"
tttctggggttttaagccactacatgtgtgcaatttgttccagcagcaataggaaactgacgcactgcttctttctcaggactagatgcaaacctccaggaggccttctgcaacacaccttg

SEQ ID NO: 10749 - DNA, 122 bp, Homo sapiens
  misc_feature (61)..(62): /note="This region represents a CpG dinucleotide"
  misc_feature (61)..(61): /note="Nucleotide may be methylated to form 5-methylcytosine"
ctgggcccctcagacctggcctagctcctgctgggtggaggcacagcatgaggtgaggcgcgtgtgtctatctccatcagctagatcctcaaagcattcaaggtcagaactggggtcttccc

SEQ ID NO: 10750 - DNA, 122 bp, Homo sapiens
  misc_feature (61)..(62): /note="This region represents a CpG dinucleotide"
  misc_feature (61)..(61): /note="Nucleotide may be methylated to form 5-methylcytosine"
acacccgggccagggtggctcaagggagccgtgggtgcactgcctgggtcaaacacccttcgcgaatgtgtcccccagcttgtccccagcttgtgtcaccccagctacacaagttccattct

SEQ ID NO: 10751 - DNA, 122 bp, Homo sapiens
  misc_feature (61)..(62): /note="This region represents a CpG dinucleotide"
  misc_feature (61)..(61): /note="Nucleotide may be methylated to form 5-methylcytosine"
cctagaatgaagtggaatctgtttagagggctcatgtaagaagtgagtcatacattgtggcgcagtaaagatgaccaggaggatacagacagggaaggggatatcacagaactggcccagag

SEQ ID NO: 10752 - DNA, 122 bp, Homo sapiens
  misc_feature (61)..(62): /note="This region represents a CpG dinucleotide"
  misc_feature (61)..(61): /note="Nucleotide may be methylated to form 5-methylcytosine"
cttcagctagtttttgacaccttagatttcttagatgtgagtcagacagtgagtatatcacggggttccccagtcctttgaggacatgcatgaaacttgtcaatggtctcactgaagccaca

SEQ ID NO: 10753 - DNA, 122 bp, Homo sapiens
  misc_feature (61)..(62): /note="This region represents a CpG dinucleotide"
  misc_feature (61)..(61): /note="Nucleotide may be methylated to form 5-methylcytosine"
ctccagcctgggtgacagagcaagactctcagccaaaaaaaaaaaaaaaaagaagtgaagcggggaaaaaaacaacagaataaaccaaacaaataaggaaaaataggccacgtgtggtggct

SEQ ID NO: 10754 - DNA, 122 bp, Homo sapiens
  misc_feature (61)..(62): /note="This region represents a CpG dinucleotide"
  misc_feature (61)..(61): /note="Nucleotide may be methylated to form 5-methylcytosine"
ccgaactccctgtgctacttaatggccctgtactcatgccatttcttctatctgaaataccgttccctgccctgccacccccaacccctcctttgcccccaaataacttctcagggcttcat

SEQ ID NO: 10755 - DNA, 122 bp, Homo sapiens
  misc_feature (61)..(62): /note="This region represents a CpG dinucleotide"
  misc_feature (61)..(61): /note="Nucleotide may be methylated to form 5-methylcytosine"
aaattctactgacacttattcttaatttttttaagagacagctgtaacattgtttacaaacgtataaataccatcccagcgagaaactagctttgtgcttctgtcataaaagagacacaggt

SEQ ID NO: 10756 - DNA, 122 bp, Homo sapiens
  misc_feature (61)..(62): /note="This region represents a CpG dinucleotide"
  misc_feature (61)..(61): /note="Nucleotide may be methylated to form 5-methylcytosine"
aagtgacttgttcaaggtcacacagcaacttgagacagagccaaaactggaaccagttctcgtacttttcctactatctttcagcctcttctggggtgctcaatcatgatattgcatgaccc

SEQ ID NO: 10757 - DNA, 122 bp, Homo sapiens
  misc_feature (61)..(62): /note="This region represents a CpG dinucleotide"
  misc_feature (61)..(61): /note="Nucleotide may be methylated to form 5-methylcytosine"
taacttggccaaggttgctcagcaaataagagacaaatcagaatttacacccaggcagtccggctcagaaatctagggtcttcaccatgacacaatgccaccattccaatatctgcctttat

SEQ ID NO: 10758 - DNA, 122 bp, Homo sapiens
  misc_feature (61)..(62): /note="This region represents a CpG dinucleotide"
  misc_feature (61)..(61): /note="Nucleotide may be methylated to form 5-methylcytosine"
tgcgtgagccagttccttaaataagtcagtctctatctctgcatctacttggttctctttcgccagagaatcctgactaatacatggtgtcagcctaggtcttcactgaccccactggtctg

SEQ ID NO: 10759 - DNA, 122 bp, Homo sapiens
  misc_feature (61)..(62): /note="This region represents a CpG dinucleotide"
  misc_feature (61)..(61): /note="Nucleotide may be methylated to form 5-methylcytosine"
atttcaaacctgactcctgagtcagcagcaactccaaacaactccagattaatagcttttcggcttattgcagtgattcaacagggccatctttagggttttagaacatggccaagtcatta

SEQ ID NO: 10760 - DNA, 122 bp, Homo sapiens
  misc_feature (61)..(62): /note="This region represents a CpG dinucleotide"
  misc_feature (61)..(61): /note="Nucleotide may be methylated to form 5-methylcytosine"
acacatactacaataccaacaaaccctgcaaacatgatgctaagctcaagaatctagacacgaaaggcacatggtatacatatatgattcaacttctggaaaatgtccagaacaggaaaatc

SEQ ID NO: 10761 - DNA, 122 bp, Homo sapiens
  misc_feature (61)..(62): /note="This region represents a CpG dinucleotide"
  misc_feature (61)..(61): /note="Nucleotide may be methylated to form 5-methylcytosine"
ttttttataggactagcaggtggcaccaactatactattctaagagcaggctaggctgggcgtagtgactcatacctataatcctagtgctttggaagccaaggcaggaggatcacttgact

SEQ ID NO: 10762 - DNA, 122 bp, Homo sapiens
  misc_feature (61)..(62): /note="This region represents a CpG dinucleotide"
  misc_feature (61)..(61): /note="Nucleotide may be methylated to form 5-methylcytosine"
tgtacatctgctttggcaatagggaaacggatgatgcaaatttgagtagataaatgcatacgtgtctttaaaaagtctaattagtgggaaattgcaggccaggcgcacacagggttgaggca

SEQ ID NO: 10763 - DNA, 122 bp, Homo sapiens
  misc_feature (61)..(62): /note="This region represents a CpG dinucleotide"
  misc_feature (61)..(61): /note="Nucleotide may be methylated to form 5-methylcytosine"
atgccttgacctgccacttgatgtcatgggataactgagagcccactaccttgaagtctccgtgaagacacagtccaccgcctcaaaacactccactgatgcctccaaccccactgacctca

SEQ ID NO: 10764 - DNA, 122 bp, Homo sapiens
  misc_feature (61)..(62): /note="This region represents a CpG dinucleotide"
  misc_feature (61)..(61): /note="Nucleotide may be methylated to form 5-methylcytosine"
gaactggcctttaatcatccacatgtaggactgttctggcagcgggggttgggggggaaccgtgttaattactcacacgatgtgctgactcaaagcctttgtcattaaacctgtactaaata

SEQ ID NO: 10765 - DNA, 122 bp, Homo sapiens
  misc_feature (61)..(62): /note="This region represents a CpG dinucleotide"
  misc_feature (61)..(61): /note="Nucleotide may be methylated to form 5-methylcytosine"
ataatgctcccagtttccctcccttgagtaggtcaggaaggaggaaggtttgtgaaagaacggagctattataaaacatagttacagggttgtatagctctagagggtttctgtgctgccct

SEQ ID NO: 10766 - DNA, 122 bp, Homo sapiens
  misc_feature (61)..(62): /note="This region represents a CpG dinucleotide"
  misc_feature (61)..(61): /note="Nucleotide may be methylated to form 5-methylcytosine"
aagtacctagtgtataaaatagtaccctttactctccctgtgagctgccttgcctgatctcggccacatctgaagaatcaacatacatataacctttaggttggcttacatttgccgtcatt

SEQ ID NO: 10767 - DNA, 122 bp, Homo sapiens
  misc_feature (61)..(62): /note="This region represents a CpG dinucleotide"
  misc_feature (61)..(61): /note="Nucleotide may be methylated to form 5-methylcytosine"
cccaggtggggtaattctcaccactgaggagaaagaattttttgaagagggctgcagatccggttggatatgaatacagatatcactcaaagtctgaatgcaatgaattctatttcaaagca

SEQ ID NO: 10768 - DNA, 122 bp, Homo sapiens
  misc_feature (61)..(62): /note="This region represents a CpG dinucleotide"
  misc_feature (61)..(61): /note="Nucleotide may be methylated to form 5-methylcytosine"
ctgctgggaacagctcgtgcttatgtgtccttctcttgaatctccacatagcactttgaacgatgctgtactgacatagccaggaaatgctgatgaaattagtcaatgaatgaatgatgcaa

SEQ ID NO: 10769 - DNA, 122 bp, Homo sapiens
  misc_feature (61)..(62): /note="This region represents a CpG dinucleotide"
  misc_feature (61)..(61): /note="Nucleotide may be methylated to form 5-methylcytosine"
tcaagggtttttctttaagggctttctacttttgccatccatctatgatgcctttgcaatcgaatcttgcataatatataatctcacactgtcattacaacatcatgatttactagagtgat

SEQ ID NO: 10770 - DNA, 122 bp, Homo sapiens
  misc_feature (61)..(62): /note="This region represents a CpG dinucleotide"
  misc_feature (61)..(61): /note="Nucleotide may be methylated to form 5-methylcytosine"
tcaattgctagttctacttggacccttatttgtggctaattccttctgctttgaattccacgtacttatgtaaacctgtttgtttcacaatgtcttcagggcaaagggcagatcctgtggat

SEQ ID NO: 10771 - DNA, 122 bp, Homo sapiens
  misc_feature (61)..(62): /note="This region represents a CpG dinucleotide"
  misc_feature (61)..(61): /note="Nucleotide may be methylated to form 5-methylcytosine"
tggtttctgctgccactactcaagcttgccattgtagtgtcaaagtagccgtagacaatacgtaaatgaatgtgactgtgtcccaataaaactttatttacaaaaggaagcagtgggctgga

SEQ ID NO: 10772 - DNA, 122 bp, Homo sapiens
  misc_feature (61)..(62): /note="This region represents a CpG dinucleotide"
  misc_feature (61)..(61): /note="Nucleotide may be methylated to form 5-methylcytosine"
tttattaaacatgtttagaccagtttctgttttcctggttagaccctgacggttatcttgcgaaatgtcatatatttccatataaggtatcttaaatccttttggaagacagccagaagtct

SEQ ID NO: 10773 - DNA, 122 bp, Homo sapiens
  misc_feature (61)..(62): /note="This region represents a CpG dinucleotide"
  misc_feature (61)..(61): /note="Nucleotide may be methylated to form 5-methylcytosine"
agagtttgaggctacagtgagctgagatcacaccactgcactccaacctgggtgacagagcgagatcctgccttaaaaacaaacaagggctgggcacagtggctcacccctgtgatcccagc

SEQ ID NO: 10774 - DNA, 122 bp, Homo sapiens
  misc_feature (61)..(62): /note="This region represents a CpG dinucleotide"
  misc_feature (61)..(61): /note="Nucleotide may be methylated to form 5-methylcytosine"
cgggctggggcaggacgtcggtcatgccgggggggacgggacgcggcgctggagagaaggcgcctgtggagcgctcagtcccggctgccagtcccgctagttccctagtcccgccggctttc

SEQ ID NO: 10775 - DNA, 122 bp, Homo sapiens
  misc_feature (61)..(62): /note="This region represents a CpG dinucleotide"
  misc_feature (61)..(61): /note="Nucleotide may be methylated to form 5-methylcytosine"
agttgctaaatttgtgttcccattttaaattgaccaattttggggtgtgacacttttgagcggttgaattgggagaatgaagataagtaatttacctgtccaggatcaaaagaagcctagaa

SEQ ID NO: 10776 - DNA, 122 bp, Homo sapiens
  misc_feature (61)..(62): /note="This region represents a CpG dinucleotide"
  misc_feature (61)..(61): /note="Nucleotide may be methylated to form 5-methylcytosine"
tgtctataaaatgggggaagtacctcacccttcacagagctgtcagggaactggtgataacgtgcacacactgtgccaagcaggtgctcagaagtattgctcacgcagatggatgcttctgt

SEQ ID NO: 10777 - DNA, 122 bp, Homo sapiens
  misc_feature (61)..(62): /note="This region represents a CpG dinucleotide"
  misc_feature (61)..(61): /note="Nucleotide may be methylated to form 5-methylcytosine"
acatttaaaaaatgttagccaataagccattcattcatcaaacattaattgaatacccagcgtgtgctccaagcacatggaagcatggagaaatgaatcacacatggctgtgccctcaggga

SEQ ID NO: 10778 - DNA, 122 bp, Homo sapiens
  misc_feature (61)..(62): /note="This region represents a CpG dinucleotide"
  misc_feature (61)..(61): /note="Nucleotide may be methylated to form 5-methylcytosine"
tgtttcttttttcctacttaggtgaaatctattcttgaaagaagtaaagaggagctgtcccgaacagtgaagtgtcgtaatgcggccctgaaagagagtcagaagttgaaagaagacctcga

SEQ ID NO: 10779 - DNA, 122 bp, Homo sapiens
  misc_feature (61)..(62): /note="This region represents a CpG dinucleotide"
  misc_feature (61)..(61): /note="Nucleotide may be methylated to form 5-methylcytosine"
agaaatgaaactgaaataaaaatttcttctgccatagacaaaattatggcaataaccacacgaagtgggaacagggtaacgtggctcatttttgcatcatgtatctcaggataactctgttt

SEQ ID NO: 10780 - DNA, 122 bp, Homo sapiens
  misc_feature (61)..(62): /note="This region represents a CpG dinucleotide"
  misc_feature (61)..(61): /note="Nucleotide may be methylated to form 5-methylcytosine"
cactctgacctctcccttttctagtgattcttgcacttgctggcagttctgtgtctgcatcgcacagatatgcctgtggcccttattatttcaggtacattgatcttttcttcccaagtaga

SEQ ID NO: 10781 - DNA, 122 bp, Homo sapiens
  misc_feature (61)..(62): /note="This region represents a CpG dinucleotide"
  misc_feature (61)..(61): /note="Nucleotide may be methylated to form 5-methylcytosine"
attgctgttctggccttcagctgatcacagctagaaactgtcggtaacattagcactaagcgctaataaccattaaaacagatgaccatttaccaagcccctactctaagccaggcgtggtt

SEQ ID NO: 10782 - DNA, 122 bp, Homo sapiens
  misc_feature (61)..(62): /note="This region represents a CpG dinucleotide"
  misc_feature (61)..(61): /note="Nucleotide may be methylated to form 5-methylcytosine"
taagaccttttgagcctaggcccaaaactagcacaaaagctgtcatattcgcagttgatacggtctggctgtgtccccagccaaatctcaacttgaattgtatctcccagaattcccgtgtg

SEQ ID NO: 10783 - DNA, 122 bp, Homo sapiens
  misc_feature (61)..(62): /note="This region represents a CpG dinucleotide"
  misc_feature (61)..(61): /note="Nucleotide may be methylated to form 5-methylcytosine"
gccaaggttcccctccactccccacccacctcatcctactcctgctgggcctctgccccacgacagggctctggactctccctggcaccacccccagaaatccccctttgacactattgcag

SEQ ID NO: 10784 - DNA, 122 bp, Homo sapiens
  misc_feature (61)..(62): /note="This region represents a CpG dinucleotide"
  misc_feature (61)..(61): /note="Nucleotide may be methylated to form 5-methylcytosine"
atacagaacaacactgtgaactgccaatagggaactacagtgcatggcatttctcaaactcgtctggccatgagtcatttggaggcatgaaagttccaagaaaccctctttggaccatgctg

SEQ ID NO: 10785 - DNA, 122 bp, Homo sapiens
  misc_feature (61)..(62): /note="This region represents a CpG dinucleotide"
  misc_feature (61)..(61): /note="Nucleotide may be methylated to form 5-methylcytosine"
aagccaggactggacttcggaccaccagttccaaacccacaccccttcccttgcaccacacgcttttgtgtggatgagcctccccaaccctgtcaacaacaaactgtcactttgtcactttt

SEQ ID NO: 10786 - DNA, 122 bp, Homo sapiens
  misc_feature (61)..(62): /note="This region represents a CpG dinucleotide"
  misc_feature (61)..(61): /note="Nucleotide may be methylated to form 5-methylcytosine"
tgttttgtggcaaggaagctggggttcagatgaagagtcctctaatgtcgcacacctgtacgaacgctaccactaggatttgcatactggtgtttctgatgccagagcactcctttcaccac

SEQ ID NO: 10787 - DNA, 122 bp, Homo sapiens
  misc_feature (61)..(62): /note="This region represents a CpG dinucleotide"
  misc_feature (61)..(61): /note="Nucleotide may be methylated to form 5-methylcytosine"
ctgtgcacctcttcccagggccgcgttcggtgtgtcatgctggtagcttgcgatcagccacggaaggaatatttacactaaggaaattggccaatgcaacaatcagggctttactattttat

SEQ ID NO: 10788 - DNA, 122 bp, Homo sapiens
  misc_feature (61)..(62): /note="This region represents a CpG dinucleotide"
  misc_feature (61)..(61): /note="Nucleotide may be methylated to form 5-methylcytosine"
actctcttccaaaccaggctttgaaagcaaagggctactgatttcctgggcctgcccacccggtgctctctcctgggccgtctgccccagggccttcctggctcctgatgcagaggaaactt

SEQ ID NO: 10789 - DNA, 122 bp, Homo sapiens
  misc_feature (61)..(62): /note="This region represents a CpG dinucleotide"
  misc_feature (61)..(61): /note="Nucleotide may be methylated to form 5-methylcytosine"
cagctatagtttcctacctctatgaccagagagtgaagcgtttcactgaagaactgtggccggcgtctccaggaaaggaaggagcctcgctttctccagggcaggggcagcgtggggcgggg

SEQ ID NO: 10790 - DNA, 122 bp, Homo sapiens
  misc_feature (61)..(62): /note="This region represents a CpG dinucleotide"
  misc_feature (61)..(61): /note="Nucleotide may be methylated to form 5-methylcytosine"
gtagggagtgaaacttgtagctcagtgactgagtattctaaaggacagggtaccaaaagacgggactgtgagagttcacaattgaccatgaccttcaattaaagccccaaagtcggcagctc

SEQ ID NO: 10791 - DNA, 122 bp, Homo sapiens
  misc_feature (61)..(62): /note="This region represents a CpG dinucleotide"
  misc_feature (61)..(61): /note="Nucleotide may be methylated to form 5-methylcytosine"
ttaaccaaaattagtaatgtgcaagacatcatcctaagtactttaggtctatcctcacggcgctcctaccatgcaggtataactgtatcccaaaaaaagaaagtgaggcagagaggagttat

SEQ ID NO: 10792 - DNA, 122 bp, Homo sapiens
  misc_feature (61)..(62): /note="This region represents a CpG dinucleotide"
  misc_feature (61)..(61): /note="Nucleotide may be methylated to form 5-methylcytosine"
tgaacttgccttacatccttattgggccatctgaggttcacacaagataacagctatacacgggccttgaaaaatgttaaggacacacactttggggatggggttggcttcatgatcatatt

SEQ ID NO: 10793 - DNA, 122 bp, Homo sapiens
  misc_feature (61)..(62): /note="This region represents a CpG dinucleotide"
  misc_feature (61)..(61): /note="Nucleotide may be methylated to form 5-methylcytosine"
ttgagagaaacttcttcaaagttgcatagcttatagggcaaagttggaatgagaagacagcgttcttgactgccactccagggctccttgccctggcactgtggtttttaacatgcctctgc

SEQ ID NO: 10794 - DNA, 122 bp, Homo sapiens
  misc_feature (61)..(62): /note="This region represents a CpG dinucleotide"
  misc_feature (61)..(61): /note="Nucleotide may be methylated to form 5-methylcytosine"
ggtcttctccgtgagcaggcactccagcaggtacagaatcgtttggatcaccgtgatctccggcactggcgtgatcttcttgaacccaaagcgcaacttgtccaggcacgtgggcaggtact

SEQ ID NO: 10795 - DNA, 122 bp, Homo sapiens
  misc_feature (61)..(62): /note="This region represents a CpG dinucleotide"
  misc_feature (61)..(61): /note="Nucleotide may be methylated to form 5-methylcytosine"
tcaaatcttactggcagcaaggtcagagtagttaagaacagtagctaacagcatgggctacgttgggtaataaggtagctgtgggactttaggcaaattgttaatcctctctgattctcaat

SEQ ID NO: 10796 - DNA, 122 bp, Homo sapiens
  misc_feature (61)..(62): /note="This region represents a CpG dinucleotide"
  misc_feature (61)..(61): /note="Nucleotide may be methylated to form 5-methylcytosine"
tgaaaataaagaagttctcagttatactgcagcttgttcatgcctcctgcctcgggatgccgcagtggctgccccagccctgccctttcagcctcagcccttccctcagtgaaggagagaaa

SEQ ID NO: 10797 - DNA, 122 bp, Homo sapiens
  misc_feature (61)..(62): /note="This region represents a CpG dinucleotide"
  misc_feature (61)..(61): /note="Nucleotide may be methylated to form 5-methylcytosine"
atatctaaacaccgcatggttaatcctgaacatctacttcctgagcgattcaaccagttacgctctgagctccacaatcaataaaatgtactggagtcttgaatccattgaagtgctttaaa

SEQ ID NO: 10798 - DNA, 122 bp, Homo sapiens
  misc_feature (61)..(62): /note="This region represents a CpG dinucleotide"
  misc_feature (61)..(61): /note="Nucleotide may be methylated to form 5-methylcytosine"
acacacacacccttccgggacatagatagtggtagagtgagtgactgtccactccatgcccgagcaggtctccaggcattcagagcacctgcttgcctggttcagcagcctgagtcacccca

SEQ ID NO: 10799 - DNA, 122 bp, Homo sapiens
  misc_feature (61)..(62): /note="This region represents a CpG dinucleotide"
  misc_feature (61)..(61): /note="Nucleotide may be methylated to form 5-methylcytosine"
aattccatgaaatttatttcaaacataacaacagtaatctcttgcacatacatcatctcgcgtaatctttacaacatccacacgcaggaaaggaatgcatgaaaagtacaagttctgttttt

SEQ ID NO: 10800 - DNA, 122 bp, Homo sapiens
  misc_feature (61)..(62): /note="This region represents a CpG dinucleotide"
  misc_feature (61)..(61): /note="Nucleotide may be methylated to form 5-methylcytosine"
acctttcgatatgtatgtttcaacaccagcctgtttttgagacagctttagagactctttcgtaattctcatctataaagaagttgtgagtcctcaggagaggttggagaggtttccggcag

SEQ ID NO: 10801 - DNA, 122 bp, Homo sapiens
  misc_feature (61)..(62): /note="This region represents a CpG dinucleotide"
  misc_feature (61)..(61): /note="Nucleotide may be methylated to form 5-methylcytosine"
gagctgactgatggtctggaagcacccagcgaagaagagcaatgatgtttgctaaggcaacgtcggtactgtttctccccaaaggcatgggattttatacacaccacctgcttttcatatag

SEQ ID NO: 10802 - DNA, 122 bp, Homo sapiens
  misc_feature (61)..(62): /note="This region represents a CpG dinucleotide"
  misc_feature (61)..(61): /note="Nucleotide may be methylated to form 5-methylcytosine"
tgacttcaggagtgataccgcagactttcaccgttagtgttacagctcttaaaggtggcgcgtccggagttgtttcttcctcccggtgggttcgtggtctcgctggcttcaagagtgaatag

SEQ ID NO: 10803 - DNA, 122 bp, Homo sapiens
  misc_feature (61)..(62): /note="This region represents a CpG dinucleotide"
  misc_feature (61)..(61): /note="Nucleotide may be methylated to form 5-methylcytosine"
ggctagagaggctaatctcaaagggctagaaatgagtcagtttccacgctcaacatcaggcgtgtggcttcctgaagcacagacgaggaagcgttgaatttcaaagagcaaatttttttttt

SEQ ID NO: 10804 - DNA, 122 bp, Homo sapiens
  misc_feature (61)..(62): /note="This region represents a CpG dinucleotide"
  misc_feature (61)..(61): /note="Nucleotide may be methylated to form 5-methylcytosine"
cagctaccaattcgttggacagcacagtaagtaagcagctttcttactttccctagagtacgtatttagctaatgctattaaagtgaatgacacaatcttgagtaaacccagctgataaacc

SEQ ID NO: 10805 - DNA, 122 bp, Homo sapiens
  misc_feature (61)..(62): /note="This region represents a CpG dinucleotide"
  misc_feature (61)..(61): /note="Nucleotide may be methylated to form 5-methylcytosine"
gcagaacgtgggacctggagcggggaccgaaagggtgcgggcgggagactatgggtggggcggcctgggagggagcctgagacaagacccgacgcccccagccgctccacgtcgctctgcag

SEQ ID NO: 10806 - DNA, 122 bp, Homo sapiens
  misc_feature (61)..(62): /note="This region represents a CpG dinucleotide"
  misc_feature (61)..(61): /note="Nucleotide may be methylated to form 5-methylcytosine"
tcaccccagcacatgtgtgacagatggtgaaagctcaatatatgaatgaatgttgaatgacggaatctactacctgatgggccagtctattccacctttgaacattgccaattttaagaaca

SEQ ID NO: 10807 - DNA, 122 bp, Homo sapiens
  misc_feature (61)..(62): /note="This region represents a CpG dinucleotide"
  misc_feature (61)..(61): /note="Nucleotide may be methylated to form 5-methylcytosine"
tcctctgaaatccatggtgtgtcatcagtacatgtcttcacccggattgactaacatgttcgttcctaacttacctctgctataatcgggtaggctccgtgggcacagtaactattttgtta

SEQ ID NO: 10808 - DNA, 122 bp, Homo sapiens
  misc_feature (61)..(62): /note="This region represents a CpG dinucleotide"
  misc_feature (61)..(61): /note="Nucleotide may be methylated to form 5-methylcytosine"
ttcaactgtgtgatcagaatcagttatgccttctctccagaggtgctgcaaaaccagttacgttaagtctgtgctaattttcacactgtttgtaactagccagtgactcaagtacagcctga

SEQ ID NO: 10809 - DNA, 122 bp, Homo sapiens
  misc_feature (61)..(62): /note="This region represents a CpG dinucleotide"
  misc_feature (61)..(61): /note="Nucleotide may be methylated to form 5-methylcytosine"
ttatcctgcacataagatcacacacatgtgcaaagatatgttgattccaggatatatacacggtcttgtagttctgataaaaacaggtcagaaacaacctaagtatccatctcaagagaaga

SEQ ID NO: 10810 - DNA, 122 bp, Homo sapiens
  misc_feature (61)..(62): /note="This region represents a CpG dinucleotide"
  misc_feature (61)..(61): /note="Nucleotide may be methylated to form 5-methylcytosine"
taatctctatgggtaggttagaaaagccatgcaagcttccatctcattcactggaacactcgctctgaaagtcctgagtaataaatctaactcctctgaggccactatgctgaaaggaagcc

SEQ ID NO: 10811 - DNA, 122 bp, Homo sapiens
  misc_feature (61)..(62): /note="This region represents a CpG dinucleotide"
  misc_feature (61)..(61): /note="Nucleotide may be methylated to form 5-methylcytosine"
gttgggtggggaactgaatgtaccagagacacacacattctcagagtcaggctatgtgtacgtgtctgtgtgttttgttttcttttcttttttaatagagatggggtcttggtatgttgtcc

SEQ ID NO: 10812 - DNA, 122 bp, Homo sapiens
  misc_feature (61)..(62): /note="This region represents a CpG dinucleotide"
  misc_feature (61)..(61): /note="Nucleotide may be methylated to form 5-methylcytosine"
ctttaaacctggagactgagaagtcaaggtggtattttggaaagcagctggagctagcaacggaaggtcggggtgcaaggcgtagctctgccactcacctcaagtcacttctctttggattt

SEQ ID NO: 10813 - DNA, 122 bp, Homo sapiens
  misc_feature (61)..(62): /note="This region represents a CpG dinucleotide"
  misc_feature (61)..(61): /note="Nucleotide may be methylated to form 5-methylcytosine"
agcacctggatcttagacttcccagcctccagaactatgggaaatatgtttttaagtacccggtccatggcattttgtcactgcagtctgagctggtaaaacacagagttttattggctttt

SEQ ID NO: 10814 - DNA, 122 bp, Homo sapiens
  misc_feature (61)..(62): /note="This region represents a CpG dinucleotide"
  misc_feature (61)..(61): /note="Nucleotide may be methylated to form 5-methylcytosine"
tgtgggtgcatctgcaggaaaaccagcctcccagcatcatctggggaatacctgtaatagcgttagcatgccaggtctggatgacataagtgttttaatattctccgtgttttgagctactc

SEQ ID NO: 10815 - DNA, 122 bp, Homo sapiens
  misc_feature (61)..(62): /note="This region represents a CpG dinucleotide"
  misc_feature (61)..(61): /note="Nucleotide may be methylated to form 5-methylcytosine"
agcgcttggcacagggcaagcgccccataaaatggcagttaggattaaaatcgaggttgccgggggacccccaggcaggagctgagatttgtgtggagcggcgaagtggggcggcggcgcgt

SEQ ID NO: 10816 - DNA, 122 bp, Homo sapiens
  misc_feature (61)..(62): /note="This region represents a CpG dinucleotide"
  misc_feature (61)..(61): /note="Nucleotide may be methylated to form 5-methylcytosine"
cagatttctattgaaacctcccaacttcagagccaggatgagaaagactggtttgccaagcggtttgaggaactgcaaaaggagacgtttaccacagaagagcgaaaacatctgtcgaaact

SEQ ID NO: 10817 - DNA, 122 bp, Homo sapiens
  misc_feature (61)..(62): /note="This region represents a CpG dinucleotide"
  misc_feature (61)..(61): /note="Nucleotide may be methylated to form 5-methylcytosine"
gagagtcccctgcctcacttagccacttccttcaacctttcaacttcagcttcctttggacgctgtcatctcaccaaagtcaagggcagaggaaggttggcttttagggaaaaatggagctt

SEQ ID NO: 10818 - DNA, 122 bp, Homo sapiens
  misc_feature (61)..(62): /note="This region represents a CpG dinucleotide"
  misc_feature (61)..(61): /note="Nucleotide may be methylated to form 5-methylcytosine"
atgtggacatacaaccaccttatactcctctaacaataatgcctgtcctctgagttttttcgttacttggtgatttagttactaatgtcctatgaatcatatgtcagcaatgcatttatttc

SEQ ID NO: 10819 - DNA, 122 bp, Homo sapiens
  misc_feature (61)..(62): /note="This region represents a CpG dinucleotide"
  misc_feature (61)..(61): /note="Nucleotide may be methylated to form 5-methylcytosine"
caggcgtgagtcaccatacccggccctcgattatcttttaagcaggggatctgacatcaccgggtcagcattcctggttggcaaaaatcaacagagctgtggtagggaccacgagctccaga

SEQ ID NO: 10820 - DNA, 122 bp, Homo sapiens
  misc_feature (61)..(62): /note="This region represents a CpG dinucleotide"
  misc_feature (61)..(61): /note="Nucleotide may be methylated to form 5-methylcytosine"
tttgtcagattctcatattctgccaacttctctgcattttctagaagctcattttccagacgactgttttcctgaacaagtatggggaaattaaatgtggtacagattaagaaattagcaaa

SEQ ID NO: 10821 - DNA, 122 bp, Homo sapiens
  misc_feature (61)..(62): /note="This region represents a CpG dinucleotide"
  misc_feature (61)..(61): /note="Nucleotide may be methylated to form 5-methylcytosine"
tggcaccaagatatggttgtgaaataggaagtctccagaaaataatgaaaaattataaaccgtgcccatagacaatagtcagcaaaaacagattgtggaaagacaggaagacagagcttatc

SEQ ID NO: 10822 - DNA, 122 bp, Homo sapiens
  misc_feature (61)..(62): /note="This region represents a CpG dinucleotide"
  misc_feature (61)..(61): /note="Nucleotide may be methylated to form 5-methylcytosine"
tttcacacggagagaacagagagctttctaggcaacaggagtgcatggacaaaggcaaaacgctttgttgattaataaaactcagactaccagctcacaggggtggggaatgataggatgag

SEQ ID NO: 10823 - DNA, 122 bp, Homo sapiens
  misc_feature (61)..(62): /note="This region represents a CpG dinucleotide"
  misc_feature (61)..(61): /note="Nucleotide may be methylated to form 5-methylcytosine"
tctgcttttgtgcagttacggataatgaggattctaaacactgaggtggctttgtgatctcgacatctgtccctgagggactggcctgagactgctgactcatttcacacagctgtcacatg

SEQ ID NO: 10824 - DNA, 122 bp, Homo sapiens
  misc_feature (61)..(62): /note="This region represents a CpG dinucleotide"
  misc_feature (61)..(61): /note="Nucleotide may be methylated to form 5-methylcytosine"
ggtgtgggctaggcgcgctccgggtcctccgtgaattcccagtttccaggcagctgcgcccgggcccgcctccccgagtcggcccccacctctgcacgcagagacctctcctcacctcccgc

SEQ ID NO: 10825 - DNA, 122 bp, Homo sapiens
  misc_feature (61)..(62): /note="This region represents a CpG dinucleotide"
  misc_feature (61)..(61): /note="Nucleotide may be methylated to form 5-methylcytosine"
tagctatttgtttcctccccacaacaattagtgctaatgtgacatgtgctcatttttgtacgggataaaactgccatccagtgcgatttggtacaaatgagtcaaacaagacaggctcaccc

SEQ ID NO: 10826 - DNA, 122 bp, Homo sapiens
  misc_feature (61)..(62): /note="This region represents a CpG dinucleotide"
  misc_feature (61)..(61): /note="Nucleotide may be methylated to form 5-methylcytosine"
tgattacaaaaggtttgatattattccccctattgtctttatctaatatggaagtataaacgtcagtcaacattatataaggtgacagttcagtgccaaagcattacagtgtgttttgcctg

SEQ ID NO: 10827 - DNA, 122 bp, Homo sapiens
  misc_feature (61)..(62): /note="This region represents a CpG dinucleotide"
  misc_feature (61)..(61): /note="Nucleotide may be methylated to form 5-methylcytosine"
gataatgaggcagacagagaggttatgtgactcacttggggccgcccagctggttagtgacgggcccagagcaccctccagagacactgtcctgaaccatcgtgctgtgctgccacccactg

SEQ ID NO: 10828 - DNA, 122 bp, Homo sapiens
  misc_feature (61)..(62): /note="This region represents a CpG dinucleotide"
  misc_feature (61)..(61): /note="Nucleotide may be methylated to form 5-methylcytosine"
ttggccaggtggaataacaatttgtgccaccctcagaatgcttcctgcaaaaaaaccatacggctcatggatgagtcagctaaatacgttggtgcaagaggaaaactactgtcacactatag

SEQ ID NO: 10829 - DNA, 122 bp, Homo sapiens
  misc_feature (61)..(62): /note="This region represents a CpG dinucleotide"
  misc_feature (61)..(61): /note="Nucleotide may be methylated to form 5-methylcytosine"
gtgtaactctttttgttttttacaaccttattttggagatgaggtaatggaaggtcaaagcgctggagtgacctgcattcagcagagtgaaatttatcttgactccaagttcagaattcttt

SEQ ID NO: 10830 - DNA, 122 bp, Homo sapiens
  misc_feature (61)..(62): /note="This region represents a CpG dinucleotide"
  misc_feature (61)..(61): /note="Nucleotide may be methylated to form 5-methylcytosine"
tctcccttcccttccatattctgctccacaagttccagctgtttggtccttaatgaactccgttctttgtctcctcagtgtaatcaccaatctttgctggagtttcccctgtctgctgcagc

SEQ ID NO: 10831 - DNA, 122 bp, Homo sapiens
  misc_feature (61)..(62): /note="This region represents a CpG dinucleotide"
  misc_feature (61)..(61): /note="Nucleotide may be methylated to form 5-methylcytosine"
aaggtctgggtatcctctgcatggttattaattacaaaatagatttcacatgtgttttcacgaggctgcgatttcacaattgcatcttagaatgtgccttcagagctctgagagctcctggg

SEQ ID NO: 10832 - DNA, 122 bp, Homo sapiens
  misc_feature (61)..(62): /note="This region represents a CpG dinucleotide"
  misc_feature (61)..(61): /note="Nucleotide may be methylated to form 5-methylcytosine"
tgccttttacaattctgattagcatgccctccaagtctttagctgagtgattaataaaaacgggttcaacaaggcaggaccctggacagagcctttcttccagctctagaatccacctttgg

SEQ ID NO: 10833 - DNA, 122 bp, Homo sapiens
  misc_feature (61)..(62): /note="This region represents a CpG dinucleotide"
  misc_feature (61)..(61): /note="Nucleotide may be methylated to form 5-methylcytosine"
ggcaggtgtcccttggtagcctacgggctgtcttatgtcagctgcttaactagggcgtgccggggaagtaaatgatctcactgacactttgctccacatataaaataagtcacttaccccag

SEQ ID NO: 10834 - DNA, 122 bp, Homo sapiens
  misc_feature (61)..(62): /note="This region represents a CpG dinucleotide"
  misc_feature (61)..(61): /note="Nucleotide may be methylated to form 5-methylcytosine"
gcccggaagtggaggaggaacgcggtggggcggggcggggccccagatcaccgcgggaggcggagccgcaggcctggggtggggctgggagtgtgggcgtgggaaggggtcggtgggagggg

SEQ ID NO: 10835 - DNA, 122 bp, Homo sapiens
  misc_feature (61)..(62): /note="This region represents a CpG dinucleotide"
  misc_feature (61)..(61): /note="Nucleotide may be methylated to form 5-methylcytosine"
ctgtatcacatgcctctgacaaactgaacaagaagccacaaggtctctgtgaccttttctcgcaaacttcctgtctctcaatcttctgtctgtcccaaagaacaggatgaagttgttctctg

SEQ ID NO: 10836 - DNA, 122 bp, Homo sapiens
  misc_feature (61)..(62): /note="This region represents a CpG dinucleotide"
  misc_feature (61)..(61): /note="Nucleotide may be methylated to form 5-methylcytosine"
ctatgagtcacttagtagccatctcagttattagatcaaccattgtactatcacactgctcgtgttcaagcaacccttattttatctaataatggccccaaagtgcaagagttgtgatgcta

SEQ ID NO: 10837 - DNA, 122 bp, Homo sapiens
  misc_feature (61)..(62): /note="This region represents a CpG dinucleotide"
  misc_feature (61)..(61): /note="Nucleotide may be methylated to form 5-methylcytosine"
ctcagcatggaacaggttcccaggctcacagaggaaggtggtggcaacacggagacttctcggtcacctggaacacaccccgctgtggacaccccctctgggactttttttctgcctctccc

SEQ ID NO: 10838 - DNA, 122 bp, Homo sapiens
  misc_feature (61)..(62): /note="This region represents a CpG dinucleotide"
  misc_feature (61)..(61): /note="Nucleotide may be methylated to form 5-methylcytosine"
ctaagtactagtttcctgaaagtcctgaaaagtaagccgaaatgcaagttcaaggtatcacgggctgaacttaatgaggaaggagtgacataatttggataggtccttagtttcagagttct

SEQ ID NO: 10839 - DNA, 122 bp, Homo sapiens
  misc_feature (61)..(62): /note="This region represents a CpG dinucleotide"
  misc_feature (61)..(61): /note="Nucleotide may be methylated to form 5-methylcytosine"
gtggagcagggttgggagtgcatcagggtgtcgggcagcagggctagcctgagccagctccgcaggtgcttctggctgaggcgaggctgaccctgggagcaccgctggaatagtggccactg

SEQ ID NO: 10840 - DNA, 122 bp, Homo sapiens
  misc_feature (61)..(62): /note="This region represents a CpG dinucleotide"
  misc_feature (61)..(61): /note="Nucleotide may be methylated to form 5-methylcytosine"
aaactgacaccatcttttctttctatttcatcgtgtagggagtagagtgttttgcacagacgccacaatatcagtttgtctagcaaacagaagagtatgtccagaagtggtgagaggctgca

SEQ ID NO: 10841 - DNA, 122 bp, Homo sapiens
  misc_feature (61)..(62): /note="This region represents a CpG dinucleotide"
  misc_feature (61)..(61): /note="Nucleotide may be methylated to form 5-methylcytosine"
cagcccctgaccaagcacagtgtccccaaggcctggtccaggcaatggagatggcactaccgtccacaagtgtcagcatatagtgccaaggtgtgtgttctcagacttgtcactctcccaag

SEQ ID NO: 10842 - DNA, 122 bp, Homo sapiens
  misc_feature (61)..(62): /note="This region represents a CpG dinucleotide"
  misc_feature (61)..(61): /note="Nucleotide may be methylated to form 5-methylcytosine"
ttcctttcttcccctctacactccaagggcgtcacctgttccttcctgttttttatagttcggctgagcgcagcgtgggtattttgagctgagtcaaactgatttccgctgacaccagcttg

SEQ ID NO: 10843 - DNA, 122 bp, Homo sapiens
  misc_feature (61)..(62): /note="This region represents a CpG dinucleotide"
  misc_feature (61)..(61): /note="Nucleotide may be methylated to form 5-methylcytosine"
catctttgttcctgtattttccttcctcttgtggctctcagtggtgtgcaggacatttagcggcattcaatgtttaatcagtttcttaggcctcttcttttgggctagctccagttcactga

SEQ ID NO: 10844 - DNA, 122 bp, Homo sapiens
  misc_feature (61)..(62): /note="This region represents a CpG dinucleotide"
  misc_feature (61)..(61): /note="Nucleotide may be methylated to form 5-methylcytosine"
tcactcattgtgagaaaagactaagactatctcaaagcacttagcacagtggtaggcacacgctacctttgaaataagtgcctgtcagtaagctgacttggaaaagggctctaacacaattc

SEQ ID NO: 10845 - DNA, 122 bp, Homo sapiens
  misc_feature (61)..(62): /note="This region represents a CpG dinucleotide"
  misc_feature (61)..(61): /note="Nucleotide may be methylated to form 5-methylcytosine"
aaactggacaaagtatgagtcaactattttcaggtattgggcaacagcaaatagaggactcgtatccctgagaaaaggaacattttcctgtggtagtacagggagatggagcccaggcagag

SEQ ID NO: 10846 - DNA, 122 bp, Homo sapiens
  misc_feature (61)..(62): /note="This region represents a CpG dinucleotide"
  misc_feature (61)..(61): /note="Nucleotide may be methylated to form 5-methylcytosine"
gctcctccactcccactctgccagagctggatttgttaagttggccagggacctctgctgcgtgaggaacactgctcgctctgacttctcagcaaaacacaaagcgcagccagccacttcct

SEQ ID NO: 10847 - DNA, 122 bp, Homo sapiens
  misc_feature (61)..(62): /note="This region represents a CpG dinucleotide"
  misc_feature (61)..(61): /note="Nucleotide may be methylated to form 5-methylcytosine"
gatctctgacatgccctggaggcatttcccccattatcttggtgattaacattggctactcgttacttatgcaaatttctgcagcaggcttgaatttctccccagaaaatggggttttcttt

SEQ ID NO: 10848 - DNA, 122 bp, Homo sapiens
  misc_feature (61)..(62): /note="This region represents a CpG dinucleotide"
  misc_feature (61)..(61): /note="Nucleotide may be methylated to form 5-methylcytosine"
gaaggtccaatcatcattaaaagcctccttcacctactggaaatagtctttgaaaggtctcgtggtactgagtcatattgttactgaatgatgagctcactctcctaagtgcatagaaccca

SEQ ID NO: 10849 - DNA, 122 bp, Homo sapiens
  misc_feature (61)..(62): /note="This region represents a CpG dinucleotide"
  misc_feature (61)..(61): /note="Nucleotide may be methylated to form 5-methylcytosine"
ttatctccctgggcttctgtttccctggctattaactgaggagttggactgatagccccacgtcctcccctctggctttctgtgagatgccactcagtgtttcccaacactctggcctccag

SEQ ID NO: 10850 - DNA, 122 bp, Homo sapiens
  misc_feature (61)..(62): /note="This region represents a CpG dinucleotide"
  misc_feature (61)..(61): /note="Nucleotide may be methylated to form 5-methylcytosine"
tcctctacactttatgccaactaattttacataaatgggaaactgtcatttctaccaaagcgagctgcactgtgtttcttggggtgaacctttagggagacagccattgtgagaatgaaagg

SEQ ID NO: 10851 - DNA, 122 bp, Homo sapiens
  misc_feature (61)..(62): /note="This region represents a CpG dinucleotide"
  misc_feature (61)..(61): /note="Nucleotide may be methylated to form 5-methylcytosine"
gacttagagagcaggcagatgctttgaaggcgtggtaacacaggtcttcattaatctccacgcaggacttgcacttctactatgcctaggctgaagaaaatggctcaggaagatgaacaatc

SEQ ID NO: 10852 - DNA, 122 bp, Homo sapiens
  misc_feature (61)..(62): /note="This region represents a CpG dinucleotide"
  misc_feature (61)..(61): /note="Nucleotide may be methylated to form 5-methylcytosine"
tgccttgggaggaatttgtaatctggatcccacagctgttgctaagtgaaccaatggggtcgttttcctctggctaagccagtagggggttcccaaagcctgtctctcctgcaagatgctct

SEQ ID NO: 10853 - DNA, 122 bp, Homo sapiens
  misc_feature (61)..(62): /note="This region represents a CpG dinucleotide"
  misc_feature (61)..(61): /note="Nucleotide may be methylated to form 5-methylcytosine"
tcttaagccatcaagtttgtggtaatttgtttcagcagccttggggaatgaatatatagccgaaaagggctttgtttgtgccaccccacagaaccagagaaccattaatgctagtctcatta

SEQ ID NO: 10854 - DNA, 122 bp, Homo sapiens
  misc_feature (61)..(62): /note="This region represents a CpG dinucleotide"
  misc_feature (61)..(61): /note="Nucleotide may be methylated to form 5-methylcytosine"
tcttataggatgtccttaatcagaaccacattactcagctagaggaagtccttgtgcagacgctggcaagacactatggcaaaagagtttcacaacatgaaaggtcagattgagaataaaag

SEQ ID NO: 10855 - DNA, 122 bp, Homo sapiens
  misc_feature (61)..(62): /note="This region represents a CpG dinucleotide"
  misc_feature (61)..(61): /note="Nucleotide may be methylated to form 5-methylcytosine"
agtgtgatggcagttctggcggatttcaaagctagttcctcatcactctattaattctaccgtaagagttgatcgcatgtgttcccattttacagaggtacctgtgcaaacaggttgtcaat

SEQ ID NO: 10856 - DNA, 122 bp, Homo sapiens
  misc_feature (61)..(62): /note="This region represents a CpG dinucleotide"
  misc_feature (61)..(61): /note="Nucleotide may be methylated to form 5-methylcytosine"
aatagaatgcagattgcagttgctagaatataaacaggaaataagaagataaagacaactcgtggaataccttttcatagagcttaggtaaactgtaggaattattctccttgtactctaat

SEQ ID NO: 10857 - DNA, 122 bp, Homo sapiens
  misc_feature (61)..(62): /note="This region represents a CpG dinucleotide"
  misc_feature (61)..(61): /note="Nucleotide may be methylated to form 5-methylcytosine"
aaactttcctatgaggtatggccaacaaattgcaggaactgttgtggagggcagggattccgaagtatgtctgcctagtacacaggctgctggcactggctgtgtccagatgtccctagtct

SEQ ID NO: 10858 - DNA, 122 bp, Homo sapiens
  misc_feature (61)..(62): /note="This region represents a CpG dinucleotide"
  misc_feature (61)..(61): /note="Nucleotide may be methylated to form 5-methylcytosine"
gcacagggggctcagcagagcaggttcaactgaaagttcctagtggttcccaactgtcagcgcattctgctggcctcttccccctgggcaaagagccagccatccttcaaagccgggcacaa

SEQ ID NO: 10859 - DNA, 122 bp, Homo sapiens
  misc_feature (61)..(62): /note="This region represents a CpG dinucleotide"
  misc_feature (61)..(61): /note="Nucleotide may be methylated to form 5-methylcytosine"
cttaatgtggaaattaagggacttacctcttttaagagactgggttgtgctgtgttgccccggtttgaatgcagtggctattgagagcacagtcatgcaccctacagctttgatcttctgag

SEQ ID NO: 10860 - DNA, 122 bp, Homo sapiens
  misc_feature (61)..(62): /note="This region represents a CpG dinucleotide"
  misc_feature (61)..(61): /note="Nucleotide may be methylated to form 5-methylcytosine"
agaatgatcagtagtatttacgtggtgcctggggttctgtggctttgggctcatctcccacgcccttcaactcactgattcggccagggtccttgttgcagccccttcctcaatttacctta

SEQ ID NO: 10861 - DNA, 122 bp, Homo sapiens
  misc_feature (61)..(62): /note="This region represents a CpG dinucleotide"
  misc_feature (61)..(61): /note="Nucleotide may be methylated to form 5-methylcytosine"
cctggaggtggcggtccagaccacctgacccgattcatgtctggcaacgaggccgcccagcggcatcagaaacttgaacatgcatccatctgtgccccaagtgctagaggagctggagaaga

SEQ ID NO: 10862 - DNA, 122 bp, Homo sapiens
  misc_feature (61)..(62): /note="This region represents a CpG dinucleotide"
  misc_feature (61)..(61): /note="Nucleotide may be methylated to form 5-methylcytosine"
gatgaagaatgctctcctcccttcctccaccagccccggcctttcctaattgagactcatcgagccgtagccggctcctcagtacagtgacttgcacacaagctccaaggagccgcgcttat

SEQ ID NO: 10863 - DNA, 122 bp, Homo sapiens
  misc_feature (61)..(62): /note="This region represents a CpG dinucleotide"
  misc_feature (61)..(61): /note="Nucleotide may be methylated to form 5-methylcytosine"
tgagacctttacccgggacgcctgttccctgctggggctttctgtggagtccccccttagcgtcaggtacaacccagccctgtgagggcagcacaggtgggagggtagagaggtaatcatca

SEQ ID NO: 10864 - DNA, 122 bp, Homo sapiens
  misc_feature (61)..(62): /note="This region represents a CpG dinucleotide"
  misc_feature (61)..(61): /note="Nucleotide may be methylated to form 5-methylcytosine"
ctcattcattcaatcaatcagtcaaccagttggtcagtcaacagacatatctcaggcacacgtgccaggcattagtatctatgggtggaggctgttaagtaagctgattttcattttcattt

SEQ ID NO: 10865 - DNA, 122 bp, Homo sapiens
  misc_feature (61)..(62): /note="This region represents a CpG dinucleotide"
  misc_feature (61)..(61): /note="Nucleotide may be methylated to form 5-methylcytosine"
ggaaaatacccaggtctcattcacttccactctttggggacagacttgctgcaccattagcgtattaccagtcttctttaaagaaaactcccaaacttgtctttgtcctgggaaggtaggag

SEQ ID NO: 10866 - DNA, 122 bp, Homo sapiens
  misc_feature (61)..(62): /note="This region represents a CpG dinucleotide"
  misc_feature (61)..(61): /note="Nucleotide may be methylated to form 5-methylcytosine"
cagaggccagaggctgcctggcatcagagatgggcggggccagtaaggagcaggcaggctcgggagccgtgactctgaaagctaagacgggccagactggaaccctttctcacagggcctcg

SEQ ID NO: 10867 - DNA, 122 bp, Homo sapiens
  misc_feature (61)..(62): /note="This region represents a CpG dinucleotide"
  misc_feature (61)..(61): /note="Nucleotide may be methylated to form 5-methylcytosine"
aacagagctgttttttacactggctgttaccctgtagatacatgcatggcttgttgtctccgtccagtctttgctttttaaatgtcagtttcttaaaaagatgtgcctattttatttaaaac

SEQ ID NO: 10868 - DNA, 122 bp, Homo sapiens
  misc_feature (61)..(62): /note="This region represents a CpG dinucleotide"
  misc_feature (61)..(61): /note="Nucleotide may be methylated to form 5-methylcytosine"
atcacaccactgcaatccagtgttagcaccacaaagcatctaaaagagccagtttgtggtcgtgaaaatattgccttattattttaccctgtcccttaataaccatgcctcaggctcattcc

SEQ ID NO: 10869 - DNA, 122 bp, Homo sapiens
  misc_feature (61)..(62): /note="This region represents a CpG dinucleotide"
  misc_feature (61)..(61): /note="Nucleotide may be methylated to form 5-methylcytosine"
cttattatgcgccaggtactgtgctgaggaattatgtgtaatcacttcatcttcatgctgcgcctacatggtgaacgtgcagtaggcatgatgtgtaccattttacagatgagtaaacaggc

SEQ ID NO: 10870 - DNA, 122 bp, Homo sapiens
  misc_feature (61)..(62): /note="This region represents a CpG dinucleotide"
  misc_feature (61)..(61): /note="Nucleotide may be methylated to form 5-methylcytosine"
actggcatccctattctccaggtgaggaaactgaagctcagaactcaataaacatacacacggccacacagctagcaaaaggcaagaggaaatttgaaacaagcgtgtctgcctctaaagcc

SEQ ID NO: 10871 - DNA, 122 bp, Homo sapiens
  misc_feature (61)..(62): /note="This region represents a CpG dinucleotide"
  misc_feature (61)..(61): /note="Nucleotide may be methylated to form 5-methylcytosine"
caccatttaatgatgaccagatcccacgtggaaggggatcctaaggggatggaggtcaggcgtttactgtaaagtgaaagctgtctgactgggtccaaccccaagagtagatgtcaatattt

SEQ ID NO: 10872 - DNA, 122 bp, Homo sapiens
  misc_feature (61)..(62): /note="This region represents a CpG dinucleotide"
  misc_feature (61)..(61): /note="Nucleotide may be methylated to form 5-methylcytosine"
cgtgatctgcccgcttcggactgccaaagtgctgcgattacaggtgtcagccactgtgtccggcccggcgttgatcttaattcttacataaaagataatgataacaccattggtagaaatca

SEQ ID NO: 10873 - DNA, 122 bp, Homo sapiens
  misc_feature (61)..(62): /note="This region represents a CpG dinucleotide"
  misc_feature (61)..(61): /note="Nucleotide may be methylated to form 5-methylcytosine"
aacctactagacttttctccttgttcataatgtgtttgtatcctcaaaataaaagctccccgttactcttctcacacttcctgctgttacagggctcatgacctgtttcctgttgataaatc

SEQ ID NO: 10874 - DNA, 122 bp, Homo sapiens
  misc_feature (61)..(62): /note="This region represents a CpG dinucleotide"
  misc_feature (61)..(61): /note="Nucleotide may be methylated to form 5-methylcytosine"
cctactcttcctcttcctcttccttctcccctttctttcacttctttggtcttatgagatcgctactgatctttacagatattgactgtttaatttgggtggaggagatcaagatgatgtag

SEQ ID NO: 10875 - DNA, 122 bp, Homo sapiens
  misc_feature (61)..(62): /note="This region represents a CpG dinucleotide"
  misc_feature (61)..(61): /note="Nucleotide may be methylated to form 5-methylcytosine"
gtgctcatgagaagtgagtcttgcaaggaaatgacatttccttcccagggtagggaagcacgcactgctgagattctacgggtatgacggcagcaccagccactgcaggacaaagatgacta

SEQ ID NO: 10876 - DNA, 122 bp, Homo sapiens
  misc_feature (61)..(62): /note="This region represents a CpG dinucleotide"
  misc_feature (61)..(61): /note="Nucleotide may be methylated to form 5-methylcytosine"
tgttatcctcttagccctactgtgttggaatagagcgtaaccagctggaggactgtaagacgcctgataatgccgctcttttccgctgtcccgtcttaatcttgttacacaaatggtcgtga

SEQ ID NO: 10877 - DNA, 122 bp, Homo sapiens
  misc_feature (61)..(62): /note="This region represents a CpG dinucleotide"
  misc_feature (61)..(61): /note="Nucleotide may be methylated to form 5-methylcytosine"
ccagacggcacgggcacgccctcacacctgccagcctgtggggtgagggacgcggcaatgcggcggtctgtcggcactgctggttcccagtctctcgcccaggctgccagtgacactgcgac

SEQ ID NO: 10878 - DNA, 122 bp, Homo sapiens
  misc_feature (61)..(62): /note="This region represents a CpG dinucleotide"
  misc_feature (61)..(61): /note="Nucleotide may be methylated to form 5-methylcytosine"
ctcctcggagggatgtaaataaccaacccagattagctggcctttccctaaagccttgggcgtcatcaaaagaatgaacaatggtagaatgcgaagcatcccgagggcccagggtgggaacc

SEQ ID NO: 10879 - DNA, 122 bp, Homo sapiens
  misc_feature (61)..(62): /note="This region represents a CpG dinucleotide"
  misc_feature (61)..(61): /note="Nucleotide may be methylated to form 5-methylcytosine"
actgcacagccagcctccctgtgccaacccacaaagtggatcagtgccttgcacagcacccgcgccgccaccaatagacgcattcagttgctgatttagatagaaataaatgtttatgaatg

SEQ ID NO: 10880 - DNA, 122 bp, Homo sapiens
  misc_feature (61)..(62): /note="This region represents a CpG dinucleotide"
  misc_feature (61)..(61): /note="Nucleotide may be methylated to form 5-methylcytosine"
gtgctctgcagtttagaaggcgctttagcagacactctcacttgctactaagagtaacctcgcctggtaggtaggacaagcacatcttcatttgacagaagcttttacacagagcatggggc

SEQ ID NO: 10881 - DNA, 122 bp, Homo sapiens
  misc_feature (61)..(62): /note="This region represents a CpG dinucleotide"
  misc_feature (61)..(61): /note="Nucleotide may be methylated to form 5-methylcytosine"
gatttcagaaatgtcttatgaaagaaatgagaatgtttccctgtgcgagataaaactgaacggttaacgttaaggtgctataaactagacaaagctggaaaggcacatcatgtaactagaaa

SEQ ID NO: 10882 - DNA, 122 bp, Homo sapiens
  misc_feature (61)..(62): /note="This region represents a CpG dinucleotide"
  misc_feature (61)..(61): /note="Nucleotide may be methylated to form 5-methylcytosine"
gcttctgtgtgaaacttgggtggttcattcccactgatttcatagccagcttctttcattcgcagggctctccacctgcagaagccaccacaggcggtgccaaaagtgccaaaacatctcaa

SEQ ID NO: 10883 - DNA, 122 bp, Homo sapiens
  misc_feature (61)..(62): /note="This region represents a CpG dinucleotide"
  misc_feature (61)..(61): /note="Nucleotide may be methylated to form 5-methylcytosine"
catagatggtattttggagatcatagctcaagcctgctagctctgctgcatatgcatactcgttgagtgagtctttgaggagctcaaggtacaaataggccatgttacagtgcaaggggtcc

SEQ ID NO: 10884 - DNA, 122 bp, Homo sapiens
  misc_feature (61)..(62): /note="This region represents a CpG dinucleotide"
  misc_feature (61)..(61): /note="Nucleotide may be methylated to form 5-methylcytosine"
agaacagcacatgcacaagtgctgctgtatgatgaagtcattccaatcccagggcaccaacgtcctgccttacagcaattcaggtaaacacatcccagggttttggaaatgattagattaga

SEQ ID NO: 10885 - DNA, 122 bp, Homo sapiens
  misc_feature (61)..(62): /note="This region represents a CpG dinucleotide"
  misc_feature (61)..(61): /note="Nucleotide may be methylated to form 5-methylcytosine"
tgtgtgtgtgtgtctctgtgtgtgagagagcgagcgagcgtgtatgttctcattaggggacgatctatgatttgacagcctcactgctgctgctcctgctgctgcttctgcttctgccgcgg

SEQ ID NO: 10886 - DNA, 122 bp, Homo sapiens
  misc_feature (61)..(62): /note="This region represents a CpG dinucleotide"
  misc_feature (61)..(61): /note="Nucleotide may be methylated to form 5-methylcytosine"
accatattttgctcttagagcaataccctcaactatgctgccacaaaaccccagttcctgcgtgatctgtgtctaaaatgaaatgaaagatgacattcttctcccaattagttttttttaaa

SEQ ID NO: 10887 - DNA, 122 bp, Homo sapiens
  misc_feature (61)..(62): /note="This region represents a CpG dinucleotide"
  misc_feature (61)..(61): /note="Nucleotide may be methylated to form 5-methylcytosine"
agctggattctgtcaccttggagctcttgtgtcactgacctagctgatgatttatcctctcgccagagtcagagaacttttgttgctcatgattagtttgccctgagacaaagggaaattac

SEQ ID NO: 10888 - DNA, 122 bp, Homo sapiens
  misc_feature (61)..(62): /note="This region represents a CpG dinucleotide"
  misc_feature (61)..(61): /note="Nucleotide may be methylated to form 5-methylcytosine"
tctaggaagctgcactaatgcagatgttgcgttctcagcctgctcatagagtgtgttaaacgtgagaggtggggagtgtggcaggcaggctgaggacagaacagaggatctgaatagcatgc

SEQ ID NO: 10889 - DNA, 122 bp, Homo sapiens
  misc_feature (61)..(62): /note="This region represents a CpG dinucleotide"
  misc_feature (61)..(61): /note="Nucleotide may be methylated to form 5-methylcytosine"
agttaccctacagagctatagaatactagagctcatttctcctgtctagctgtaattttgcgttcattcaccaacctctccttatcctctcctccccctttcccttcccagcctccagttcc

SEQ ID NO: 10890 - DNA, 122 bp, Homo sapiens
  misc_feature (61)..(62): /note="This region represents a CpG dinucleotide"
  misc_feature (61)..(61): /note="Nucleotide may be methylated to form 5-methylcytosine"
gccccagtccagtccctatcatgagcaactgttggctcactgatgaggtctgaggccttacgagagggatgtaatcagactttaatgagtcagcagggaagagctacggaggtaaattgctc

SEQ ID NO: 10891 - DNA, 122 bp, Homo sapiens
  misc_feature (61)..(62): /note="This region represents a CpG dinucleotide"
  misc_feature (61)..(61): /note="Nucleotide may be methylated to form 5-methylcytosine"
cctgcagccgctggtgccctctgcgaccagctacgttcccactcgttctgacagcaccagcgccccaggggcagctcgcaaacccctgactcatgcccccgcctcctaatctgcccgcccca

SEQ ID NO: 10892 - DNA, 122 bp, Homo sapiens
  misc_feature (61)..(62): /note="This region represents a CpG dinucleotide"
  misc_feature (61)..(61): /note="Nucleotide may be methylated to form 5-methylcytosine"
cctcgacagcctagcactggggccagattatcgagaggacatctcctgggaaaacaggcccgagctccttgggggcaggcagggctctggattttattatcttcttatcttcagtattgtgc

SEQ ID NO: 10893 - DNA, 122 bp, Homo sapiens
  misc_feature (61)..(62): /note="This region represents a CpG dinucleotide"
  misc_feature (61)..(61): /note="Nucleotide may be methylated to form 5-methylcytosine"
cactgtaaggaacaggtcaacgacaacttgggcaataggaactgaagagggaagctcagtcgctcctggaggagagccacagtccctaaggcaagttccctaactgtctgtgaaaagtagta

SEQ ID NO: 10894 - DNA, 122 bp, Homo sapiens
  misc_feature (61)..(62): /note="This region represents a CpG dinucleotide"
  misc_feature (61)..(61): /note="Nucleotide may be methylated to form 5-methylcytosine"
atgcccagacatttacaaggctcgtaccaggaaaagaggtggggacttctgcaacacagacgcacaccacattcacagaaaatgaagatgcaggaaagaaccacggggagacagtgctcacc

SEQ ID NO: 10895 - DNA, 122 bp, Homo sapiens
  misc_feature (61)..(62): /note="This region represents a CpG dinucleotide"
  misc_feature (61)..(61): /note="Nucleotide may be methylated to form 5-methylcytosine"
tacaaaaattagtcaggtgtggtggtgcacgcctgtggtttcagctactccagaggcaggcgggatcgcttgagccaggaggttgacgccacagtgagtcctgaccaagccactgcactcaa

SEQ ID NO: 10896 - DNA, 122 bp, Homo sapiens
  misc_feature (61)..(62): /note="This region represents a CpG dinucleotide"
  misc_feature (61)..(61): /note="Nucleotide may be methylated to form 5-methylcytosine"
ttgaagtgtccgatccagtccttcaactcagagcactcctatctgtgacacctctgcccacgcatccagtatgtgcagcacacctgctctgtgactgacactcttgcagaagtggggccact

SEQ ID NO: 10897 - DNA, 122 bp, Homo sapiens
  misc_feature (61)..(62): /note="This region represents a CpG dinucleotide"
  misc_feature (61)..(61): /note="Nucleotide may be methylated to form 5-methylcytosine"
caggtgccagccagctgaaggatggccacccctgtggtcaccaagacagcctggaagttgcgtgagtggttttcatttttctttatcaccccatttattctgttagcggcttgttgctggga

SEQ ID NO: 10898 - DNA, 122 bp, Homo sapiens
  misc_feature (61)..(62): /note="This region represents a CpG dinucleotide"
  misc_feature (61)..(61): /note="Nucleotide may be methylated to form 5-methylcytosine"
ctgcctagaactgaatcgaacatgaggatgagtcagtgtcaagactcccagtggggccatcggatcattactgcatgatcgtcttaagcctttgttagtgaatccctcagactcacgccttc

SEQ ID NO: 10899 - DNA, 122 bp, Homo sapiens
  misc_feature (61)..(62): /note="This region represents a CpG dinucleotide"
  misc_feature (61)..(61): /note="Nucleotide may be methylated to form 5-methylcytosine"
acagttttggacatagcttttctcacagtggtagtagctcccactatacccaccgtgactcggggctgttcagaatccacccaggcgccctgagctctggggcctcctgggtaggggctggg

SEQ ID NO: 10900 - DNA, 122 bp, Homo sapiens
  misc_feature (61)..(62): /note="This region represents a CpG dinucleotide"
  misc_feature (61)..(61): /note="Nucleotide may be methylated to form 5-methylcytosine"
actcattaggattttcttttcaagagagcaaagaacctaaataaagatccttgaatttagcgtacaatacccaggagtcatcggagcagcagcaatttgggggaacttcaagtgtggtattt

SEQ ID NO: 10901 - DNA, 122 bp, Homo sapiens
  misc_feature (61)..(62): /note="This region represents a CpG dinucleotide"
  misc_feature (61)..(61): /note="Nucleotide may be methylated to form 5-methylcytosine"
ctccgagggagcaggcgagtcctctcttgtcagaggccacatccctgcacctgcgcagcacggcacatcctggggctcagcgtcctgcgtggaacatactcaagtccatccacatcctctgc

SEQ ID NO: 10902 - DNA, 122 bp, Homo sapiens
  misc_feature (61)..(62): /note="This region represents a CpG dinucleotide"
  misc_feature (61)..(61): /note="Nucleotide may be methylated to form 5-methylcytosine"
atcctccacaccttttctgaaaccctttctagaataagcctctgattaaagcagcctcaacgtcccatggctatccacatggataccaagcaattttctttaggaagattcaggtctcactg

SEQ ID NO: 10903 - DNA, 122 bp, Homo sapiens
  misc_feature (61)..(62): /note="This region represents a CpG dinucleotide"
  misc_feature (61)..(61): /note="Nucleotide may be methylated to form 5-methylcytosine"
ctgcagtgtctcactgagcaccctaagcactcacccgtcaccctctggttccttggggcccggtgctggccttggaacactggtcccagtactcaggcagtccaggaaatagtctgtttggc

SEQ ID NO: 10904 - DNA, 122 bp, Homo sapiens
  misc_feature (61)..(62): /note="This region represents a CpG dinucleotide"
  misc_feature (61)..(61): /note="Nucleotide may be methylated to form 5-methylcytosine"
agaaaccaaactttgtgaaacaggaagggtaataaagattcccgtgtatctgggcggccacgaagcatcatggagtttttgttttgtgtctccgtggagttaactggttttagcagttctac

SEQ ID NO: 10905 - DNA, 122 bp, Homo sapiens
  misc_feature (61)..(62): /note="This region represents a CpG dinucleotide"
  misc_feature (61)..(61): /note="Nucleotide may be methylated to form 5-methylcytosine"
gtttattacccactttctgccttttctgcactgaattacttgccatgtactaatgcacaacgggcttaggtatgtgtatgtcctacaatctatctttcacaaaatttttacatgtattggtt

SEQ ID NO: 10906 - DNA, 122 bp, Homo sapiens
  misc_feature (61)..(62): /note="This region represents a CpG dinucleotide"
  misc_feature (61)..(61): /note="Nucleotide may be methylated to form 5-methylcytosine"
aagcctggatgtggtccccgctgagctgagcccaggatcctgatgcagcctctgggggaccggggcaggtggcacggtgcacgccaagatggctgtgtccacagaggagctggaggccacgg

SEQ ID NO: 10907 - DNA, 122 bp, Homo sapiens
  misc_feature (61)..(62): /note="This region represents a CpG dinucleotide"
  misc_feature (61)..(61): /note="Nucleotide may be methylated to form 5-methylcytosine"
gccagtggggatgtggagggccaggagtgccagaaggtccaaggtgttggtgtggtgtcacgtccaaggcaatcccaaactggccccagaacccacgtgtctaagtcctaccttcgtcgcct

SEQ ID NO: 10908 - DNA, 122 bp, Homo sapiens
  misc_feature (61)..(62): /note="This region represents a CpG dinucleotide"
  misc_feature (61)..(61): /note="Nucleotide may be methylated to form 5-methylcytosine"
cactcatcagtctcccaaaatgctgggattacatgcatgagccactgcacctggccttgacgcacattaattcagacgtagtcattttggtatgggactgagtgctaagctgtgcaatgcca

SEQ ID NO: 10909 - DNA, 122 bp, Homo sapiens
  misc_feature (61)..(62): /note="This region represents a CpG dinucleotide"
  misc_feature (61)..(61): /note="Nucleotide may be methylated to form 5-methylcytosine"
agtctccatatctggtcagctcctgccagagccaacccttctgcagacagcagctgtccacgctggagaaattacaaaaaataactgcctgatgccagcggagagtgaataagatgaaacca

SEQ ID NO: 10910 - DNA, 122 bp, Homo sapiens
  misc_feature (61)..(62): /note="This region represents a CpG dinucleotide"
  misc_feature (61)..(61): /note="Nucleotide may be methylated to form 5-methylcytosine"
aaggctgatgaagctgagacattgattatcaaagtgccttcacttcccagaaccatctgacgcaagatagaatccagctatgcttaatcaccacttacacagcactttctgaaatgctttct

SEQ ID NO: 10911 - DNA, 122 bp, Homo sapiens
  misc_feature (61)..(62): /note="This region represents a CpG dinucleotide"
  misc_feature (61)..(61): /note="Nucleotide may be methylated to form 5-methylcytosine"
tggtgtaacgatggcagtctatgaatccccttggttattatctctggggtagccaggtctcgcaagaacagagctcagcaggcctgccagggactaccacaccctctcctgaggatgtcgtg

SEQ ID NO: 10912 - DNA, 122 bp, Homo sapiens
  misc_feature (61)..(62): /note="This region represents a CpG dinucleotide"
  misc_feature (61)..(61): /note="Nucleotide may be methylated to form 5-methylcytosine"
agcctgaatattcaacaccattcagcttttaatgagaggagctacccagggccaggaccccgtctgtgttgtgaggacaccaggtgtggccgagaaacttaccgatggcagagccgttaagg

SEQ ID NO: 10913 - DNA, 122 bp, Homo sapiens
  misc_feature (61)..(62): /note="This region represents a CpG dinucleotide"
  misc_feature (61)..(61): /note="Nucleotide may be methylated to form 5-methylcytosine"
ctcctggcctcaagtgatccacccacctcagcctcccaaagtacagggattataggcgtgcgccactgtgcccggccgagaacaatttgtcacaagcttacttttctagttttgccaatgca

SEQ ID NO: 10914 - DNA, 122 bp, Homo sapiens
  misc_feature (61)..(62): /note="This region represents a CpG dinucleotide"
  misc_feature (61)..(61): /note="Nucleotide may be methylated to form 5-methylcytosine"
ggagcttggctgatagaaccagccactggatgtcaccctttctctataaccaacaaacagcgctggctgctcacaaccaccaccaaagtgcccactgctggtctgatgtgttggcagtaaga

SEQ ID NO: 10915 - DNA, 122 bp, Homo sapiens
  misc_feature (61)..(62): /note="This region represents a CpG dinucleotide"
  misc_feature (61)..(61): /note="Nucleotide may be methylated to form 5-methylcytosine"
ctcactcaggggcaagtggtaagcgctctttcccctctagtgtttgtgactcaggagtttcgaaacaggaagtagagctggctggctgtgcccttccgtccttcattagacgtttgctcttg

SEQ ID NO: 10916 - DNA, 122 bp, Homo sapiens
  misc_feature (61)..(62): /note="This region represents a CpG dinucleotide"
  misc_feature (61)..(61): /note="Nucleotide may be methylated to form 5-methylcytosine"
tgacctcgtgatccacctgcctcggcctctcaaagtgctgggattacaggcgtgagccaccgcgcccggcctaatttttaaataaatagagacgggggttgggtgtcactatttgcccaggc

SEQ ID NO: 10917 - DNA, 122 bp, Homo sapiens
  misc_feature (61)..(62): /note="This region represents a CpG dinucleotide"
  misc_feature (61)..(61): /note="Nucleotide may be methylated to form 5-methylcytosine"
tcctgtatataatcctagttctctctcctttattgaactccgaataaatcacaaaatccccgtgccacaatttcctcttctaagacagagataatattttcacctgcccatcaagtgggata

SEQ ID NO: 10918 - DNA, 122 bp, Homo sapiens
  misc_feature (61)..(62): /note="This region represents a CpG dinucleotide"
  misc_feature (61)..(61): /note="Nucleotide may be methylated to form 5-methylcytosine"
aatcagctttccacttgattgctagttttgatttgacatttgattgatcacctgtcatctcgctgcctttgatctattcattcttgatatatatcaataaatcactcaccatggtaactcag

SEQ ID NO: 10919 - DNA, 122 bp, Homo sapiens
  misc_feature (61)..(62): /note="This region represents a CpG dinucleotide"
  misc_feature (61)..(61): /note="Nucleotide may be methylated to form 5-methylcytosine"
aaggggagaaaacagccaaacagcccaaacctggatactctaggggggaaatgcataatgcgaaggacagccacatgaaactagcaaacattgtctagagccggggaaatgaatcaagagca

SEQ ID NO: 10920 - DNA, 122 bp, Homo sapiens
  misc_feature (61)..(62): /note="This region represents a CpG dinucleotide"
  misc_feature (61)..(61): /note="Nucleotide may be methylated to form 5-methylcytosine"
tgaaataaaagctgtccttttacatagcacgacagatgcacaaagaaatttgaacgttctcgtattaaaaaaaaaaaaaaaaaaaaaaaaaaaaaaaaaagcctgcggcacactccaaaatc

SEQ ID NO: 10921 - DNA, 122 bp, Homo sapiens
  misc_feature (61)..(62): /note="This region represents a CpG dinucleotide"
  misc_feature (61)..(61): /note="Nucleotide may be methylated to form 5-methylcytosine"
ttattaagtaaattaccactactggagcctaatctagctggaaactccaggagccagtgtcgactcaaaggtcaagaggagcagagaattaaaaaccaaccacaacaatcaaggtcagaact

SEQ ID NO: 10922 - DNA, 122 bp, Homo sapiens
  misc_feature (61)..(62): /note="This region represents a CpG dinucleotide"
  misc_feature (61)..(61): /note="Nucleotide may be methylated to form 5-methylcytosine"
caatggtcaatcttggtcctctcatccctcctgcttttgacaagatttgatgtagtgtatcgtttttttcttctttaaacattttttcttggcttggcctctgtgacaccagattccttgtt

SEQ ID NO: 10923 - DNA, 122 bp, Homo sapiens
  misc_feature (61)..(62): /note="This region represents a CpG dinucleotide"
  misc_feature (61)..(61): /note="Nucleotide may be methylated to form 5-methylcytosine"
ttagaaggcaagagcagcagggtcaggaggaagagcaggggtgtggcgcctcgttccttccgccaggagctcatggggcttcgttggacccaatcccgttgcctttgttgacgtagaatggc

SEQ ID NO: 10924 - DNA, 122 bp, Homo sapiens
  misc_feature (61)..(62): /note="This region represents a CpG dinucleotide"
  misc_feature (61)..(61): /note="Nucleotide may be methylated to form 5-methylcytosine"
ttttaaaaatattcagcccttcaagacttcttctctcagcaaggggtcctctgccgtgcccgtcgaagtcagaggtccaggagagctgcccttcactggagaagggggaaagggaatggttc

SEQ ID NO: 10925 - DNA, 122 bp, Homo sapiens
  misc_feature (61)..(62): /note="This region represents a CpG dinucleotide"
  misc_feature (61)..(61): /note="Nucleotide may be methylated to form 5-methylcytosine"
gtgggtgtggccaagaagatggggctcactcccagctctcaatcagttgctacaacgtctcgctgggaggcttaagccaacagcatttctcattctgcctccaggtcttgttacagagcctg

SEQ ID NO: 10926 - DNA, 122 bp, Homo sapiens
  misc_feature (61)..(62): /note="This region represents a CpG dinucleotide"
  misc_feature (61)..(61): /note="Nucleotide may be methylated to form 5-methylcytosine"
tttacagggtacacaatgttttctagcttaattagcctcttaccttcatccaggaactaacgccagatgcctctgtcctcatggcagtcacctggccatgaccagaatcccagtttgagtgt

SEQ ID NO: 10927 - DNA, 122 bp, Homo sapiens
  misc_feature (61)..(62): /note="This region represents a CpG dinucleotide"
  misc_feature (61)..(61): /note="Nucleotide may be methylated to form 5-methylcytosine"
aacttgaagatgtaaatgccctgacgaatataaagaggtatttggaaggcacaagggaggcgctgccaccaaaaatcgaatttgtaattacactccagattgaagagcccaaggtaggtacc

SEQ ID NO: 10928 - DNA, 122 bp, Homo sapiens
  misc_feature (61)..(62): /note="This region represents a CpG dinucleotide"
  misc_feature (61)..(61): /note="Nucleotide may be methylated to form 5-methylcytosine"
ataatcaggaagctttttctattaataacaccagtcctaagtatttttcttctgttccaacgtcagtgctctcctttatatctcagagaatgtagagagcttctatgcattacacagatgct

SEQ ID NO: 10929 - DNA, 122 bp, Homo sapiens
  misc_feature (61)..(62): /note="This region represents a CpG dinucleotide"
  misc_feature (61)..(61): /note="Nucleotide may be methylated to form 5-methylcytosine"
agatatggtcaaagactataattgctctcttgcatgtatctttaacttccttaacacttccgtcacatttgtttcacaaaaccacagccatggttaaaagccagctctccacctactcctta

SEQ ID NO: 10930 - DNA, 122 bp, Homo sapiens
  misc_feature (61)..(62): /note="This region represents a CpG dinucleotide"
  misc_feature (61)..(61): /note="Nucleotide may be methylated to form 5-methylcytosine"
tgaatcactgtagattgttctagaaacacagacaaagcaataaaaccctctttcatattgcgttgacttgaaatcataaccataagttcccaccacaaatttctttcttcattaattcattt

SEQ ID NO: 10931 - DNA, 122 bp, Homo sapiens
  misc_feature (61)..(62): /note="This region represents a CpG dinucleotide"
  misc_feature (61)..(61): /note="Nucleotide may be methylated to form 5-methylcytosine"
acatgtaaggcttaaggttcatggatctgaaccaggcttgtgaatactcatccaggtctccgccctggaagacgacttttccccatccaccagccccagtgccccctccctctccctctcaa

SEQ ID NO: 10932 - DNA, 122 bp, Homo sapiens
  misc_feature (61)..(62): /note="This region represents a CpG dinucleotide"
  misc_feature (61)..(61): /note="Nucleotide may be methylated to form 5-methylcytosine"
gaacccgcagcccagacgggacagtcaaccaaagcgggatggagagaggacccatcgcggcggaggctgcatagttttggttaaccaaggactgcctgggctgatctagactcatttatatg

SEQ ID NO: 10933 - DNA, 122 bp, Homo sapiens
  misc_feature (61)..(62): /note="This region represents a CpG dinucleotide"
  misc_feature (61)..(61): /note="Nucleotide may be methylated to form 5-methylcytosine"
tgaacattatgtatttttttctttaaccctttgccactcccatttcgcagatgaggataccgaggctctgagtcatacagttagtgatttgaaaccagatctttctgactgtaggatctaag

SEQ ID NO: 10934 - DNA, 122 bp, Homo sapiens
  misc_feature (61)..(62): /note="This region represents a CpG dinucleotide"
  misc_feature (61)..(61): /note="Nucleotide may be methylated to form 5-methylcytosine"
ttactggcaatgctgtctttactaagcctttatctattctcttctttgtttaagcaaatacggtgtttaaatgtaagttctacgtctttgggatgtaaatttttacttaagagtcatgtctt

SEQ ID NO: 10935 - DNA, 122 bp, Homo sapiens
  misc_feature (61)..(62): /note="This region represents a CpG dinucleotide"
  misc_feature (61)..(61): /note="Nucleotide may be methylated to form 5-methylcytosine"
gcttatgccgcaggctgacagcgaaaactctcagcacaacaggggtatctgggcagacagcgaacagggctgagaacctactatgtgcagacatgacagtctgattgaatcccaataacaat

SEQ ID NO: 10936 - DNA, 122 bp, Homo sapiens
  misc_feature (61)..(62): /note="This region represents a CpG dinucleotide"
  misc_feature (61)..(61): /note="Nucleotide may be methylated to form 5-methylcytosine"
tacaatactttgcatacttcagtcaagtagacagtcaatattaatcaccacattctccaacgctttctcatacaggttctatttctccactatgaacagtgagattttttttctggtatact

SEQ ID NO: 10937 - DNA, 122 bp, Homo sapiens
  misc_feature (61)..(62): /note="This region represents a CpG dinucleotide"
  misc_feature (61)..(61): /note="Nucleotide may be methylated to form 5-methylcytosine"
agcactaaaatgctactgtgtccactggcctgatggcatgatgccctgtgtctcagggctcgtgtgtcatgcttgaagcataggtctttgtgctaaggctggagccagcgtctaaagtcctt

SEQ ID NO: 10938 - DNA, 122 bp, Homo sapiens
  misc_feature (61)..(62): /note="This region represents a CpG dinucleotide"
  misc_feature (61)..(61): /note="Nucleotide may be methylated to form 5-methylcytosine"
ccccacatgctgtcccaggagcatagcaggcatcgtacactgtgcagtgtggggtacacacgtaggcacttcagacccaggaatcacggactcctgtctcctgccatatatgtgggaggtct

SEQ ID NO: 10939 - DNA, 122 bp, Homo sapiens
  misc_feature (61)..(62): /note="This region represents a CpG dinucleotide"
  misc_feature (61)..(61): /note="Nucleotide may be methylated to form 5-methylcytosine"
aatccttacccacagatataccaaaataatcttctacattatttaatcctagcttcttcgcgggcaagagccacattatctctgtgcttaatgagttctcagtacataagacagacattggt

SEQ ID NO: 10940 - DNA, 122 bp, Homo sapiens
  misc_feature (61)..(62): /note="This region represents a CpG dinucleotide"
  misc_feature (61)..(61): /note="Nucleotide may be methylated to form 5-methylcytosine"
tgtgtacatagagccaggattgctggattaagatagcattacaggtaatacaggataagacgacattgcacctcgggtccaggtagtgagaaggttccctgccaccctgttacctggagcgg

SEQ ID NO: 10941 - DNA, 122 bp, Homo sapiens
  misc_feature (61)..(62): /note="This region represents a CpG dinucleotide"
  misc_feature (61)..(61): /note="Nucleotide may be methylated to form 5-methylcytosine"
tctcaggaagcaagcattttgctcttttcctaaaactgcatagctgacttgggaatgaggcggggagagctggtctctcttttctaactcttctggtaggatgtggtaaagactgagctcct

SEQ ID NO: 10942 - DNA, 122 bp, Homo sapiens
  misc_feature (61)..(62): /note="This region represents a CpG dinucleotide"
  misc_feature (61)..(61): /note="Nucleotide may be methylated to form 5-methylcytosine"
tcaaggaagataagctttatgattcagggagaggaggaagtactccagggttggaaggtacgcttaggaaatgatacaatgtacttatttaatattgtcctttgagttttatggagtgcagc

SEQ ID NO: 10943 - DNA, 122 bp, Homo sapiens
  misc_feature (61)..(62): /note="This region represents a CpG dinucleotide"
  misc_feature (61)..(61): /note="Nucleotide may be methylated to form 5-methylcytosine"
gttaactttgctcctttttatggctaaagctctggtgaaagacttcataagcatacatctcgcaatcgcatgtatttagttgtcaggcacagaaagctggactacaaatcacaaatctgtta

SEQ ID NO: 10944 - DNA, 122 bp, Homo sapiens
  misc_feature (61)..(62): /note="This region represents a CpG dinucleotide"
  misc_feature (61)..(61): /note="Nucleotide may be methylated to form 5-methylcytosine"
tcatgacctcaattccctcacctgaaataggaaatgagaatgtttcattgtagccccaagcggtcatgtcaacctagtgcctagtcataattaattgacttttcctgtattacttctttttt

SEQ ID NO: 10945 - DNA, 122 bp, Homo sapiens
  misc_feature (61)..(62): /note="This region represents a CpG dinucleotide"
  misc_feature (61)..(61): /note="Nucleotide may be methylated to form 5-methylcytosine"
gtgagcttttccctttctctctttccttggtgaatggctcttcttccccaagggttgagccgccagctcccagaacaatgtcagtatggagggtgtttcctgaacccgcagggcaagacttc

SEQ ID NO: 10946 - DNA, 122 bp, Homo sapiens
  misc_feature (61)..(62): /note="This region represents a CpG dinucleotide"
  misc_feature (61)..(61): /note="Nucleotide may be methylated to form 5-methylcytosine"
ctgtacttaaaagttctggtctccttagaggcttctgtttccgcagccaacgacagggtgcggggcgggggccgggaggcgagggccagcaggaccggggtccagtcactttcacgggtcct

SEQ ID NO: 10947 - DNA, 122 bp, Homo sapiens
  misc_feature (61)..(62): /note="This region represents a CpG dinucleotide"
  misc_feature (61)..(61): /note="Nucleotide may be methylated to form 5-methylcytosine"
actcccacatgtctgggcacctgccctgggctgaggccaggctgctccaggggcctcctgcgccctcacctgccacagagcaacccaggttaaatacagcccatgcacaaagccacaggcca

SEQ ID NO: 10948 - DNA, 122 bp, Homo sapiens
  misc_feature (61)..(62): /note="This region represents a CpG dinucleotide"
  misc_feature (61)..(61): /note="Nucleotide may be methylated to form 5-methylcytosine"
gaacagggagaacaagctctacctctccaaggagttctacacggagatccttgagagtgacggtgccatccatctgttcctccttctccaaaagcagcatgaagagccggccttccatgtct

SEQ ID NO: 10949 - DNA, 122 bp, Homo sapiens
  misc_feature (61)..(62): /note="This region represents a CpG dinucleotide"
  misc_feature (61)..(61): /note="Nucleotide may be methylated to form 5-methylcytosine"
tggccacagcaatgaacgttctttccttctcaagtcagtataggccatatgctaatggggcgttaggcaattagctagcgcttcctctactaagagcaggcataagtgcctttcatttgagt

SEQ ID NO: 10950 - DNA, 122 bp, Homo sapiens
  misc_feature (61)..(62): /note="This region represents a CpG dinucleotide"
  misc_feature (61)..(61): /note="Nucleotide may be methylated to form 5-methylcytosine"
caaataagataatgggaacgggtgttgtcaggcattacacaaatgtaggattaggtccagcggtttactaacagaggtctggctcaattccagcgagtcccccctggggagcatttaacata

SEQ ID NO: 10951 - DNA, 122 bp, Homo sapiens
  misc_feature (61)..(62): /note="This region represents a CpG dinucleotide"
  misc_feature (61)..(61): /note="Nucleotide may be methylated to form 5-methylcytosine"
tcagggaatgcatgtaatggacttaactcagtgcctggcacgcagtgaacgataggccgacgttggccaagccagaaaatccgtctgccctgacgtcaggcagggcctaattatagacaccc

SEQ ID NO: 10952 - DNA, 122 bp, Homo sapiens
  misc_feature (61)..(62): /note="This region represents a CpG dinucleotide"
  misc_feature (61)..(61): /note="Nucleotide may be methylated to form 5-methylcytosine"
ctcaggtaccgcgttttaaagtaaataccattagggggcagtatttctggtccacctccccgcgagagggccatctggctcaacagttggttaacggaggtagggtaaacagacttattggg

SEQ ID NO: 10953 - DNA, 122 bp, Homo sapiens
  misc_feature (61)..(62): /note="This region represents a CpG dinucleotide"
  misc_feature (61)..(61): /note="Nucleotide may be methylated to form 5-methylcytosine"
cacatccccaccattccccaccgtggcaccatggagtcttccttacctgatctaggaaggcggcgctggagcttgctgccccctgtctgatccagcccctcatgttgtaggagggaggtggg

SEQ ID NO: 10954 - DNA, 122 bp, Homo sapiens
  misc_feature (61)..(62): /note="This region represents a CpG dinucleotide"
  misc_feature (61)..(61): /note="Nucleotide may be methylated to form 5-methylcytosine"
tgggattcagagctggggtgtagaatgcaaccttgcactgtgtggatttaggaaagacaccgcccctctctgattgtcagttcttcatttacaaagtgggaagagaggtccatctctgaccc

SEQ ID NO: 10955 - DNA, 122 bp, Homo sapiens
  misc_feature (61)..(62): /note="This region represents a CpG dinucleotide"
  misc_feature (61)..(61): /note="Nucleotide may be methylated to form 5-methylcytosine"
agagcatcggcataggtctctccatgtggcttggagccctcactgcaggacactgcattccgagagggattgtcccaagggcaagcattccaaagacacacatggaagcagcttttcttcct

SEQ ID NO: 10956 - DNA, 122 bp, Homo sapiens
  misc_feature (61)..(62): /note="This region represents a CpG dinucleotide"
  misc_feature (61)..(61): /note="Nucleotide may be methylated to form 5-methylcytosine"
gatatttcctcctattaaaaaaaaatgtttggttttatctagggtaaggtatgctaggtacgcagaggaaaattccagagctgtacgccaggaaccgaagtcactagctacatggtaaacag

SEQ ID NO: 10957 - DNA, 122 bp, Homo sapiens
  misc_feature (61)..(62): /note="This region represents a CpG dinucleotide"
  misc_feature (61)..(61): /note="Nucleotide may be methylated to form 5-methylcytosine"
gacagggaccctggggctacaaggaggggcagggtgggaatgtgaaggagccctgaagaacggggtgtcagtaccactatgtagggcttatcagtgccagacactaagccaagcactttaca

SEQ ID NO: 10958 - DNA, 122 bp, Homo sapiens
  misc_feature (61)..(62): /note="This region represents a CpG dinucleotide"
  misc_feature (61)..(61): /note="Nucleotide may be methylated to form 5-methylcytosine"
tgctcctatgagaatctaatgctgccactgatctgacaggaggcggagctctgatagtaacgcttgctcacccactggcccaccatcctgctggcctcgggctgtattcctaacaggccatg

SEQ ID NO: 10959 - DNA, 122 bp, Homo sapiens
  misc_feature (61)..(62): /note="This region represents a CpG dinucleotide"
  misc_feature (61)..(61): /note="Nucleotide may be methylated to form 5-methylcytosine"
gggaaaaacatctcacgtgtttcaagtggtgctttgactccaacccacataggtcaaaaacgttaattagattaaattaaggtaactcatttccttggtacatcatgaaagacaggctaatg

SEQ ID NO: 10960 - DNA, 122 bp, Homo sapiens
  misc_feature (61)..(62): /note="This region represents a CpG dinucleotide"
  misc_feature (61)..(61): /note="Nucleotide may be methylated to form 5-methylcytosine"
tctctcctaagagacatatttgtacttttcttggtcttaagcctcatcaagaatatcccacgaagcacaagaggcacatcctttcttgaaaccagaaacaatgaaggaaatgactaacagcc

SEQ ID NO: 10961 - DNA, 122 bp, Homo sapiens
  misc_feature (61)..(62): /note="This region represents a CpG dinucleotide"
  misc_feature (61)..(61): /note="Nucleotide may be methylated to form 5-methylcytosine"
tcaaagccctgtgtttttgcctccaacagccctcatgcctagaccatcccttgtgctgaacgtgcacctaattcaacaccctagtcttcagacccgtgcaattttcactccctgtaaggaag

SEQ ID NO: 10962 - DNA, 122 bp, Homo sapiens
  misc_feature (61)..(62): /note="This region represents a CpG dinucleotide"
  misc_feature (61)..(61): /note="Nucleotide may be methylated to form 5-methylcytosine"
tcagaaggaacttcagaatttgggcaatgcctcttagccatcattacaaacaattcttcccgtattagagccatttcagtaataacagacaagtcctgacatacaagaatcaggttgccttc

SEQ ID NO: 10963 - DNA, 122 bp, Homo sapiens
  misc_feature (61)..(62): /note="This region represents a CpG dinucleotide"
  misc_feature (61)..(61): /note="Nucleotide may be methylated to form 5-methylcytosine"
gtgaaaggctgggagctgaaagcaaggagagcagaagaggctggtgaagattctaatctgcgtgtccaggggcactcttccaggtctcaggaacgcaggtcagaatgtgcaagccagctgcc

SEQ ID NO: 10964 - DNA, 122 bp, Homo sapiens
  misc_feature (61)..(62): /note="This region represents a CpG dinucleotide"
  misc_feature (61)..(61): /note="Nucleotide may be methylated to form 5-methylcytosine"
ttctggagagagattctatgccatgctgataggtagcaccaaactaaagccagcactgggcgctggggagagggagacccatgacaagaggaagttctgtttgacttctggagaaacagaaa

SEQ ID NO: 10965 - DNA, 122 bp, Homo sapiens
  misc_feature (61)..(62): /note="This region represents a CpG dinucleotide"
  misc_feature (61)..(61): /note="Nucleotide may be methylated to form 5-methylcytosine"
gagggaattgaaaggaggtgaacttgcctctctgagccagctctttggctgtctccttcccgatacctgtattagctcctgtgaccacaactactttcccaggaagctgaacagttgatgta

SEQ ID NO: 10966 - DNA, 122 bp, Homo sapiens
  misc_feature (61)..(62): /note="This region represents a CpG dinucleotide"
  misc_feature (61)..(61): /note="Nucleotide may be methylated to form 5-methylcytosine"
acaaacaaaagaacaagaactcccccataattccacttctcagaaatcacatcacattgacgtttttgtctgcgtatccagatcattttgggggtgctcatgattttttaaacaaaagaact

SEQ ID NO: 10967 - DNA, 122 bp, Homo sapiens
  misc_feature (61)..(62): /note="This region represents a CpG dinucleotide"
  misc_feature (61)..(61): /note="Nucleotide may be methylated to form 5-methylcytosine"
aacagaatacaaacagtaatatattgacctaacagattataaataaataacataaccacacggaagaggaagtgactaaaatgtaacctaagtaactttagaaaatagcatctgtatattac

SEQ ID NO: 10968 - DNA, 122 bp, Homo sapiens
  misc_feature (61)..(62): /note="This region represents a CpG dinucleotide"
  misc_feature (61)..(61): /note="Nucleotide may be methylated to form 5-methylcytosine"
attctgtggaggagaagcatctccccaaatgtccttgttttatagtaaataattctaccacgaggatccttatccataaatctatattcatgtttattttgtgctagatacagatcttgcaa

SEQ ID NO: 10969 - DNA, 122 bp, Homo sapiens
  misc_feature (61)..(62): /note="This region represents a CpG dinucleotide"
  misc_feature (61)..(61): /note="Nucleotide may be methylated to form 5-methylcytosine"
ccagggtgggcgggagggctgggagcggatggcggagatgttcagacacagctggggtcgcgggcgtctgactgcgagctgtcctctctcccgcaggcctgctgctcttggtgagcctggag

SEQ ID NO: 10970 - DNA, 122 bp, Homo sapiens
  misc_feature (61)..(62): /note="This region represents a CpG dinucleotide"
  misc_feature (61)..(61): /note="Nucleotide may be methylated to form 5-methylcytosine"
ttgtccctcctggaagcatcactacactttggtggcagggaagctgagctatgtggggcacgtgtgttcacgcatgttgcctggaagcgttctccagaaaagcattgcctcttctctgacag

SEQ ID NO: 10971 - DNA, 122 bp, Homo sapiens
  misc_feature (61)..(62): /note="This region represents a CpG dinucleotide"
  misc_feature (61)..(61): /note="Nucleotide may be methylated to form 5-methylcytosine"
aggaccatttcatcacttccctggggagcccactcattcattcagtgaagatttctctcccgatacccacttcaggaacccaggggccatctggaacagctctgggcaatggttcttatcct

SEQ ID NO: 10972 - DNA, 122 bp, Homo sapiens
  misc_feature (61)..(62): /note="This region represents a CpG dinucleotide"
  misc_feature (61)..(61): /note="Nucleotide may be methylated to form 5-methylcytosine"
taacttagaggaatctaggggatcatatacttcaaccttctcattttccactagtgaaaacggagaaccaaagtggtaatttttgtccatgcttaaggtcacagaggtagaggttgcccaaa

SEQ ID NO: 10973 - DNA, 122 bp, Homo sapiens
  misc_feature (61)..(62): /note="This region represents a CpG dinucleotide"
  misc_feature (61)..(61): /note="Nucleotide may be methylated to form 5-methylcytosine"
ttacgttaagtgaaataagtcaggcacagaaagacaaatactacatgttctcaccatatgcggaagcttaagaagttgacttcacagaagtagagtataaatagtggttattagaggctggg

SEQ ID NO: 10974 - DNA, 122 bp, Homo sapiens
  misc_feature (61)..(62): /note="This region represents a CpG dinucleotide"
  misc_feature (61)..(61): /note="Nucleotide may be methylated to form 5-methylcytosine"
acggataggcagttcgcactttcagtttattcttaaggattaatgcattaacccactccacgtgcttctctcctcctttgaccatgaaagcaggaatccaaaggacactgtcattcagcatg

SEQ ID NO: 10975 - DNA, 122 bp, Homo sapiens
  misc_feature (61)..(62): /note="This region represents a CpG dinucleotide"
  misc_feature (61)..(61): /note="Nucleotide may be methylated to form 5-methylcytosine"
tgtagaaccattaccattttaaagacagcaatcccccttttaaaaaactactgaggccttcgaagaaaccacacggctgccttgggccccaaaagctgcggaaaagcgcagtattcagttaa

SEQ ID NO: 10976 - DNA, 122 bp, Homo sapiens
  misc_feature (61)..(62): /note="This region represents a CpG dinucleotide"
  misc_feature (61)..(61): /note="Nucleotide may be methylated to form 5-methylcytosine"
gcagaggcgtgagactgccggccagccctgctgtgtacactgatagaattagtgagcgagcgtcccactctgatggaatccagatggaactcgtcactgtcactgcggtggagacggtgggg

SEQ ID NO: 10977 - DNA, 122 bp, Homo sapiens
  misc_feature (61)..(62): /note="This region represents a CpG dinucleotide"
  misc_feature (61)..(61): /note="Nucleotide may be methylated to form 5-methylcytosine"
cttgccttatttcaatgtggaatccagccttcattgtcttatcagtttgcagacagttcacgtgaaacactggaaatagttttcacaacataaacagaaattttatttgaaatgactgacag

SEQ ID NO: 10978 - DNA, 122 bp, Homo sapiens
  misc_feature (61)..(62): /note="This region represents a CpG dinucleotide"
  misc_feature (61)..(61): /note="Nucleotide may be methylated to form 5-methylcytosine"
tgcatagtgagcactgtagaatccccattttgcagccagggaaacgggggcggaggggggcgtgtggagaatttaagcattttgcccaaggtgccccagccagtaagtagcaacgccaagat

SEQ ID NO: 10979 - DNA, 122 bp, Homo sapiens
  misc_feature (61)..(62): /note="This region represents a CpG dinucleotide"
  misc_feature (61)..(61): /note="Nucleotide may be methylated to form 5-methylcytosine"
gtggaggctttgcaggctatatgatccctgtcacaactattcaactctgctactgtaaagcgaaaacaacataaacaggaagtaagcacacaggcagcagtgtgccgatcaaaccgcaccca

SEQ ID NO: 10980 - DNA, 122 bp, Homo sapiens
  misc_feature (61)..(62): /note="This region represents a CpG dinucleotide"
  misc_feature (61)..(61): /note="Nucleotide may be methylated to form 5-methylcytosine"
cagggtgcttccgcagcagaaagcatgcacattgctgtttttagaattccttctggtatacggtctactcagcacctcaggggaaaagcatgtgacactctcagtcatatgagactacagct

SEQ ID NO: 10981 - DNA, 122 bp, Homo sapiens
  misc_feature (61)..(62): /note="This region represents a CpG dinucleotide"
  misc_feature (61)..(61): /note="Nucleotide may be methylated to form 5-methylcytosine"
cccggtttataggaagtggagctgctgtctcagcctaggcatgtctgcctctttgcccttcgccatactgcttctcctctcctagccatgatggtgggagaatgcactgaaatgatgaatga

SEQ ID NO: 10982 - DNA, 122 bp, Homo sapiens
  misc_feature (61)..(62): /note="This region represents a CpG dinucleotide"
  misc_feature (61)..(61): /note="Nucleotide may be methylated to form 5-methylcytosine"
ctctctaagctgcatgaagggtgcccccattccatccctcttcacttctccccagcatagcgcctccataaatgtttgtgaactggatgaatgactgttgagcgcttggtatgatgagctgc

SEQ ID NO: 10983 - DNA, 122 bp, Homo sapiens
  misc_feature (61)..(62): /note="This region represents a CpG dinucleotide"
  misc_feature (61)..(61): /note="Nucleotide may be methylated to form 5-methylcytosine"
agtggtgtttcagaatccaaagtgtaacccatctttctgatccttgggtgaaccagcttccgtgagtcactccagcaaggaaaactgttttacttcattaagacggcatgtgtggcctctag

SEQ ID NO: 10984 - DNA, 122 bp, Homo sapiens
  misc_feature (61)..(62): /note="This region represents a CpG dinucleotide"
  misc_feature (61)..(61): /note="Nucleotide may be methylated to form 5-methylcytosine"
ataaaaggaggggaacaggaactttactatgaggaagctgggtgtggcacatagctcaggcgcctgtggccatcttaccacagcataattaacagtcaacctgatatgtgaagagggcatgc

SEQ ID NO: 10985 - DNA, 122 bp, Homo sapiens
  misc_feature (61)..(62): /note="This region represents a CpG dinucleotide"
  misc_feature (61)..(61): /note="Nucleotide may be methylated to form 5-methylcytosine"
gacttggagggccagagagtcagtctttaaggaaacaaatcaattattttcaaataagtacgagataaagcttgacattgctatcccatttgtggagacaggtaggatttatttgtctgtta

SEQ ID NO: 10986 - DNA, 122 bp, Homo sapiens
  misc_feature (61)..(62): /note="This region represents a CpG dinucleotide"
  misc_feature (61)..(61): /note="Nucleotide may be methylated to form 5-methylcytosine"
cagccccagccccagccgagcacccccggccccgcctgcccggcgttcccttttgtgcggcgctctcccgtccgcatccgcccgatcctctggaactccccgcggacgccggggtccctgga

SEQ ID NO: 10987 - DNA, 122 bp, Homo sapiens
  misc_feature (61)..(62): /note="This region represents a CpG dinucleotide"
  misc_feature (61)..(61): /note="Nucleotide may be methylated to form 5-methylcytosine"
tcacacctgggacacatggtcatggtaccacccatatgttctgcccaggcacagctcttgcgtctcctgcattatttccttagactccataacctgctcagacctcaagaaaagagaacctt

SEQ ID NO: 10988 - DNA, 122 bp, Homo sapiens
  misc_feature (61)..(62): /note="This region represents a CpG dinucleotide"
  misc_feature (61)..(61): /note="Nucleotide may be methylated to form 5-methylcytosine"
tcagcttccagaacaccaaaatgctccagatagttccacctcggcaggcaggacaagaggcgttaactctgtttactccttggcagatatcacggccccagtggcttcttcctctttataaa

SEQ ID NO: 10989 - DNA, 122 bp, Homo sapiens
  misc_feature (61)..(62): /note="This region represents a CpG dinucleotide"
  misc_feature (61)..(61): /note="Nucleotide may be methylated to form 5-methylcytosine"
aacttctcacatgtcccttgccagccacaccccagctacacacaaacttcgttcaatctgcggaacactcagaatttattcccaactaagactctttgcatgggctgttccctctgctattg

SEQ ID NO: 10990 - DNA, 122 bp, Homo sapiens
  misc_feature (61)..(62): /note="This region represents a CpG dinucleotide"
  misc_feature (61)..(61): /note="Nucleotide may be methylated to form 5-methylcytosine"
aagcaaagccacacatggacaaatgccagataatgtaacagccactttctagatgtgagccgaggggtatggagtccagtcaatttaaaagaaacaaaactgatataatcattgagagtaat

SEQ ID NO: 10991 - DNA, 122 bp, Homo sapiens
  misc_feature (61)..(62): /note="This region represents a CpG dinucleotide"
  misc_feature (61)..(61): /note="Nucleotide may be methylated to form 5-methylcytosine"
ggagttggcttgtttttatgtaatggccactgaatcatataaacaagaagacttcctttacgtgtaagctgctggtttaaagccaaattttaattggctcgaggcaagagctatatatatgt

SEQ ID NO: 10992 - DNA, 122 bp, Homo sapiens
  misc_feature (61)..(62): /note="This region represents a CpG dinucleotide"
  misc_feature (61)..(61): /note="Nucleotide may be methylated to form 5-methylcytosine"
tgcttggagtttgtttagtaaccttcttccttcttcatgctcgctggtgactcagaagttcgttttcttagcaaggcatgcagcaaaatgccaaagtagcagatgacccgaatgaaaaccct

SEQ ID NO: 10993 - DNA, 122 bp, Homo sapiens
  misc_feature (61)..(62): /note="This region represents a CpG dinucleotide"
  misc_feature (61)..(61): /note="Nucleotide may be methylated to form 5-methylcytosine"
tcttactttctggactcatcatttaagtttctgcccacaggttttgtgaggtagtcacctcgcctctgccactgctgctattctataaaaatgaaatctgcttccccatcactccagcaggc

SEQ ID NO: 10994 - DNA, 122 bp, Homo sapiens
  misc_feature (61)..(62): /note="This region represents a CpG dinucleotide"
  misc_feature (61)..(61): /note="Nucleotide may be methylated to form 5-methylcytosine"
gtagctgattgtaaatgccttcaggaagaatcaaaataaacaatagctgtctgtgaataacgaaagactcaaaatggccatggttaaggatctgataagagttcactaaaatgatgattaaa

SEQ ID NO: 10995 - DNA, 122 bp, Homo sapiens
  misc_feature (61)..(62): /note="This region represents a CpG dinucleotide"
  misc_feature (61)..(61): /note="Nucleotide may be methylated to form 5-methylcytosine"
atggccatttcctttgtaatcatcccgtggtttttggtattagccttgataccactcatacgctctgggcaccagctttgagacactgtctgcagaccagtgtgcttacttcattgaaaatg

SEQ ID NO: 10996 - DNA, 122 bp, Homo sapiens
  misc_feature (61)..(62): /note="This region represents a CpG dinucleotide"
  misc_feature (61)..(61): /note="Nucleotide may be methylated to form 5-methylcytosine"
caagattatatatactattcctgaccttaccaggtaggtaagattctttgtgcttaattccgcactcaggacagacttggtgagtctgttgcttattttcctgtatcttattagtgagggaa

SEQ ID NO: 10997 - DNA, 122 bp, Homo sapiens
  misc_feature (61)..(62): /note="This region represents a CpG dinucleotide"
  misc_feature (61)..(61): /note="Nucleotide may be methylated to form 5-methylcytosine"
atctgacttcaatttctgtcctttttcattcagggtttacttgaggtttatatatagaggcgtcttaggttatttgtttagtttgcatgtctaaaaattttattagaaagttaagcttgaca

SEQ ID NO: 10998 - DNA, 122 bp, Homo sapiens
  misc_feature (61)..(62): /note="This region represents a CpG dinucleotide"
  misc_feature (61)..(61): /note="Nucleotide may be methylated to form 5-methylcytosine"
gccacttggagctttctgagcctcagtgtgctcatgattaaaatggggtaatactatctgcgttatgaggattcttgtgaaatttaggtattgtctagaaaatcccagtgcagggcccagta

SEQ ID NO: 10999 - DNA, 122 bp, Homo sapiens
  misc_feature (61)..(62): /note="This region represents a CpG dinucleotide"
  misc_feature (61)..(61): /note="Nucleotide may be methylated to form 5-methylcytosine"
cacgtaaaattagaagaaagcagcccagcagggcctacaaggaatgtgtgaacggatgcacgtaaagtgcttagcaaagcgtggtaaacaagagcccttgttgtcattcttgctttaagcct

SEQ ID NO: 11000 - DNA, 122 bp, Homo sapiens
  misc_feature (61)..(62): /note="This region represents a CpG dinucleotide"
  misc_feature (61)..(61): /note="Nucleotide may be methylated to form 5-methylcytosine"
gtcctgccctggggttccatgatttaatgattctgcacctgcaccatctgataaggtagccgcatatgactgttgagcacttgaaatgtgtgggaacccactaggagccccagagttggcat

SEQ ID NO: 11001 - DNA, 122 bp, Homo sapiens
  misc_feature (61)..(62): /note="This region represents a CpG dinucleotide"
  misc_feature (61)..(61): /note="Nucleotide may be methylated to form 5-methylcytosine"
tggtttctcgtgcccctcagggtcaggagcagtctgatcaaaaggagggcatccactgtccggggccattcccacagctcccggatgctgggtctggaggctgcgcccttcccctgcaggag

SEQ ID NO: 11002 - DNA, 122 bp, Homo sapiens
  misc_feature (61)..(62): /note="This region represents a CpG dinucleotide"
  misc_feature (61)..(61): /note="Nucleotide may be methylated to form 5-methylcytosine"
gttaacaagttggctcctgctttactacggggggtccctggcagctcctctgttgaaggacgcatggggcatctgtgccgctctcgtagggacgtttgcagggccttgtgtgactgtgttca

SEQ ID NO: 11003 - DNA, 122 bp, Homo sapiens
  misc_feature (61)..(62): /note="This region represents a CpG dinucleotide"
  misc_feature (61)..(61): /note="Nucleotide may be methylated to form 5-methylcytosine"
gaaagtgcacaccctggaacaaggagccttgggggtaaacataaatgaaatgcacttaggcgaaaatggaaatttttacaaggaaatagaggtatctcaggaacccaaggaagcacactagg

SEQ ID NO: 11004 - DNA, 122 bp, Homo sapiens
  misc_feature (61)..(62): /note="This region represents a CpG dinucleotide"
  misc_feature (61)..(61): /note="Nucleotide may be methylated to form 5-methylcytosine"
ctataccttctaggcctgatcaggaaggaagctgggttttggtgtgccagtcaggtgagacgcagagaagacagcacaatcaacacaggaagtaacagaagcagctagttactcacaggtcc

SEQ ID NO: 11005 - DNA, 122 bp, Homo sapiens
  misc_feature (61)..(62): /note="This region represents a CpG dinucleotide"
  misc_feature (61)..(61): /note="Nucleotide may be methylated to form 5-methylcytosine"
aggataactgtcgggatgtttctgccaatcacagtggtccagcaccatccagttaaaacacgttcactcccacaggcctcagctcaattatcccaggaaattctgtcgaactgctaaaagga

SEQ ID NO: 11006 - DNA, 122 bp, Homo sapiens
  misc_feature (61)..(62): /note="This region represents a CpG dinucleotide"
  misc_feature (61)..(61): /note="Nucleotide may be methylated to form 5-methylcytosine"
cctcgtctttaaaccagaacagacacaaccttggtcaggaaatttcacattctgaaagtccgtatcacctaacaaggaaaaccttcttatcctggccatgaatctagcagtgatctttcata

SEQ ID NO: 11007 - DNA, 122 bp, Homo sapiens
  misc_feature (61)..(62): /note="This region represents a CpG dinucleotide"
  misc_feature (61)..(61): /note="Nucleotide may be methylated to form 5-methylcytosine"
tgtatggatacctgtgcgtgtacacacggcagagtggctgagccaggctccatgcggctccgtgcgtgggatgctgttgactttcacagttctaacctgtttcccctggagctccctaactc

SEQ ID NO: 11008 - DNA, 122 bp, Homo sapiens
  misc_feature (61)..(62): /note="This region represents a CpG dinucleotide"
  misc_feature (61)..(61): /note="Nucleotide may be methylated to form 5-methylcytosine"
ggaaatccggctgatcattcaggcactattcctggagaaattactgactcattgtttatacgaacaaccagagctgtattcccagaggtgggaatcatacaagtagaggagactttgagaaa

SEQ ID NO: 11009 - DNA, 122 bp, Homo sapiens
  misc_feature (61)..(62): /note="This region represents a CpG dinucleotide"
  misc_feature (61)..(61): /note="Nucleotide may be methylated to form 5-methylcytosine"
ataattcagttctcaagcagcaactcagtaacttgatatctacaactcttgctgcattctcggtagagaatgtcttttcaactcacttcctttttggtttgacagttttaatcagatgcatt

SEQ ID NO: 11010 - DNA, 122 bp, Homo sapiens
  misc_feature (61)..(62): /note="This region represents a CpG dinucleotide"
  misc_feature (61)..(61): /note="Nucleotide may be methylated to form 5-methylcytosine"
tccaaaaggtaatttttaaatattaggtattggaggccactatttatcaagaaagacagacgagtataagccaccttttgaaagttatcaaaaagatttacctggacaaagaagcttcccat

SEQ ID NO: 11011 - DNA, 122 bp, Homo sapiens
  misc_feature (61)..(62): /note="This region represents a CpG dinucleotide"
  misc_feature (61)..(61): /note="Nucleotide may be methylated to form 5-methylcytosine"
gagccccagcgaccgctctggtcggctgtgtagactgttgggtaggctgcgtgctagcttcggcgcggatccctgggcgtccgtacgtcggagtccttcgtcctccagggtccctgttcttt

SEQ ID NO: 11012 - DNA, 122 bp, Homo sapiens
  misc_feature (61)..(62): /note="This region represents a CpG dinucleotide"
  misc_feature (61)..(61): /note="Nucleotide may be methylated to form 5-methylcytosine"
tgtcataagcagttttccacattgctacatggtcatcatcttattctaattgttgcacaacgttccaatgagtgaataatttaatcatcattaccctaatgtaagtcacttacatggttgct

SEQ ID NO: 11013 - DNA, 122 bp, Homo sapiens
  misc_feature (61)..(62): /note="This region represents a CpG dinucleotide"
  misc_feature (61)..(61): /note="Nucleotide may be methylated to form 5-methylcytosine"
gagtcagtgcacagagttagaggcaggcagaaagaaaggagacctccccaacctcggccccgcccttccctggcccaggcaacaaagcagcgaggagccacgtgtggaaaagcagtgcagat

SEQ ID NO: 11014 - DNA, 122 bp, Homo sapiens
  misc_feature (61)..(62): /note="This region represents a CpG dinucleotide"
  misc_feature (61)..(61): /note="Nucleotide may be methylated to form 5-methylcytosine"
gtctgaactccctaaggtcaacgctcaagggctccgggcaggcgatggaataattaatggcgctatttatgtgcctgtaatgttcagagctgacacctggaagacacggatgaacgctgtca

SEQ ID NO: 11015 - DNA, 122 bp, Homo sapiens
  misc_feature (61)..(62): /note="This region represents a CpG dinucleotide"
  misc_feature (61)..(61): /note="Nucleotide may be methylated to form 5-methylcytosine"
cacccagcctcctgtgaacaaagcatcacaacagtcagcatcacaaacccccatcagccccgtgcagttgcagttgtgctggaccagagcccatcagcctggccttcgggctctcctccaca

SEQ ID NO: 11016 - DNA, 122 bp, Homo sapiens
  misc_feature (61)..(62): /note="This region represents a CpG dinucleotide"
  misc_feature (61)..(61): /note="Nucleotide may be methylated to form 5-methylcytosine"
tctccccatgaaagttccactcaaactaatctgaatctagttcaagtcctcatcatctctcgcctggttgactgccacagacttctgtcttccctgactctgatgttatctgaaccatctgc

SEQ ID NO: 11017 - DNA, 122 bp, Homo sapiens
  misc_feature (61)..(62): /note="This region represents a CpG dinucleotide"
  misc_feature (61)..(61): /note="Nucleotide may be methylated to form 5-methylcytosine"
agaaaagtctgatcaaagaaaactatacttgtaatagtgctaaccaatgggtaatgctagcgttggggggaaaatatttccctaacaataattgtggaacaaaaattaggttggatagaaca

SEQ ID NO: 11018 - DNA, 122 bp, Homo sapiens
  misc_feature (61)..(62): /note="This region represents a CpG dinucleotide"
  misc_feature (61)..(61): /note="Nucleotide may be methylated to form 5-methylcytosine"
gttcatgagctcatggggcttatagtcgagggaaggaagtagatattaggcacatgattacggaaatacaggtaactgtgtaattatgttttggggtaagtgctatgaaagaacagtgaaga

SEQ ID NO: 11019 - DNA, 122 bp, Homo sapiens
  misc_feature (61)..(62): /note="This region represents a CpG dinucleotide"
  misc_feature (61)..(61): /note="Nucleotide may be methylated to form 5-methylcytosine"
agggatgcagggaggaagggagggaggacacacaagcagcactgctgggaaaagcacaggcggcctggatgtcagtgtgaggggaccttgtgctgtcgttgctgcaaaaccgcatttggcct

SEQ ID NO: 11020 - DNA, 122 bp, Homo sapiens
  misc_feature (61)..(62): /note="This region represents a CpG dinucleotide"
  misc_feature (61)..(61): /note="Nucleotide may be methylated to form 5-methylcytosine"
agcctctttgcccaaattagttttggtgtggatggtatggggcagcgcaaaaaacactcacgctggcctctgcctgctaatgtgaacaggggaacccagcaggaaacagagcaacctgatct

SEQ ID NO: 11021 - DNA, 122 bp, Homo sapiens
  misc_feature (61)..(62): /note="This region represents a CpG dinucleotide"
  misc_feature (61)..(61): /note="Nucleotide may be methylated to form 5-methylcytosine"
taacactcaccgcgaaggtctgcagcttcactcctgaagccagcgagaccacgagcccatcgggaggaacagcaactccagaggcgccgccttaggagctgtaacactcaccgcgaaggtct

SEQ ID NO: 11022 - DNA, 122 bp, Homo sapiens
  misc_feature (61)..(62): /note="This region represents a CpG dinucleotide"
  misc_feature (61)..(61): /note="Nucleotide may be methylated to form 5-methylcytosine"
acagacacagacctcagagctggctgcctcgggagtgccttgctgacggtcgctggagttcgtccatcaggcgactgcggtggggcacggagagcaaccgctgcctggcggagactttgatg

SEQ ID NO: 11023 - DNA, 122 bp, Homo sapiens
  misc_feature (61)..(62): /note="This region represents a CpG dinucleotide"
  misc_feature (61)..(61): /note="Nucleotide may be methylated to form 5-methylcytosine"
ggaactaaaagccagagactcaacagactattcagttccaacttatgaccctacatatgacgtttaattaacagaggatgcaggaacccttacagtagagagttctgatagacatcatcttc

SEQ ID NO: 11024 - DNA, 122 bp, Homo sapiens
  misc_feature (61)..(62): /note="This region represents a CpG dinucleotide"
  misc_feature (61)..(61): /note="Nucleotide may be methylated to form 5-methylcytosine"
tacccaacagaccatttctcctgccatctcattctttagtcatcactaggggaaatcctccgtaaaggaaaggcagtcttagtaaagaaccattaaggaactgagatcaactctttacctga

SEQ ID NO: 11025 - DNA, 122 bp, Homo sapiens
  misc_feature (61)..(62): /note="This region represents a CpG dinucleotide"
  misc_feature (61)..(61): /note="Nucleotide may be methylated to form 5-methylcytosine"
gcttaatgtcattatttaaaaagggggagggaatcacttgacgggtgggcaaggtggggacggggttggatggaatggtcaaaaaaggtctttcagagttcttccaatcctgaactaactca

SEQ ID NO: 11026 - DNA, 122 bp, Homo sapiens
  misc_feature (61)..(62): /note="This region represents a CpG dinucleotide"
  misc_feature (61)..(61): /note="Nucleotide may be methylated to form 5-methylcytosine"
tttccaggcggtcagtaggcaccacagtaggtgtgggggaaatctggacagatacaaacacgagcaacattgagaaagacagtgaggcagttaattttgtgtgctaactaggatatgccaac

SEQ ID NO: 11027 - DNA, 122 bp, Homo sapiens
  misc_feature (61)..(62): /note="This region represents a CpG dinucleotide"
  misc_feature (61)..(61): /note="Nucleotide may be methylated to form 5-methylcytosine"
cagggtgaggccacccacagagccatttaattatccctgagtgcaaggccatgccgcaggcgcatgaaacaggaaggaaaaacaagacctgcagctgcactatgatgtcagcgatggggcag

SEQ ID NO: 11028 - DNA, 122 bp, Homo sapiens
  misc_feature (61)..(62): /note="This region represents a CpG dinucleotide"
  misc_feature (61)..(61): /note="Nucleotide may be methylated to form 5-methylcytosine"
ccaacaaatgctgtgtcactaatccacatgtcactgaacacatgggataccttacagtttcgcaaggcaaatgttgcaataaaaactgaaaaactgtcctggagttggattaggtaatacag

SEQ ID NO: 11029 - DNA, 122 bp, Homo sapiens
  misc_feature (61)..(62): /note="This region represents a CpG dinucleotide"
  misc_feature (61)..(61): /note="Nucleotide may be methylated to form 5-methylcytosine"
tgaagagaagcactcatcccttcgtcagaagacacacacacacacacacacacacacatacgcacactccatgtaggcttagtaagcccagccagtcagtgcccagtcagccgtcccccttc

SEQ ID NO: 11030 - DNA, 122 bp, Homo sapiens
  misc_feature (61)..(62): /note="This region represents a CpG dinucleotide"
  misc_feature (61)..(61): /note="Nucleotide may be methylated to form 5-methylcytosine"
ttctgtttgcagcagagcccaggctgtcttttcttcataattctctctgtgcccactcctcgagggcaggaactgtccctgtatcagtgaggcattcggacttgggagatgtttttagaaca

SEQ ID NO: 11031 - DNA, 122 bp, Homo sapiens
  misc_feature (61)..(62): /note="This region represents a CpG dinucleotide"
  misc_feature (61)..(61): /note="Nucleotide may be methylated to form 5-methylcytosine"
tcatttttatggttgtttacaaaagcatcagtcagcatcagatgggaaatttagaaaactcgtctttcacccaggtcagtggagaaggtccgctcctacatcttggccacaaactcagatat

SEQ ID NO: 11032 - DNA, 122 bp, Homo sapiens
  misc_feature (61)..(62): /note="This region represents a CpG dinucleotide"
  misc_feature (61)..(61): /note="Nucleotide may be methylated to form 5-methylcytosine"
ggttcaatgatgaagcagcgagagcaagttcctggtacccggcctgggaatcagaacacacgagtgcaacttccagttctgctgctgattgaccctgtgacccagggaaagttattttactt

SEQ ID NO: 11033 - DNA, 122 bp, Homo sapiens
  misc_feature (61)..(62): /note="This region represents a CpG dinucleotide"
  misc_feature (61)..(61): /note="Nucleotide may be methylated to form 5-methylcytosine"
aaccgagctccctgaataagtaattcctgtcccttacaaggctctcaactctaaaggggccgcgtgaagggcggggggcgggaggttgtgattgattgagcaaatgagggttacatgactgg

SEQ ID NO: 11034 - DNA, 122 bp, Homo sapiens
  misc_feature (61)..(62): /note="This region represents a CpG dinucleotide"
  misc_feature (61)..(61): /note="Nucleotide may be methylated to form 5-methylcytosine"
tgtggtgcagcacctgccgcaggatgctcacctcccgctcgatctcctcccggctcacaccgcgccggctcgcccggctctgccgcttcttgatgaacttggctgcatactcaagccccgtg

SEQ ID NO: 11035 - DNA, 122 bp, Homo sapiens
  misc_feature (61)..(62): /note="This region represents a CpG dinucleotide"
  misc_feature (61)..(61): /note="Nucleotide may be methylated to form 5-methylcytosine"
ggaaaaggcaagaaaacggtttctcccaggagcctccagaaggaaccccagccccacccacgccctgcttgtatcccagtgaggcccactgtggacatttgacctcagaactgtaaagagaa

SEQ ID NO: 11036 - DNA, 122 bp, Homo sapiens
  misc_feature (61)..(62): /note="This region represents a CpG dinucleotide"
  misc_feature (61)..(61): /note="Nucleotide may be methylated to form 5-methylcytosine"
attgtaagaataatcaacttttcaggtagagagtgagaaggccatttttaaacaataaaacgagcaccactggttgatgccacaggtttgcagagatttggattaacaagggtaagattcat

SEQ ID NO: 11037 - DNA, 122 bp, Homo sapiens
  misc_feature (61)..(62): /note="This region represents a CpG dinucleotide"
  misc_feature (61)..(61): /note="Nucleotide may be methylated to form 5-methylcytosine"
agagataataggtagaaagtcacacatacctgtgtacatttgttaggatatgtccctgctcgttgagaggagagagtttttttgatagttatggggtcttaaatccatttcaggattgagta

SEQ ID NO: 11038 - DNA, 122 bp, Homo sapiens
  misc_feature (61)..(62): /note="This region represents a CpG dinucleotide"
  misc_feature (61)..(61): /note="Nucleotide may be methylated to form 5-methylcytosine"
ggttagtttaattcattctatccaggacattcatggacgcttaataggatgcagacagcacgtcaggcgttgtgggaagcacggccgctactgacagaagggccccacaagtcactcggcct

SEQ ID NO: 11039 - DNA, 122 bp, Homo sapiens
  misc_feature (61)..(62): /note="This region represents a CpG dinucleotide"
  misc_feature (61)..(61): /note="Nucleotide may be methylated to form 5-methylcytosine"
gtgttgcgtgctggtggcagatctggaatactgcggcctcaagaagtccttgcactaagtcgtgatgctggtctgggtgcaggaaagtcttgggataagtcctgtttcaggcatgtgggcgt

SEQ ID NO: 11040 - DNA, 122 bp, Homo sapiens
  misc_feature (61)..(62): /note="This region represents a CpG dinucleotide"
  misc_feature (61)..(61): /note="Nucleotide may be methylated to form 5-methylcytosine"
agggatgtgggctcgtgtctcagattcaacccgtatgcattgagtcacagttttctcttccgtcagttaagatcatgacaatgagaatgtgtgcccctaaggtggttgtgaggattaaatgg

SEQ ID NO: 11041 - DNA, 122 bp, Homo sapiens
  misc_feature (61)..(62): /note="This region represents a CpG dinucleotide"
  misc_feature (61)..(61): /note="Nucleotide may be methylated to form 5-methylcytosine"
ttagctaacagcagctggaaactgagttatccctacatggatcattgatgcataagcttacgtcattaaaacttctcactaccagtggctgaaacttataactacttcatggctatcctagt

SEQ ID NO: 11042 - DNA, 122 bp, Homo sapiens
  misc_feature (61)..(62): /note="This region represents a CpG dinucleotide"
  misc_feature (61)..(61): /note="Nucleotide may be methylated to form 5-methylcytosine"
agtcttggggaaaaaaagaaactgcacttgatgagatctgcagctttgcagctttttgtccgaggacacccacaatccacatggtgtgggcagcagaagccacagacttactggctagaggt

SEQ ID NO: 11043 - DNA, 122 bp, Homo sapiens
  misc_feature (61)..(62): /note="This region represents a CpG dinucleotide"
  misc_feature (61)..(61): /note="Nucleotide may be methylated to form 5-methylcytosine"
gcggaccctgtctcataaaaaaagaaaaaagaaaacacacaagatgcgcctagttaacaccgccaattggtcactgctagtcgcgattccatatcgggagcttaacaaggtaatgaccttaa

SEQ ID NO: 11044 - DNA, 122 bp, Homo sapiens
  misc_feature (61)..(62): /note="This region represents a CpG dinucleotide"
  misc_feature (61)..(61): /note="Nucleotide may be methylated to form 5-methylcytosine"
tgattcacattcgtactgtgtctggattgactcaaaaattcatcattaatgagcaagaagcgatacagtacagtggagtaatacacttgaaatgaaaccagtcatctttccctgctgttctt

SEQ ID NO: 11045 - DNA, 122 bp, Homo sapiens
  misc_feature (61)..(62): /note="This region represents a CpG dinucleotide"
  misc_feature (61)..(61): /note="Nucleotide may be methylated to form 5-methylcytosine"
tgttcgcaatccatcctgtgtctgcggattctcccaggtctgtaaggcagcagggagatgcggcctctcccactccacccaacacgtagccagggcgaggtggggccgggggagaggctgac

SEQ ID NO: 11046 - DNA, 122 bp, Homo sapiens
  misc_feature (61)..(62): /note="This region represents a CpG dinucleotide"
  misc_feature (61)..(61): /note="Nucleotide may be methylated to form 5-methylcytosine"
gaaggagagaagaaaagaatgtcagaagaatgctggattctgcattttcagaagggggtgcgggcagggattaaaaaggtagtgaaatagtcagggggcatctaccaaagtaagctgagcaa

SEQ ID NO: 11047 - DNA, 122 bp, Homo sapiens
  misc_feature (61)..(62): /note="This region represents a CpG dinucleotide"
  misc_feature (61)..(61): /note="Nucleotide may be methylated to form 5-methylcytosine"
ttaacatcaatcttcctgattggctgtgtgaggatgggcggggtctgtttttgttgtttacgcctgtatccccagcacaaaacatggggctggcatatggtaggtactaaacagatagttga

SEQ ID NO: 11048 - DNA, 122 bp, Homo sapiens
  misc_feature (61)..(62): /note="This region represents a CpG dinucleotide"
  misc_feature (61)..(61): /note="Nucleotide may be methylated to form 5-methylcytosine"
ccccaggaaggctttaaatgctgatgcctaagcctcacccatagattctgattctacttccgtcagtatcgaatgcctctccccaggtgctcctgctgccctatgagcattgagaaccctga

SEQ ID NO: 11049 - DNA, 122 bp, Homo sapiens
  misc_feature (61)..(62): /note="This region represents a CpG dinucleotide"
  misc_feature (61)..(61): /note="Nucleotide may be methylated to form 5-methylcytosine"
caccggagtccagatatttctgtcaagtcagccaaccaggaaggggctgcagacaaagtgcggcaacagggactccaccaggccatggagctcatcccacaagacgcctcaccgcacaggag

SEQ ID NO: 11050 - DNA, 122 bp, Homo sapiens
  misc_feature (61)..(62): /note="This region represents a CpG dinucleotide"
  misc_feature (61)..(61): /note="Nucleotide may be methylated to form 5-methylcytosine"
ttgcagtagaacgtatcccaaccccagagggtgggttctggcttccctgcctcagacctgcgggcaggtccgggaacccgacagggacagagaagcccgttttccagcctaaatagaagctc

SEQ ID NO: 11051 - DNA, 122 bp, Homo sapiens
  misc_feature (61)..(62): /note="This region represents a CpG dinucleotide"
  misc_feature (61)..(61): /note="Nucleotide may be methylated to form 5-methylcytosine"
atacaaaatatgcatgttggcatcatgcaaaagtcagtggatcagaggcatcatatggagcggcttagctgctctcaaaatcttgttatgcaggctttagtcagacaggctaatacagctgc

SEQ ID NO: 11052 - DNA, 122 bp, Homo sapiens
  misc_feature (61)..(62): /note="This region represents a CpG dinucleotide"
  misc_feature (61)..(61): /note="Nucleotide may be methylated to form 5-methylcytosine"
ctccggaagagtctggttttgactggcgtctctgtcctctcacttaggtcgctgagattacgggtgttgtggaaactgccaaagtttaccaactaggtggcaccagaacaaacaaagggctg

SEQ ID NO: 11053 - DNA, 122 bp, Homo sapiens
  misc_feature (61)..(62): /note="This region represents a CpG dinucleotide"
  misc_feature (61)..(61): /note="Nucleotide may be methylated to form 5-methylcytosine"
ctggagtcaaaacaaaccttatagatttgcctcaaaaactaccactgcaaagaggcttgacgtcaactggattagactgtgggacaatatatgcccccagggcattattgaaatgaatgagg

SEQ ID NO: 11054 - DNA, 122 bp, Homo sapiens
  misc_feature (61)..(62): /note="This region represents a CpG dinucleotide"
  misc_feature (61)..(61): /note="Nucleotide may be methylated to form 5-methylcytosine"
taactttagccaacatgttcacacacagaatctcttacaattaatgttctataaaccttccgtaacttgttcaaatctttagctttatttaacaatcctttaaccctctaacctaggcaaaa

SEQ ID NO: 11055 - DNA, 122 bp, Homo sapiens
  misc_feature (61)..(62): /note="This region represents a CpG dinucleotide"
  misc_feature (61)..(61): /note="Nucleotide may be methylated to form 5-methylcytosine"
gtacaacaggcacttcttttaactggaagaaggaagaggagccttttgccctgtcagagccgcacaggacacttaaaaacccaggctggccacggtcacatggcagtaacttctagattgtt

SEQ ID NO: 11056 - DNA, 122 bp, Homo sapiens
  misc_feature (61)..(62): /note="This region represents a CpG dinucleotide"
  misc_feature (61)..(61): /note="Nucleotide may be methylated to form 5-methylcytosine"
tcgtggaagttctctcggtcttcccctcatgtcagaagatagtatctcagttctaattatcgggtctcaacctgacaacttcctaagcacaaagaaactggctggggggcaaaagagcctac

SEQ ID NO: 11057 - DNA, 122 bp, Homo sapiens
  misc_feature (61)..(62): /note="This region represents a CpG dinucleotide"
  misc_feature (61)..(61): /note="Nucleotide may be methylated to form 5-methylcytosine"
gagcaaatacaggcctatctaaaagcatacctcacagtaaagatggttaaaaaccaaaaccggaggaggcagagtactcttggtggggctggtagtggggggaatggatgattttccaaaag

SEQ ID NO: 11058 - DNA, 122 bp, Homo sapiens
  misc_feature (61)..(62): /note="This region represents a CpG dinucleotide"
  misc_feature (61)..(61): /note="Nucleotide may be methylated to form 5-methylcytosine"
atcagatttattatagatgctttaaaatgacctccaaagccttttctcaacacatttgatcgacaattttgagcactattatgtgtaattttatttacactagagtcagtggctttttcatg

SEQ ID NO: 11059 - DNA, 122 bp, Homo sapiens
  misc_feature (61)..(62): /note="This region represents a CpG dinucleotide"
  misc_feature (61)..(61): /note="Nucleotide may be methylated to form 5-methylcytosine"
gtgagaccagcagagaaactacccagtcaacccacagaatcataagaaacaagctgctgtcgttttaagccatgaaatttagaggtgacctgttatgcagcaataggtaactgacacaatta

SEQ ID NO: 11060 - DNA, 122 bp, Homo sapiens
  misc_feature (61)..(62): /note="This region represents a CpG dinucleotide"
  misc_feature (61)..(61): /note="Nucleotide may be methylated to form 5-methylcytosine"
ccagagagtgtcttcattccctctgatttgggagagcattttggtctttattctttttatcgttgttttcttctttttgtttgctctgctctaaccgggggctttattttttctacccagag

SEQ ID NO: 11061 - DNA, 122 bp, Homo sapiens
  misc_feature (61)..(62): /note="This region represents a CpG dinucleotide"
  misc_feature (61)..(61): /note="Nucleotide may be methylated to form 5-methylcytosine"
actgacctcacctggatttgtgactcataactcaactggtcatatggccccacctagaggcgcactgagtgcaccaggagctttttccacacgttgatgatttcatccccaaccaatcagca

SEQ ID NO: 11062 - DNA, 122 bp, Homo sapiens
  misc_feature (61)..(62): /note="This region represents a CpG dinucleotide"
  misc_feature (61)..(61): /note="Nucleotide may be methylated to form 5-methylcytosine"
cccagttgtgtttctaattcactttgcctggactccctgtaagtcttctctaagaagaaccgtccagccttttctcagggacagcattagtccaatattgtaatcgtccaatgttacaacat

SEQ ID NO: 11063 - DNA, 122 bp, Homo sapiens
  misc_feature (61)..(62): /note="This region represents a CpG dinucleotide"
  misc_feature (61)..(61): /note="Nucleotide may be methylated to form 5-methylcytosine"
gattcatcatagaagcctatggttttatttattgacactgctgtacaattttccctgtagcgagtcatagttggctgaagagagagtcgaagattaagtacaaaactttctaaacatcctgt

SEQ ID NO: 11064 - DNA, 122 bp, Homo sapiens
  misc_feature (61)..(62): /note="This region represents a CpG dinucleotide"
  misc_feature (61)..(61): /note="Nucleotide may be methylated to form 5-methylcytosine"
ctctgtccctccatggctcatggacaatgattgacctgaagccgctccaggaagtctactcgggagtcctcactgcctgctcccctatggccctaagggactcaagcctctcctcgagaagg

SEQ ID NO: 11065 - DNA, 122 bp, Homo sapiens
  misc_feature (61)..(62): /note="This region represents a CpG dinucleotide"
  misc_feature (61)..(61): /note="Nucleotide may be methylated to form 5-methylcytosine"
cttttctcagcagtcagacattgttccttggctctagcaccaaggagttgtgcttcccatcgttagaaagatgatgcaagaggtctgccttcagtttgacatgtttgttttcaataacagga

SEQ ID NO: 11066 - DNA, 122 bp, Homo sapiens
  misc_feature (61)..(62): /note="This region represents a CpG dinucleotide"
  misc_feature (61)..(61): /note="Nucleotide may be methylated to form 5-methylcytosine"
caacaaactatacatattgtagcctcaggcattcagaaagactggtctctttccaaatcccgctttcaaaaatctcagagaagacaatgactcgctcagcattgattgtgaggcctctgcag

SEQ ID NO: 11067 - DNA, 122 bp, Homo sapiens
  misc_feature (61)..(62): /note="This region represents a CpG dinucleotide"
  misc_feature (61)..(61): /note="Nucleotide may be methylated to form 5-methylcytosine"
tatggtgaactcatataatgggacccaaataggaagtgaaaattgcataatctagaactacgtgtatccatgtgaacacatttcaagattatcctgctgggtgaaaaaagcaagttgcacaa

SEQ ID NO: 11068 - DNA, 122 bp, Homo sapiens
  misc_feature (61)..(62): /note="This region represents a CpG dinucleotide"
  misc_feature (61)..(61): /note="Nucleotide may be methylated to form 5-methylcytosine"
gtgtctatgcccaatggcactttcctcctgaagctttgtaacagcagagaacaatgaacacgtacagctgaggcaacaaggaacctaaagaaactcctcctcaaatccctccagccccagtg

SEQ ID NO: 11069 - DNA, 122 bp, Homo sapiens
  misc_feature (61)..(62): /note="This region represents a CpG dinucleotide"
  misc_feature (61)..(61): /note="Nucleotide may be methylated to form 5-methylcytosine"
ggtgaaaagggaaaaacggggaaacagggatgctctgcaaagccggagtccctgctagagcgcttcctgccaagccggtggaatttcaggttccacacaggaagaggaggggccaggctgct

SEQ ID NO: 11070 - DNA, 122 bp, Homo sapiens
  misc_feature (61)..(62): /note="This region represents a CpG dinucleotide"
  misc_feature (61)..(61): /note="Nucleotide may be methylated to form 5-methylcytosine"
caatcattgaatcggttactgaatactttcttgcatttcttcttctccaccttgtgcccacgttaagcaggaagacatcatattttcattagcacctgttttgttttttcaccttctgtaga

SEQ ID NO: 11071 - DNA, 122 bp, Homo sapiens
  misc_feature (61)..(62): /note="This region represents a CpG dinucleotide"
  misc_feature (61)..(61): /note="Nucleotide may be methylated to form 5-methylcytosine"
gccgctgccttcactcacccctccccacaccagtctggagtgataggctgcgtctgcacgcggctggctctgcctaggtgcccaggagtgactggcacaagtgtgtgctctatgtgcttaat

SEQ ID NO: 11072 - DNA, 122 bp, Homo sapiens
  misc_feature (61)..(62): /note="This region represents a CpG dinucleotide"
  misc_feature (61)..(61): /note="Nucleotide may be methylated to form 5-methylcytosine"
tgtttaaaagaaatctgcaaaaagcctgggagtggggatgcctgtgggcagttcttccagcgcagtgttcctctgtttcctgattgcagggagcattgagtcatcatctgacaggcataaat

SEQ ID NO: 11073 - DNA, 122 bp, Homo sapiens
  misc_feature (61)..(62): /note="This region represents a CpG dinucleotide"
  misc_feature (61)..(61): /note="Nucleotide may be methylated to form 5-methylcytosine"
atttcatttctcttatgtcgaggtttcttcaagtgccgcctcctctgtccattattttagcgactctggggagctgggtaaaactgacagctttacagttagatgaaccataaaaatttggc

SEQ ID NO: 11074 - DNA, 122 bp, Homo sapiens
  misc_feature (61)..(62): /note="This region represents a CpG dinucleotide"
  misc_feature (61)..(61): /note="Nucleotide may be methylated to form 5-methylcytosine"
ccctgccctgggttgaccttacaatgcccagaggattaaagcttaacttcctacctgtcacgtttctttttgcagctcttctggaaagcttctctctcttccttgattccccctctttcctt

SEQ ID NO: 11075 - DNA, 122 bp, Homo sapiens
  misc_feature (61)..(62): /note="This region represents a CpG dinucleotide"
  misc_feature (61)..(61): /note="Nucleotide may be methylated to form 5-methylcytosine"
agctatcaaaggcctgctattctgggtggttgcgtgctagacatcatgagtgagctcttccgtggctaggccctgatgatgatgatgcatgctgcagcaaggctaactacacttataaggct

SEQ ID NO: 11076 - DNA, 122 bp, Homo sapiens
  misc_feature (61)..(62): /note="This region represents a CpG dinucleotide"
  misc_feature (61)..(61): /note="Nucleotide may be methylated to form 5-methylcytosine"
ttcacaaacttgcacagaatgtgaaagcagctcctctaggtacatgtggctaagctgcagcgctacccaggactgtagagagaaggaatgacaaccttgcatcgtccacagttccttgccag

SEQ ID NO: 11077 - DNA, 122 bp, Homo sapiens
  misc_feature (61)..(62): /note="This region represents a CpG dinucleotide"
  misc_feature (61)..(61): /note="Nucleotide may be methylated to form 5-methylcytosine"
gtcacaaaaggagatctgaacaagatatctgaagttcagttgggccctcaaagcttcactcgtattggactagatatgcttcctgagagaagtctctaaaagttctgtaaatgacactgacc

SEQ ID NO: 11078 - DNA, 122 bp, Homo sapiens
  misc_feature (61)..(62): /note="This region represents a CpG dinucleotide"
  misc_feature (61)..(61): /note="Nucleotide may be methylated to form 5-methylcytosine"
caatggcactggtacttgtagtgaaatgagccacagaggcatcattactcatcaccatcacgactcaaggatcagcaaatgagagtcctgaaggtaaagaatgtttattttcaggtagagaa

SEQ ID NO: 11079 - DNA, 122 bp, Homo sapiens
  misc_feature (61)..(62): /note="This region represents a CpG dinucleotide"
  misc_feature (61)..(61): /note="Nucleotide may be methylated to form 5-methylcytosine"
cgtatttgttttttgtttctaaatctgctgattgaaaggaagcctgtttatgctttcttgcgaacaccatgttcatatgggaactggaccatgtttacattgggaccaccatgtccttacat

SEQ ID NO: 11080 - DNA, 122 bp, Homo sapiens
  misc_feature (61)..(62): /note="This region represents a CpG dinucleotide"
  misc_feature (61)..(61): /note="Nucleotide may be methylated to form 5-methylcytosine"
tctagggactgggggtgtaaggaggggttgacaacaaaaatccacgtgttggggaggtgacggaagagttctatatcttgattgtggtgatggttatgtgatacggtttggctgtgtcccac

SEQ ID NO: 11081 - DNA, 122 bp, Homo sapiens
  misc_feature (61)..(62): /note="This region represents a CpG dinucleotide"
  misc_feature (61)..(61): /note="Nucleotide may be methylated to form 5-methylcytosine"
tgcctggtttgagtattaggttatctttagtgcaggaccatcctggtttggaggtagcatcgtgtggtagtttaagcacagactttgaagtcagactttctagattcgaatcccagttctgc

SEQ ID NO: 11082 - DNA, 122 bp, Homo sapiens
  misc_feature (61)..(62): /note="This region represents a CpG dinucleotide"
  misc_feature (61)..(61): /note="Nucleotide may be methylated to form 5-methylcytosine"
gaggctcagagaagttaaataaacgttccattgtgtcacaacagtacattttgcagccaccgtatgaattcaaatctgtctctttgcaaactacagactagcagctatgaagaatttctgat

SEQ ID NO: 11083 - DNA, 122 bp, Homo sapiens
  misc_feature (61)..(62): /note="This region represents a CpG dinucleotide"
  misc_feature (61)..(61): /note="Nucleotide may be methylated to form 5-methylcytosine"
ctctggaatggcagttccacaaagaccagggcctggtctgtcctgctcctcagtttaccccgagtctagagcaatattagtggaagaatccatgatggaggattaaatgaaatagtctaagt

SEQ ID NO: 11084 - DNA, 122 bp, Homo sapiens
  misc_feature (61)..(62): /note="This region represents a CpG dinucleotide"
  misc_feature (61)..(61): /note="Nucleotide may be methylated to form 5-methylcytosine"
gaatctgctctgctggaacatggataatgtggggcggcctgtcgccatggtgatgcaccgcgttgctctcctgttcataaatggcatcacgttctggctgaggaagactgaggaaccttcgg

SEQ ID NO: 11085 - DNA, 122 bp, Homo sapiens
  misc_feature (61)..(62): /note="This region represents a CpG dinucleotide"
  misc_feature (61)..(61): /note="Nucleotide may be methylated to form 5-methylcytosine"
gaaagttccaatttcatatattttccccattatttcatcactgataactcctagaaacgacgatattttggtggttgtacctgctagactgtctttcaaatctggaagcaacacaaaaagtc

SEQ ID NO: 11086 - DNA, 122 bp, Homo sapiens
  misc_feature (61)..(62): /note="This region represents a CpG dinucleotide"
  misc_feature (61)..(61): /note="Nucleotide may be methylated to form 5-methylcytosine"
tagagtgccgtattccgtgatcccgccacagctgctcttccaggcctcttgcctgcagggcgttcatccccaccaccatgctgctcaacatgcttacacgtgtctcctggcgccctctgcaa

SEQ ID NO: 11087 - DNA, 122 bp, Homo sapiens
  misc_feature (61)..(62): /note="This region represents a CpG dinucleotide"
  misc_feature (61)..(61): /note="Nucleotide may be methylated to form 5-methylcytosine"
aactggggcccagcgagattactatttaacagctttgaaatgactgcaggagggagaacacgaggaaacatccaagtttactgatgaagagccaggtccctggagatagattacagggggat

SEQ ID NO: 11088 - DNA, 122 bp, Homo sapiens
  misc_feature (61)..(62): /note="This region represents a CpG dinucleotide"
  misc_feature (61)..(61): /note="Nucleotide may be methylated to form 5-methylcytosine"
tgctcatgtctaccttagaattgctgtccacagtagcagacaaaaattagaagcaactcacgtattcatcaataacagccaagtactcagcaacccaagcatttcatcaaccaagtaaaaca

SEQ ID NO: 11089 - DNA, 122 bp, Homo sapiens
  misc_feature (61)..(62): /note="This region represents a CpG dinucleotide"
  misc_feature (61)..(61): /note="Nucleotide may be methylated to form 5-methylcytosine"
tgctcccttccacaagggatggcatcttactcaatcagattgcacaagcctgacacggggcgtcatcccctgccaagcaatggatcttcaactcgttatctattttctcttctgcacatttc

SEQ ID NO: 11090 - DNA, 122 bp, Homo sapiens
  misc_feature (61)..(62): /note="This region represents a CpG dinucleotide"
  misc_feature (61)..(61): /note="Nucleotide may be methylated to form 5-methylcytosine"
ttcattcaactgatgatttactgaacatgccacgtaccaggcactgtcctaggcactgggcgtacagcagtgagcaaaacacagtacctcatttcctggagttcacatgcccatggagcaag

SEQ ID NO: 11091 - DNA, 122 bp, Homo sapiens
  misc_feature (61)..(62): /note="This region represents a CpG dinucleotide"
  misc_feature (61)..(61): /note="Nucleotide may be methylated to form 5-methylcytosine"
gccaaacctgcaccagggttagatctcctgactccatcccaagccctttggaggcaccaacgccgccctttaggggatgagtcagcagctgaaattagatctttagctttgtgtgatcaaaa

SEQ ID NO: 11092 - DNA, 122 bp, Homo sapiens
  misc_feature (61)..(62): /note="This region represents a CpG dinucleotide"
  misc_feature (61)..(61): /note="Nucleotide may be methylated to form 5-methylcytosine"
aatgacttatgaagcaccgagaccaagttaagacagaattagaatacaattttaatgagacggagctgagaaagtggaagtgttactcctttgacagacttggcaaaatacccaatattatt

SEQ ID NO: 11093 - DNA, 122 bp, Homo sapiens
  misc_feature (61)..(62): /note="This region represents a CpG dinucleotide"
  misc_feature (61)..(61): /note="Nucleotide may be methylated to form 5-methylcytosine"
aacctacctttcaggcatataaacttcaaatccactctacaactgtgcctgagctgtaggcgtggcaggaaaaagcagaatgctgcaaggctcctcgagtcaaatcctttgggatttgagca

SEQ ID NO: 11094 - DNA, 122 bp, Homo sapiens
  misc_feature (61)..(62): /note="This region represents a CpG dinucleotide"
  misc_feature (61)..(61): /note="Nucleotide may be methylated to form 5-methylcytosine"
cacccacacacagacagtagggctgtttaacacatcaagctctgactagaacagctaatacgtgctggacgtgattaaactttgagtttagctgccagctatgatttgtcccaattaaggca

SEQ ID NO: 11095 - DNA, 122 bp, Homo sapiens
  misc_feature (61)..(62): /note="This region represents a CpG dinucleotide"
  misc_feature (61)..(61): /note="Nucleotide may be methylated to form 5-methylcytosine"
taaatcctcttactgagggtaagattggctctagatctgggtgagccccagcagtatccccgtgcaggctctgactggctcatgagaactaattgcttgtgtctcttgctaattctgcattc

SEQ ID NO: 11096 - DNA, 122 bp, Homo sapiens
  misc_feature (61)..(62): /note="This region represents a CpG dinucleotide"
  misc_feature (61)..(61): /note="Nucleotide may be methylated to form 5-methylcytosine"
gggtatgaagaagagggagattcctcagatttctagctggaccaacaggatggatggcagcgcccttcaccaggaaaaaagtgagctgatggaagaacataaggtgaaatttgaattcatgg

SEQ ID NO: 11097 - DNA, 122 bp, Homo sapiens
  misc_feature (61)..(62): /note="This region represents a CpG dinucleotide"
  misc_feature (61)..(61): /note="Nucleotide may be methylated to form 5-methylcytosine"
ttcttctaattatcccccaaagcacagatacttggggtttcagtttagcataataggagacgtggagaaaagagggaacaatgtgtgtaagtgaatattttcaacaccggcctcaccgccgc

SEQ ID NO: 11098 - DNA, 122 bp, Homo sapiens
  misc_feature (61)..(62): /note="This region represents a CpG dinucleotide"
  misc_feature (61)..(61): /note="Nucleotide may be methylated to form 5-methylcytosine"
gtgaagctttattgtttctgagactctacctgggctcagggttcaaaatcaaaagcttcccgcaggtaagattagctaagtgaaaaccactgcactttctctaaagtagaatggcttaaaaa

SEQ ID NO: 11099 - DNA, 122 bp, Homo sapiens
  misc_feature (61)..(62): /note="This region represents a CpG dinucleotide"
  misc_feature (61)..(61): /note="Nucleotide may be methylated to form 5-methylcytosine"
gtctgaaaattgtagtgtccgttttctctttagccataaagttttgcttaaatgctgagtcgcgttttaatgctctactagatgtacatataagaatactaaatggagggaaagtaatttct

SEQ ID NO: 11100 - DNA, 122 bp, Homo sapiens
  misc_feature (61)..(62): /note="This region represents a CpG dinucleotide"
  misc_feature (61)..(61): /note="Nucleotide may be methylated to form 5-methylcytosine"
aatgtactaaggagaaaactgccaaattcacattctgtacctgacaaaatctttccgaagcgatggtgacataaagacattttcatacacacagaaactaagagtttcatccccagcagacc

SEQ ID NO: 11101 - DNA, 122 bp, Homo sapiens
  misc_feature (61)..(62): /note="This region represents a CpG dinucleotide"
  misc_feature (61)..(61): /note="Nucleotide may be methylated to form 5-methylcytosine"
ctgagctgtttctgtttactcagaggcacttgctaagctgtgccgtaaaggctgatccaccgtgtgctccttaagctcagcagctgtgtgaacatattctttttgtatccatggggcttaaa

SEQ ID NO: 11102 - DNA, 122 bp, Homo sapiens
  misc_feature (61)..(62): /note="This region represents a CpG dinucleotide"
  misc_feature (61)..(61): /note="Nucleotide may be methylated to form 5-methylcytosine"
ggtgtccgggcccagctccaccacattgtcggcgccccgccacgcgctccatggggcgtacggcagctgactcacccagcaacctgtggatatggctgttgcttttacgatttggacattat

SEQ ID NO: 11103 - DNA, 122 bp, Homo sapiens
  misc_feature (61)..(62): /note="This region represents a CpG dinucleotide"
  misc_feature (61)..(61): /note="Nucleotide may be methylated to form 5-methylcytosine"
ggaaaccttttatctaaggcggagcgctgaccgcctccccagtctctaaggaagtgggcacgagaggctctttccagggactttagtccccagatcagtgactgcaaacagaagtggcttgt

SEQ ID NO: 11104 - DNA, 122 bp, Homo sapiens
  misc_feature (61)..(62): /note="This region represents a CpG dinucleotide"
  misc_feature (61)..(61): /note="Nucleotide may be methylated to form 5-methylcytosine"
agtgagcctgccttctatcttaaaagccaaaaaggctaaataccgtctcaacctccctcgcgctaggggtgcaggcagtgacctaagtttagccaatccaagacactcactgaggactttga

SEQ ID NO: 11105 - DNA, 122 bp, Homo sapiens
  misc_feature (61)..(62): /note="This region represents a CpG dinucleotide"
  misc_feature (61)..(61): /note="Nucleotide may be methylated to form 5-methylcytosine"
cctcaaacaaacaaacaaaacacctaactggggaggtcacagaaggtctcgcccagcagacggcacttgagctgaagccctgtgaatcttaaggttgtccagtctgactgtgggagcagaca

SEQ ID NO: 11106 - DNA, 122 bp, Homo sapiens
  misc_feature (61)..(62): /note="This region represents a CpG dinucleotide"
  misc_feature (61)..(61): /note="Nucleotide may be methylated to form 5-methylcytosine"
gtatcacttattatttccttcaggcaaaccacatgtcagaggacttcaatctgaaaatgacgtgagttacatgggttccttcctcttcgttttttaaaggtcctcttgtctttctgttttca

SEQ ID NO: 11107 - DNA, 122 bp, Homo sapiens
  misc_feature (61)..(62): /note="This region represents a CpG dinucleotide"
  misc_feature (61)..(61): /note="Nucleotide may be methylated to form 5-methylcytosine"
attatgttacatttatataagattctgtcttgctagcagactgctctagagactccttaccggcttgatgaagttacaatagcagctgtgttaggaaagcctgtgtgatgagtaactgcagg

SEQ ID NO: 11108 - DNA, 122 bp, Homo sapiens
  misc_feature (61)..(62): /note="This region represents a CpG dinucleotide"
  misc_feature (61)..(61): /note="Nucleotide may be methylated to form 5-methylcytosine"
gcaagacctccaggggattctcatgcactctcaaatgtgagaatcaccgcagtgaagcaacgccttttacaggggctgagaaaggtgaagtctcaccgcatctggttaccattcctgtgtgc

SEQ ID NO: 11109 - DNA, 122 bp, Homo sapiens
  misc_feature (61)..(62): /note="This region represents a CpG dinucleotide"
  misc_feature (61)..(61): /note="Nucleotide may be methylated to form 5-methylcytosine"
tatcaaaaaaaggtgtactgatttttagctgcttcctcccccggtctggttgccctagtgcgttaagttcagagagatcagcagctgtcagattggaatctccccagcctcagtacaaactg

SEQ ID NO: 11110 - DNA, 122 bp, Homo sapiens
  misc_feature (61)..(62): /note="This region represents a CpG dinucleotide"
  misc_feature (61)..(61): /note="Nucleotide may be methylated to form 5-methylcytosine"
caaaggcacagagctaaggcttcaggcttcaatactgtcatttactgaaacaaggaaagacgagtgtaggtaaagccccagttacaacaagatggccaggaaaagcttcttaaatgcttggg

SEQ ID NO: 11111 - DNA, 122 bp, Homo sapiens
  misc_feature (61)..(62): /note="This region represents a CpG dinucleotide"
  misc_feature (61)..(61): /note="Nucleotide may be methylated to form 5-methylcytosine"
tcagatagcaaccttctgcttacattcctaatgtctcctcaaagatgttaagctcagatacgtgcagtctttttctcaaatgttgccaaaaagaaaaaaagatatagatgtgtgtcagagat

SEQ ID NO: 11112 - DNA, 122 bp, Homo sapiens
  misc_feature (61)..(62): /note="This region represents a CpG dinucleotide"
  misc_feature (61)..(61): /note="Nucleotide may be methylated to form 5-methylcytosine"
ctacctacactcatgggaagggttaccaaaatccgtctattgcaaaacatcactctttctcgcttacatcatggctgcatgacatcaggacatgagtagctgccaagatgaactataaatgt

SEQ ID NO: 11113 - DNA, 122 bp, Homo sapiens
  misc_feature (61)..(62): /note="This region represents a CpG dinucleotide"
  misc_feature (61)..(61): /note="Nucleotide may be methylated to form 5-methylcytosine"
tagatttcccatggctagatgccctgggagacaaatgtaggcaaattctgtggatgccaacgcaggtttctgacggctatcaaaagagtaacctggaaccaaggggatacaaattctctcaa

SEQ ID NO: 11114 - DNA, 122 bp, Homo sapiens
  misc_feature (61)..(62): /note="This region represents a CpG dinucleotide"
  misc_feature (61)..(61): /note="Nucleotide may be methylated to form 5-methylcytosine"
gtcttggattgggcagtcaaatccttggccttgagctacagagtttgatccctgggtagtcgtcagggaggctgcctcttgggagaaacccaggtaggctgtccaaaaaccagaaaggtctt

SEQ ID NO: 11115 - DNA, 122 bp, Homo sapiens
  misc_feature (61)..(62): /note="This region represents a CpG dinucleotide"
  misc_feature (61)..(61): /note="Nucleotide may be methylated to form 5-methylcytosine"
cagggttcctaacctgtggtaagtaaagaatgtcactttctgacaagctcaggagccccacgttattttgggacctcgggaaaagaggaagtcacctaatttatataggtatctgcaggcac

SEQ ID NO: 11116 - DNA, 122 bp, Homo sapiens
  misc_feature (61)..(62): /note="This region represents a CpG dinucleotide"
  misc_feature (61)..(61): /note="Nucleotide may be methylated to form 5-methylcytosine"
ggcagcggcggtgagcgatgccttccctctgccacaaggcgccgcctgcagagcctgccgcgtccgccacgcccagagcgtacccgcagctcagcgccgagttactcctgctggcggtggcc

SEQ ID NO: 11117 - DNA, 122 bp, Homo sapiens
  misc_feature (61)..(62): /note="This region represents a CpG dinucleotide"
  misc_feature (61)..(61): /note="Nucleotide may be methylated to form 5-methylcytosine"
gtcccattgttattctcacctgacagctgcagacgtggaagctcacagaggtggagtcatcgcccagggttacacacctgatgagcagagagctgggattcgaacccaggcagctgggggct

SEQ ID NO: 11118 - DNA, 122 bp, Homo sapiens
  misc_feature (61)..(62): /note="This region represents a CpG dinucleotide"
  misc_feature (61)..(61): /note="Nucleotide may be methylated to form 5-methylcytosine"
tgacctaagacaagttactcagcctctctgtgcctcatctttttcacctgtggaatggagcgaatcatcgcagctggtgtgaagattaacaatttgtatataggagttggcacagggccagt

SEQ ID NO: 11119 - DNA, 122 bp, Homo sapiens
  misc_feature (61)..(62): /note="This region represents a CpG dinucleotide"
  misc_feature (61)..(61): /note="Nucleotide may be methylated to form 5-methylcytosine"
aataatccccaagccagggagaggggaaggaagcctttgctggatgcaaaggcccagctacgtaacctccaaatgagcatgaaaaaaatcacatataagaagagaggctttaaagacacatg

SEQ ID NO: 11120 - DNA, 122 bp, Homo sapiens
  misc_feature (61)..(62): /note="This region represents a CpG dinucleotide"
  misc_feature (61)..(61): /note="Nucleotide may be methylated to form 5-methylcytosine"
ccacaaagggtggggccagcctgggcaggtccacctacaggtcacctgatggcaggcacacgcactggcagcatgggagaatccagtgcatggtcatcaaatgcctagaggtgtgcctagcc

SEQ ID NO: 11121 - DNA, 122 bp, Homo sapiens
  misc_feature (61)..(62): /note="This region represents a CpG dinucleotide"
  misc_feature (61)..(61): /note="Nucleotide may be methylated to form 5-methylcytosine"
catgctattatttgaaaaatccaggaaacaaatggttgaatcctagttagccaataaatacgtggctttgtagtattagtctcttgggcttcagttttatcaccaagaataataatgcagcc

SEQ ID NO: 11122 - DNA, 122 bp, Homo sapiens
  misc_feature (61)..(62): /note="This region represents a CpG dinucleotide"
  misc_feature (61)..(61): /note="Nucleotide may be methylated to form 5-methylcytosine"
cacttcctgctctgggcttccttctctgcgctgctcacagcggagacgtggtcatgaggccgggtcgccttggagccagggcctctcagtccctgtggtggtctctggtcagatttggccca

SEQ ID NO: 11123 - DNA, 122 bp, Homo sapiens
  misc_feature (61)..(62): /note="This region represents a CpG dinucleotide"
  misc_feature (61)..(61): /note="Nucleotide may be methylated to form 5-methylcytosine"
accgcctggctgtgcaggagagatgagctgttctcctcctcctgcctgccaccaggatggcgctgtgttgtgtcacttaaggactcacctgctttgtagagaccagttaggtggctgctcca

SEQ ID NO: 11124 - DNA, 122 bp, Homo sapiens
  misc_feature (61)..(62): /note="This region represents a CpG dinucleotide"
  misc_feature (61)..(61): /note="Nucleotide may be methylated to form 5-methylcytosine"
agggactaacaccaagaaggccctccaggcagtgtacagcatgatgagctggccagatgacgtccctcctgaaggctggaaccgcacccgccatgtcatcatcctcatgactgatggtcaga

SEQ ID NO: 11125 - DNA, 122 bp, Homo sapiens
  misc_feature (61)..(62): /note="This region represents a CpG dinucleotide"
  misc_feature (61)..(61): /note="Nucleotide may be methylated to form 5-methylcytosine"
ataacggaaatgggactggtatttgcattttgactcacactccagtgttcttttcacttgcgtgctgataatagggaagtgacgctatagaagctgaatcatcaaggtaggaaattacagca

SEQ ID NO: 11126 - DNA, 122 bp, Homo sapiens
  misc_feature (61)..(62): /note="This region represents a CpG dinucleotide"
  misc_feature (61)..(61): /note="Nucleotide may be methylated to form 5-methylcytosine"
agaaaatctcttatctctgtagtagtttgagtaacttctcttatcagtaaagctgtcttacgcagctgtggttatgtatctatgcaagcacaaagcaccgccttttttgtttgcataactgt

SEQ ID NO: 11127 - DNA, 122 bp, Homo sapiens
  misc_feature (61)..(62): /note="This region represents a CpG dinucleotide"
  misc_feature (61)..(61): /note="Nucleotide may be methylated to form 5-methylcytosine"
agaggtgtggggagagcagttaggaggtgccagtggagcaagcacccacacacgctgtggcggaactctgtgatgagcacccagagcaactgggaccagtggtgcaactgttgccgaggcca

SEQ ID NO: 11128 - DNA, 122 bp, Homo sapiens
  misc_feature (61)..(62): /note="This region represents a CpG dinucleotide"
  misc_feature (61)..(61): /note="Nucleotide may be methylated to form 5-methylcytosine"
ttaagtcagtagttctgttgctaaataatagtttgccttagatcatttcctggaaaagttcgaagcctttttgtggaattgcttcaacagtcatccttagctcgaccctgtccgtgtgtttt

SEQ ID NO: 11129 - DNA, 122 bp, Homo sapiens
  misc_feature (61)..(62): /note="This region represents a CpG dinucleotide"
  misc_feature (61)..(61): /note="Nucleotide may be methylated to form 5-methylcytosine"
ccaagtgctgatacacaactgtcattatttaaaaggcagactcactgctgctgaattccacgtggacaatcgtagctaattgaggcagttattttaagaatatttcataatttctaaagcag

SEQ ID NO: 11130 - DNA, 122 bp, Homo sapiens
  misc_feature (61)..(62): /note="This region represents a CpG dinucleotide"
  misc_feature (61)..(61): /note="Nucleotide may be methylated to form 5-methylcytosine"
taactcaggcttgaaagcacttagcacatggcaggcatctccacagagacagtggctgagcgattggagtgagtaagagagaatgtagtttcaagagtaaaggagaacaaagtagggtgacc

SEQ ID NO: 11131 - DNA, 122 bp, Homo sapiens
  misc_feature (61)..(62): /note="This region represents a CpG dinucleotide"
  misc_feature (61)..(61): /note="Nucleotide may be methylated to form 5-methylcytosine"
caggtaaaggtcacatttcagaccttttttgtaaacagtaaattataatagtaagttacacgtgaagacactgtccttacaacacatcatatcatgaccagtacagcctaagggtcctccga

SEQ ID NO: 11132 - DNA, 122 bp, Homo sapiens
  misc_feature (61)..(62): /note="This region represents a CpG dinucleotide"
  misc_feature (61)..(61): /note="Nucleotide may be methylated to form 5-methylcytosine"
ctaaatagaccatgaaaaggacacttgtttacactatgtaagctgaaactagaatgtgcacgtcagtagactcacatttttcaccattgtgcacatgtctgcaatgacagtggaagtgctat

SEQ ID NO: 11133 - DNA, 122 bp, Homo sapiens
  misc_feature (61)..(62): /note="This region represents a CpG dinucleotide"
  misc_feature (61)..(61): /note="Nucleotide may be methylated to form 5-methylcytosine"
ttaaactcaattttattttctttaatcttcagtttctagttttcatcgttggctctctaacgtttatcatttgttattaattcttggcttttactttgccattttatagtgctcattttata

SEQ ID NO: 11134 - DNA, 122 bp, Homo sapiens
  misc_feature (61)..(62): /note="This region represents a CpG dinucleotide"
  misc_feature (61)..(61): /note="Nucleotide may be methylated to form 5-methylcytosine"
actacactcttgcatcacaccaagcatgaaagagtttacattccagagaaaaaggtttatcgctgtctcttggtttttcagactattgaaggccaagtgttcagatggtcttgttttgtggg

SEQ ID NO: 11135 - DNA, 122 bp, Homo sapiens
  misc_feature (61)..(62): /note="This region represents a CpG dinucleotide"
  misc_feature (61)..(61): /note="Nucleotide may be methylated to form 5-methylcytosine"
tgactttagacattgctgggagagggtgagagtccccgctctgccatgaataggatgagacgtggctgggctaggcagcatgccggactaggctctgactcaggttccacagaagggaactg

SEQ ID NO: 11136 - DNA, 122 bp, Homo sapiens
  misc_feature (61)..(62): /note="This region represents a CpG dinucleotide"
  misc_feature (61)..(61): /note="Nucleotide may be methylated to form 5-methylcytosine"
ccccagtgaagtctgaattcccgataagatgaaatgccaggctgccaaaagcccagagctcgctgctggctgccggctgccttgtgaggcctttgctccatttttcgtccctgactcatact

SEQ ID NO: 11137 - DNA, 122 bp, Homo sapiens
  misc_feature (61)..(62): /note="This region represents a CpG dinucleotide"
  misc_feature (61)..(61): /note="Nucleotide may be methylated to form 5-methylcytosine"
cttttaacactgtctcctgtgagtccagagattttgatcttgtaactaaattgactctgtcgcaggtttgccatccccctgggtaaattctctgacatgcacagcttcagaccaaaccccct

SEQ ID NO: 11138 - DNA, 122 bp, Homo sapiens
  misc_feature (61)..(62): /note="This region represents a CpG dinucleotide"
  misc_feature (61)..(61): /note="Nucleotide may be methylated to form 5-methylcytosine"
caaaagcaggtttcccagaaaaggaggaattctgcctcaagattcaatgtgtaaatcctgcgtgagtttgagtttccagcatgccctgtgggtttccatacgttccctgtgaactttggact

SEQ ID NO: 11139 - DNA, 122 bp, Homo sapiens
  misc_feature (61)..(62): /note="This region represents a CpG dinucleotide"
  misc_feature (61)..(61): /note="Nucleotide may be methylated to form 5-methylcytosine"
gacatggtaagaagaccttggactatttgtctatgcttctctgactgtagtattgctacacgtgaggagatatagcaatagacggaggagtagattgcacgtgtgccgttctcttcattagg

SEQ ID NO: 11140 - DNA, 122 bp, Homo sapiens
  misc_feature (61)..(62): /note="This region represents a CpG dinucleotide"
  misc_feature (61)..(61): /note="Nucleotide may be methylated to form 5-methylcytosine"
tctactctcagaaacagcgtcctccctgccacagccatcaatgtgcatgtggtcgacacacgcattcacacacactcacggctcattaaaatgcgttgtgaacttggcgtaatccccaggat

SEQ ID NO: 11141 - DNA, 122 bp, Homo sapiens
  misc_feature (61)..(62): /note="This region represents a CpG dinucleotide"
  misc_feature (61)..(61): /note="Nucleotide may be methylated to form 5-methylcytosine"
gggattttaaggtagtgaaactcttgcagggcaggggagccccaaaactgggacaccgtccgggaaggctcttggcttcgtccaggaaggaattcaagggtgagctagaggaggaagaaaaa

SEQ ID NO: 11142 - DNA, 122 bp, Homo sapiens
  misc_feature (61)..(62): /note="This region represents a CpG dinucleotide"
  misc_feature (61)..(61): /note="Nucleotide may be methylated to form 5-methylcytosine"
ggaactatttcaggcatataggatacagcaatggcttgctcaatttattgagacttgtttcgtggctcagcatatagtctgtcttggtgaatgctccacattcccaccaacagacttataaa

SEQ ID NO: 11143 - DNA, 122 bp, Homo sapiens
  misc_feature (61)..(62): /note="This region represents a CpG dinucleotide"
  misc_feature (61)..(61): /note="Nucleotide may be methylated to form 5-methylcytosine"
tgtggagagaggcgtgggcgggcgggaactggggttacgcgcggtgcttgccagccagtgcgagttccgggtgggcgtgggcttggcgggccctgcagtgggagcggccaactgggccaggc

SEQ ID NO: 11144 - DNA, 122 bp, Homo sapiens
  misc_feature (61)..(62): /note="This region represents a CpG dinucleotide"
  misc_feature (61)..(61): /note="Nucleotide may be methylated to form 5-methylcytosine"
cctgcactaaaactgtcatgacaaagcacaccattgaccttcccttcgcaaatctaggagcgtggtttttggtcctcatttgatgtctctgtaatagttggtgttattgagcatccgcttct

SEQ ID NO: 11145 - DNA, 122 bp, Homo sapiens
  misc_feature (61)..(62): /note="This region represents a CpG dinucleotide"
  misc_feature (61)..(61): /note="Nucleotide may be methylated to form 5-methylcytosine"
tttatgagaaaccatttgtggccaaaaatctacatgggcttcagatgacctgaatgaactcgtctctgtagagtgagagtcctgggcaggaggaaaggtttccatagccaaggaccacatgc

SEQ ID NO: 11146 - DNA, 122 bp, Homo sapiens
  misc_feature (61)..(62): /note="This region represents a CpG dinucleotide"
  misc_feature (61)..(61): /note="Nucleotide may be methylated to form 5-methylcytosine"
aagagaccagagacagccactcctgacacatgggcagagttcacagtttaacacattgcacgaggaagtcagctgactgggttgctttttcaaacaggacttaaagccagcccagaaactct

SEQ ID NO: 11147 - DNA, 122 bp, Homo sapiens
  misc_feature (61)..(62): /note="This region represents a CpG dinucleotide"
  misc_feature (61)..(61): /note="Nucleotide may be methylated to form 5-methylcytosine"
ccacccagagactgcaaggacacaatcagtgagtgatcactgattcttatcatctgtttgcgcccttgcaatccttgtggacaggaataggatttaatgagtacttatgacagtacttgcag

SEQ ID NO: 11148 - DNA, 122 bp, Homo sapiens
  misc_feature (61)..(62): /note="This region represents a CpG dinucleotide"
  misc_feature (61)..(61): /note="Nucleotide may be methylated to form 5-methylcytosine"
ctttgaacaactcagctcctgcaaaagcttccgtccctgaggcaaaaggacacgagggcccgactgccagagggaggatggacagacctcttgccctcacactctggtaccaggactgttcg

SEQ ID NO: 11149 - DNA, 122 bp, Homo sapiens
  misc_feature (61)..(62): /note="This region represents a CpG dinucleotide"
  misc_feature (61)..(61): /note="Nucleotide may be methylated to form 5-methylcytosine"
caacttcctcatcaccaacgatgaggcatacgctgaggagtttggcaacgagacgtggggcgtaacaaaggtgaggcctggtcctggtcctgatgtcgggggcgggcagggctggcaggggg

SEQ ID NO: 11150 - DNA, 122 bp, Homo sapiens
  misc_feature (61)..(62): /note="This region represents a CpG dinucleotide"
  misc_feature (61)..(61): /note="Nucleotide may be methylated to form 5-methylcytosine"
aaaagtgcaccaggttaaccgccgggtcaggaaggacaggcttgcttccctggaagtctacgcaagcaacctgaatgcctggacaagccagctcaaaggtcaggctgccgtctctgttgagt

SEQ ID NO: 11151 - DNA, 122 bp, Homo sapiens
  misc_feature (61)..(62): /note="This region represents a CpG dinucleotide"
  misc_feature (61)..(61): /note="Nucleotide may be methylated to form 5-methylcytosine"
ataaatatacatgcaggtgctgaacatcttgtaaaaacccacaaacataactcctgcacacgtaaactccgtctaaatgatataaggccatgatatgcagctgtgtgaagttgcatatggat

SEQ ID NO: 11152 - DNA, 122 bp, Homo sapiens
  misc_feature (61)..(62): /note="This region represents a CpG dinucleotide"
  misc_feature (61)..(61): /note="Nucleotide may be methylated to form 5-methylcytosine"
acctcatgatctgcttgccttggcctcccaaagtgttgggattacaggcgtgagccaccgcgcccagccggtaggagggttttaatggtgattaaaccatctctgatccctagagagacaga

SEQ ID NO: 11153 - DNA, 122 bp, Homo sapiens
  misc_feature (61)..(62): /note="This region represents a CpG dinucleotide"
  misc_feature (61)..(61): /note="Nucleotide may be methylated to form 5-methylcytosine"
ccagctgagtcatgggtcacttagtaggaaggcaccctgagatacagacagggtgctgtgcgcgctgcagaatgcctcctcccaccctcctccctccctgacttctcctggcgtaggaatct

SEQ ID NO: 11154 - DNA, 122 bp, Homo sapiens
  misc_feature (61)..(62): /note="This region represents a CpG dinucleotide"
  misc_feature (61)..(61): /note="Nucleotide may be methylated to form 5-methylcytosine"
ttctcatctgtgtaggtttgcggtgtttcttgaggcgagagctgtctgtgtaggttttgccgctgcctatgtaatcccaagtgtgggtagtgatcttttttggcttgtgctcctccaagatg

SEQ ID NO: 11155 - DNA, 122 bp, Homo sapiens
  misc_feature (61)..(62): /note="This region represents a CpG dinucleotide"
  misc_feature (61)..(61): /note="Nucleotide may be methylated to form 5-methylcytosine"
gaggaagcagatgaggtacacgtaccccctagccgggagcactcaagctccagcagaaagcgtatcaactccatccctctgctgttcagagtagcttagagtctcctccccttctccacgtg

SEQ ID NO: 11156 - DNA, 122 bp, Homo sapiens
  misc_feature (61)..(62): /note="This region represents a CpG dinucleotide"
  misc_feature (61)..(61): /note="Nucleotide may be methylated to form 5-methylcytosine"
ctcacccaaggtcaaacaacttatcactggctgagtcaggactcaaatctatcccaagaccggaggtttcatgtttcatgcaacaaaatgaaaacacaataagaacaaaacaaaccaagaac

SEQ ID NO: 11157 - DNA, 122 bp, Homo sapiens
  misc_feature (61)..(62): /note="This region represents a CpG dinucleotide"
  misc_feature (61)..(61): /note="Nucleotide may be methylated to form 5-methylcytosine"
ctgaacagttgagggaagctgaactactgcaatgactgggtatcttctaactcttaagaccggtcatgcaacttaggctggagaactccatttcaggggaggtcagtgactcacactgaagc

SEQ ID NO: 11158 - DNA, 122 bp, Homo sapiens
  misc_feature (61)..(62): /note="This region represents a CpG dinucleotide"
  misc_feature (61)..(61): /note="Nucleotide may be methylated to form 5-methylcytosine"
ccaggaaggaagcattgtaactttgtggctgaccaggcaggatggtcacacggctcctgacgcaggcccagacgtattcacgaatcactccatagtgattctgatgtgctgccagagttgag

SEQ ID NO: 11159 - DNA, 122 bp, Homo sapiens
  misc_feature (61)..(62): /note="This region represents a CpG dinucleotide"
  misc_feature (61)..(61): /note="Nucleotide may be methylated to form 5-methylcytosine"
ggacgttaggagtctgctgcaaaacctgagggtcttagctgagcagtcacaggctgggcccgttgccctgggctcctgtgagtaaaacccagtcaattttgagtacccagtaaggcatccat

SEQ ID NO: 11160 - DNA, 122 bp, Homo sapiens
  misc_feature (61)..(62): /note="This region represents a CpG dinucleotide"
  misc_feature (61)..(61): /note="Nucleotide may be methylated to form 5-methylcytosine"
tctgttcaacagatttacactgactgggccaaccactacctagcaaaatcaggccacaagcggctgatcaaggacttgcaacaagacattgcagatggagtactcctagcagaaatcatcca

SEQ ID NO: 11161 - DNA, 122 bp, Homo sapiens
  misc_feature (61)..(62): /note="This region represents a CpG dinucleotide"
  misc_feature (61)..(61): /note="Nucleotide may be methylated to form 5-methylcytosine"
ctgggccagtacatccacaggaagagggtgcctggtcagaccagacaggcccaatgggcccgggaggagaggcattagatacagccccacagctcaggcaggcatcctgtcctttagctcta

SEQ ID NO: 11162 - DNA, 122 bp, Homo sapiens
  misc_feature (61)..(62): /note="This region represents a CpG dinucleotide"
  misc_feature (61)..(61): /note="Nucleotide may be methylated to form 5-methylcytosine"
aacatcaatttcactgcagacaaacccagtcacacagattaagcaagcacaatactggtgcgtcttatctctgaccacaggaggagggtagacagattctacaggatgaagaaattcagact

SEQ ID NO: 11163 - DNA, 122 bp, Homo sapiens
  misc_feature (61)..(62): /note="This region represents a CpG dinucleotide"
  misc_feature (61)..(61): /note="Nucleotide may be methylated to form 5-methylcytosine"
gctggactgtgtgcgtgcgtattcatgtgagagaaacagcctggttcgaccagtgcctgacgtcacttgttctgctgtgtcagcatggcacaggaggctgtatccccttgatacatttctca

SEQ ID NO: 11164 - DNA, 122 bp, Homo sapiens
  misc_feature (61)..(62): /note="This region represents a CpG dinucleotide"
  misc_feature (61)..(61): /note="Nucleotide may be methylated to form 5-methylcytosine"
tgtccaccccccaccaattcatatgctgaaaccctaattcccaatgtgactatatttggacgtagggcctttaaggaagtagttaaggttaaataaggtcatacgggtgagccctattccaa

SEQ ID NO: 11165 - DNA, 122 bp, Homo sapiens
  misc_feature (61)..(62): /note="This region represents a CpG dinucleotide"
  misc_feature (61)..(61): /note="Nucleotide may be methylated to form 5-methylcytosine"
tccttgagagatcatttcctggatgtggacttcaagatccaggcttttccttcagtgctgcgtgggctctccgctgcctcccctgtcatccggggctgcgtgtcgtgagctgcgcccgtctt

SEQ ID NO: 11166 - DNA, 122 bp, Homo sapiens
  misc_feature (61)..(62): /note="This region represents a CpG dinucleotide"
  misc_feature (61)..(61): /note="Nucleotide may be methylated to form 5-methylcytosine"
ctaggtttgatttttttccccttgttctaaagttgctgtttccgaatctccttctattgtcgtgtttataaaatgtatgagaaacagggacatttaaagacatcatagaaatggccactctt

SEQ ID NO: 11167 - DNA, 122 bp, Homo sapiens
  misc_feature (61)..(62): /note="This region represents a CpG dinucleotide"
  misc_feature (61)..(61): /note="Nucleotide may be methylated to form 5-methylcytosine"
tgcaaatgctcggtttgaaacaaatgctaattagtagattgtcaagacaagggttttgaacgtttgagcaatatcattttgttgcatgacacaataagtgtgttctgagggctgggtgtggt

SEQ ID NO: 11168 - DNA, 122 bp, Homo sapiens
  misc_feature (61)..(62): /note="This region represents a CpG dinucleotide"
  misc_feature (61)..(61): /note="Nucleotide may be methylated to form 5-methylcytosine"
gcttcccaggttgctggaaaaatcaacgtaggatagcatcggtagaggacgctaccgcggcgcaggtgaaagatgtaaacagtgcaatctaaatcttcaatgggatgcaagtcagacttatt

SEQ ID NO: 11169 - DNA, 122 bp, Homo sapiens
  misc_feature (61)..(62): /note="This region represents a CpG dinucleotide"
  misc_feature (61)..(61): /note="Nucleotide may be methylated to form 5-methylcytosine"
agcagctacgcatttgtcctgctgcccttctgagtgttgctcaatgcttagatactgctccgtgtggtctcacgcagtgctttgagcaacacatcgaggaggaaggaaactttttttcttga

SEQ ID NO: 11170 - DNA, 122 bp, Homo sapiens
  misc_feature (61)..(62): /note="This region represents a CpG dinucleotide"
  misc_feature (61)..(61): /note="Nucleotide may be methylated to form 5-methylcytosine"
ggtgcaggatgtgcctgccaggcagcccctgagatgggtgtatgtggaacccagtgaggacgggaaactacacaaattcacggaatgagagggatgctcactttgctcagtttaaattcctc

SEQ ID NO: 11171 - DNA, 122 bp, Homo sapiens
  misc_feature (61)..(62): /note="This region represents a CpG dinucleotide"
  misc_feature (61)..(61): /note="Nucleotide may be methylated to form 5-methylcytosine"
tgtgagtctcttttgaccacagtttattttgtgttgcttcttttagctgcatggtccatacgccaaaggtgggcaggtggagggctgctactcactaacttggtagtgcagaaatggctttt

SEQ ID NO: 11172 - DNA, 122 bp, Homo sapiens
  misc_feature (61)..(62): /note="This region represents a CpG dinucleotide"
  misc_feature (61)..(61): /note="Nucleotide may be methylated to form 5-methylcytosine"
aagtcctttttatgtggtttctctgttccagtatctggcactgtcaccctgaagtggcagcgccagctttcagttatctagctacctaaactttgtgctgattgtgactttctcctctccct

SEQ ID NO: 11173 - DNA, 122 bp, Homo sapiens
  misc_feature (61)..(62): /note="This region represents a CpG dinucleotide"
  misc_feature (61)..(61): /note="Nucleotide may be methylated to form 5-methylcytosine"
aaaaaaaggtatgtgtactcaaactcccattcttaggatgagactagaacccgagttgtccgcagttggagacattaatctgcagcctcattggcttgtccacaggataccatgcataaatt

SEQ ID NO: 11174 - DNA, 122 bp, Homo sapiens
  misc_feature (61)..(62): /note="This region represents a CpG dinucleotide"
  misc_feature (61)..(61): /note="Nucleotide may be methylated to form 5-methylcytosine"
gcctaattctgtgcacttgatgcataattgccagaccttttctacttaattggcccctggcgttggcccaccctgcctgccatatcactgttgatccctccagtgacggctaatttgaccta

SEQ ID NO: 11175 - DNA, 122 bp, Homo sapiens
  misc_feature (61)..(62): /note="This region represents a CpG dinucleotide"
  misc_feature (61)..(61): /note="Nucleotide may be methylated to form 5-methylcytosine"
atgtgaaacatttttcagccagtggggaggagctggtcaaagtagggaggagtgcactaacgaaaagcaataatgttattcaggaaaacttaaaaggggaaaaagcaacactaggcatcata

SEQ ID NO: 11176 - DNA, 122 bp, Homo sapiens
  misc_feature (61)..(62): /note="This region represents a CpG dinucleotide"
  misc_feature (61)..(61): /note="Nucleotide may be methylated to form 5-methylcytosine"
aattgactgaaaccatggcattgcagtaaaggaagagtttaattgctgcgaggccagccacgccctaagggagagggagttaccactcaaattaatctcccggaaagctcagaggctgggat

SEQ ID NO: 11177 - DNA, 122 bp, Homo sapiens
  misc_feature (61)..(62): /note="This region represents a CpG dinucleotide"
  misc_feature (61)..(61): /note="Nucleotide may be methylated to form 5-methylcytosine"
actgactcagcagtatctcttgctgcagttattggcacatgatattgactgggaagtgtacggactggtaatctaacgtctttagagagagtcacattgtcaagcctggctggcaatggcct

SEQ ID NO: 11178 - DNA, 122 bp, Homo sapiens
  misc_feature (61)..(62): /note="This region represents a CpG dinucleotide"
  misc_feature (61)..(61): /note="Nucleotide may be methylated to form 5-methylcytosine"
gtcagatctgcaatgtgaagcccttcaggaacaaaccttccaggaggagaaaagagaccacgagagacggctggactaacaggagctcaaagaccaacaactgaaggcctgtgcaggcctgg

SEQ ID NO: 11179 - DNA, 122 bp, Homo sapiens
  misc_feature (61)..(62): /note="This region represents a CpG dinucleotide"
  misc_feature (61)..(61): /note="Nucleotide may be methylated to form 5-methylcytosine"
gcttaagcacttctgtgggctgacagctccagcaatggccaaagattttacttaaataagcgattagctctgggaatcagattctaagtggaaacatgaataattagtgaattaagtagtct

SEQ ID NO: 11180 - DNA, 122 bp, Homo sapiens
  misc_feature (61)..(62): /note="This region represents a CpG dinucleotide"
  misc_feature (61)..(61): /note="Nucleotide may be methylated to form 5-methylcytosine"
atatattcatcattttacttagcaatcttacttgtgggaatctatcctatagatacagtacgaaatgtacaataggcctagcgcagtggctcaggcatgtaatcccagtactttgggaggcc

SEQ ID NO: 11181 - DNA, 122 bp, Homo sapiens
  misc_feature (61)..(62): /note="This region represents a CpG dinucleotide"
  misc_feature (61)..(61): /note="Nucleotide may be methylated to form 5-methylcytosine"
tcccttacctctcctcagacctccttttgggtgtgtgagtcttacatgaacagtcatttccgtcacaagagttcaaggctgcagtaagccacagttgcaccaccgtactccagcctgggcag

SEQ ID NO: 11182 - DNA, 122 bp, Homo sapiens
  misc_feature (61)..(62): /note="This region represents a CpG dinucleotide"
  misc_feature (61)..(61): /note="Nucleotide may be methylated to form 5-methylcytosine"
gccttggtcatagtccaggaagacacccaccttgtcaagcttgtcccggacgttaagccgcgtccagggctccgtgcaggcgctgtactggttgccatcgtgcatcacgatgcagtagaagc

SEQ ID NO: 11183 - DNA, 122 bp, Homo sapiens
  misc_feature (61)..(62): /note="This region represents a CpG dinucleotide"
  misc_feature (61)..(61): /note="Nucleotide may be methylated to form 5-methylcytosine"
aaagacctgtcagtcatttttcaccaatgggacctgaaaattccatgataaacacaaatacgttattactctaaggaacaatttgttgtttaaaactgaaatcttgtctttacagatctctc

SEQ ID NO: 11184 - DNA, 122 bp, Homo sapiens
  misc_feature (61)..(62): /note="This region represents a CpG dinucleotide"
  misc_feature (61)..(61): /note="Nucleotide may be methylated to form 5-methylcytosine"
caggctttcctgcagttttgctcatatacattctaagtttttctgatagctttcaacccacgtcttcttgtttgcaaacctatccagcctggaaggtccaactcatatcctgcctttcccat

SEQ ID NO: 11185 - DNA, 122 bp, Homo sapiens
  misc_feature (61)..(62): /note="This region represents a CpG dinucleotide"
  misc_feature (61)..(61): /note="Nucleotide may be methylated to form 5-methylcytosine"
aatgcgttggagaatcaccttaattttttccaggtaattgggtaaaggcctcagagaggtcgtggcatttgaggatgaataaaatgctgctagctggggaaaggttgttaggaacaggaaag

SEQ ID NO: 11186 - DNA, 122 bp, Homo sapiens
  misc_feature (61)..(62): /note="This region represents a CpG dinucleotide"
  misc_feature (61)..(61): /note="Nucleotide may be methylated to form 5-methylcytosine"
gaaaaaaaatgatctcttatcaattagcactcactaatgtactactaattgagcaacctacgcactcagttgactacgtaaatctgtcaggtcttttgtgatttcctctgatgcaggagagg

SEQ ID NO: 11187 - DNA, 122 bp, Homo sapiens
  misc_feature (61)..(62): /note="This region represents a CpG dinucleotide"
  misc_feature (61)..(61): /note="Nucleotide may be methylated to form 5-methylcytosine"
actacttctacttatctccagcctccatcatgttaacttgagggtgtgtgtgtgtgttcgcgtgtttgtcgaggtgggtatctaacctgatcactcaggtcgtgtcccttcactcagtttgg

SEQ ID NO: 11188 - DNA, 122 bp, Homo sapiens
  misc_feature (61)..(62): /note="This region represents a CpG dinucleotide"
  misc_feature (61)..(61): /note="Nucleotide may be methylated to form 5-methylcytosine"
gtgtcagaagttccagtttgtgctgactcaggaggacagaggctccgtgggctggaaccccggacaggagagggtgtgtgagccccgtcccctgcccagccaggaggaaatcccccgctccg

SEQ ID NO: 11189 - DNA, 122 bp, Homo sapiens
  misc_feature (61)..(62): /note="This region represents a CpG dinucleotide"
  misc_feature (61)..(61): /note="Nucleotide may be methylated to form 5-methylcytosine"
taggctttgtcaaccagagaagcttgttagagactccatgcctagggcttttactggtcacgtaggcagatctacctgggacattccaaaattccagattcccagaaggaaagcaggtattc

SEQ ID NO: 11190 - DNA, 122 bp, Homo sapiens
  misc_feature (61)..(62): /note="This region represents a CpG dinucleotide"
  misc_feature (61)..(61): /note="Nucleotide may be methylated to form 5-methylcytosine"
attctgaacccagaagcccgagagagcttccaaaatgtaagtcagatgatgtcactcctccgtctttgcactcagagccagcctctgcatgctgagcctcatcttcctcacctgccacatgc

SEQ ID NO: 11191 - DNA, 122 bp, Homo sapiens
  misc_feature (61)..(62): /note="This region represents a CpG dinucleotide"
  misc_feature (61)..(61): /note="Nucleotide may be methylated to form 5-methylcytosine"
gtaatggcaaaatagaacccagaggaggcaatgactgggagatgacagaggaaaccaaatcgaagcagctttattgcaccattaagtacatcactgcatcaaagacagtgccacaaatgcaa

SEQ ID NO: 11192 - DNA, 122 bp, Homo sapiens
  misc_feature (61)..(62): /note="This region represents a CpG dinucleotide"
  misc_feature (61)..(61): /note="Nucleotide may be methylated to form 5-methylcytosine"
tgctgatgacatggagaaaaggaaaatgtgctccttgttacctgtttgaggggagggaggcgctgggagcccactgcaggggatgtgtctacagaaatatgtatagtgttacttttcagtta

SEQ ID NO: 11193 - DNA, 122 bp, Homo sapiens
  misc_feature (61)..(62): /note="This region represents a CpG dinucleotide"
  misc_feature (61)..(61): /note="Nucleotide may be methylated to form 5-methylcytosine"
atgtgaatttggaggtaaggacacgttctacactcttggacccagacaaatttggtctcacgtgattggatcagagggacaacacttgtggtctcatgaagcgccaaggccttcttggttcc

SEQ ID NO: 11194 - DNA, 122 bp, Homo sapiens
  misc_feature (61)..(62): /note="This region represents a CpG dinucleotide"
  misc_feature (61)..(61): /note="Nucleotide may be methylated to form 5-methylcytosine"
tgtcactgaaacctttcccagccttggtcttcccctctgtgaaatggagtctcacaggatcgccgtgagaactgaatgactaactctatggaaaatgcttccaaaacagccctcagtaggtg

SEQ ID NO: 11195 - DNA, 122 bp, Homo sapiens
  misc_feature (61)..(62): /note="This region represents a CpG dinucleotide"
  misc_feature (61)..(61): /note="Nucleotide may be methylated to form 5-methylcytosine"
gctcatcgttgctctgtttgctgtgttggcctcacaatattctgttgtcctgagcacttccgtgaacttctgggaggtacaagtcctttctgtcaaaagtgaaaatgtgcagacatttgacc

SEQ ID NO: 11196 - DNA, 122 bp, Homo sapiens
  misc_feature (61)..(62): /note="This region represents a CpG dinucleotide"
  misc_feature (61)..(61): /note="Nucleotide may be methylated to form 5-methylcytosine"
ccagggcatatgatttctagggtgtctcccagctctgataggtgaggactcatcatttcacgtgcatcttcattaactcctaactcaacccttctaagctgtcctgccatcaagaaagtgat

SEQ ID NO: 11197 - DNA, 122 bp, Homo sapiens
  misc_feature (61)..(62): /note="This region represents a CpG dinucleotide"
  misc_feature (61)..(61): /note="Nucleotide may be methylated to form 5-methylcytosine"
ctggggtcatgagatggctcaggcagtactataaacatacactttcaacacacaatgcctcgtgcacacagatttcctgtatgaataccaactccacacagggcattgtattgtggactgac

SEQ ID NO: 11198 - DNA, 122 bp, Homo sapiens
  misc_feature (61)..(62): /note="This region represents a CpG dinucleotide"
  misc_feature (61)..(61): /note="Nucleotide may be methylated to form 5-methylcytosine"
agagactcctcttcctctctttgactcatcttaaataagcatgttcaatttcaaaacaaacgtgactcattttgactaaaagccctaccaccaacagctactacagcttacaacaaaccggt

SEQ ID NO: 11199 - DNA, 122 bp, Homo sapiens
  misc_feature (61)..(62): /note="This region represents a CpG dinucleotide"
  misc_feature (61)..(61): /note="Nucleotide may be methylated to form 5-methylcytosine"
atggtggaaaagttggcaattaataacttctaagaaaactgaactaatgaaccaatcctgcgtgtgctatgtgtataacctccttctcactattaacagatttgttccaaacttatataaga

SEQ ID NO: 11200 - DNA, 122 bp, Homo sapiens
  misc_feature (61)..(62): /note="This region represents a CpG dinucleotide"
  misc_feature (61)..(61): /note="Nucleotide may be methylated to form 5-methylcytosine"
tcccggctcctgggagccagcgtctgcagagccctggcggcggagggcggtggagggcggcggcccacgtacacaacggcgccttccagctctgggaggcttgctccagagcctggaaacac

SEQ ID NO: 11201 - DNA, 122 bp, Homo sapiens
  misc_feature (61)..(62): /note="This region represents a CpG dinucleotide"
  misc_feature (61)..(61): /note="Nucleotide may be methylated to form 5-methylcytosine"
agctcccaaacaagaattttaacttgaattttcaggtttggttgtctaccctgctcatgccgagttcagactgagggtctgtgataaattaaagtcactgaaattattaaattaggaacctg

SEQ ID NO: 11202 - DNA, 122 bp, Homo sapiens
  misc_feature (61)..(62): /note="This region represents a CpG dinucleotide"
  misc_feature (61)..(61): /note="Nucleotide may be methylated to form 5-methylcytosine"
cagcggggagtccttctcagcctccttgggtaacttgggcaccacagtgaaggagttgggcgtgccctggctgtggaagatgctgtcagagctggcctcggcttggtggctgtggtcacgga

SEQ ID NO: 11203 - DNA, 122 bp, Homo sapiens
  misc_feature (61)..(62): /note="This region represents a CpG dinucleotide"
  misc_feature (61)..(61): /note="Nucleotide may be methylated to form 5-methylcytosine"
gagtgtacagctggtttacttgactcatgagcaagatgcacacgtcacatctggctggcacgtctctgaagcctttttacatctctaggctttccccattcctcttttatccctttgcagtt

SEQ ID NO: 11204 - DNA, 122 bp, Homo sapiens
  misc_feature (61)..(62): /note="This region represents a CpG dinucleotide"
  misc_feature (61)..(61): /note="Nucleotide may be methylated to form 5-methylcytosine"
ttcaggcatggctgttcgtgtttgccgtggcccgtgtttgccgtggctgttcatgtttgccgtggctcgtgtttgccgtggctcgtgtttgccgtggctcgtgtttgccgtggctcgtgttt

SEQ ID NO: 11205 - DNA, 122 bp, Homo sapiens
  misc_feature (61)..(62): /note="This region represents a CpG dinucleotide"
  misc_feature (61)..(61): /note="Nucleotide may be methylated to form 5-methylcytosine"
gagagagtagggggaccgctgagctctgtccacagactagagcaggaaaggggggaaaggcggcgatagaggttagcaggaatgtttaattatcaggagcaggaacagaactgagggcatgc

SEQ ID NO: 11206 - DNA, 122 bp, Homo sapiens
  misc_feature (61)..(62): /note="This region represents a CpG dinucleotide"
  misc_feature (61)..(61): /note="Nucleotide may be methylated to form 5-methylcytosine"
aacaagcctgtaacgtgacagatctgtatcccaggggctgatcatagagaaaccacaaagcgatgttttagctgcgtcgagtcctcaacacgggggacttccagcctggtaccaggatagcc

SEQ ID NO: 11207 - DNA, 122 bp, Homo sapiens
  misc_feature (61)..(62): /note="This region represents a CpG dinucleotide"
  misc_feature (61)..(61): /note="Nucleotide may be methylated to form 5-methylcytosine"
tagggaaacaccatcatggaattaaccttcagaggagggtggtcagcctcactgagaccacgtcacccaacctgtccattgcacagacaaaggggaagtgtgtgtttgtgttcccatgatga

SEQ ID NO: 11208 - DNA, 122 bp, Homo sapiens
  misc_feature (61)..(62): /note="This region represents a CpG dinucleotide"
  misc_feature (61)..(61): /note="Nucleotide may be methylated to form 5-methylcytosine"
tgaatcttcctatagctagagaaatccttttgggaataaggcagagtataaataaacagacggtgggtggatagttagataaatacatacatgtgtaattctcaccgtggcctggaaatctt

SEQ ID NO: 11209 - DNA, 122 bp, Homo sapiens
  misc_feature (61)..(62): /note="This region represents a CpG dinucleotide"
  misc_feature (61)..(61): /note="Nucleotide may be methylated to form 5-methylcytosine"
caaatatctaaacaaaatgctgtggtctcttaccagcacttaaaaagttaacaacagcaccgaatagaattgctcaaggcagtgaaggttaaaccagcatttggaaatgctgtgagaacaca

SEQ ID NO: 11210 - DNA, 122 bp, Homo sapiens
  misc_feature (61)..(62): /note="This region represents a CpG dinucleotide"
  misc_feature (61)..(61): /note="Nucleotide may be methylated to form 5-methylcytosine"
tatgggaacttaatctgactctgccattaccagcatggggacttgagcaagagttgctaccgtgaatggggccctcttcctcccctggttactcatctgtgaaataattggattaggcagca

SEQ ID NO: 11211 - DNA, 122 bp, Homo sapiens
  misc_feature (61)..(62): /note="This region represents a CpG dinucleotide"
  misc_feature (61)..(61): /note="Nucleotide may be methylated to form 5-methylcytosine"
ctgagtggagagtgactgggcacagtctgactatgtgctaccgtagtgaatcactgtgaacgcaaatgagtaatggcaggctgtgtcatctccaagctgaaaaatgtgataaaacaatcaaa

SEQ ID NO: 11212 - DNA, 122 bp, Homo sapiens
  misc_feature (61)..(62): /note="This region represents a CpG dinucleotide"
  misc_feature (61)..(61): /note="Nucleotide may be methylated to form 5-methylcytosine"
cctgtgcctctcagcacttcctgctctgggcttccttctctgcgctgctcacagcggagacgtggtcatgaggccgggtcgccttggagccagggcctctcagtccctgtggtggtctctgg

SEQ ID NO: 11213 - DNA, 122 bp, Homo sapiens
  misc_feature (61)..(62): /note="This region represents a CpG dinucleotide"
  misc_feature (61)..(61): /note="Nucleotide may be methylated to form 5-methylcytosine"
caaaggagtcatttcccaacttcagtattttgaaacattagatatcctgtttccttacaacgtgaccatcttgcagataagcactgctagatcatctgcacattcgagtaaatcctgttgtg

SEQ ID NO: 11214 - DNA, 122 bp, Homo sapiens
  misc_feature (61)..(62): /note="This region represents a CpG dinucleotide"
  misc_feature (61)..(61): /note="Nucleotide may be methylated to form 5-methylcytosine"
tgccagttttcttttggcaatgtctattggtgatactaatcttgaccaatttttgccgagcgtctccactgctcagaaagagactagcagccctgacatccgggggccatgccttagggtgc

SEQ ID NO: 11215 - DNA, 122 bp, Homo sapiens
  misc_feature (61)..(62): /note="This region represents a CpG dinucleotide"
  misc_feature (61)..(61): /note="Nucleotide may be methylated to form 5-methylcytosine"
gtgtgtgtgtgtgtatttttttcttttaatccagtcttccattgcctgacattgattccacgacttcacctttgtgtgtagtgctgtgataaacatatcagtataggttttttaaaaaccat

SEQ ID NO: 11216 - DNA, 122 bp, Homo sapiens
  misc_feature (61)..(62): /note="This region represents a CpG dinucleotide"
  misc_feature (61)..(61): /note="Nucleotide may be methylated to form 5-methylcytosine"
agggctgagacagtgaggctggtgtggcaacggtgctgccctgagcccctgatctggctccgacactcactagccgtgggaccccaggcaagtcactgagcctgggctggattttctcatct

SEQ ID NO: 11217 - DNA, 122 bp, Homo sapiens
  misc_feature (61)..(62): /note="This region represents a CpG dinucleotide"
  misc_feature (61)..(61): /note="Nucleotide may be methylated to form 5-methylcytosine"
gaattatttggtgccattgagttccttattgtttccctctgacctagatttctgggtgtgcgccagtaacacgactgtgattgttgctgctttataacattgtctgtggtcagtccaaacaa

SEQ ID NO: 11218 - DNA, 122 bp, Homo sapiens
  misc_feature (61)..(62): /note="This region represents a CpG dinucleotide"
  misc_feature (61)..(61): /note="Nucleotide may be methylated to form 5-methylcytosine"
tcctcagcatcaaaagctgtggcactacagctttttctctggattgcagcttgatatccccgagtgtgtttgacactatataagtgtatacacagcatggtgtcacatggttcttagagtca

SEQ ID NO: 11219 - DNA, 122 bp, Homo sapiens
  misc_feature (61)..(62): /note="This region represents a CpG dinucleotide"
  misc_feature (61)..(61): /note="Nucleotide may be methylated to form 5-methylcytosine"
aatggagtccaaaggaagtctatgagcagggttaaagttatgctggaagtcaggaaccaccggaacaggttgggaaaagagcagaaagttgaaactgttaagagctcatggttagtgtcctg

SEQ ID NO: 11220 - DNA, 122 bp, Homo sapiens
  misc_feature (61)..(62): /note="This region represents a CpG dinucleotide"
  misc_feature (61)..(61): /note="Nucleotide may be methylated to form 5-methylcytosine"
accatcccctgtgccctgataaatcaaccaacagttgttttggtagccccagataagcagcgggaagagctgacttcctcttagaaaatgactcctttgtatttctggcaaaacagcttggg

SEQ ID NO: 11221 - DNA, 122 bp, Homo sapiens
  misc_feature (61)..(62): /note="This region represents a CpG dinucleotide"
  misc_feature (61)..(61): /note="Nucleotide may be methylated to form 5-methylcytosine"
aatgtcctgtacctgcttgacaccatgactcagtaagcaatctcaaatgaaaattaataccgtctatagtataatcttagttataagtaacagctgatcgtgtttagaaaatgaaaacctca

SEQ ID NO: 11222 - DNA, 122 bp, Homo sapiens
  misc_feature (61)..(62): /note="This region represents a CpG dinucleotide"
  misc_feature (61)..(61): /note="Nucleotide may be methylated to form 5-methylcytosine"
ggtatgtcccacaagtcaaagataaagttaccacaatcttaaagccaggttcaagcatggcgtaatgacaaatcacagtgatttgtggaatggaaaatgcttccatcggggagttgggctgc

SEQ ID NO: 11223 - DNA, 122 bp, Homo sapiens
  misc_feature (61)..(62): /note="This region represents a CpG dinucleotide"
  misc_feature (61)..(61): /note="Nucleotide may be methylated to form 5-methylcytosine"
tcctagggcctgttttccagaaagaaaatactccactcctcaaatacagaaatctaataacgtaaatgatttttgtgttggcatttcatttcaggaaggagtaaacagtgagaacacacagt

SEQ ID NO: 11224 - DNA, 122 bp, Homo sapiens
  misc_feature (61)..(62): /note="This region represents a CpG dinucleotide"
  misc_feature (61)..(61): /note="Nucleotide may be methylated to form 5-methylcytosine"
ataccttacaataattggcactattaaaaattttatgatgcccaagggaagttagagccccgttgtgccacttgccattgttgaaaatgtttgtgttgattatgtatctggacttagctgat

SEQ ID NO: 11225 - DNA, 122 bp, Homo sapiens
  misc_feature (61)..(62): /note="This region represents a CpG dinucleotide"
  misc_feature (61)..(61): /note="Nucleotide may be methylated to form 5-methylcytosine"
aagtcagaaatgcatttaataccccaataaacccatcataaagtcaaaaaactgttaagtcgaggtatggtaacttggggattatttgtacttgttagatcatcaaattcagagtcactatc

SEQ ID NO: 11226 - DNA, 122 bp, Homo sapiens
  misc_feature (61)..(62): /note="This region represents a CpG dinucleotide"
  misc_feature (61)..(61): /note="Nucleotide may be methylated to form 5-methylcytosine"
ttctaattgagcctttttgcatagttaccagttacccgtatctgacttcaagtctttagccgtatacctacatggttccatagttatcaatgtttatttacaatttaatattcttctttagc

SEQ ID NO: 11227 - DNA, 122 bp, Homo sapiens
  misc_feature (61)..(62): /note="This region represents a CpG dinucleotide"
  misc_feature (61)..(61): /note="Nucleotide may be methylated to form 5-methylcytosine"
aaagctaaatgagtatgcaataaagctttgagaaatggaaaagaaaatctatgaggaaaacgtcagcttgcttatccagggaatgagcaggacttaattctcatgccggcatggggctgccg

SEQ ID NO: 11228 - DNA, 122 bp, Homo sapiens
  misc_feature (61)..(62): /note="This region represents a CpG dinucleotide"
  misc_feature (61)..(61): /note="Nucleotide may be methylated to form 5-methylcytosine"
cattagcctaaatacttctgtcttagtcagctcagactgtgcaacttttataaacaacatcgattcattgcttacagttctggaggttgggaagtccaaggtcaaggcactggcagattcgg

SEQ ID NO: 11229 - DNA, 122 bp, Homo sapiens
  misc_feature (61)..(62): /note="This region represents a CpG dinucleotide"
  misc_feature (61)..(61): /note="Nucleotide may be methylated to form 5-methylcytosine"
ctcagtgggcagagcctctgttttgttctcagctctttctcctctccacaggactcagcacgagtactgttggtctgactggtcccactcgatttgccctgaattgcattagctgggaacag

SEQ ID NO: 11230 - DNA, 122 bp, Homo sapiens
  misc_feature (61)..(62): /note="This region represents a CpG dinucleotide"
  misc_feature (61)..(61): /note="Nucleotide may be methylated to form 5-methylcytosine"
actaagagagttgggagttgagcattgtgcctcatgatagactcaggaatgtagaagtctcggtttctactcagcctttgctggaatggatgggggtagggtaaagttttttctgagtggtt

SEQ ID NO: 11231 - DNA, 122 bp, Homo sapiens
  misc_feature (61)..(62): /note="This region represents a CpG dinucleotide"
  misc_feature (61)..(61): /note="Nucleotide may be methylated to form 5-methylcytosine"
ttctgttgagattggacaggcgtggctcagttcccttcttttatttaccctgatggagagcgtgttctcaatgtttccatccctcctcagggatgtgctgtctaatgagtataattgggatt

SEQ ID NO: 11232 - DNA, 122 bp, Homo sapiens
  misc_feature (61)..(62): /note="This region represents a CpG dinucleotide"
  misc_feature (61)..(61): /note="Nucleotide may be methylated to form 5-methylcytosine"
caggaggggtggtgcaaacacaagatgacacacctcggatgcaccaaacctttaaagtatcgtttttctagctgattgcttcactcttaataccaaagaacaaataagcaggagatttacat

SEQ ID NO: 11233 - DNA, 122 bp, Homo sapiens
  misc_feature (61)..(62): /note="This region represents a CpG dinucleotide"
  misc_feature (61)..(61): /note="Nucleotide may be methylated to form 5-methylcytosine"
tttttaaagacaaggtcttgctctgtcatccagctggagtgcagtggtgtgatgacagctcgcagatcacagcaacctcgaccacctggggtcatgggattctcctgcctcagccttccaag

SEQ ID NO: 11234 - DNA, 122 bp, Homo sapiens
  misc_feature (61)..(62): /note="This region represents a CpG dinucleotide"
  misc_feature (61)..(61): /note="Nucleotide may be methylated to form 5-methylcytosine"
attcctgaattcattccattacaccatattgctgtgcgtgtgtgtgcacgtgtgtgcttgcgcccgcatgtatgttgaatgggagtgtgggcaggtcagctagaacatcagctgcaattcac

SEQ ID NO: 11235 - DNA, 122 bp, Homo sapiens
  misc_feature (61)..(62): /note="This region represents a CpG dinucleotide"
  misc_feature (61)..(61): /note="Nucleotide may be methylated to form 5-methylcytosine"
agctctcagagagttttagggttactcttacttaatgcagccattaatccccatgaataccgtacagcaaactaacaaatacattgtgtaaaagtagtcaagcccaaacagaccatccaaac

SEQ ID NO: 11236 - DNA, 122 bp, Homo sapiens
  misc_feature (61)..(62): /note="This region represents a CpG dinucleotide"
  misc_feature (61)..(61): /note="Nucleotide may be methylated to form 5-methylcytosine"
cctaactttttttcataattgactatttcagttaatagccctaggcttcaagaaaggctgcgcatcttggaagtattagggcatgagtcatgagtcttgattcttccaaataaaatatggta

SEQ ID NO: 11237 - DNA, 122 bp, Homo sapiens
  misc_feature (61)..(62): /note="This region represents a CpG dinucleotide"
  misc_feature (61)..(61): /note="Nucleotide may be methylated to form 5-methylcytosine"
tgtcttcaagttgaaacaggtttcttgtctctaattaagaataagctttgaaactaaggtcggcagggaagtggattttctggtaaagcatgaaaacgaaacatctcccctaccagacaagg

SEQ ID NO: 11238 - DNA, 122 bp, Homo sapiens
  misc_feature (61)..(62): /note="This region represents a CpG dinucleotide"
  misc_feature (61)..(61): /note="Nucleotide may be methylated to form 5-methylcytosine"
gtgaagagcaaacccgcaatgaagtcagcactctgcttattaagtggaaaaagctgtgctcggcttattgaaatgttcattagacagatatatagagatgagaaggaggaagggagggcggc

SEQ ID NO: 11239 - DNA, 122 bp, Homo sapiens
  misc_feature (61)..(62): /note="This region represents a CpG dinucleotide"
  misc_feature (61)..(61): /note="Nucleotide may be methylated to form 5-methylcytosine"
tgactccgcacaccggggtgacttctcaggttctcggggtggcagctgcagtgatgacaccgcttcctggtggtcacgccgcgggcaggacgcgggaggccaggtccgtgcatcccgcgtgt

SEQ ID NO: 11240 - DNA, 122 bp, Homo sapiens
  misc_feature (61)..(62): /note="This region represents a CpG dinucleotide"
  misc_feature (61)..(61): /note="Nucleotide may be methylated to form 5-methylcytosine"
cctcatttttttaaccataattagcccatgccttattgagctcacattgtttccatttttcgctctgacggcccaggtgtcaaggaagagctgtacatttgtcagttttgctgggtcctgga

SEQ ID NO: 11241 - DNA, 122 bp, Homo sapiens
  misc_feature (61)..(62): /note="This region represents a CpG dinucleotide"
  misc_feature (61)..(61): /note="Nucleotide may be methylated to form 5-methylcytosine"
ttaaggcaggagctgtttcacttctgtggttttttagctggctcctgcaggccatctggacgtatatatgcaggttacgggggttacaatggctgagcttcggctcagaggcctgacaatat

SEQ ID NO: 11242 - DNA, 122 bp, Homo sapiens
  misc_feature (61)..(62): /note="This region represents a CpG dinucleotide"
  misc_feature (61)..(61): /note="Nucleotide may be methylated to form 5-methylcytosine"
aggaattggagcctcagagaagtgaagggatctgacaaagatctcacagctggtaaatcacggagctggagtccatgtgactccagagcttgggctgtttaaccactaatgccctatcgtat

SEQ ID NO: 11243 - DNA, 122 bp, Homo sapiens
  misc_feature (61)..(62): /note="This region represents a CpG dinucleotide"
  misc_feature (61)..(61): /note="Nucleotide may be methylated to form 5-methylcytosine"
ctgagctagtgcaaaacaagtgtccatagtaatcctgtggcagcccaatgctgccttcgtcgctacctctccacccctcaaatcaccatccattggcagtagcctctgccacccaggttcaa

SEQ ID NO: 11244 - DNA, 122 bp, Homo sapiens
  misc_feature (61)..(62): /note="This region represents a CpG dinucleotide"
  misc_feature (61)..(61): /note="Nucleotide may be methylated to form 5-methylcytosine"
aaaaaaagggagaaatgtctaatcatctccggaattgaatggatgaatcatcctttgtttcgccagttccctctagatggacatttaggttctctctttctttctttttttgttttaaatag

SEQ ID NO: 11245 - DNA, 122 bp, Homo sapiens
  misc_feature (61)..(62): /note="This region represents a CpG dinucleotide"
  misc_feature (61)..(61): /note="Nucleotide may be methylated to form 5-methylcytosine"
gaccatgttattttcctgttggacatacactgtctcacaggacatcaacagcagacagggcggtgctagtctatgataaggtaagacaaaaaacggctgtgtgcaaccaccaaaataccact

SEQ ID NO: 11246 - DNA, 122 bp, Homo sapiens
  misc_feature (61)..(62): /note="This region represents a CpG dinucleotide"
  misc_feature (61)..(61): /note="Nucleotide may be methylated to form 5-methylcytosine"
tttttttttttttttttttggaacaacccgcttttgcctccgattggccgctgccagtcacgcggcccgcgggcgggacggaattggagagctttcacttgctgacctggcgtcaccaccgc

SEQ ID NO: 11247 - DNA, 122 bp, Homo sapiens
  misc_feature (61)..(62): /note="This region represents a CpG dinucleotide"
  misc_feature (61)..(61): /note="Nucleotide may be methylated to form 5-methylcytosine"
tctacttcctgaagatcttctttcttccttttgcttcctttattctttagcttgcctttccgtttcatatcactctccaaaagagaagaatcttttgaatcctggaaagaaaataaatttaa

SEQ ID NO: 11248 - DNA, 122 bp, Homo sapiens
  misc_feature (61)..(62): /note="This region represents a CpG dinucleotide"
  misc_feature (61)..(61): /note="Nucleotide may be methylated to form 5-methylcytosine"
gggaaaggggtgtgatctgtctttcctgtctgcctcctctctgcttttttcatgtatacacgtaagggaaagatgtaatagtctctgttttctatgtacagggatatttagatatgcaaatg

SEQ ID NO: 11249 - DNA, 122 bp, Homo sapiens
  misc_feature (61)..(62): /note="This region represents a CpG dinucleotide"
  misc_feature (61)..(61): /note="Nucleotide may be methylated to form 5-methylcytosine"
tgggtattggttgttgggactggccaaaccagttacctgactggactgtcaggactggcccgcagtgggtcacctgacattattggctgttgggattagccaaaccggttacctgactggac

SEQ ID NO: 11250 - DNA, 122 bp, Homo sapiens
  misc_feature (61)..(62): /note="This region represents a CpG dinucleotide"
  misc_feature (61)..(61): /note="Nucleotide may be methylated to form 5-methylcytosine"
gggaataagggccctaaggactttggattcttctacatggaaaaggtgcccttgctggggcgctagtaaagatttttttaaatctgaataattagaagggcccattaggcattttttaacaa

SEQ ID NO: 11251 - DNA, 122 bp, Homo sapiens
  misc_feature (61)..(62): /note="This region represents a CpG dinucleotide"
  misc_feature (61)..(61): /note="Nucleotide may be methylated to form 5-methylcytosine"
atgctgaggcaggatgattgcttgagcctaggaggcagaggttgcagtgacctgtgatggcgccactgcagtccaacctgggcgacgaaaagaacctctgtctcaaaattaaaaaaaaaaaa

SEQ ID NO: 11252 - DNA, 122 bp, Homo sapiens
  misc_feature (61)..(62): /note="This region represents a CpG dinucleotide"
  misc_feature (61)..(61): /note="Nucleotide may be methylated to form 5-methylcytosine"
gtcacctttaaagtcaattcctgtggttgaaatgaggactatatgcatctgtcctgcttccggctccaaccagaagtggtaatgaggagagacagacggatgcacaatgatagtcttcacaa

SEQ ID NO: 11253 - DNA, 122 bp, Homo sapiens
  misc_feature (61)..(62): /note="This region represents a CpG dinucleotide"
  misc_feature (61)..(61): /note="Nucleotide may be methylated to form 5-methylcytosine"
gacttttggccctggcatccttgtgactttcaacccctctggggttgtcagaggatttgccgctatgttgcccgagatggggttagagacagcctgttgggtggccagcgttccttgtgtgg

SEQ ID NO: 11254 - DNA, 122 bp, Homo sapiens
  misc_feature (61)..(62): /note="This region represents a CpG dinucleotide"
  misc_feature (61)..(61): /note="Nucleotide may be methylated to form 5-methylcytosine"
gtgctccataaacacctattgaacaaatggatgattctgcagcccaagttcttcccactacgctctactattacaaaactgttatccctctgtctggtacacagttctgataccaaggctga

SEQ ID NO: 11255 - DNA, 122 bp, Homo sapiens
  misc_feature (61)..(62): /note="This region represents a CpG dinucleotide"
  misc_feature (61)..(61): /note="Nucleotide may be methylated to form 5-methylcytosine"
acaccctgaacagcatcatcaagcctcagtaatgtcttctgattacacatgtttgatctgcgtgaattccatttctctcttgccttcttcatcctagtaactacagcctctccccgataaca

SEQ ID NO: 11256 - DNA, 122 bp, Homo sapiens
  misc_feature (61)..(62): /note="This region represents a CpG dinucleotide"
  misc_feature (61)..(61): /note="Nucleotide may be methylated to form 5-methylcytosine"
aggtgacaggcgtgtccccagctgccgcagtgacagtccagggtgctgaccttgctgtgacgggggcagtcctgacagctcacacttggccctggaaagttgaatcacctggtcctaatctc

SEQ ID NO: 11257 - DNA, 122 bp, Homo sapiens
  misc_feature (61)..(62): /note="This region represents a CpG dinucleotide"
  misc_feature (61)..(61): /note="Nucleotide may be methylated to form 5-methylcytosine"
tcaccattttactgcctgaaatcatctcagataccactagtattatgtgaactaccctttcggaaaattgattggatcaacctctttgtcttgtgtttgtggaaagctgtggtccagaactg

SEQ ID NO: 11258 - DNA, 122 bp, Homo sapiens
  misc_feature (61)..(62): /note="This region represents a CpG dinucleotide"
  misc_feature (61)..(61): /note="Nucleotide may be methylated to form 5-methylcytosine"
agcttttctctggaacttgacacagcaatagatttcctgtatgaagccctgaagcaaagacggaggaagcagattgattgaattatctctcagctcattggttctcctctcacttctgctgt

SEQ ID NO: 11259 - DNA, 122 bp, Homo sapiens
  misc_feature (61)..(62): /note="This region represents a CpG dinucleotide"
  misc_feature (61)..(61): /note="Nucleotide may be methylated to form 5-methylcytosine"
cagaataatttcatgcctagattcttcctctacctgtttcctcatttagggggcccttctcggtttaattgtctccagctgatgatcaattaagcaaactgattgcagttgcatttgatggc

SEQ ID NO: 11260 - DNA, 122 bp, Homo sapiens
  misc_feature (61)..(62): /note="This region represents a CpG dinucleotide"
  misc_feature (61)..(61): /note="Nucleotide may be methylated to form 5-methylcytosine"
ggcctagagaagtgaagtaacttaccccagggctaagtgggaagtggctcaaaagcaagccggtgttctaatccaaggtgatgagaagacctgccccagatagctgtgtttgtttttgatct

SEQ ID NO: 11261 - DNA, 122 bp, Homo sapiens
  misc_feature (61)..(62): /note="This region represents a CpG dinucleotide"
  misc_feature (61)..(61): /note="Nucleotide may be methylated to form 5-methylcytosine"
ataaactagaagagagtaaaaaatattactctgtggtgggagaacagggaattagggtaacggaggttcagcaggtgcagccagttcacataagcaaaagaacagcaggtccagccagtttg

SEQ ID NO: 11262 - DNA, 122 bp, Homo sapiens
  misc_feature (61)..(62): /note="This region represents a CpG dinucleotide"
  misc_feature (61)..(61): /note="Nucleotide may be methylated to form 5-methylcytosine"
agtaagtaaatgacaagatccctattcaacagatctcctggactctcattttgagaatcacgtttctctccgcgtgagttgcaccaaaccattcagctattattaagtgtctcattgtctgt

SEQ ID NO: 11263 - DNA, 122 bp, Homo sapiens
  misc_feature (61)..(62): /note="This region represents a CpG dinucleotide"
  misc_feature (61)..(61): /note="Nucleotide may be methylated to form 5-methylcytosine"
tgcaattacattccacttctccagagttcctggagctcagcactggagcctggaatgattcgtcatgactaggtaatatcactcatatttagtaactatattggcatgcgagtttcctcttg

SEQ ID NO: 11264 - DNA, 122 bp, Homo sapiens
  misc_feature (61)..(62): /note="This region represents a CpG dinucleotide"
  misc_feature (61)..(61): /note="Nucleotide may be methylated to form 5-methylcytosine"
ttacgttctttaatgtcctggttatcttctccctaccgcttttatctgaacctttcctttcgtctctactaacttgtctctctgcagctcaatctggattatatttccaacagtttgtcctc

SEQ ID NO: 11265 - DNA, 122 bp, Homo sapiens
  misc_feature (61)..(62): /note="This region represents a CpG dinucleotide"
  misc_feature (61)..(61): /note="Nucleotide may be methylated to form 5-methylcytosine"
gccttcctacatccaggaaagggaggaaagccctgtccctgcctgagcctgtgaacccagcgaagaggcagtcgggctgattttacatgcacctctgcacttagagggatcagggcgttctc

SEQ ID NO: 11266 - DNA, 122 bp, Homo sapiens
  misc_feature (61)..(62): /note="This region represents a CpG dinucleotide"
  misc_feature (61)..(61): /note="Nucleotide may be methylated to form 5-methylcytosine"
ggtggagggaaacagcaatactcatttatggagtctgcagtctgccaaacacagttcatgcgttatctcaatgcatgagaatccttgcaactaccctatgagtgcgttgttctccccatttc

SEQ ID NO: 11267 - DNA, 122 bp, Homo sapiens
  misc_feature (61)..(62): /note="This region represents a CpG dinucleotide"
  misc_feature (61)..(61): /note="Nucleotide may be methylated to form 5-methylcytosine"
agcaaacaaaacagatgtatagattagagtgtggagaaaacagaggaaaacttgcagttacgaagactggcaacttggctttactaagttttcagactggcaggaagtcaaacctattaggc

SEQ ID NO: 11268 - DNA, 122 bp, Homo sapiens
  misc_feature (61)..(62): /note="This region represents a CpG dinucleotide"
  misc_feature (61)..(61): /note="Nucleotide may be methylated to form 5-methylcytosine"
ttttgggagttttcaagctcatgaatcaaaacatggttttcctcttgcgcttttagtcaccgtacaattctttccgagtgcttctgagtcacacaccatccgacagaagtggggacaaggca

SEQ ID NO: 11269 - DNA, 122 bp, Homo sapiens
  misc_feature (61)..(62): /note="This region represents a CpG dinucleotide"
  misc_feature (61)..(61): /note="Nucleotide may be methylated to form 5-methylcytosine"
ttaagagctcgccagatgatttctgatgcatcaccatgactgagactcactgtcaagacacgtgtttgacagaacaactagccttagacttattgaaatagcaaggttttgtctggttacaa

SEQ ID NO: 11270 - DNA, 122 bp, Homo sapiens
  misc_feature (61)..(62): /note="This region represents a CpG dinucleotide"
  misc_feature (61)..(61): /note="Nucleotide may be methylated to form 5-methylcytosine"
agtagagactgttttccatcagcatttgtaacatgactcattatttcacaatttctcatccgcccttcctctattcctaccctcaaatgctctgtggtagaaaacttcgaccttgctgagag

SEQ ID NO: 11271 - DNA, 122 bp, Homo sapiens
  misc_feature (61)..(62): /note="This region represents a CpG dinucleotide"
  misc_feature (61)..(61): /note="Nucleotide may be methylated to form 5-methylcytosine"
ggcaagccatccaacctctctgagcctcaatgtttctcagctgtcaaatggagaattcatcgtatcctcatggggttattgtcaggatgtgcgaaataggatggtgggttaaaagacgttgt

SEQ ID NO: 11272 - DNA, 122 bp, Homo sapiens
  misc_feature (61)..(62): /note="This region represents a CpG dinucleotide"
  misc_feature (61)..(61): /note="Nucleotide may be methylated to form 5-methylcytosine"
cacccccatcacctggcacccctcctctctatgcctgggaactcctggggtccagatccacgagaaaggagcccacagagaagaaagcagcaacttctaccagcctaaggcccacctccaag

SEQ ID NO: 11273 - DNA, 122 bp, Homo sapiens
  misc_feature (61)..(62): /note="This region represents a CpG dinucleotide"
  misc_feature (61)..(61): /note="Nucleotide may be methylated to form 5-methylcytosine"
gaaatagaatcacaaccactaggggcaaaaacccatggcttttatgtcatcattgtgttccgttctgttgcatactttgtgtgtgggtgtgtgttttatacttttttccctttaaccgttta

SEQ ID NO: 11274 - DNA, 122 bp, Homo sapiens
  misc_feature (61)..(62): /note="This region represents a CpG dinucleotide"
  misc_feature (61)..(61): /note="Nucleotide may be methylated to form 5-methylcytosine"
ctttcaatttattttcacgtggcactcaaaatgacctgtgaaactctccagtggccagctcgttccaaaaaaagaccaatcgctcagtgaggtgcacagtctggaccatcacctctctgact

SEQ ID NO: 11275 - DNA, 122 bp, Homo sapiens
  misc_feature (61)..(62): /note="This region represents a CpG dinucleotide"
  misc_feature (61)..(61): /note="Nucleotide may be methylated to form 5-methylcytosine"
tctccctttctgtctttcacattaggcttagagcctatcagaaatccaggataatctcatcgtgatatatttaatttgattatacttacaaatcacatcaaatgtaattacaaaataattta

SEQ ID NO: 11276 - DNA, 122 bp, Homo sapiens
  misc_feature (61)..(62): /note="This region represents a CpG dinucleotide"
  misc_feature (61)..(61): /note="Nucleotide may be methylated to form 5-methylcytosine"
ttccaactgatactggagttgtttgctttgaacaatgtgactttgtttctttgtcagacacggccagcagcatagctgttgcttaggaaaggaacaaacacattaggagcttgctaaaagtc

SEQ ID NO: 11277 - DNA, 122 bp, Homo sapiens
  misc_feature (61)..(62): /note="This region represents a CpG dinucleotide"
  misc_feature (61)..(61): /note="Nucleotide may be methylated to form 5-methylcytosine"
tggtatgacaccctctctcagcagggaccctgctgacagtgactacgcgctggtggctggcgtctcctgagttccttgtactcagcctgatcatgaggaactgactcagagaaatgagagtc

SEQ ID NO: 11278 - DNA, 122 bp, Homo sapiens
  misc_feature (61)..(62): /note="This region represents a CpG dinucleotide"
  misc_feature (61)..(61): /note="Nucleotide may be methylated to form 5-methylcytosine"
ttggcaagtactctgtgttctctcatttccttatctttgtgtatgctgtattgcagcacacgtcacatggagatgggcgtcaagaagttacctctcgtaccagccgctcaggagctcggtgt

SEQ ID NO: 11279 - DNA, 122 bp, Homo sapiens
  misc_feature (61)..(62): /note="This region represents a CpG dinucleotide"
  misc_feature (61)..(61): /note="Nucleotide may be methylated to form 5-methylcytosine"
gaggaagtgcgggctcccggcatgcctcgcatccggccccagccctgagccacctcaggccgcccctggccagccctgaggcccgcccctcagcccaccactgtcagctggagcaggccggc

SEQ ID NO: 11280 - DNA, 122 bp, Homo sapiens
  misc_feature (61)..(62): /note="This region represents a CpG dinucleotide"
  misc_feature (61)..(61): /note="Nucleotide may be methylated to form 5-methylcytosine"
gataaaggtgggactgttagctttacaagaagaggaagagaaacctgagcttagtgccctcgacatgtgatgccctacacagccttgggactctgcagtctccaccagcaagaagggcctca

SEQ ID NO: 11281 - DNA, 122 bp, Homo sapiens
  misc_feature (61)..(62): /note="This region represents a CpG dinucleotide"
  misc_feature (61)..(61): /note="Nucleotide may be methylated to form 5-methylcytosine"
tcaaagaggcaagaaggcaagtcctgccagatctgattgtgcagacccaaaggatctgatcgcccgtcactaaggctactaatcaaatttccatccaatatgctcacgcaggatttcctgat

SEQ ID NO: 11282 - DNA, 122 bp, Homo sapiens
  misc_feature (61)..(62): /note="This region represents a CpG dinucleotide"
  misc_feature (61)..(61): /note="Nucleotide may be methylated to form 5-methylcytosine"
cagggggcgccagtcacccagctaggaagtgaatggcgtcccttgctgtgatgcagtccacgacctgcacaccctcacatggcagcctgggcaggggcagatacactcacttctccatggcc

SEQ ID NO: 11283 - DNA, 122 bp, Homo sapiens
  misc_feature (61)..(62): /note="This region represents a CpG dinucleotide"
  misc_feature (61)..(61): /note="Nucleotide may be methylated to form 5-methylcytosine"
acttagcacagtgccaggaactgagcaggtactcaacagatgttttctaggtttctcaaacgattaatcagaagactgacaaagtacctgcagagacagtgttctctcacttttgtcccttc

SEQ ID NO: 11284 - DNA, 122 bp, Homo sapiens
  misc_feature (61)..(62): /note="This region represents a CpG dinucleotide"
  misc_feature (61)..(61): /note="Nucleotide may be methylated to form 5-methylcytosine"
tttaaaaagtttgaggctagcagagtttggttcatgaggtttaaggaaagaagccatctccgtcacatgaaagtgccaagtgaagcagcaagtgccgctgtagaagctgcagcaatttatct

SEQ ID NO: 11285 - DNA, 122 bp, Homo sapiens
  misc_feature (61)..(62): /note="This region represents a CpG dinucleotide"
  misc_feature (61)..(61): /note="Nucleotide may be methylated to form 5-methylcytosine"
cacattctttccttgtgcatatgctacatccgccaaggtagactgcatgctgggccataacgcacattttgataaatgtgaaaggattgagatcataccaggaaaaacaaaggaagaagtca

SEQ ID NO: 11286 - DNA, 122 bp, Homo sapiens
  misc_feature (61)..(62): /note="This region represents a CpG dinucleotide"
  misc_feature (61)..(61): /note="Nucleotide may be methylated to form 5-methylcytosine"
ttttggagaagttactgaaagcaaagcactccactaagcacttcatatatcttaactattcgttacattggtcctgtattcttatttcacagatgaggaacatcttgaggcttagatgatgc

SEQ ID NO: 11287 - DNA, 122 bp, Homo sapiens
  misc_feature (61)..(62): /note="This region represents a CpG dinucleotide"
  misc_feature (61)..(61): /note="Nucleotide may be methylated to form 5-methylcytosine"
ccagggatgagtgcttttgtttgggtagttgctttaggctgcgggagttccagaggacagcgtgtgtaggagggagggagggagggaggtggaactggcgcctgcagtggggccttcctgaa

SEQ ID NO: 11288 - DNA, 122 bp, Homo sapiens
  misc_feature (61)..(62): /note="This region represents a CpG dinucleotide"
  misc_feature (61)..(61): /note="Nucleotide may be methylated to form 5-methylcytosine"
cgaaatacttctcttgaaatctttcagcttaaataatgaacctttagtcacacagtcactcgtatggctatttttctttggtttaaggcggtcatcaccaaccagtgtgtgtttgcactctg

SEQ ID NO: 11289 - DNA, 122 bp, Homo sapiens
  misc_feature (61)..(62): /note="This region represents a CpG dinucleotide"
  misc_feature (61)..(61): /note="Nucleotide may be methylated to form 5-methylcytosine"
gttttacttccttcccaatgtggatgccttttacttccctttcttgcctaattgttctggcgagaacgtccagtgcactgctgatagaagtgaccagagcaggcatccttgggttgtttctg

SEQ ID NO: 11290 - DNA, 122 bp, Homo sapiens
  misc_feature (61)..(62): /note="This region represents a CpG dinucleotide"
  misc_feature (61)..(61): /note="Nucleotide may be methylated to form 5-methylcytosine"
gcgtcggcactcttcctctgtccacagagctggtaaagacagaattatgaactcttctggcgttgtcccagcccacttcttggagcctttatgagagaagaagtttggcaactcacctccca

SEQ ID NO: 11291 - DNA, 122 bp, Homo sapiens
  misc_feature (61)..(62): /note="This region represents a CpG dinucleotide"
  misc_feature (61)..(61): /note="Nucleotide may be methylated to form 5-methylcytosine"
ttgaagagcatgtaatgaagaaactatgtgtagagtgtgggcaggtccacgtgcatgacacggtatgactcccagggatcagcaacagtggggagtcattactactctggggctgaagggca

SEQ ID NO: 11292 - DNA, 122 bp, Homo sapiens
  misc_feature (61)..(62): /note="This region represents a CpG dinucleotide"
  misc_feature (61)..(61): /note="Nucleotide may be methylated to form 5-methylcytosine"
ctctcttggtcttagctgaactctgcggcatgatcttaagctttggctatttgaggtaaacgaactctgtggtcacgcctgccttggctgaaacaatctgtcaatatggacgggcatggagg

SEQ ID NO: 11293 - DNA, 122 bp, Homo sapiens
  misc_feature (61)..(62): /note="This region represents a CpG dinucleotide"
  misc_feature (61)..(61): /note="Nucleotide may be methylated to form 5-methylcytosine"
ttgttgaaactaaatgaaacctgtgtcccttagtaactgtctaaccagaagcagccactgcggattaagcagaaaacaagaagtgtaacatgccgttctagttcaacacttcctcgttggtt

SEQ ID NO: 11294 - DNA, 122 bp, Homo sapiens
  misc_feature (61)..(62): /note="This region represents a CpG dinucleotide"
  misc_feature (61)..(61): /note="Nucleotide may be methylated to form 5-methylcytosine"
ttaataatcttgtggatgcagctgacatgtgagtcttgagagtttctgactcttccatagcgaattctaaagggaaggaaattctgtgagggcaggaggtgaggctttatcagagactatga

SEQ ID NO: 11295 - DNA, 122 bp, Homo sapiens
  misc_feature (61)..(62): /note="This region represents a CpG dinucleotide"
  misc_feature (61)..(61): /note="Nucleotide may be methylated to form 5-methylcytosine"
tagtatccctcttaggagaagcaagagagatttaggattgcttatttattgcagaacccacgtcttcttgcagattgcaaagccaattctgaaactgcctttgcaaaaattaaaacagtgag

SEQ ID NO: 11296 - DNA, 122 bp, Homo sapiens
  misc_feature (61)..(62): /note="This region represents a CpG dinucleotide"
  misc_feature (61)..(61): /note="Nucleotide may be methylated to form 5-methylcytosine"
catacagtaaatcatctgcagcttacaccaatcgtgtgaatattttacacatggggaaagcgaagctcagagaggttgaattacaggccagagcccacacagctggttagttgcagagccag

SEQ ID NO: 11297 - DNA, 122 bp, Homo sapiens
  misc_feature (61)..(62): /note="This region represents a CpG dinucleotide"
  misc_feature (61)..(61): /note="Nucleotide may be methylated to form 5-methylcytosine"
gtgcacattttctaaactgacatcttctacatcactcatgagcttgatcttattggcagccgtagctgcacatcttcgagtaatcctcaggagacctgttctggcttttgatgatttcttaa

SEQ ID NO: 11298 - DNA, 122 bp, Homo sapiens
  misc_feature (61)..(62): /note="This region represents a CpG dinucleotide"
  misc_feature (61)..(61): /note="Nucleotide may be methylated to form 5-methylcytosine"
caagccaatgcagaatgccatctggaggatgcatgcccaagtcatgcaacagcctcctgtcgggatgtatcaggaactttgcaacagaacaactaataacatcttaagctccatttgtctag

SEQ ID NO: 11299 - DNA, 122 bp, Homo sapiens
  misc_feature (61)..(62): /note="This region represents a CpG dinucleotide"
  misc_feature (61)..(61): /note="Nucleotide may be methylated to form 5-methylcytosine"
ccagtgtggggagtagacaatctgggtggtggacaacagctgctggcttccaccctgacacggctgcatttcattagtgggtaaactgattgctcagagtatgtttatgtgtgggtgtggtt

SEQ ID NO: 11300 - DNA, 122 bp, Homo sapiens
  misc_feature (61)..(62): /note="This region represents a CpG dinucleotide"
  misc_feature (61)..(61): /note="Nucleotide may be methylated to form 5-methylcytosine"
ctgtttgtattctcttaccacaagttatctgctgttcctactttcacttaagctttgtatcgtactctgtgagaaatgtttgagctggctggacacatttcctgaaatcatttctctagtct

SEQ ID NO: 11301 - DNA, 122 bp, Homo sapiens
  misc_feature (61)..(62): /note="This region represents a CpG dinucleotide"
  misc_feature (61)..(61): /note="Nucleotide may be methylated to form 5-methylcytosine"
atgagaggtgaaataagtacacaaaacactgccttgtgccacctcagctgggaatgtgcacgtcaggagactcagatgttttcactgccctgtccatgtgaatgtctgagattaacagccaa

SEQ ID NO: 11302 - DNA, 122 bp, Homo sapiens
  misc_feature (61)..(62): /note="This region represents a CpG dinucleotide"
  misc_feature (61)..(61): /note="Nucleotide may be methylated to form 5-methylcytosine"
cattttgtctccctcggaagttttcaagttctccagtgaatcatttaggagcagaagcagcgtaattcaacagatgccttgggaggaaaatatgaggcacaaaagtaaacaggaaagaacaa

SEQ ID NO: 11303 - DNA, 122 bp, Homo sapiens
  misc_feature (61)..(62): /note="This region represents a CpG dinucleotide"
  misc_feature (61)..(61): /note="Nucleotide may be methylated to form 5-methylcytosine"
ctagaaaatgtgtgaacttaaaacaactatgagtccctgagccacaatctctttctccttcgaggccagcttctcccgtggccttgcttctctctctctcactttgcccatgctgttcgctg

SEQ ID NO: 11304 - DNA, 122 bp, Homo sapiens
  misc_feature (61)..(62): /note="This region represents a CpG dinucleotide"
  misc_feature (61)..(61): /note="Nucleotide may be methylated to form 5-methylcytosine"
ctgcctcggcctcccaaagtgctgggattacaggcaagaaccaccacacccagcctgatacgtacattttcaattttacaggcctgtgtcactgtgcccagcacttctactttcttttaaaa

SEQ ID NO: 11305 - DNA, 122 bp, Homo sapiens
  misc_feature (61)..(62): /note="This region represents a CpG dinucleotide"
  misc_feature (61)..(61): /note="Nucleotide may be methylated to form 5-methylcytosine"
gagtaactgaatggagtacagaaggaacagaaagcaggttttggtgagttcagtcacgtacgtaagctgaaaatgttacaacaaatgtagacagctcttcaggaagttgggctgtgatgggg

SEQ ID NO: 11306 - DNA, 122 bp, Homo sapiens
  misc_feature (61)..(62): /note="This region represents a CpG dinucleotide"
  misc_feature (61)..(61): /note="Nucleotide may be methylated to form 5-methylcytosine"
actgctctcttcttcaaatccctgaagtgatcttgaaatagctgcttacaaaaatgtctacgtggttatgtagcactcagtctcaggctggtcatgataaagaacatttactagaaagctca

SEQ ID NO: 11307 - DNA, 122 bp, Homo sapiens
  misc_feature (61)..(62): /note="This region represents a CpG dinucleotide"
  misc_feature (61)..(61): /note="Nucleotide may be methylated to form 5-methylcytosine"
atttatctttctagtcctgctcactccctgctgtgcttgttcagccttaaaggctattagcggatttctcccaaccaccttccctgccctcagcacatacagagtgccagggcccttctggg

SEQ ID NO: 11308 - DNA, 122 bp, Homo sapiens
  misc_feature (61)..(62): /note="This region represents a CpG dinucleotide"
  misc_feature (61)..(61): /note="Nucleotide may be methylated to form 5-methylcytosine"
acctgagctctccgattccaaagcctgtacatttttcaggagcctcatgaggctgagccacgtcacactggcagcccacactctggaatgagtcagtccccagggagcagaacagcatccgt

SEQ ID NO: 11309 - DNA, 122 bp, Homo sapiens
  misc_feature (61)..(62): /note="This region represents a CpG dinucleotide"
  misc_feature (61)..(61): /note="Nucleotide may be methylated to form 5-methylcytosine"
aagagaaggtgagagtacacctgtgtaaatggagcaggattaatagatcaaaattccaggcggaggttcagtggaagagaaccttttagtttcaccagagatgtaagtccaacagtcaggaa

SEQ ID NO: 11310 - DNA, 122 bp, Homo sapiens
  misc_feature (61)..(62): /note="This region represents a CpG dinucleotide"
  misc_feature (61)..(61): /note="Nucleotide may be methylated to form 5-methylcytosine"
ctcagaccagtaaatgcaaacattagatagggtgcttactgtggactcatcactgctatccgtgactcacacacttcagtcttcacaacaaccttaggatgtaggtagttttattacactta

SEQ ID NO: 11311 - DNA, 122 bp, Homo sapiens
  misc_feature (61)..(62): /note="This region represents a CpG dinucleotide"
  misc_feature (61)..(61): /note="Nucleotide may be methylated to form 5-methylcytosine"
tggagtgatgaaaaatattttatctgaaaggctgggcaagaataactcccctttgtattacgtgtcaggtgatgttagttatcctaactctaccactggcagattgagttttttggtcacag

SEQ ID NO: 11312 - DNA, 122 bp, Homo sapiens
  misc_feature (61)..(62): /note="This region represents a CpG dinucleotide"
  misc_feature (61)..(61): /note="Nucleotide may be methylated to form 5-methylcytosine"
gtcccccattcctttcccaggtctgctcctggtttctgtgagccgcgctgttactgtgagcgcgctgcctctcaggaagtcttccttgtgaaaggtaactcgtgctgctggaaagaagctga

SEQ ID NO: 11313 - DNA, 122 bp, Homo sapiens
  misc_feature (61)..(62): /note="This region represents a CpG dinucleotide"
  misc_feature (61)..(61): /note="Nucleotide may be methylated to form 5-methylcytosine"
cacaatacagatatgacacccgcaatacagatatgacaccctcaatactgctatgacccccgcaatacagatatgacccccgcaatactgctatgacacccgcaatactgatatgacacccg

SEQ ID NO: 11314 - DNA, 122 bp, Homo sapiens
  misc_feature (61)..(62): /note="This region represents a CpG dinucleotide"
  misc_feature (61)..(61): /note="Nucleotide may be methylated to form 5-methylcytosine"
ctagcatacacattaggcacttgacctaatttaaaataatgattgcaaagaggactatgacgtagtggaaaggacatagcattagcagttaagaagcctgaattctaggcttagtctgccac

SEQ ID NO: 11315 - DNA, 122 bp, Homo sapiens
  misc_feature (61)..(62): /note="This region represents a CpG dinucleotide"
  misc_feature (61)..(61): /note="Nucleotide may be methylated to form 5-methylcytosine"
gccaatcatatttttctcagaatgaaggtgcaaaaattaaatcatgcatgcaaagcagttcgtaggtgctccatagtatgtggttagccttataatgcttacttaggatccgatgtaggaag

SEQ ID NO: 11316 - DNA, 122 bp, Homo sapiens
  misc_feature (61)..(62): /note="This region represents a CpG dinucleotide"
  misc_feature (61)..(61): /note="Nucleotide may be methylated to form 5-methylcytosine"
ctttgttttcttgatacagggtttcactctgtcaccctggctggagtgctattgcacaatcgtggctcactgcagccttgacctcctggactcaagcaatcctcctaccttactctcctgag

SEQ ID NO: 11317 - DNA, 122 bp, Homo sapiens
  misc_feature (61)..(62): /note="This region represents a CpG dinucleotide"
  misc_feature (61)..(61): /note="Nucleotide may be methylated to form 5-methylcytosine"
aggtccaaactggaaagccactcagatggccaccaataaataaactgtggtatattcatacgacagaaaataaacagcaaagaaaatgagcctcggccgggcacatggcttatgcctgtaat

SEQ ID NO: 11318 - DNA, 122 bp, Homo sapiens
  misc_feature (61)..(62): /note="This region represents a CpG dinucleotide"
  misc_feature (61)..(61): /note="Nucleotide may be methylated to form 5-methylcytosine"
tgaggaggctgaagtgagaggacagggagcttgtagttctcctgcaatgtatgaggtaaacgaaacagagaagcttgaaaaggggaagcagaaccctgtagaagcaccactcagggctagga

SEQ ID NO: 11319 - DNA, 122 bp, Homo sapiens
  misc_feature (61)..(62): /note="This region represents a CpG dinucleotide"
  misc_feature (61)..(61): /note="Nucleotide may be methylated to form 5-methylcytosine"
cagcgggggcggaataagcgagctggggaggcggccgcggggctgcctgttgcccagcaacgatgccagccgcggcctgtgctcccccaaaagcccgaaagcaccgcggcaggcagccagga

SEQ ID NO: 11320 - DNA, 122 bp, Homo sapiens
  misc_feature (61)..(62): /note="This region represents a CpG dinucleotide"
  misc_feature (61)..(61): /note="Nucleotide may be methylated to form 5-methylcytosine"
ctaacttgcaggagctgtgcagctttggctttgcaggttttagaagctctccctacgccacgtctttaaatatatgtatgttcaatcagcaggaggaagggactaacaagagccttctgcgg

SEQ ID NO: 11321 - DNA, 122 bp, Homo sapiens
  misc_feature (61)..(62): /note="This region represents a CpG dinucleotide"
  misc_feature (61)..(61): /note="Nucleotide may be methylated to form 5-methylcytosine"
actcttgttaaatattttgcatatcacctctattggcaaaccagtatttccttttctctgcgttatcactttctctttcctctctctgctcccctgtcctctccttttacctcccttttctt

SEQ ID NO: 11322 - DNA, 122 bp, Homo sapiens
  misc_feature (61)..(62): /note="This region represents a CpG dinucleotide"
  misc_feature (61)..(61): /note="Nucleotide may be methylated to form 5-methylcytosine"
tgagattgctgtgaagattagatacagggtttattcccttatcttatataaaatgcttagcgaagtgcctggaacattattaagtgcgcaatcagtgttagtccttgctccttccttgtgga

SEQ ID NO: 11323 - DNA, 122 bp, Homo sapiens
  misc_feature (61)..(62): /note="This region represents a CpG dinucleotide"
  misc_feature (61)..(61): /note="Nucleotide may be methylated to form 5-methylcytosine"
ccttccttctatgacttatctcagaatgacgttacaattgttattgtgtttgagtgccgacgctgaggcattggctagaaacttctataattaggtgttttctgacactagacaaaattatt

SEQ ID NO: 11324 - DNA, 122 bp, Homo sapiens
  misc_feature (61)..(62): /note="This region represents a CpG dinucleotide"
  misc_feature (61)..(61): /note="Nucleotide may be methylated to form 5-methylcytosine"
ggggccaaggccagagctggacaccacgactgccacgtaagaggaatcccaagcatactgcgatcaagggaagggaagaaaatccactcccagaagcagctttttactgtgactctcatcgt

SEQ ID NO: 11325 - DNA, 122 bp, Homo sapiens
  misc_feature (61)..(62): /note="This region represents a CpG dinucleotide"
  misc_feature (61)..(61): /note="Nucleotide may be methylated to form 5-methylcytosine"
ttttccttctcagctttagatttatcaggcttcttcacctcgcactgtccccatcctggccgcaggccccctcggtccctccctccccctgccaccccgttctcagtcctcagtccttgccc

SEQ ID NO: 11326 - DNA, 122 bp, Homo sapiens
  misc_feature (61)..(62): /note="This region represents a CpG dinucleotide"
  misc_feature (61)..(61): /note="Nucleotide may be methylated to form 5-methylcytosine"
tgcaaggactggagatggctcatgctggccctgtgcccaggcagcctcctcctcctcctccgcccctcacacaccagaggttcatgaaattagtcacttggactttccatggtttcgctgaa

SEQ ID NO: 11327 - DNA, 122 bp, Homo sapiens
  misc_feature (61)..(62): /note="This region represents a CpG dinucleotide"
  misc_feature (61)..(61): /note="Nucleotide may be methylated to form 5-methylcytosine"
caagaattctagcacaacgaaaaatctgaatgtaataacaccactaaaggatcacactaacggctccagcaattgtccgtaatgaatatggaaactaagaaatgacagaggaagaattcaaa

SEQ ID NO: 11328 - DNA, 122 bp, Homo sapiens
  misc_feature (61)..(62): /note="This region represents a CpG dinucleotide"
  misc_feature (61)..(61): /note="Nucleotide may be methylated to form 5-methylcytosine"
aataagcttctgtcaccaagtttcccaggatccaaacccaccactcaactgattgattaacgaaggttttgggtgtgacagatatctgggttttcatatcagtcataagtcagattatgttc

SEQ ID NO: 11329 - DNA, 122 bp, Homo sapiens
  misc_feature (61)..(62): /note="This region represents a CpG dinucleotide"
  misc_feature (61)..(61): /note="Nucleotide may be methylated to form 5-methylcytosine"
agtttggggtccttctgtcaaaaatggacagagcctaaagcgtattactttaacacactacgtgtacaagcaaagctacaaacacctatggagtaaagctggtcaactgggctgaggccagt

SEQ ID NO: 11330 - DNA, 122 bp, Homo sapiens
  misc_feature (61)..(62): /note="This region represents a CpG dinucleotide"
  misc_feature (61)..(61): /note="Nucleotide may be methylated to form 5-methylcytosine"
tcgttttcccagcggaattttaactattctaaggatgtccttacagccagttccccactccgctactcagagtgtgtcagactttaccctgtccattcaactccagaaaaaccgggaggtct

SEQ ID NO: 11331 - DNA, 122 bp, Homo sapiens
  misc_feature (61)..(62): /note="This region represents a CpG dinucleotide"
  misc_feature (61)..(61): /note="Nucleotide may be methylated to form 5-methylcytosine"
tcaccaaatgtcagttgctgtggtagttattatttttcacagccttcactgtcccagatacgtaacaatgaagaatggcttgcctcgaagcatttccctcagtccagagggggagatttggg

SEQ ID NO: 11332 - DNA, 122 bp, Homo sapiens
  misc_feature (61)..(62): /note="This region represents a CpG dinucleotide"
  misc_feature (61)..(61): /note="Nucleotide may be methylated to form 5-methylcytosine"
tttgagctagtctggtggcagaacacctctctcctgatattcaaggacctgtctccaggtcgcttcagttccttgtcttgcctctcgcaatgggctttctgctgaccaagcccattgactca

SEQ ID NO: 11333 - DNA, 122 bp, Homo sapiens
  misc_feature (61)..(62): /note="This region represents a CpG dinucleotide"
  misc_feature (61)..(61): /note="Nucleotide may be methylated to form 5-methylcytosine"
agaagtgagtcatgtcttaccctctaaggctgaaacaaccacagtctctgcatctgtgtacgtgtgtgtgcatgtgtgtgtacgtgcgtgtgtgcgtgcgtgtgtgcgtgtgtgtgcgcgcg

SEQ ID NO: 11334 - DNA, 122 bp, Homo sapiens
  misc_feature (61)..(62): /note="This region represents a CpG dinucleotide"
  misc_feature (61)..(61): /note="Nucleotide may be methylated to form 5-methylcytosine"
atttctaccacaacacactacaatcgcatagggacgaaatacaatgaagccaagactaaccgatccccaacaagaggaagtgaattctctggaaagggtgatgttcccaatacatctttaaa

SEQ ID NO: 11335 - DNA, 122 bp, Homo sapiens
  misc_feature (61)..(62): /note="This region represents a CpG dinucleotide"
  misc_feature (61)..(61): /note="Nucleotide may be methylated to form 5-methylcytosine"
agctctcttttgctctttcctgtcatttcagttatgcaagaacacaatgctctcaccctacgccagtctggagagctttgcttttctcttgggaggaggcatggtgcaatgatgagaagaag

SEQ ID NO: 11336 - DNA, 122 bp, Homo sapiens
  misc_feature (61)..(62): /note="This region represents a CpG dinucleotide"
  misc_feature (61)..(61): /note="Nucleotide may be methylated to form 5-methylcytosine"
tgtaggaccctgctccctctcaggggtgaagatcccatctttgaaatgcctgacttctctcggacagtccattattgaggaaagacttagacattttacagcgctgtcaggcattccgtgat

SEQ ID NO: 11337 - DNA, 122 bp, Homo sapiens
  misc_feature (61)..(62): /note="This region represents a CpG dinucleotide"
  misc_feature (61)..(61): /note="Nucleotide may be methylated to form 5-methylcytosine"
cccgccccgagtgcaggtgtgtgtgaggtgcccgggacaggtcattgcagagaggagacccgggcaagtgttcctgaaccttccacgtctccgcctggctttccatcggcagcacggaagtc

SEQ ID NO: 11338 - DNA, 122 bp, Homo sapiens
  misc_feature (61)..(62): /note="This region represents a CpG dinucleotide"
  misc_feature (61)..(61): /note="Nucleotide may be methylated to form 5-methylcytosine"
attaaaatatttttaaaaaattaattaattaatcaaattccattctaagaacaatcaagccgaaagtgaggaattactttaaatgctttgaagctcagcatcccggggttcttatccgtcac

SEQ ID NO: 11339 - DNA, 122 bp, Homo sapiens
  misc_feature (61)..(62): /note="This region represents a CpG dinucleotide"
  misc_feature (61)..(61): /note="Nucleotide may be methylated to form 5-methylcytosine"
agatatctgtatatacacacacacatatgtgcacacacacactctctctccattatcgaacgactgactgtaaacctcaccacacagggtggtgccctggccccgaggtcaccccgactttt

SEQ ID NO: 11340 - DNA, 122 bp, Homo sapiens
  misc_feature (61)..(62): /note="This region represents a CpG dinucleotide"
  misc_feature (61)..(61): /note="Nucleotide may be methylated to form 5-methylcytosine"
tgagggacccctcatgccagtagtggctgggggttagggactggagcctgctgcccagcacggtggtcacaccctggccagccccaccccacccggccctggaggggaggccaaggtaaggc

SEQ ID NO: 11341 - DNA, 122 bp, Homo sapiens
  misc_feature (61)..(62): /note="This region represents a CpG dinucleotide"
  misc_feature (61)..(61): /note="Nucleotide may be methylated to form 5-methylcytosine"
tcggtggccagcagtgtaaattaatctttccctctctgctcaaagcaactttgcaactctcgtctatagaggtggccagtaaaacccaagcaaaaatctaaacgggcaccaggtggccactg

SEQ ID NO: 11342 - DNA, 122 bp, Homo sapiens
  misc_feature (61)..(62): /note="This region represents a CpG dinucleotide"
  misc_feature (61)..(61): /note="Nucleotide may be methylated to form 5-methylcytosine"
accagttaaaggcaaatttcaataatgagagcagttatcacgtatctagtacttaccatgcgccagactatgatctaaatttatgacacatattaaatcatttaagccttacaaccatgtat

SEQ ID NO: 11343 - DNA, 122 bp, Homo sapiens
  misc_feature (61)..(62): /note="This region represents a CpG dinucleotide"
  misc_feature (61)..(61): /note="Nucleotide may be methylated to form 5-methylcytosine"
gtaaggggaagaaggtttgtagtaggatataaggctgtcaaggaggtaaaaaccaaacttcgtgaggctctgaatatcaggcaaaataggtggaatgtttaaaaaaatctaagaaaggtagt

SEQ ID NO: 11344 - DNA, 122 bp, Homo sapiens
  misc_feature (61)..(62): /note="This region represents a CpG dinucleotide"
  misc_feature (61)..(61): /note="Nucleotide may be methylated to form 5-methylcytosine"
ttgttatccgaaaaaaacaaacagcgttcattcacctgtcaagcaacaaacgactctccacgagaatgcagattttgatcaataggagttttattacttggctcaagtaaggggagcactgg

SEQ ID NO: 11345 - DNA, 122 bp, Homo sapiens
  misc_feature (61)..(62): /note="This region represents a CpG dinucleotide"
  misc_feature (61)..(61): /note="Nucleotide may be methylated to form 5-methylcytosine"
aatgcagattaatagttgggattggccggatttcccttggtcacctgtcctaaccccttgcgcaaacacaggtctatatgtggaaaccctacaaatacctgcccatccctttttaacattta

SEQ ID NO: 11346 - DNA, 122 bp, Homo sapiens
  misc_feature (61)..(62): /note="This region represents a CpG dinucleotide"
  misc_feature (61)..(61): /note="Nucleotide may be methylated to form 5-methylcytosine"
tgccctgccctggagtcccttcaagttcaatgttgcttggcaacttacaatgtgctattacgaccgtgtctgttattccccatgatgatcctgtgaacgtggtgtggattagtagatccatc

SEQ ID NO: 11347 - DNA, 122 bp, Homo sapiens
  misc_feature (61)..(62): /note="This region represents a CpG dinucleotide"
  misc_feature (61)..(61): /note="Nucleotide may be methylated to form 5-methylcytosine"
tttggtgtggaggactatttggtttgagtgaaagctggcagaaggaaataaatttcatgacgactttcagatctgcttatgtctgttttctgagtacaagtgtgtattgctctagtgaccca

SEQ ID NO: 11348 - DNA, 122 bp, Homo sapiens
  misc_feature (61)..(62): /note="This region represents a CpG dinucleotide"
  misc_feature (61)..(61): /note="Nucleotide may be methylated to form 5-methylcytosine"
ccctacttccaatattgagctgactgtttctgttgtatttaccctttgcaatagccatctcgctattttcttaacttacaaaacatcacttagccttctgcctgtagaaatagccctgtata

SEQ ID NO: 11349 - DNA, 122 bp, Homo sapiens
  misc_feature (61)..(62): /note="This region represents a CpG dinucleotide"
  misc_feature (61)..(61): /note="Nucleotide may be methylated to form 5-methylcytosine"
gactatggggattacatttcaagatgagatttgggtggggacacaaatcctaccatatcacgaggtgatctcactagatcctctagaagcctgagtgccttgcagggctagagaagggaaca

SEQ ID NO: 11350 - DNA, 122 bp, Homo sapiens
  misc_feature (61)..(62): /note="This region represents a CpG dinucleotide"
  misc_feature (61)..(61): /note="Nucleotide may be methylated to form 5-methylcytosine"
tgtgtgaggaagggtattgcataagtgaagagaggaacttaagattcatgcttaaatacacgcactggaatgctgtgtctctgacaaacagaaatcaaatcagcacaaaggtaatattttac

SEQ ID NO: 11351 - DNA, 122 bp, Homo sapiens
  misc_feature (61)..(62): /note="This region represents a CpG dinucleotide"
  misc_feature (61)..(61): /note="Nucleotide may be methylated to form 5-methylcytosine"
tggacagcacgctggaccgagatggaaccacagctttctcttcccaatccctggcctcaccgttttgtttcatacctcaccgtttgtttcaaacctcgtggtgttgaaatgattaaatgaga

SEQ ID NO: 11352 - DNA, 122 bp, Homo sapiens
  misc_feature (61)..(62): /note="This region represents a CpG dinucleotide"
  misc_feature (61)..(61): /note="Nucleotide may be methylated to form 5-methylcytosine"
aacctttcctagatgtcaaccccaggctaccctgatggctgtccccaccttgagtcactgcgtggcacttgcgtgtgccatcccaggaggcccttgctcactgctgtcacactttcttgact

SEQ ID NO: 11353 - DNA, 122 bp, Homo sapiens
  misc_feature (61)..(62): /note="This region represents a CpG dinucleotide"
  misc_feature (61)..(61): /note="Nucleotide may be methylated to form 5-methylcytosine"
ggaacagtcaatgagtcaacagcctgtctgcatgggtaccttctgtattgttcaccttcacgcatggagtaaggcctgatctaaaaactaccaccagcccgaagccatccctggcagagaaa

SEQ ID NO: 11354 - DNA, 122 bp, Homo sapiens
  misc_feature (61)..(62): /note="This region represents a CpG dinucleotide"
  misc_feature (61)..(61): /note="Nucleotide may be methylated to form 5-methylcytosine"
gggctggggtatctgaagtcaactttcctccctctttctggggcctcaggcctttagtgacggggcttagaggaagggacactggcaggctgggagtccaggggtcagagccacgagggccc

SEQ ID NO: 11355 - DNA, 122 bp, Homo sapiens
  misc_feature (61)..(62): /note="This region represents a CpG dinucleotide"
  misc_feature (61)..(61): /note="Nucleotide may be methylated to form 5-methylcytosine"
ggctgtactcccaggtcagatgctgcgctgaagatatctgctccagagttgacatgcgtccgtgtccgctgggccacgggcctctcaggtggtcacggtattctgactggttggagggctgc

SEQ ID NO: 11356 - DNA, 122 bp, Homo sapiens
  misc_feature (61)..(62): /note="This region represents a CpG dinucleotide"
  misc_feature (61)..(61): /note="Nucleotide may be methylated to form 5-methylcytosine"
ttcggcatttggagcagctgaggcagtgtctgaggtggttttctgaagcggtgaaggagccgctctcacactccctgcagtccgtatcctgccccgggcctggacagtcattgtacaagtag

SEQ ID NO: 11357 - DNA, 122 bp, Homo sapiens
  misc_feature (61)..(62): /note="This region represents a CpG dinucleotide"
  misc_feature (61)..(61): /note="Nucleotide may be methylated to form 5-methylcytosine"
tcccaataccaggagctgtgtaactctgttatacatggcacagggctcctcattggtcaacgaaatgagctttggccacttaatgccttgggagtcatttgctaagggcacctggaatgagc

SEQ ID NO: 11358 - DNA, 122 bp, Homo sapiens
  misc_feature (61)..(62): /note="This region represents a CpG dinucleotide"
  misc_feature (61)..(61): /note="Nucleotide may be methylated to form 5-methylcytosine"
ctgcgcacccagcacagctgggagctgatcgaagcgcttggggccgtcagggggcgcgggcgtccctggtggggccagttgtacgctgcggcggtcggcggagatgagcaggcggcggtgtg

SEQ ID NO: 11359 - DNA, 122 bp, Homo sapiens
  misc_feature (61)..(62): /note="This region represents a CpG dinucleotide"
  misc_feature (61)..(61): /note="Nucleotide may be methylated to form 5-methylcytosine"
aaagctctatgagatccgaatgagcagcatccggcctcagagctaatctgtcagattttgcgtctgagtcagaacttactggttattaatgctgtctgtctttgtggccaagagtctagcaa

SEQ ID NO: 11360 - DNA, 122 bp, Homo sapiens
  misc_feature (61)..(62): /note="This region represents a CpG dinucleotide"
  misc_feature (61)..(61): /note="Nucleotide may be methylated to form 5-methylcytosine"
ataggtccctctctgcctccgcgtgtggatttgtgactcaacggcttatcaagggctacgcggcagcgcggcttagtaacattaaaagattccagcactgccctgtgttccgcctccggtcc

SEQ ID NO: 11361 - DNA, 122 bp, Homo sapiens
  misc_feature (61)..(62): /note="This region represents a CpG dinucleotide"
  misc_feature (61)..(61): /note="Nucleotide may be methylated to form 5-methylcytosine"
catggcattcattcattcatccaacacatattgattgagtgctggcactcgcaggcattgcgctggggttgaggacacagcagatgaacaggacagaccagcttctattctcacggtgcttg

SEQ ID NO: 11362 - DNA, 122 bp, Homo sapiens
  misc_feature (61)..(62): /note="This region represents a CpG dinucleotide"
  misc_feature (61)..(61): /note="Nucleotide may be methylated to form 5-methylcytosine"
gtggccagttgatcccctgtggagacagtaaagattaagaggatcataaactgcgtccagcggctgccccgggagaaatctcctcaagccagagcctgtgctgtgaggggcttcgggacctt

SEQ ID NO: 11363 - DNA, 122 bp, Homo sapiens
  misc_feature (61)..(62): /note="This region represents a CpG dinucleotide"
  misc_feature (61)..(61): /note="Nucleotide may be methylated to form 5-methylcytosine"
agcaggtctcagcctcattttacccagcccctattcaagatggagtcgctctggtttgaacgcctctgacggaaaccttccaaatgtcagagacaaggcaaagtagcttgggtcaccaggtg

SEQ ID NO: 11364 - DNA, 122 bp, Homo sapiens
  misc_feature (61)..(62): /note="This region represents a CpG dinucleotide"
  misc_feature (61)..(61): /note="Nucleotide may be methylated to form 5-methylcytosine"
gtgacctgagctgctctcatggaatgagtgtggtctgactcacctgaccataaatttgtgcgtactctgcagcattccattatcaaatggaagtgaatacatgagaatcctctcaagcactg

SEQ ID NO: 11365 - DNA, 122 bp, Homo sapiens
  misc_feature (61)..(62): /note="This region represents a CpG dinucleotide"
  misc_feature (61)..(61): /note="Nucleotide may be methylated to form 5-methylcytosine"
agtcttctttccaaataaggaaaggaatgtgagctggtactgataagcctggtactgtggcgtgtccaggcatgtaacaaaggcagaaacgaaaaaaagagaaaaaggaaaaaaggttgtgg

SEQ ID NO: 11366 - DNA, 122 bp, Homo sapiens
  misc_feature (61)..(62): /note="This region represents a CpG dinucleotide"
  misc_feature (61)..(61): /note="Nucleotide may be methylated to form 5-methylcytosine"
ccggtaggtgcaggggccgaaggccaggcccagtggacccagccgcctgaaggggagccacggcctcagaaaacctctgcccgcccccgcggaaaaccgctgtggggaagtctgaaggcctt

SEQ ID NO: 11367 - DNA, 122 bp, Homo sapiens
  misc_feature (61)..(62): /note="This region represents a CpG dinucleotide"
  misc_feature (61)..(61): /note="Nucleotide may be methylated to form 5-methylcytosine"
ctgccacaggaagccttgaggtctgggatgcttgggacggtgtggtgatctgggtgcagacggcttggaactagcctaacaagtcaggcctgttgccagtgacagagacccacctgcgcaga

SEQ ID NO: 11368 - DNA, 122 bp, Homo sapiens
  misc_feature (61)..(62): /note="This region represents a CpG dinucleotide"
  misc_feature (61)..(61): /note="Nucleotide may be methylated to form 5-methylcytosine"
tttgttttcttcctttttctaagctgctgagctgtccctggaattgtgcaagaggtcacacggagggactgtcaacagctccctaacgtaggttcctaccccagaaagggggtccaggtttt

SEQ ID NO: 11369 - DNA, 122 bp, Homo sapiens
  misc_feature (61)..(62): /note="This region represents a CpG dinucleotide"
  misc_feature (61)..(61): /note="Nucleotide may be methylated to form 5-methylcytosine"
gtgatctgagttatatgaaccatctacacgcccaaaatgtgggttcagggtaccccagtgcgtttcctcctgctggtccctgcatgctctgagctgtgggctggcttggggttggagcctta

SEQ ID NO: 11370 - DNA, 122 bp, Homo sapiens
  misc_feature (61)..(62): /note="This region represents a CpG dinucleotide"
  misc_feature (61)..(61): /note="Nucleotide may be methylated to form 5-methylcytosine"
acttaccctagtaactatttggtttattccttttcgtggtgacatatctaagtagttcaacgtccttagcttccttgtgtttttataaacattcttgtgcttcatgtgccttcaggaaatgt

SEQ ID NO: 11371 - DNA, 122 bp, Homo sapiens
  misc_feature (61)..(62): /note="This region represents a CpG dinucleotide"
  misc_feature (61)..(61): /note="Nucleotide may be methylated to form 5-methylcytosine"
caaagttctaaaacaggctatttgaaattaagcacttccccccagcaactccgtgaattacgtaatagtgaaaaatggagatagacaaaaagcaaacctgaggaaggaaaggaatgttaagg

SEQ ID NO: 11372 - DNA, 122 bp, Homo sapiens
  misc_feature (61)..(62): /note="This region represents a CpG dinucleotide"
  misc_feature (61)..(61): /note="Nucleotide may be methylated to form 5-methylcytosine"
gttgaggttactcagttcaggaaactctttcagctaggggtgccctatcattcagcagaccgtgtgtttcctggaaacagagcaggggtagctggtgaagggctgtcagtgaggccaggggc

SEQ ID NO: 11373 - DNA, 122 bp, Homo sapiens
  misc_feature (61)..(62): /note="This region represents a CpG dinucleotide"
  misc_feature (61)..(61): /note="Nucleotide may be methylated to form 5-methylcytosine"
atgttcctctactgcaaggcaatcctgtatgtgtgcatcatttggccctgttcacatcatcgtttgggaaatggagttcagggaagtggctcaaatgttgacactggctactgctactgctg

SEQ ID NO: 11374 - DNA, 122 bp, Homo sapiens
  misc_feature (61)..(62): /note="This region represents a CpG dinucleotide"
  misc_feature (61)..(61): /note="Nucleotide may be methylated to form 5-methylcytosine"
tcgtccaactttctcgaatgtttggatgaaaacaaatgactctgtcacctttggcattagcgatgtttgacacatctgagtgtgtcagccttgtttacagtcctgtcctgaccaacaactgc

SEQ ID NO: 11375 - DNA, 122 bp, Homo sapiens
  misc_feature (61)..(62): /note="This region represents a CpG dinucleotide"
  misc_feature (61)..(61): /note="Nucleotide may be methylated to form 5-methylcytosine"
gaggtttcctccaactggacgttaagttactgagaacaggaatcagggatgcgattggtgcgtgtcttctgtggctacctggtcagcattcataaacggtgataatggattgaatgctgcag

SEQ ID NO: 11376 - DNA, 122 bp, Homo sapiens
  misc_feature (61)..(62): /note="This region represents a CpG dinucleotide"
  misc_feature (61)..(61): /note="Nucleotide may be methylated to form 5-methylcytosine"
cctcattgtaccctttcctgctgcctctatacacccgctgccccaactccttacacaaagcgatgctagtccactacctccaggaagcctttcctggctgttagcccacacagaccttcctc

SEQ ID NO: 11377 - DNA, 122 bp, Homo sapiens
  misc_feature (61)..(62): /note="This region represents a CpG dinucleotide"
  misc_feature (61)..(61): /note="Nucleotide may be methylated to form 5-methylcytosine"
agaacacaatcacatagcaacctgttctatcagcagttgctctgtagggtaaatcccagacgtatcaactgaaagccatctccacagtgagtctattaggactgctgggaagctgaattagc

SEQ ID NO: 11378 - DNA, 122 bp, Homo sapiens
  misc_feature (61)..(62): /note="This region represents a CpG dinucleotide"
  misc_feature (61)..(61): /note="Nucleotide may be methylated to form 5-methylcytosine"
cagagtggagcaccaggagggagaggagcaccacggcaggaaggaccgggatcttcatggcgtcaagtttggggtgctctgaggcggggcctcagtgcttgctctttatattgccaaggagg

SEQ ID NO: 11379 - DNA, 122 bp, Homo sapiens
  misc_feature (61)..(62): /note="This region represents a CpG dinucleotide"
  misc_feature (61)..(61): /note="Nucleotide may be methylated to form 5-methylcytosine"
gagaattcagtctgtgccagggattgtgttagggactgggggttcgaccgtgttaagacacggtctctgtctttagagagtatctaactgggggaatatgacacataagaaacagatatttt

SEQ ID NO: 11380 - DNA, 122 bp, Homo sapiens
  misc_feature (61)..(62): /note="This region represents a CpG dinucleotide"
  misc_feature (61)..(61): /note="Nucleotide may be methylated to form 5-methylcytosine"
ggccaagtttggcttcagctgtggccaagggcagcacagaaatacccagattagaccaggcgccatgtggcacgcctataatcccagcactttgagaggccaaggtgggcggatcacctgag

SEQ ID NO: 11381 - DNA, 122 bp, Homo sapiens
  misc_feature (61)..(62): /note="This region represents a CpG dinucleotide"
  misc_feature (61)..(61): /note="Nucleotide may be methylated to form 5-methylcytosine"
aaatatgaagataatctgattcaaatttcaaacctgctctgccattgctttgctgtatgacgaaatcaaaacctggaaaaggggattgatataagagacaatggtgtataaccaattcaaag

SEQ ID NO: 11382 - DNA, 122 bp, Homo sapiens
  misc_feature (61)..(62): /note="This region represents a CpG dinucleotide"
  misc_feature (61)..(61): /note="Nucleotide may be methylated to form 5-methylcytosine"
aacaatatctctcacgaacacagatgcagaacttctagacaaaacgtttccaaattgaagcgaagaccatattaaaaggacaaaagcacctcagtggttgcttggggactgggggaggggct

SEQ ID NO: 11383 - DNA, 122 bp, Homo sapiens
  misc_feature (61)..(62): /note="This region represents a CpG dinucleotide"
  misc_feature (61)..(61): /note="Nucleotide may be methylated to form 5-methylcytosine"
caacagcaaaactcggtctcaaaaaaaaaaaaagaatacacactgcaggttccatttgtacgaaattcaaacacaggcaaacgcaatttatggtgccagaagtcaggacatggttaccttta

SEQ ID NO: 11384 - DNA, 122 bp, Homo sapiens
  misc_feature (61)..(62): /note="This region represents a CpG dinucleotide"
  misc_feature (61)..(61): /note="Nucleotide may be methylated to form 5-methylcytosine"
gttttttttttttttttgatatcgagtttcgctcttgttgcccagactggagcgtacttgcgcgatctcggctcactgcaacctccgcctcctgcgctcaagcaattctgcctcagcctccc

SEQ ID NO: 11385 - DNA, 122 bp, Homo sapiens
  misc_feature (61)..(62): /note="This region represents a CpG dinucleotide"
  misc_feature (61)..(61): /note="Nucleotide may be methylated to form 5-methylcytosine"
gaggtcatcttgagggcaaggccggctcatggtgcatgataggagggaaggggtaacaggcggtcattgccacctacaggaaaacaatgccagtgttggtgcctcagcttccagcctcggga

SEQ ID NO: 11386 - DNA, 122 bp, Homo sapiens
  misc_feature (61)..(62): /note="This region represents a CpG dinucleotide"
  misc_feature (61)..(61): /note="Nucleotide may be methylated to form 5-methylcytosine"
tgttttagtcataatctatgttctcaaaaccacaaatgtgttgtgtggctgagtgactcacgatgtacttacaatacttatgggagagactaagatgccttggtcaagtttgtgacattctt

SEQ ID NO: 11387 - DNA, 122 bp, Homo sapiens
  misc_feature (61)..(62): /note="This region represents a CpG dinucleotide"
  misc_feature (61)..(61): /note="Nucleotide may be methylated to form 5-methylcytosine"
ttaagtagaagctcagttagttctctacacttcaatcactccgttccagttgcctggaaacgtgagttgcttctccaacagtgaactataaagcaccgaagattcctgcatatgtccctgca

SEQ ID NO: 11388 - DNA, 122 bp, Homo sapiens
  misc_feature (61)..(62): /note="This region represents a CpG dinucleotide"
  misc_feature (61)..(61): /note="Nucleotide may be methylated to form 5-methylcytosine"
cgaaggcatcagagctgagagaccttctcactaaatgtgacactgacactgtccaggagccgcagcctcactctatcagcagctgaggtttttatagggtgcccctattaccctgggtgttg

SEQ ID NO: 11389 - DNA, 122 bp, Homo sapiens
  misc_feature (61)..(62): /note="This region represents a CpG dinucleotide"
  misc_feature (61)..(61): /note="Nucleotide may be methylated to form 5-methylcytosine"
cagccccctccccgatgaagggttcatccaaagttcgaatccagactctgaacaaagtggcgcagaccttttcctgactcctcaccctttgtcctcatcactcagtgacagacaggaatcaa

SEQ ID NO: 11390 - DNA, 122 bp, Homo sapiens
  misc_feature (61)..(62): /note="This region represents a CpG dinucleotide"
  misc_feature (61)..(61): /note="Nucleotide may be methylated to form 5-methylcytosine"
gggggccacataatcagatgagccactttgggcagccaaagtgagtggatcaccggaggtcgggaattggaaaccagcctggccaacattgtgaaaccctgtctctactaaaaaacaaaaaa

SEQ ID NO: 11391 - DNA, 122 bp, Homo sapiens
  misc_feature (61)..(62): /note="This region represents a CpG dinucleotide"
  misc_feature (61)..(61): /note="Nucleotide may be methylated to form 5-methylcytosine"
cctcatagggacggggcttcggcctggaggcctgaaaacgtcctgaaactagctggaggtcgtggttacgcaacaccatgaatgtctaaacacccccaagctgtgcacctgaaaatgattca

SEQ ID NO: 11392 - DNA, 122 bp, Homo sapiens
  misc_feature (61)..(62): /note="This region represents a CpG dinucleotide"
  misc_feature (61)..(61): /note="Nucleotide may be methylated to form 5-methylcytosine"
acctagtctgtcttctcacttacattctagataactttgagcaagttgtttaagcctcttcgtgcttcagtgtcccttatctgtaaaatggggattgtggctgttctaaggattaagtgagt

SEQ ID NO: 11393 - DNA, 122 bp, Homo sapiens
  misc_feature (61)..(62): /note="This region represents a CpG dinucleotide"
  misc_feature (61)..(61): /note="Nucleotide may be methylated to form 5-methylcytosine"
caagacgtccctggacctgcggcgggagatcatcgatgtgggcgggatccagaacctcatcgagctgcggaagaaacgcaagcagaagaagcgggacgctctggccgcctcgcatgagccgc

SEQ ID NO: 11394 - DNA, 122 bp, Homo sapiens
  misc_feature (61)..(62): /note="This region represents a CpG dinucleotide"
  misc_feature (61)..(61): /note="Nucleotide may be methylated to form 5-methylcytosine"
tcttttttccacatcctcaataacacttgctttcatttatctttttggtaatagccatgccgacaggtatgaggtgatatctcattgtggctttcgtttgtatttctctgatgattagtggt

SEQ ID NO: 11395 - DNA, 122 bp, Homo sapiens
  misc_feature (61)..(62): /note="This region represents a CpG dinucleotide"
  misc_feature (61)..(61): /note="Nucleotide may be methylated to form 5-methylcytosine"
aggcccctgatttcaaaccatttataacctggcttgtgagacagactaaaagggagccaacgatcaccaaaatgagtacttgaaggcatgaagtgccaccaaagagttgtgatgaaagcttt

SEQ ID NO: 11396 - DNA, 122 bp, Homo sapiens
  misc_feature (61)..(62): /note="This region represents a CpG dinucleotide"
  misc_feature (61)..(61): /note="Nucleotide may be methylated to form 5-methylcytosine"
ttgtttctatttttgataaagatggattgcaaataagccatccacaaacaattttacaaacgagtttgcaccaatatttgtattgggttactacagagtggctccttctatcactgtgtcat

SEQ ID NO: 11397 - DNA, 122 bp, Homo sapiens
  misc_feature (61)..(62): /note="This region represents a CpG dinucleotide"
  misc_feature (61)..(61): /note="Nucleotide may be methylated to form 5-methylcytosine"
caaaggctttggagctacacaggcaaggtttccagacccagttctgccacttcttaacttcgtgacactgggcaagacgcttctcttctctgaggctcagcttcatcttggggttactaaga

SEQ ID NO: 11398 - DNA, 122 bp, Homo sapiens
  misc_feature (61)..(62): /note="This region represents a CpG dinucleotide"
  misc_feature (61)..(61): /note="Nucleotide may be methylated to form 5-methylcytosine"
cctcacctctgttactccagtagcacttctacaactcagatgttgccttaccatattctacgtaatgcacaactacacgaaagataaatctgtgttttatacagagatgatgcaactacttc

SEQ ID NO: 11399 - DNA, 122 bp, Homo sapiens
  misc_feature (61)..(62): /note="This region represents a CpG dinucleotide"
  misc_feature (61)..(61): /note="Nucleotide may be methylated to form 5-methylcytosine"
aggtgttctccacagccggttatgaagtgagtaacctgagttcataaatgagcagttgggcgggctcctcttccaggctcttaaatggggagcagggcgtggtgctccgggataagagaaaa

SEQ ID NO: 11400 - DNA, 122 bp, Homo sapiens
  misc_feature (61)..(62): /note="This region represents a CpG dinucleotide"
  misc_feature (61)..(61): /note="Nucleotide may be methylated to form 5-methylcytosine"
ttgaagtgggatcccatgtttagacaattttcacaagctgtcaataataagccacaaagtcgtctttaaccgaacacgttatcatccttcctaatagatgtttaaaatttgcagaccaaatt

SEQ ID NO: 11401 - DNA, 122 bp, Homo sapiens
  misc_feature (61)..(62): /note="This region represents a CpG dinucleotide"
  misc_feature (61)..(61): /note="Nucleotide may be methylated to form 5-methylcytosine"
aatgtggtagatacagagatatgatggcatattattgatcaataaaaggaaaagaggcaacgagcacatgaaaagacgctgaactcattagtcactaggaaaatgcaaatcaaaactacaaa

SEQ ID NO: 11402 - DNA, 122 bp, Homo sapiens
  misc_feature (61)..(62): /note="This region represents a CpG dinucleotide"
  misc_feature (61)..(61): /note="Nucleotide may be methylated to form 5-methylcytosine"
attggaatactcctgcacttttctccctttgaatcccaccacggaaagaaaattctgtgacgtgtacccagtatttattggagggtatttcctagcaagaaaatgagggcgattgaccaggc

SEQ ID NO: 11403 - DNA, 122 bp, Homo sapiens
  misc_feature (61)..(62): /note="This region represents a CpG dinucleotide"
  misc_feature (61)..(61): /note="Nucleotide may be methylated to form 5-methylcytosine"
ctcttaaagataaatgtgtcttaagaataattatatatcctaacaagtgaccacatccttcgatgtgtggatctgatcctccttcactagaaggctggggataaggcagaggcaacactagc

SEQ ID NO: 11404 - DNA, 122 bp, Homo sapiens
  misc_feature (61)..(62): /note="This region represents a CpG dinucleotide"
  misc_feature (61)..(61): /note="Nucleotide may be methylated to form 5-methylcytosine"
cttctttggccatcatcctgtgaagtggtggcactgcctctcacagtgaggtcactgagccgtctcaggagagtgatgctctgagggaggaacgtgagtgggagctgaagggagaggcatgg

SEQ ID NO: 11405 - DNA, 122 bp, Homo sapiens
  misc_feature (61)..(62): /note="This region represents a CpG dinucleotide"
  misc_feature (61)..(61): /note="Nucleotide may be methylated to form 5-methylcytosine"
ctcctcaaaatcaaaggttaattctggataacagcagcaaaacattgtctatacaaaaaacgaagagaaatgaaaattttaatggaaaagactatcataatataaaatatcctattttagaa

SEQ ID NO: 11406 - DNA, 122 bp, Homo sapiens
  misc_feature (61)..(62): /note="This region represents a CpG dinucleotide"
  misc_feature (61)..(61): /note="Nucleotide may be methylated to form 5-methylcytosine"
cagatgagggagctgaggatctgataaggcaacttgtccaaggccgcttgaacccagttccgtctgtgcccttagtcaccatgctttcccgaaagaaagtgcccttggcaaaaaaatttaaa

SEQ ID NO: 11407 - DNA, 122 bp, Homo sapiens
  misc_feature (61)..(62): /note="This region represents a CpG dinucleotide"
  misc_feature (61)..(61): /note="Nucleotide may be methylated to form 5-methylcytosine"
tccaaactatagccctgctcttgcctcccctccagccctgctgcccccagttcagcccggcgacacacagcagccagaaaggtcttaagaggaaattactgcctgccactcccctgcttaaa

SEQ ID NO: 11408 - DNA, 122 bp, Homo sapiens
  misc_feature (61)..(62): /note="This region represents a CpG dinucleotide"
  misc_feature (61)..(61): /note="Nucleotide may be methylated to form 5-methylcytosine"
aggggctctaagacaccagctttgtgctgtggctactattcgctcttaggagtccattagcgcttaggttagttcaactgggctcagttttaaaatccttggacagaaaagggtgtttgtgg

SEQ ID NO: 11409 - DNA, 122 bp, Homo sapiens
  misc_feature (61)..(62): /note="This region represents a CpG dinucleotide"
  misc_feature (61)..(61): /note="Nucleotide may be methylated to form 5-methylcytosine"
aaaatccatgacaaacaaagtataaaacatggattaaagatgggctgctgtttgtgttttcggacctgcatgattgtgcaatggcaacagttgtttccagtcagcccggggctcctcagtct

SEQ ID NO: 11410 - DNA, 122 bp, Homo sapiens
  misc_feature (61)..(62): /note="This region represents a CpG dinucleotide"
  misc_feature (61)..(61): /note="Nucleotide may be methylated to form 5-methylcytosine"
aggcccaagtccagtaaccggagctgttgccactcttgactgtgaaggttccagtgcttgcgtggaggggtttctcacctctcccgggagggcgtgatgctggcagtcaccactaggcaggg

SEQ ID NO: 11411 - DNA, 122 bp, Homo sapiens
  misc_feature (61)..(62): /note="This region represents a CpG dinucleotide"
  misc_feature (61)..(61): /note="Nucleotide may be methylated to form 5-methylcytosine"
gagtgaaggaagtctagccaaaggctgcgggccttattggttagggttttgacaccaatgcgaggataggggaaaaaatcatgggacatgcaaggtaggtacgtcttaggtatttatgacat

SEQ ID NO: 11412 - DNA, 122 bp, Homo sapiens
  misc_feature (61)..(62): /note="This region represents a CpG dinucleotide"
  misc_feature (61)..(61): /note="Nucleotide may be methylated to form 5-methylcytosine"
ccatcctggctgcggcgtctgtctgaaccacgcgggggccttgagggacgctttgtctgtcgtgatggggcaagggcacaagtcctggatgttgtgtgtatcgagaggccaaaggctggtgg

SEQ ID NO: 11413 - DNA, 122 bp, Homo sapiens
  misc_feature (61)..(62): /note="This region represents a CpG dinucleotide"
  misc_feature (61)..(61): /note="Nucleotide may be methylated to form 5-methylcytosine"
taagtgttctccatgtaccattttgtttagtcctcaccataatcttattgctgtcatctccgttttgtaggtgagaaaacctaggcccagagggtttaagccacttgactgaggtcacacag

SEQ ID NO: 11414 - DNA, 122 bp, Homo sapiens
  misc_feature (61)..(62): /note="This region represents a CpG dinucleotide"
  misc_feature (61)..(61): /note="Nucleotide may be methylated to form 5-methylcytosine"
atcctacagaacttttcattcctgccatcattggcctccacccaaaatgcacactgccatcgtcatctggtctcttacatcctcatcctcatgctactcagtttcctctcctatgactcatc

SEQ ID NO: 11415 - DNA, 122 bp, Homo sapiens
  misc_feature (61)..(62): /note="This region represents a CpG dinucleotide"
  misc_feature (61)..(61): /note="Nucleotide may be methylated to form 5-methylcytosine"
cacagaagaggaaataactttgaccacaagatagtcaagatagtaccagtgtgcttaggccgtcactgccttagggacccttacccatatttatctttttctttaaagatttgtcttcggtc

SEQ ID NO: 11416 - DNA, 122 bp, Homo sapiens
  misc_feature (61)..(62): /note="This region represents a CpG dinucleotide"
  misc_feature (61)..(61): /note="Nucleotide may be methylated to form 5-methylcytosine"
gcttctgtctgctcctctttagctcacagacaaagcatttaagatttctttgacaacctgcgtttcagtaaattccacatatttgttgaaagcctattgtataggaatctgaactgtcttgt

SEQ ID NO: 11417 - DNA, 122 bp, Homo sapiens
  misc_feature (61)..(62): /note="This region represents a CpG dinucleotide"
  misc_feature (61)..(61): /note="Nucleotide may be methylated to form 5-methylcytosine"
tttgtgtcagcagactcaagtgggatgttccttctgcagctcttaccgagcaagaggaagcgggctttgaaacacaatgttcattgaaattggctttcatctgaggaatcccagggtggctc

SEQ ID NO: 11418 - DNA, 122 bp, Homo sapiens
  misc_feature (61)..(62): /note="This region represents a CpG dinucleotide"
  misc_feature (61)..(61): /note="Nucleotide may be methylated to form 5-methylcytosine"
gtcactcatatttggctcagaataaatctcttcaaatattttacagagtttgactctttacgttgacatgtcccattgggtgcaaggtcattgtgaggcctcatggactaggaatctgacag

SEQ ID NO: 11419 - DNA, 122 bp, Homo sapiens
  misc_feature (61)..(62): /note="This region represents a CpG dinucleotide"
  misc_feature (61)..(61): /note="Nucleotide may be methylated to form 5-methylcytosine"
ctttgtttgctgtgattcctggtggaagaatgctggttctagctttggctctgccatccccgtgtagtgtggcaggaagcaatgcatttccctttctgggcctcgtctcctgccctgtgcac

SEQ ID NO: 11420 - DNA, 122 bp, Homo sapiens
  misc_feature (61)..(62): /note="This region represents a CpG dinucleotide"
  misc_feature (61)..(61): /note="Nucleotide may be methylated to form 5-methylcytosine"
aacatcctgtgagctagagatatatattgtatctttcctgcagatctttatgccttcttgcgacagatttccataatgtgattacagttgatgaggcaatggcccacagaaagaggctgata

SEQ ID NO: 11421 - DNA, 122 bp, Homo sapiens
  misc_feature (61)..(62): /note="This region represents a CpG dinucleotide"
  misc_feature (61)..(61): /note="Nucleotide may be methylated to form 5-methylcytosine"
gtcactgcctgatacgtgatagcatctgactccatgttagggcccgaattgtgtccatcccgccaaatccgtatgttgaagccagaaacttcaggacttcagaacttgactattagaaaaaa

SEQ ID NO: 11422 - DNA, 122 bp, Homo sapiens
  misc_feature (61)..(62): /note="This region represents a CpG dinucleotide"
  misc_feature (61)..(61): /note="Nucleotide may be methylated to form 5-methylcytosine"
agtcttgctctgtagcccaggctggagtgcagtggtgcaatctcggctcactacaacctccgtgtggctataacttttgcagtttgaggtgtgtcagcaagactaacatgaatttctttttc

SEQ ID NO: 11423 - DNA, 122 bp, Homo sapiens
  misc_feature (61)..(62): /note="This region represents a CpG dinucleotide"
  misc_feature (61)..(61): /note="Nucleotide may be methylated to form 5-methylcytosine"
cgtgtaggtggactctgccccaactagagagccactggtaacttcctcccaacttagcaacgtatcttggttgacaagccccaccaaagtcacatggcggggtgagaatagggaagttcccc

SEQ ID NO: 11424 - DNA, 122 bp, Homo sapiens
  misc_feature (61)..(62): /note="This region represents a CpG dinucleotide"
  misc_feature (61)..(61): /note="Nucleotide may be methylated to form 5-methylcytosine"
gctattctcaagctgatcgacatgagagatttcaacacatgtgtcagcagccagactaaacgtggaagaaaatcagaagcatttgaaactgtaaagctcaataactttcctcctcctgagaa

SEQ ID NO: 11425 - DNA, 122 bp, Homo sapiens
  misc_feature (61)..(62): /note="This region represents a CpG dinucleotide"
  misc_feature (61)..(61): /note="Nucleotide may be methylated to form 5-methylcytosine"
tctctgaaatcagctgagaaaaggcagattaataggacaaaaggcaaatttattgatcatcgttttatgtgacacaggaacctcagaatgaagacccaaagatgcaaaggaaactgtccatt

SEQ ID NO: 11426 - DNA, 122 bp, Homo sapiens
  misc_feature (61)..(62): /note="This region represents a CpG dinucleotide"
  misc_feature (61)..(61): /note="Nucleotide may be methylated to form 5-methylcytosine"
tatgtttgaggattatacagtaacaaggtgggagaaactagatctcatgcagtcaaaatacgtgaagaacagttctccattggactaggtaattcattattctactaattttgccttgtgta

SEQ ID NO: 11427 - DNA, 122 bp, Homo sapiens
  misc_feature (61)..(62): /note="This region represents a CpG dinucleotide"
  misc_feature (61)..(61): /note="Nucleotide may be methylated to form 5-methylcytosine"
cttgctcgggtttggcaacgacgtactgtaatgatgatggatttcagtctttaaaagctccgggacagcctgagagtaggggtcaggggactcaagccgacctccccaccgctcatctcgga

SEQ ID NO: 11428 - DNA, 122 bp, Homo sapiens
  misc_feature (61)..(62): /note="This region represents a CpG dinucleotide"
  misc_feature (61)..(61): /note="Nucleotide may be methylated to form 5-methylcytosine"
tgtggcttcccccctcacctacatcacttccccagctgaatagaggccactttggggctgcgtcaccaagggctcatctaggctgagaaaggagggccaagagtaatgttgtattaacaggc

SEQ ID NO: 11429 - DNA, 122 bp, Homo sapiens
  misc_feature (61)..(62): /note="This region represents a CpG dinucleotide"
  misc_feature (61)..(61): /note="Nucleotide may be methylated to form 5-methylcytosine"
aggtggactctgtgatatagggcttgccgtgcaggtggagtaggagggagcataacctggcgtgaactgaaagtctataaagaaggaagtgcacttctcaaggaagagcacccaaagggcag

SEQ ID NO: 11430 - DNA, 122 bp, Homo sapiens
  misc_feature (61)..(62): /note="This region represents a CpG dinucleotide"
  misc_feature (61)..(61): /note="Nucleotide may be methylated to form 5-methylcytosine"
tcacttgttgttcccattttgaatcaattctgtatcctcatgtgttagacttccacttcacgcttggtttcctttaacagacagtgatgtatctgactaaagtcaaggtgtgtttttctaga

SEQ ID NO: 11431 - DNA, 122 bp, Homo sapiens
  misc_feature (61)..(62): /note="This region represents a CpG dinucleotide"
  misc_feature (61)..(61): /note="Nucleotide may be methylated to form 5-methylcytosine"
ttggaatgctgagaattgtctagcaagccctgcggggtcatctggttctgcagagctgtgcgctgctggagcaggctggtcagccactctggacattatagaacacagagagtaacacgcat

SEQ ID NO: 11432 - DNA, 122 bp, Homo sapiens
  misc_feature (61)..(62): /note="This region represents a CpG dinucleotide"
  misc_feature (61)..(61): /note="Nucleotide may be methylated to form 5-methylcytosine"
accacccctggcaccaggcccgaagcagctccatgggcagagccgtctttccctggaggccgtctctatttgggcagtgagaatctcctccatccagcatccctcacacggcctggggcttg

SEQ ID NO: 11433 - DNA, 122 bp, Homo sapiens
  misc_feature (61)..(62): /note="This region represents a CpG dinucleotide"
  misc_feature (61)..(61): /note="Nucleotide may be methylated to form 5-methylcytosine"
atcaggtggagggtctggcctagcacagaagcacaccagctccggttctgtgaagcagtacgccatgattggcctactaggaatccattcaggaatagtgcctgggataggcctgttatctg

SEQ ID NO: 11434 - DNA, 122 bp, Homo sapiens
  misc_feature (61)..(62): /note="This region represents a CpG dinucleotide"
  misc_feature (61)..(61): /note="Nucleotide may be methylated to form 5-methylcytosine"
ttattgttcaacagaatgatctggttgagcggctttttgtacctcacaatacaaccaaaacgcttactctgtacttagatcaagttgctgtattaatgtagtgtgcaaggctgtgcacaaca

SEQ ID NO: 11435 - DNA, 122 bp, Homo sapiens
  misc_feature (61)..(62): /note="This region represents a CpG dinucleotide"
  misc_feature (61)..(61): /note="Nucleotide may be methylated to form 5-methylcytosine"
gtcatcgggccatggtgttgatacctgcctgcacgtggtgctcagcagcaaggtacaaggcgtgtgtggccctggggtgctggggagagggagaatcccgtggtgagaggcacctcctgggt

SEQ ID NO: 11436 - DNA, 122 bp, Homo sapiens
  misc_feature (61)..(62): /note="This region represents a CpG dinucleotide"
  misc_feature (61)..(61): /note="Nucleotide may be methylated to form 5-methylcytosine"
taatttcctcaaaaaatactgtcccagtgctagaaaaccctgtcagaaagttttaacttacgtctattctgagtcacttttaccaacatctaattgcattttatggtggttgttttcaattc

SEQ ID NO: 11437 - DNA, 122 bp, Homo sapiens
  misc_feature (61)..(62): /note="This region represents a CpG dinucleotide"
  misc_feature (61)..(61): /note="Nucleotide may be methylated to form 5-methylcytosine"
attcttcaaatgtgaaacatatcatgtcagcctaggcccctgatcatgactatgtgaatacgttaaaactgccaggcctggcgtggtggcttactctggtaatcccagcactttgggagact

SEQ ID NO: 11438 - DNA, 122 bp, Homo sapiens
  misc_feature (61)..(62): /note="This region represents a CpG dinucleotide"
  misc_feature (61)..(61): /note="Nucleotide may be methylated to form 5-methylcytosine"
tcggataattacccctaaatggccacggcagccccttgtgtttcctggagattagaaccccgcagtcatcaatggcagggccgagtgagccgccaatcacctccgctcactccctgagagcc

SEQ ID NO: 11439 - DNA, 122 bp, Homo sapiens
  misc_feature (61)..(62): /note="This region represents a CpG dinucleotide"
  misc_feature (61)..(61): /note="Nucleotide may be methylated to form 5-methylcytosine"
tgatgaggacagtcatagtgttgacaattactcaatgaatacttagagatttgaatgtatcgctagatttctgggaaatgaaaagaccaatgtaagctagttgaatgagaaaaccagaggtg

SEQ ID NO: 11440 - DNA, 122 bp, Homo sapiens
  misc_feature (61)..(62): /note="This region represents a CpG dinucleotide"
  misc_feature (61)..(61): /note="Nucleotide may be methylated to form 5-methylcytosine"
ctgtcatcttagaaaaagatgtagctgtgtcaaccatctcaaaatttgtcagaaagatcacgtttggtacttggggtttcagtggtctaggaggaagcccatcaatcctctgccgaagaagt

SEQ ID NO: 11441 - DNA, 122 bp, Homo sapiens
  misc_feature (61)..(62): /note="This region represents a CpG dinucleotide"
  misc_feature (61)..(61): /note="Nucleotide may be methylated to form 5-methylcytosine"
catcagcagaaagcagaaattatttagaagctcctcacctgtccccctgagttaaatcaacgttgcacttgcttgttatttccatgtatttcaatagctcccagaggagtagttccaagaat

SEQ ID NO: 11442 - DNA, 122 bp, Homo sapiens
  misc_feature (61)..(62): /note="This region represents a CpG dinucleotide"
  misc_feature (61)..(61): /note="Nucleotide may be methylated to form 5-methylcytosine"
aaacttgaactcaaatgtctgggttaaaaattgtttcttggctggggacacagtggcacacgcctgcaatcccagccctttgggaggccaagacaggggcatcgcttgagcccaggagttca

SEQ ID NO: 11443 - DNA, 122 bp, Homo sapiens
  misc_feature (61)..(62): /note="This region represents a CpG dinucleotide"
  misc_feature (61)..(61): /note="Nucleotide may be methylated to form 5-methylcytosine"
ctcccaggttcaagcaattctcctgcctaagcctcccgagtagctgggattacaggcgtgcgtcaccacgcttttgtaaatttgtaaagttacaaaaagctaactttttgtatttttagtag

SEQ ID NO: 11444 - DNA, 122 bp, Homo sapiens
  misc_feature (61)..(62): /note="This region represents a CpG dinucleotide"
  misc_feature (61)..(61): /note="Nucleotide may be methylated to form 5-methylcytosine"
ttagccttggtaatttatatgcttctctgtggtcctggctcatcctttttgttgagtcatcgcatggcaggagtgcaagagagtgaacccagtcctgcaagatccaaggcgctttcaaacca

SEQ ID NO: 11445 - DNA, 122 bp, Homo sapiens
  misc_feature (61)..(62): /note="This region represents a CpG dinucleotide"
  misc_feature (61)..(61): /note="Nucleotide may be methylated to form 5-methylcytosine"
agcacttttttccccatccctataaaaaaaaaaaaaaaaaagagagagagagagagggagcgagagggagatgatctcattcgatcctgtgaaggactgctactcagtaaggaagaagtcct

SEQ ID NO: 11446 - DNA, 122 bp, Homo sapiens
  misc_feature (61)..(62): /note="This region represents a CpG dinucleotide"
  misc_feature (61)..(61): /note="Nucleotide may be methylated to form 5-methylcytosine"
gacgtgttcatgtgttcatgtaagaagtcactgaggcaacagcactttacattaaccatccgcctaacactagtcgatccttacgtcacaatccaaattggtgatagaggttgtgcaatgtg

SEQ ID NO: 11447 - DNA, 122 bp, Homo sapiens
  misc_feature (61)..(62): /note="This region represents a CpG dinucleotide"
  misc_feature (61)..(61): /note="Nucleotide may be methylated to form 5-methylcytosine"
atcgactcattcaagaggacattaatatgtcacttaaagttgcctttgggctattatttacgaaacactaatgggagttaaggcttctggccagattcagccttcaggtggactggattggc

SEQ ID NO: 11448 - DNA, 122 bp, Homo sapiens
  misc_feature (61)..(62): /note="This region represents a CpG dinucleotide"
  misc_feature (61)..(61): /note="Nucleotide may be methylated to form 5-methylcytosine"
ataacactggccaggcatcacgaggaagctatgagcactcggttgatgtctgcagtcacacggaggcctcagttactaaagaaagaggagtgttactgagatcagttacttcacacccattt

SEQ ID NO: 11449 - DNA, 122 bp, Homo sapiens
  misc_feature (61)..(62): /note="This region represents a CpG dinucleotide"
  misc_feature (61)..(61): /note="Nucleotide may be methylated to form 5-methylcytosine"
gaggggagctggaagtgtggcggtctgtcttagactatgttagctgtgtcaaaacagctacgccccacatcaccagccgaaaaggaaggggaaacagtggcaggtacttgcctggcatctta

SEQ ID NO: 11450 - DNA, 122 bp, Homo sapiens
  misc_feature (61)..(62): /note="This region represents a CpG dinucleotide"
  misc_feature (61)..(61): /note="Nucleotide may be methylated to form 5-methylcytosine"
ggaaatgatcttaccagatctaccatttagttttatattatcacgtgcctacttacagtgcgtgcaaaaaggaccttttccttcatcaggggttgggtggagagcatcccaatgataagcat

SEQ ID NO: 11451 - DNA, 122 bp, Homo sapiens
  misc_feature (61)..(62): /note="This region represents a CpG dinucleotide"
  misc_feature (61)..(61): /note="Nucleotide may be methylated to form 5-methylcytosine"
ccttttagattcgatttatcttagccaaattgaccagggaaaataggtgcctacaaatagcgatcactggcaaacaaggagagttattatcttaaattaaggctggtttctaacaacaaaaa

SEQ ID NO: 11452 - DNA, 122 bp, Homo sapiens
  misc_feature (61)..(62): /note="This region represents a CpG dinucleotide"
  misc_feature (61)..(61): /note="Nucleotide may be methylated to form 5-methylcytosine"
actgattgtacaagttaacaagttagcctgttactatttcatgggtgccagcagaagacacgagactcctgagtcagagaaaaaggactttattactcatagcataacaggaagctggagct

SEQ ID NO: 11453 - DNA, 122 bp, Homo sapiens
  misc_feature (61)..(62): /note="This region represents a CpG dinucleotide"
  misc_feature (61)..(61): /note="Nucleotide may be methylated to form 5-methylcytosine"
tttacagaacccccagggctttgagagaacgggcagagccagcaaggagctcgggagtctcggcctagggaggaggtggtgcagatttgcaggcatcggtgccccacagacggcgagcaggc

SEQ ID NO: 11454 - DNA, 122 bp, Homo sapiens
  misc_feature (61)..(62): /note="This region represents a CpG dinucleotide"
  misc_feature (61)..(61): /note="Nucleotide may be methylated to form 5-methylcytosine"
ctggtgagaaaagcactggcagcactgatgttggtgtgagatgatgttgttctttagctacgttaataaagatattgcctttagaatacagaggtgctctacagtgatcattcattcaactg

SEQ ID NO: 11455 - DNA, 122 bp, Homo sapiens
  misc_feature (61)..(62): /note="This region represents a CpG dinucleotide"
  misc_feature (61)..(61): /note="Nucleotide may be methylated to form 5-methylcytosine"
aaaactacccaaattcctaggacaataatcaactgcattccactgggcaaaattaatttgcgtttctatggacaagaatcatttgcattactctcagttttctacaacttgcagtagttgta

SEQ ID NO: 11456 - DNA, 122 bp, Homo sapiens
  misc_feature (61)..(62): /note="This region represents a CpG dinucleotide"
  misc_feature (61)..(61): /note="Nucleotide may be methylated to form 5-methylcytosine"
ggcgcccactcaccaggtctgcgcgggagccctcgtgggggggcttgggctgccggagctcgctgggtgccagctgcagggacacaccgtggctgtggcccccgtggctatggctgctgtgg

SEQ ID NO: 11457 - DNA, 122 bp, Homo sapiens
  misc_feature (61)..(62): /note="This region represents a CpG dinucleotide"
  misc_feature (61)..(61): /note="Nucleotide may be methylated to form 5-methylcytosine"
ccccattgaaacatttaattttgggcaggctccatgttttttccttgtgtagtatcatcccgtgctctgtttttccaacttaaagcctacttacaaacttgtcaagtctcacatctctctgg

SEQ ID NO: 11458 - DNA, 122 bp, Homo sapiens
  misc_feature (61)..(62): /note="This region represents a CpG dinucleotide"
  misc_feature (61)..(61): /note="Nucleotide may be methylated to form 5-methylcytosine"
aagagcccacacatgttagaaacagtcagtcctgtgttcagattccccttcccctgacaccgccgtggtggggagtccctgtgggggcagtcacttctttcttctaacctgagtctgactca

SEQ ID NO: 11459 - DNA, 122 bp, Homo sapiens
  misc_feature (61)..(62): /note="This region represents a CpG dinucleotide"
  misc_feature (61)..(61): /note="Nucleotide may be methylated to form 5-methylcytosine"
cccactaccatccctgcacacacaccaccatctctgggcacccactaccatccttgcacacgcaccactgtccttgcacacctgttaacatccctgggtacccatcaccatctctgtacatc

SEQ ID NO: 11460 - DNA, 122 bp, Homo sapiens
  misc_feature (61)..(62): /note="This region represents a CpG dinucleotide"
  misc_feature (61)..(61): /note="Nucleotide may be methylated to form 5-methylcytosine"
gaagggtggggtggaggctactgacatgtagcatagagaagccagggatactgctgaacacgtggcagtacacatgacaggccccacagcaaagacttatctggtccttagtgtcaatagtg

SEQ ID NO: 11461 - DNA, 122 bp, Homo sapiens
  misc_feature (61)..(62): /note="This region represents a CpG dinucleotide"
  misc_feature (61)..(61): /note="Nucleotide may be methylated to form 5-methylcytosine"
cccctccctagacctggtgactgggagactcggctgggcccagcagcccatgcctaaccacgcctccaggggcttctaatgccagcccagaacactaggctgtggtcatcctcagttgagcc

SEQ ID NO: 11462 - DNA, 122 bp, Homo sapiens
  misc_feature (61)..(62): /note="This region represents a CpG dinucleotide"
  misc_feature (61)..(61): /note="Nucleotide may be methylated to form 5-methylcytosine"
ttcagggacagctcaagtatggggcaataactgaacccatcaccaggagcaacttgctgccgtgtggtcttgcgggggcaccacagtgagccccacctcggggtggctcatcacacacagtc

SEQ ID NO: 11463 - DNA, 122 bp, Homo sapiens
  misc_feature (61)..(62): /note="This region represents a CpG dinucleotide"
  misc_feature (61)..(61): /note="Nucleotide may be methylated to form 5-methylcytosine"
cagtcattgttacagtcacacatacctggaagaagcaatggtccctgcatttctgtggtacgggtatcccacgccagccagccctggaagctctctactgtgccgtaagccaaccacctttc

SEQ ID NO: 11464 - DNA, 122 bp, Homo sapiens
  misc_feature (61)..(62): /note="This region represents a CpG dinucleotide"
  misc_feature (61)..(61): /note="Nucleotide may be methylated to form 5-methylcytosine"
ccttccccgccctccgcgaggctgcagcccaggctgagcgccgcctcccaggcccagggccgcccctccaagccccaaccccgggtttcatccctggcaagggcgctgctcctccccgaccc

SEQ ID NO: 11465 - DNA, 122 bp, Homo sapiens
  misc_feature (61)..(62): /note="This region represents a CpG dinucleotide"
  misc_feature (61)..(61): /note="Nucleotide may be methylated to form 5-methylcytosine"
tgtggtttgaacatcctgatcacttctgagacaatgccattagtgaatacattctaagcacgtcatctgaatattcacagacatctttttaaaagggctggatctggaagttaggccatgaa

SEQ ID NO: 11466 - DNA, 122 bp, Homo sapiens
  misc_feature (61)..(62): /note="This region represents a CpG dinucleotide"
  misc_feature (61)..(61): /note="Nucleotide may be methylated to form 5-methylcytosine"
aggaagtggccatggggcctggaggttgggagtgccgacaccagtggctgctgacacctgcgtcactcactgccacacttcagcggtgtgccttggggttcacaagggggaggcctgggagg

SEQ ID NO: 11467 - DNA, 122 bp, Homo sapiens
  misc_feature (61)..(62): /note="This region represents a CpG dinucleotide"
  misc_feature (61)..(61): /note="Nucleotide may be methylated to form 5-methylcytosine"
cacaatgactatttttttacctctacaatttgcttgcagtgtttcttttcattcatttaacgtgttttgaaagcaatatgccaaagggaatttgagaggagttttattttgaccctatgtat

SEQ ID NO: 11468 - DNA, 122 bp, Homo sapiens
  misc_feature (61)..(62): /note="This region represents a CpG dinucleotide"
  misc_feature (61)..(61): /note="Nucleotide may be methylated to form 5-methylcytosine"
ggcctgaggctgggagtgcaggcatgaatttgagtgcaggctcaggaacatccccagggccgccaggcagggagacacctcttcaactcctggctcctcgactctagctggtgacctaggca

SEQ ID NO: 11469 - DNA, 122 bp, Homo sapiens
  misc_feature (61)..(62): /note="This region represents a CpG dinucleotide"
  misc_feature (61)..(61): /note="Nucleotide may be methylated to form 5-methylcytosine"
tgtaattagggagtcacccagtgtcagaccccaaggaataaggtccaggcatgggaccctcgcccccgaatgccgtccttccccaccgggggggggggcgggaacataaaatggacccaagt

SEQ ID NO: 11470 - DNA, 122 bp, Homo sapiens
  misc_feature (61)..(62): /note="This region represents a CpG dinucleotide"
  misc_feature (61)..(61): /note="Nucleotide may be methylated to form 5-methylcytosine"
gaaaccacgctgcccgggtggaggagcgccagagggaagcaggccccatgtcctccctcccgcaggaagtgcaccaggcccgtcctttccacccaggctgtacaaaagggaggaggagcact

SEQ ID NO: 11471 - DNA, 122 bp, Homo sapiens
  misc_feature (61)..(62): /note="This region represents a CpG dinucleotide"
  misc_feature (61)..(61): /note="Nucleotide may be methylated to form 5-methylcytosine"
cagtgatgtttgcacaaggccacaaacgcttctggcagttcagtgaaatgaaccaaggggcggatccctgggagaacagcaaatataaaggctgagagaaagcaggcccttttgagttaaat

SEQ ID NO: 11472 - DNA, 122 bp, Homo sapiens
  misc_feature (61)..(62): /note="This region represents a CpG dinucleotide"
  misc_feature (61)..(61): /note="Nucleotide may be methylated to form 5-methylcytosine"
aatttttggaagcacgaggttgccaaaagtcttccaaaaatggaacaaaagaaatccctgcggaggggctatcagctgtcaaagacgcaataactacacagaagaggacaaaaaaggggaag

SEQ ID NO: 11473 - DNA, 122 bp, Homo sapiens
  misc_feature (61)..(62): /note="This region represents a CpG dinucleotide"
  misc_feature (61)..(61): /note="Nucleotide may be methylated to form 5-methylcytosine"
cacaaattctgtgaatgagtgtaaacatctttggctgacctctgaaccaagaatccatggcgaagcataaaaacaatctgagctgacatttgtgaagcactaccaacctcaatggtgatgga

SEQ ID NO: 11474 - DNA, 122 bp, Homo sapiens
  misc_feature (61)..(62): /note="This region represents a CpG dinucleotide"
  misc_feature (61)..(61): /note="Nucleotide may be methylated to form 5-methylcytosine"
cccactcttgacacgtggggattattacaatccaagatgagatttgggtggggacacagccgaagtatatcaccaggctctgctaagcactgaaggccatagtgcttgttcatagcttcctt

SEQ ID NO: 11475 - DNA, 122 bp, Homo sapiens
  misc_feature (61)..(62): /note="This region represents a CpG dinucleotide"
  misc_feature (61)..(61): /note="Nucleotide may be methylated to form 5-methylcytosine"
aatgccttacccagagaggaacaaggaaatgtattatgttagaattctttctggaaatcacgtgagcagaaagaggagtggggtaaaatatttacactattgaaagaaaagacacccacttg

SEQ ID NO: 11476 - DNA, 122 bp, Homo sapiens
  misc_feature (61)..(62): /note="This region represents a CpG dinucleotide"
  misc_feature (61)..(61): /note="Nucleotide may be methylated to form 5-methylcytosine"
atttatttctaccccggctcgttagagacaggatcagagctataggcaggctgtgggtcccgtgcatgcagggccttcctcgtccctgcatgacccagcgtcggggcctggcaccctcagtg

SEQ ID NO: 11477 - DNA, 122 bp, Homo sapiens
  misc_feature (61)..(62): /note="This region represents a CpG dinucleotide"
  misc_feature (61)..(61): /note="Nucleotide may be methylated to form 5-methylcytosine"
ggaggtgtggagagtccccgagcttcctgatgagaagtcaccctctgccccacctctctgcgcccaggcaatggcaggctgccacccagcatccaggtcagcctgcatgtccatttctgggc

SEQ ID NO: 11478 - DNA, 122 bp, Homo sapiens
  misc_feature (61)..(62): /note="This region represents a CpG dinucleotide"
  misc_feature (61)..(61): /note="Nucleotide may be methylated to form 5-methylcytosine"
caaagaacagcttctcacaaagtgcatggcacagtaaggtaagctgatgtgagagcagcacgtgaggccccactcaccctgggtggaacctagtgggtctctgggccaggggactctgtgga

SEQ ID NO: 11479 - DNA, 122 bp, Homo sapiens
  misc_feature (61)..(62): /note="This region represents a CpG dinucleotide"
  misc_feature (61)..(61): /note="Nucleotide may be methylated to form 5-methylcytosine"
gtgcctggctctcactgaaaaacaacacgtgctcacttgagatatttcagaagatacaaacgcaaagacaaacaaaaaaccacccagcacctcagtggtagatgcagttaccatcagcccgg

SEQ ID NO: 11480 - DNA, 122 bp, Homo sapiens
  misc_feature (61)..(62): /note="This region represents a CpG dinucleotide"
  misc_feature (61)..(61): /note="Nucleotide may be methylated to form 5-methylcytosine"
aatgtagtagaaacaggcttcccagtctatcatgtgtcattgaaacgcaaaacacaatagcgtttgtcttgttacaaaccaggaggctgtaaatctattatttattttttattaaaggtgca

SEQ ID NO: 11481 - DNA, 122 bp, Homo sapiens
  misc_feature (61)..(62): /note="This region represents a CpG dinucleotide"
  misc_feature (61)..(61): /note="Nucleotide may be methylated to form 5-methylcytosine"
ctaatgacctgccttggctctctctgcatggtttatgcatatcaaataattatcaacaatcgacaaatatttattgagttcctaccacgtcccaggcgctgtgctacgcactggaagttaca

SEQ ID NO: 11482 - DNA, 122 bp, Homo sapiens
  misc_feature (61)..(62): /note="This region represents a CpG dinucleotide"
  misc_feature (61)..(61): /note="Nucleotide may be methylated to form 5-methylcytosine"
aatgtcttatgtaatccaccgtgaagagcttggtgaacagctgtgctaggaaggatcaggcgccatgggaagtgtggtgcggccgtttcccctacttctctccgcctcgtgcttacgactga

SEQ ID NO: 11483 - DNA, 122 bp, Homo sapiens
  misc_feature (61)..(62): /note="This region represents a CpG dinucleotide"
  misc_feature (61)..(61): /note="Nucleotide may be methylated to form 5-methylcytosine"
cagacacgaagattgcatgagcattattattggcaaatcgggaaccttgcttctctactgcgtgctctgaaaggaggaagaatgctagggttttttccctggaagggagaaaagagtaaaca

SEQ ID NO: 11484 - DNA, 122 bp, Homo sapiens
  misc_feature (61)..(62): /note="This region represents a CpG dinucleotide"
  misc_feature (61)..(61): /note="Nucleotide may be methylated to form 5-methylcytosine"
gaggggtcttcatcaattactggacttgtctaattaactcacttaaaataatttaaaactcgagaatttgctcaataacaatacatggaaatggtgagtattgtggtttctaactttcactt

SEQ ID NO: 11485 - DNA, 122 bp, Homo sapiens
  misc_feature (61)..(62): /note="This region represents a CpG dinucleotide"
  misc_feature (61)..(61): /note="Nucleotide may be methylated to form 5-methylcytosine"
attattatcttggtaggtgtcattcaacctttttggcatatatgtaaagtaataaagcaacgatagcttaagagcaggccaagtttgtataaaggtatgctgcaatctcactgcaacttagt

SEQ ID NO: 11486 - DNA, 122 bp, Homo sapiens
  misc_feature (61)..(62): /note="This region represents a CpG dinucleotide"
  misc_feature (61)..(61): /note="Nucleotide may be methylated to form 5-methylcytosine"
tacttctgttaaatgtctcttgactaacagaaccatctacagcatgagcatctaattatccgtagagaattcagaaaaccctcttgtcttaattatgagtatatggaaggcttggttgaaat

SEQ ID NO: 11487 - DNA, 122 bp, Homo sapiens
  misc_feature (61)..(62): /note="This region represents a CpG dinucleotide"
  misc_feature (61)..(61): /note="Nucleotide may be methylated to form 5-methylcytosine"
tgatgaggggcattaatagctcctaatgacaccatctgagcctggcctccttccttctctcgctgctcactccttcctctttccctccatcccttgaagacacatgatcccacagacagaca

SEQ ID NO: 11488 - DNA, 122 bp, Homo sapiens
  misc_feature (61)..(62): /note="This region represents a CpG dinucleotide"
  misc_feature (61)..(61): /note="Nucleotide may be methylated to form 5-methylcytosine"
ttgtccattctactgttgatggaaaatggactgtttccagctgcttgccatgatggatagcgcacttgtgaacattgtttcatgtgacctgatgtgcccaggagtggaattccagggaacct

SEQ ID NO: 11489 - DNA, 122 bp, Homo sapiens
  misc_feature (61)..(62): /note="This region represents a CpG dinucleotide"
  misc_feature (61)..(61): /note="Nucleotide may be methylated to form 5-methylcytosine"
cagccagtcacttcctggtaaatattttcattttctttgctcagtgtcttttttggagggcgtgccatgcgatactgcctctccttcacttgagcaatttctgtattttccaagtcagatat

SEQ ID NO: 11490 - DNA, 122 bp, Homo sapiens
  misc_feature (61)..(62): /note="This region represents a CpG dinucleotide"
  misc_feature (61)..(61): /note="Nucleotide may be methylated to form 5-methylcytosine"
taggttatttatgttgcctgcactgataaccaaagactgtgcaattctctatatcttttacgtcttggagacctattcttgttgtttgcataagatgtaaaaaatataattctgtgtcctag

SEQ ID NO: 11491 - DNA, 122 bp, Homo sapiens
  misc_feature (61)..(62): /note="This region represents a CpG dinucleotide"
  misc_feature (61)..(61): /note="Nucleotide may be methylated to form 5-methylcytosine"
actgtgctccttgcagttgtctactggaacatctggagtctactgttcaaagaaagcattcgtgcaggcctgcactaaatcaagcagctgattgacaaccacccctttctccctatttcctt

SEQ ID NO: 11492 - DNA, 122 bp, Homo sapiens
  misc_feature (61)..(62): /note="This region represents a CpG dinucleotide"
  misc_feature (61)..(61): /note="Nucleotide may be methylated to form 5-methylcytosine"
gacacccgtggtttgcacactgtgggcagctgaagctatcactgcttacagatgtggtcacggatggccacatcagttattcctcagttcctgggtaattgtacatgactcaaaacacagga

SEQ ID NO: 11493 - DNA, 122 bp, Homo sapiens
  misc_feature (61)..(62): /note="This region represents a CpG dinucleotide"
  misc_feature (61)..(61): /note="Nucleotide may be methylated to form 5-methylcytosine"
gcccttgttccttctttacattcctcagacgttgtgctttacagccacagtttcagtaaccgctgccagagccccacctgtgcgtgttctccaggatggctgcgtctgggctctgggcgact

SEQ ID NO: 11494 - DNA, 122 bp, Homo sapiens
  misc_feature (61)..(62): /note="This region represents a CpG dinucleotide"
  misc_feature (61)..(61): /note="Nucleotide may be methylated to form 5-methylcytosine"
atatcttgtatacatcactgtctttggtcataccaccctttctttaagggaaaataaaaccggttgaacagttccctaatacatacaacaatgattcagaaatgtttgtgtacataaacatc

SEQ ID NO: 11495 - DNA, 122 bp, Homo sapiens
  misc_feature (61)..(62): /note="This region represents a CpG dinucleotide"
  misc_feature (61)..(61): /note="Nucleotide may be methylated to form 5-methylcytosine"
taaaggtcgtcatctgggcaaatgaaccactctgacttggagattaggggctcagacagccgtggatgagagtccagctctactacttattagccttgattaggtgagtattaccctgtatt

SEQ ID NO: 11496 - DNA, 122 bp, Homo sapiens
  misc_feature (61)..(62): /note="This region represents a CpG dinucleotide"
  misc_feature (61)..(61): /note="Nucleotide may be methylated to form 5-methylcytosine"
ggctaggatagcagtgccatggagtcaacacagagtaagatgaaccagggttgctgccaacgcccagcacctgctaagtgactcagcagagaagccagtcccaggagggcagcctaaagtgt

SEQ ID NO: 11497 - DNA, 122 bp, Homo sapiens
  misc_feature (61)..(62): /note="This region represents a CpG dinucleotide"
  misc_feature (61)..(61): /note="Nucleotide may be methylated to form 5-methylcytosine"
tctaagggcatggaaggggaggaggattaaggttcagatgaggaaactggtcatgcaatccgtggagatagagcaagcacagcacccaggaaaatttggcccaggacctgctaccccacaga

SEQ ID NO: 11498 - DNA, 122 bp, Homo sapiens
  misc_feature (61)..(62): /note="This region represents a CpG dinucleotide"
  misc_feature (61)..(61): /note="Nucleotide may be methylated to form 5-methylcytosine"
acacaggctttggcacagagaacaggcacagagacatctgacctccttgttaaacaggtgcgtcaacacaccagtgaaaccaacaaacctcacactcacctcaaatgtcctgtgcagggtgg

SEQ ID NO: 11499 - DNA, 122 bp, Homo sapiens
  misc_feature (61)..(62): /note="This region represents a CpG dinucleotide"
  misc_feature (61)..(61): /note="Nucleotide may be methylated to form 5-methylcytosine"
cagatctggcacttgagtcagtagaaaatggggagcctctgtgggctcctggtcctgcaccgtgataaatagcctgtcctgcaacctggcttaaaacagggaaagccggagttaggcaacag

SEQ ID NO: 11500 - DNA, 122 bp, Homo sapiens
  misc_feature (61)..(62): /note="This region represents a CpG dinucleotide"
  misc_feature (61)..(61): /note="Nucleotide may be methylated to form 5-methylcytosine"
acaggggcttggagaggtcaaggaacttgcccaaagtcacagcatagaagtgacagaatccgagttttgacccagatttgatgggttccaaagcgtgaacttatttctccactccacaaaaa

SEQ ID NO: 11501 - DNA, 122 bp, Homo sapiens
  misc_feature (61)..(62): /note="This region represents a CpG dinucleotide"
  misc_feature (61)..(61): /note="Nucleotide may be methylated to form 5-methylcytosine"
agatcgtaaatcataaccagtagggattatctgaaatggatttttccctgtttatgtttacgtggtcaagttttaaaataacagtggccaggaaatctgagagaggctgaaggctctgttct

SEQ ID NO: 11502 - DNA, 122 bp, Homo sapiens
  misc_feature (61)..(62): /note="This region represents a CpG dinucleotide"
  misc_feature (61)..(61): /note="Nucleotide may be methylated to form 5-methylcytosine"
cttgggcctgttcccagtcttttcctgtaagagatcatgcagcaggggataatatcctttcgtatagtggaggtgtgtcttcaggacagactcctaaaagtgagacggccgggtcaaaagtt

SEQ ID NO: 11503 - DNA, 122 bp, Homo sapiens
  misc_feature (61)..(62): /note="This region represents a CpG dinucleotide"
  misc_feature (61)..(61): /note="Nucleotide may be methylated to form 5-methylcytosine"
gctttctgggttccatcatgtgaccaccatactgcagagcagaccagaactgctgatcaccgtgagaagcaaacacaaaggtcaggggctgagtggtttggctatttttctactgtgagaca

SEQ ID NO: 11504 - DNA, 122 bp, Homo sapiens
  misc_feature (61)..(62): /note="This region represents a CpG dinucleotide"
  misc_feature (61)..(61): /note="Nucleotide may be methylated to form 5-methylcytosine"
ggcctacatcctttgtctgttaggtgcttccacatccttatgtcttaaatggccaaaatacgtcacccccactgccaaaacacacaggtcactcgaggtcacaatctggaacataggctggc

SEQ ID NO: 11505 - DNA, 122 bp, Homo sapiens
  misc_feature (61)..(62): /note="This region represents a CpG dinucleotide"
  misc_feature (61)..(61): /note="Nucleotide may be methylated to form 5-methylcytosine"
gacttccctgtatccacacccttcttcagtgtcctcccactctgactctggattcagcaacggtagcaaacttaaacagaaacttgaaacctgtttgcatgttttcagcttcttcttctgga

SEQ ID NO: 11506 - DNA, 122 bp, Homo sapiens
  misc_feature (61)..(62): /note="This region represents a CpG dinucleotide"
  misc_feature (61)..(61): /note="Nucleotide may be methylated to form 5-methylcytosine"
actgggtctacctggataatccaggataatctccctgtctcagagttcttaacatcatcacgcctgcaaaatccctcttgccttatgaggtaacatattcacaggttctggggattagggcg

SEQ ID NO: 11507 - DNA, 122 bp, Homo sapiens
  misc_feature (61)..(62): /note="This region represents a CpG dinucleotide"
  misc_feature (61)..(61): /note="Nucleotide may be methylated to form 5-methylcytosine"
gtagatgattcattcggcaaatacagaaaagaaaacaaagctgtgatgacagatctggaacgaagaacagcacacgccacgctctaggtgctcaagtagatgtttatttaatgaataataaa

SEQ ID NO: 11508 - DNA, 122 bp, Homo sapiens
  misc_feature (61)..(62): /note="This region represents a CpG dinucleotide"
  misc_feature (61)..(61): /note="Nucleotide may be methylated to form 5-methylcytosine"
caaattaaaataaggaaacatatttcttgggtacctgagagatcactgctttcaattcgccggagatctgaatcagcccaaaagagcttgcccagcctgctatcaagggctaaagcaattgg

SEQ ID NO: 11509 - DNA, 122 bp, Homo sapiens
  misc_feature (61)..(62): /note="This region represents a CpG dinucleotide"
  misc_feature (61)..(61): /note="Nucleotide may be methylated to form 5-methylcytosine"
aaaaaaaagatgcatgactcaattcttactaatgaaacataaggaaagtctgaggggaaacgtttcagggaatgtttttcttgttactataaagaactagaaagcaaaggcccctttttgca

SEQ ID NO: 11510 - DNA, 122 bp, Homo sapiens
  misc_feature (61)..(62): /note="This region represents a CpG dinucleotide"
  misc_feature (61)..(61): /note="Nucleotide may be methylated to form 5-methylcytosine"
tggggcatattgaattagaggttaaaggtggagggggtggggtgtggagaaagggaaagacggagaaagaaaagaagggctgctcagtggcagacttttagtgaaatggtgaatgcagcctt

SEQ ID NO: 11511 - DNA, 122 bp, Homo sapiens
  misc_feature (61)..(62): /note="This region represents a CpG dinucleotide"
  misc_feature (61)..(61): /note="Nucleotide may be methylated to form 5-methylcytosine"
tttcgtcatgtgccaatcaataaagcaatgccagtaagcccaagttataagcttgcaggacgtgtgataagatttcaggtgtgtgcaggagctaggtaccaaaatgggaaaaaggccactgg

SEQ ID NO: 11512 - DNA, 122 bp, Homo sapiens
  misc_feature (61)..(62): /note="This region represents a CpG dinucleotide"
  misc_feature (61)..(61): /note="Nucleotide may be methylated to form 5-methylcytosine"
taaacctgcacattcaacaggttgttgctgatcacttaaaatagcagagtcccaagtcctcgtgagtcatggaccatgtcatgtagggagtgagacatttgttcagcattattgtgaaatat

SEQ ID NO: 11513 - DNA, 122 bp, Homo sapiens
  misc_feature (61)..(62): /note="This region represents a CpG dinucleotide"
  misc_feature (61)..(61): /note="Nucleotide may be methylated to form 5-methylcytosine"
ggggattgtgtatcacctctgttaaggcagtgggtgtgttcggaatatgtcactttcacccgagtgtcctgactaaggagagaaacagctatgagactcaccgttggaacattcgctcctcc

SEQ ID NO: 11514 - DNA, 122 bp, Homo sapiens
  misc_feature (61)..(62): /note="This region represents a CpG dinucleotide"
  misc_feature (61)..(61): /note="Nucleotide may be methylated to form 5-methylcytosine"
agtgggacctacagcttggtgggactctgccatgcaggtgtgccaggctgcgtgtgtaggcgaggacaagccaggttccagccagcaggtgcacactcaggtgtgtgcagaggtggtccctt

SEQ ID NO: 11515 - DNA, 122 bp, Homo sapiens
  misc_feature (61)..(62): /note="This region represents a CpG dinucleotide"
  misc_feature (61)..(61): /note="Nucleotide may be methylated to form 5-methylcytosine"
tggtggggcaggctcagctcacactcagccttggcaagtagctccagaaactgctagtgacgttgtcttcaagttaaatctcaggaggaaaagaaaatacgaggacaacaaagagaggaagt

SEQ ID NO: 11516 - DNA, 122 bp, Homo sapiens
  misc_feature (61)..(62): /note="This region represents a CpG dinucleotide"
  misc_feature (61)..(61): /note="Nucleotide may be methylated to form 5-methylcytosine"
gagcaagtgtacatcgttggcctcaggcacatttcatctgattgagtcatctggctcaagcggccactctggtcctttttgtaacccgactattaggggaaagcgtatgtgacagaatgtga

SEQ ID NO: 11517 - DNA, 122 bp, Homo sapiens
  misc_feature (61)..(62): /note="This region represents a CpG dinucleotide"
  misc_feature (61)..(61): /note="Nucleotide may be methylated to form 5-methylcytosine"
tgatgatacacaagtggaagcctgagcaaagagggtgaggggaatgagcagttgaaaccacggatctgtgtgggattgccaaagaagagaacaaactctaaaaaggaaaagaactaaaccta

SEQ ID NO: 11518 - DNA, 122 bp, Homo sapiens
  misc_feature (61)..(62): /note="This region represents a CpG dinucleotide"
  misc_feature (61)..(61): /note="Nucleotide may be methylated to form 5-methylcytosine"
ggagctagagttgcttaatccttcctttatagcccacagagaggtaaggcagggcaggagcgcagcccatagcatgcgagctgttctagtgccagttcaagaaatagctcgtgtgcttacca

SEQ ID NO: 11519 - DNA, 122 bp, Homo sapiens
  misc_feature (61)..(62): /note="This region represents a CpG dinucleotide"
  misc_feature (61)..(61): /note="Nucleotide may be methylated to form 5-methylcytosine"
ttcctgaatgaacaggattccctgctgtagaatcttgttggctggtctacactggccttacgttatcttgaaaatcttccttttgagcaggattgtgggggctgcaggagttctgctgactg

SEQ ID NO: 11520 - DNA, 122 bp, Homo sapiens
  misc_feature (61)..(62): /note="This region represents a CpG dinucleotide"
  misc_feature (61)..(61): /note="Nucleotide may be methylated to form 5-methylcytosine"
cttcatagtcttcccaggaggtctatgcttaatttcatttagcctggggccatgtagcagcgggcatttggacaaatgcaagcagaaactcccctaaggacttagtaatttacaacttgctt

SEQ ID NO: 11521 - DNA, 122 bp, Homo sapiens
  misc_feature (61)..(62): /note="This region represents a CpG dinucleotide"
  misc_feature (61)..(61): /note="Nucleotide may be methylated to form 5-methylcytosine"
taaaaataaatctgaatatatcaacatgtacagtcaactaatttgctgacttcaaaatagcgtgatgaaactctttgcctgttaaacctattattgcccataatgaaagattccatatgcac

SEQ ID NO: 11522 - DNA, 122 bp, Homo sapiens
  misc_feature (61)..(62): /note="This region represents a CpG dinucleotide"
  misc_feature (61)..(61): /note="Nucleotide may be methylated to form 5-methylcytosine"
agaattctgcctaaacattcacctcggtcacctccaggacaaccgcatccagggtggctacgagaacgtgccgactattgacatccacatgaaccagatcggctttgagcgggagtggcaca

SEQ ID NO: 11523 - DNA, 122 bp, Homo sapiens
  misc_feature (61)..(62): /note="This region represents a CpG dinucleotide"
  misc_feature (61)..(61): /note="Nucleotide may be methylated to form 5-methylcytosine"
aggtcttaggtgtatgctgtgtgtgtgtgtgcaaaggcttggggagaaggattggtgtcacgtgcggggcagtgtaaaaaacttaactgcttcccacctgggcacaaaatgaaaagaaagac

SEQ ID NO: 11524 - DNA, 122 bp, Homo sapiens
  misc_feature (61)..(62): /note="This region represents a CpG dinucleotide"
  misc_feature (61)..(61): /note="Nucleotide may be methylated to form 5-methylcytosine"
ttttcttattaaggaatctggttctatgactgtcctaagcccaggctgagttaagagcgacgagttctggagggaactacttcccactctgagtcttctggttgtaatccttgtcttttctc

SEQ ID NO: 11525 - DNA, 122 bp, Homo sapiens
  misc_feature (61)..(62): /note="This region represents a CpG dinucleotide"
  misc_feature (61)..(61): /note="Nucleotide may be methylated to form 5-methylcytosine"
tctttgtatttctttgggccacctcaaaaacacctccaggttggtatcccaggaaaacaacggttaagttcaggacgtttactgaccaattgcttcatattggagatgtagagcttttctac

SEQ ID NO: 11526 - DNA, 122 bp, Homo sapiens
  misc_feature (61)..(62): /note="This region represents a CpG dinucleotide"
  misc_feature (61)..(61): /note="Nucleotide may be methylated to form 5-methylcytosine"
gtgggaaggaaagggagccgagagggctgagccgctgagccggagtccagatgaatgtgccggagtctctgcatttgtgatgggggcgaggtgatgggggcgaggtggccggcgtggctctg

SEQ ID NO: 11527 - DNA, 122 bp, Homo sapiens
  misc_feature (61)..(62): /note="This region represents a CpG dinucleotide"
  misc_feature (61)..(61): /note="Nucleotide may be methylated to form 5-methylcytosine"
atctccttgaaaattgaggccttttcgatagtttcgggtcaggtaaaaatggcctcctggcgtaagcttttcaaggttttttggaggctttttgtaaattgtgataggaactttggaccttg

SEQ ID NO: 11528 - DNA, 122 bp, Homo sapiens
  misc_feature (61)..(62): /note="This region represents a CpG dinucleotide"
  misc_feature (61)..(61): /note="Nucleotide may be methylated to form 5-methylcytosine"
tcggcacccacactagctcggtctcctcaaaactccgtgtccttgtccaccactgagcggcgtgcacacacagggtggggcagcagtggccccagggctgcctccgtctccagggatgagtc

SEQ ID NO: 11529 - DNA, 122 bp, Homo sapiens
  misc_feature (61)..(62): /note="This region represents a CpG dinucleotide"
  misc_feature (61)..(61): /note="Nucleotide may be methylated to form 5-methylcytosine"
cttggtctgacccctcagggaaatcccttgctgctggaagtcaaatcctcaactttcacacgaagccaccaggtgtaaagcacacaccaagtataaggcaggatcaggagatacatgatcaa

SEQ ID NO: 11530 - DNA, 122 bp, Homo sapiens
  misc_feature (61)..(62): /note="This region represents a CpG dinucleotide"
  misc_feature (61)..(61): /note="Nucleotide may be methylated to form 5-methylcytosine"
ctccagcaggtcgatagcaaaacaaacgcactattgaccgccgcgcgcactaaatcctcccggcagacaagatgatgtgagcccgaatcgaatcgactgctgaactcataaccgctggggcc

SEQ ID NO: 11531 - DNA, 122 bp, Homo sapiens
  misc_feature (61)..(62): /note="This region represents a CpG dinucleotide"
  misc_feature (61)..(61): /note="Nucleotide may be methylated to form 5-methylcytosine"
ttggttttcccatctgtgatgtaaacaaatgaaaacctgtttttgaagattcatcaatgacgttgaggaagctaattatctggggaacctttggggatgaatacttttcacatttacttgtc

SEQ ID NO: 11532 - DNA, 122 bp, Homo sapiens
  misc_feature (61)..(62): /note="This region represents a CpG dinucleotide"
  misc_feature (61)..(61): /note="Nucleotide may be methylated to form 5-methylcytosine"
aaaagaaaaaggaaactgcccaactagctgcaaaattattatcaggtaaactcatcattacgaggcagagaatatttttcttcctttccattcaagaaacagaccactaaaaaaacctgtct

SEQ ID NO: 11533 - DNA, 122 bp, Homo sapiens
  misc_feature (61)..(62): /note="This region represents a CpG dinucleotide"
  misc_feature (61)..(61): /note="Nucleotide may be methylated to form 5-methylcytosine"
aacaccctgtggctccgtgggtgaaggcggtgctggctccttccctgtgtgtggatcagccgtgcctgggactcaggtcgggttgggtcaggctgtgtcgggctagggagcccagtctcccc

SEQ ID NO: 11534 - DNA, 122 bp, Homo sapiens
  misc_feature (61)..(62): /note="This region represents a CpG dinucleotide"
  misc_feature (61)..(61): /note="Nucleotide may be methylated to form 5-methylcytosine"
tatataatatatattatatatatgtatatacatattttcctcattagtgggatggagtaacgctgagctgggcaaaagaaaggtccgaatttgcctggtaatattgccacaacttgaaagtg

SEQ ID NO: 11535 - DNA, 122 bp, Homo sapiens
  misc_feature (61)..(62): /note="This region represents a CpG dinucleotide"
  misc_feature (61)..(61): /note="Nucleotide may be methylated to form 5-methylcytosine"
gtcattcattgtatttttagatctccagtctggctcagctgccagtggtgggagtggtgccggaggaggaggaggaggaggaggaggaggcggcagtggcagcggtggaggcggcagcacag

SEQ ID NO: 11536 - DNA, 122 bp, Homo sapiens
  misc_feature (61)..(62): /note="This region represents a CpG dinucleotide"
  misc_feature (61)..(61): /note="Nucleotide may be methylated to form 5-methylcytosine"
ggagaaggaccttcggagcacccgtgtgctgtgaatacagggcctcagctctgctaggggcggcgtggggaagacatagggcgggtgtgagtcagccacttcggctaagcctggaacagccc

SEQ ID NO: 11537 - DNA, 122 bp, Homo sapiens
  misc_feature (61)..(62): /note="This region represents a CpG dinucleotide"
  misc_feature (61)..(61): /note="Nucleotide may be methylated to form 5-methylcytosine"
ccgagtcttggtggttcacggcagcagggttctgtctggttcatgctccgtttgtggctgcgtggctggtgccctccactacatccgctcactccagggcctaggctgtgggagcagctatt

SEQ ID NO: 11538 - DNA, 122 bp, Homo sapiens
  misc_feature (61)..(62): /note="This region represents a CpG dinucleotide"
  misc_feature (61)..(61): /note="Nucleotide may be methylated to form 5-methylcytosine"
ggtctctgctccgcactgcgctggtaagagcctgggaagagatgctgtctgtggtgagcacgtgatagacattccacgacccgacctgtcggtgccctggttctcattgtttcttctcattt

SEQ ID NO: 11539 - DNA, 122 bp, Homo sapiens
  misc_feature (61)..(62): /note="This region represents a CpG dinucleotide"
  misc_feature (61)..(61): /note="Nucleotide may be methylated to form 5-methylcytosine"
tcttatggggccaccatcgtatatgcaatctgtcattgacccaaaggtcattatgcagcacgtgactgtaaagtaaaaggctaggcaggatctttatgaagcaaaatacacttgtgaaagac

SEQ ID NO: 11540 - DNA, 122 bp, Homo sapiens
  misc_feature (61)..(62): /note="This region represents a CpG dinucleotide"
  misc_feature (61)..(61): /note="Nucleotide may be methylated to form 5-methylcytosine"
ctttaaaccacaccttttatctcttcgccagagtgcctttccactcccattctatttttacgcagttggactatgtcttggaactgaagccttctactgagcacagagcaaagttatatttc

SEQ ID NO: 11541 - DNA, 122 bp, Homo sapiens
  misc_feature (61)..(62): /note="This region represents a CpG dinucleotide"
  misc_feature (61)..(61): /note="Nucleotide may be methylated to form 5-methylcytosine"
ttatttttaagtgttcttgtgtccgggccaatagaaaagaacatattccaagagctttctcggacaagagaaagggcatttgaggtttctgcacatatcctctggatacagtgaggcaaaga

SEQ ID NO: 11542 - DNA, 122 bp, Homo sapiens
  misc_feature (61)..(62): /note="This region represents a CpG dinucleotide"
  misc_feature (61)..(61): /note="Nucleotide may be methylated to form 5-methylcytosine"
aataattccatcgtttcattttgtggcatcagagatgagtcattgacccggaagaagtcccgtaatgtttctcaactcagtatctgtgactatatttcctgctcttaaaagtttagcatgcc

SEQ ID NO: 11543 - DNA, 122 bp, Homo sapiens
  misc_feature (61)..(62): /note="This region represents a CpG dinucleotide"
  misc_feature (61)..(61): /note="Nucleotide may be methylated to form 5-methylcytosine"
ctccccacgacagataatgagcagcaagtgcttctggcgacttagggtgatgtgaaatcacgctgggaatcctgctcctcctcaggtcctggcagtttcagggcccctccctaggccttact

SEQ ID NO: 11544 - DNA, 122 bp, Homo sapiens
  misc_feature (61)..(62): /note="This region represents a CpG dinucleotide"
  misc_feature (61)..(61): /note="Nucleotide may be methylated to form 5-methylcytosine"
aagatagcctggacttgggcttcccttctcctccctcctctccagcccagaaaccaagggcggtggccaaaaggctattgttcttactcatgtggctgagaaaatattactcctaagcaaga

SEQ ID NO: 11545 - DNA, 122 bp, Homo sapiens
  misc_feature (61)..(62): /note="This region represents a CpG dinucleotide"
  misc_feature (61)..(61): /note="Nucleotide may be methylated to form 5-methylcytosine"
atttatctcttctgttgttttaagtgccttggaacagattttatgaacaacagcaacattcgatattgatttgctcagtgttagtagtgagatgcctttagtagtgagatcacacctttcag

SEQ ID NO: 11546 - DNA, 122 bp, Homo sapiens
  misc_feature (61)..(62): /note="This region represents a CpG dinucleotide"
  misc_feature (61)..(61): /note="Nucleotide may be methylated to form 5-methylcytosine"
atagctacgcttcttgtctaagcactcttccttattctttattcttgaatattttttattcgttacaagcccttcctgattctttaatcactaaaaacagagcttttagaggggtagaagag

SEQ ID NO: 11547 - DNA, 122 bp, Homo sapiens
  misc_feature (61)..(62): /note="This region represents a CpG dinucleotide"
  misc_feature (61)..(61): /note="Nucleotide may be methylated to form 5-methylcytosine"
attttatccacctccatttcagcatgtggctcgcgtggacaggtggacggacgctgtggccgcatggaaccttgagaacccagggacgagccagtgccgggaaggaactgccgggactcacc

SEQ ID NO: 11548 - DNA, 122 bp, Homo sapiens
  misc_feature (61)..(62): /note="This region represents a CpG dinucleotide"
  misc_feature (61)..(61): /note="Nucleotide may be methylated to form 5-methylcytosine"
agaattttttttttttgtaaatgaattccatgcttttccttcctttcccttccctgccttcgtgaaagggaagctaagtctttctcctaccccagattccttgaaggctgtctgagttctct

SEQ ID NO: 11549 - DNA, 122 bp, Homo sapiens
  misc_feature (61)..(62): /note="This region represents a CpG dinucleotide"
  misc_feature (61)..(61): /note="Nucleotide may be methylated to form 5-methylcytosine"
aagatcaataaatgtttattaaatgaggcactttacttcacaaaggatatggcattttaacggttacaagcgttcccagtcaacgcatccacaaagcattaggccacctataaactaggaat

SEQ ID NO: 11550 - DNA, 122 bp, Homo sapiens
  misc_feature (61)..(62): /note="This region represents a CpG dinucleotide"
  misc_feature (61)..(61): /note="Nucleotide may be methylated to form 5-methylcytosine"
caagatggagtgatacttatgaacattgcttctcctgatcatgtaacaacatcctccttccgtctgctcagacctcacaatcttgagctgtccttgactcctccttttttcccatttgtcac

SEQ ID NO: 11551 - DNA, 122 bp, Homo sapiens
  misc_feature (61)..(62): /note="This region represents a CpG dinucleotide"
  misc_feature (61)..(61): /note="Nucleotide may be methylated to form 5-methylcytosine"
ttgtatgctatcatatggatgaatcatgaggaaactatgttacatgaaataagccagtcacggaaagagaaataccacatgatttcacttatacaaggtatttaatgtagtcaaactcataa

SEQ ID NO: 11552 - DNA, 122 bp, Homo sapiens
  misc_feature (61)..(62): /note="This region represents a CpG dinucleotide"
  misc_feature (61)..(61): /note="Nucleotide may be methylated to form 5-methylcytosine"
cttagggcaattactcaacctctctgtgtcacagattctacagcataaaaccagtaataacgctcacttcacagggctgcaaggagaattaaacaaggtaaaccatgtgaaacacttaggat

SEQ ID NO: 11553 - DNA, 122 bp, Homo sapiens
  misc_feature (61)..(62): /note="This region represents a CpG dinucleotide"
  misc_feature (61)..(61): /note="Nucleotide may be methylated to form 5-methylcytosine"
cttttatcctcacttgatactgccttgttgagtgactcattcattcctgtgactttattacgcacatcctgagggctctcaaatacatacttcagaccagcccggtctcctcatttatagtc

SEQ ID NO: 11554 - DNA, 122 bp, Homo sapiens
  misc_feature (61)..(62): /note="This region represents a CpG dinucleotide"
  misc_feature (61)..(61): /note="Nucleotide may be methylated to form 5-methylcytosine"
ctggagaaaagatacaaaggcaacctctaaggggcatgaagggctcttttgtttgcagctcggggtgcgggaggcggggagattctcaccactgaagtggacgtaaacacacgtcagacgcg

SEQ ID NO: 11555 - DNA, 122 bp, Homo sapiens
  misc_feature (61)..(62): /note="This region represents a CpG dinucleotide"
  misc_feature (61)..(61): /note="Nucleotide may be methylated to form 5-methylcytosine"
gaaggattactcttattacttaatcagtggcatgttcctgatgctgaaaaaccatcctgacgcacatgccatgcatgatgagtgttaggtgtccccactgctggatgaacacgtccactgtt

SEQ ID NO: 11556 - DNA, 122 bp, Homo sapiens
  misc_feature (61)..(62): /note="This region represents a CpG dinucleotide"
  misc_feature (61)..(61): /note="Nucleotide may be methylated to form 5-methylcytosine"
gaatgaggctttggcttcctgctccatccttgtcccctcttccttctagttgtctgggtacgaggcagctgtgccaatcacggagaagtcaaacccactgacccaggatctagacaaagcag

SEQ ID NO: 11557 - DNA, 122 bp, Homo sapiens
  misc_feature (61)..(62): /note="This region represents a CpG dinucleotide"
  misc_feature (61)..(61): /note="Nucleotide may be methylated to form 5-methylcytosine"
caagcactccaaatctagggaattgcagggtcaccttgtacattactcaacttggactgccgtaacaaagtattaatacaatagactgggtggcttaaacagcagaaatttattttctcatg

SEQ ID NO: 11558 - DNA, 122 bp, Homo sapiens
  misc_feature (61)..(62): /note="This region represents a CpG dinucleotide"
  misc_feature (61)..(61): /note="Nucleotide may be methylated to form 5-methylcytosine"
gtcccctgggaatggagtccctgtccacccatgtgagtatggttagagtgacgggcactgcggctgggtggctctcgggctggcactgcggctgggtggctctcgggctggcactgcggctg

SEQ ID NO: 11559 - DNA, 122 bp, Homo sapiens
  misc_feature (61)..(62): /note="This region represents a CpG dinucleotide"
  misc_feature (61)..(61): /note="Nucleotide may be methylated to form 5-methylcytosine"
cccatggcgccaacccccagggaggagaaaggtgtgtacagtccctagtcttcctgttgacggagcagtcaggcacattctcaggctgtcttgctccttgacagcacctcctctgtcagctg

SEQ ID NO: 11560 - DNA, 122 bp, Homo sapiens
  misc_feature (61)..(62): /note="This region represents a CpG dinucleotide"
  misc_feature (61)..(61): /note="Nucleotide may be methylated to form 5-methylcytosine"
gcctcctccagcagagggcaccctgggaaccagaagacctcctggtggagaggaaaggggcggggcctggaatcgtaccattattgcacattcttctgtttaaaatagtgaaagtccttgtt

SEQ ID NO: 11561 - DNA, 122 bp, Homo sapiens
  misc_feature (61)..(62): /note="This region represents a CpG dinucleotide"
  misc_feature (61)..(61): /note="Nucleotide may be methylated to form 5-methylcytosine"
gtggcctgcatagtaggccttgatctccagctcatcatctacctgtggaggacagggctgcgctcaggctgtgtcctcacagcagaggggcggggagtgagggaggcgggggacgggaagcg

SEQ ID NO: 11562 - DNA, 122 bp, Homo sapiens
  misc_feature (61)..(62): /note="This region represents a CpG dinucleotide"
  misc_feature (61)..(61): /note="Nucleotide may be methylated to form 5-methylcytosine"
tacagctgtttttctctcaacctctgtgctggtggctaaatatttacttttctctgttaacggaaggagccagataagattttaagagtctgagacttttgcccctaggacccactgtcaaa

SEQ ID NO: 11563 - DNA, 122 bp, Homo sapiens
  misc_feature (61)..(62): /note="This region represents a CpG dinucleotide"
  misc_feature (61)..(61): /note="Nucleotide may be methylated to form 5-methylcytosine"
ccagaatgttccaacatagatatggaggctccgaggcagagtgatctggtaaattgaacacgacctcagtcttagatcccagatgtaaggataagtctcaaccagtctccccagccttactg

SEQ ID NO: 11564 - DNA, 122 bp, Homo sapiens
  misc_feature (61)..(62): /note="This region represents a CpG dinucleotide"
  misc_feature (61)..(61): /note="Nucleotide may be methylated to form 5-methylcytosine"
gactgaggggaacagaatctgattgcagaatgtttttcagtgctctaaaagtcatgcatacgtaccatccctctgttttatgaccacatttgtcaaaagaactgatttgaaggagcctgttc

SEQ ID NO: 11565 - DNA, 122 bp, Homo sapiens
  misc_feature (61)..(62): /note="This region represents a CpG dinucleotide"
  misc_feature (61)..(61): /note="Nucleotide may be methylated to form 5-methylcytosine"
acaaaccaatatgacttacattatactaaaatcattcccttatttaccaatgggctaattcgtgttatggaaaaggtttgtaacagaacaagctgtactaagaatataagaggtggcttctg

SEQ ID NO: 11566 - DNA, 122 bp, Homo sapiens
  misc_feature (61)..(62): /note="This region represents a CpG dinucleotide"
  misc_feature (61)..(61): /note="Nucleotide may be methylated to form 5-methylcytosine"
tagcagaggaagagaattgctattttggggcatattttaactccaataggtaggcattatcgtccccatattgcagatgaggaaactgaggatcagagagtttaagtagcttgtctggtgtc

SEQ ID NO: 11567 - DNA, 122 bp, Homo sapiens
  misc_feature (61)..(62): /note="This region represents a CpG dinucleotide"
  misc_feature (61)..(61): /note="Nucleotide may be methylated to form 5-methylcytosine"
gggaagcaggccagggcagaggcccagggaagatctcagcaggggcagtgtgagcatgagcgagtgtgtgcacctgtgacagtgcagacagcccaagatcagagatacaatgtgcagggggg

SEQ ID NO: 11568 - DNA, 122 bp, Homo sapiens
  misc_feature (61)..(62): /note="This region represents a CpG dinucleotide"
  misc_feature (61)..(61): /note="Nucleotide may be methylated to form 5-methylcytosine"
tctatctccttaattgtagcaaaaataacttttgagatgcgggtaagtaagcagtagggacgggcagagcagtaactaagttgtgttcataggtattgtgcaagttcttaagtaggctggaa

SEQ ID NO: 11569 - DNA, 122 bp, Homo sapiens
  misc_feature (61)..(62): /note="This region represents a CpG dinucleotide"
  misc_feature (61)..(61): /note="Nucleotide may be methylated to form 5-methylcytosine"
ttccttatgaatcaactggggacagtaatacctcacagggttgtgaaagtaaatgagtaacgcaaattaatgcacctaccacagcacctggcacaggatgaatcataaatgaaaaactttaa

SEQ ID NO: 11570 - DNA, 122 bp, Homo sapiens
  misc_feature (61)..(62): /note="This region represents a CpG dinucleotide"
  misc_feature (61)..(61): /note="Nucleotide may be methylated to form 5-methylcytosine"
tcttctgcccttaaataagcatcctaactagtggaatgagtcacagaacctggaaatagacgtgtgacaaagatggcattacaaatggaatggaaatgtctatcctgttcctgtcccaccat

SEQ ID NO: 11571 - DNA, 122 bp, Homo sapiens
  misc_feature (61)..(62): /note="This region represents a CpG dinucleotide"
  misc_feature (61)..(61): /note="Nucleotide may be methylated to form 5-methylcytosine"
ggtgagttgcagctagaagtgcccagcagaaatgcctccaaagaatttacaaaagtgtctcggagagaattggctttaagtcagataaatagtccctttgttctcctgtgagaacacataaa

SEQ ID NO: 11572 - DNA, 122 bp, Homo sapiens
  misc_feature (61)..(62): /note="This region represents a CpG dinucleotide"
  misc_feature (61)..(61): /note="Nucleotide may be methylated to form 5-methylcytosine"
tagaccctgataacctgcaattccacagccaggtttctatcccagagaaacaaaatcacacgtgcacaagagagcgtatgaaagttcacagcagcattgtctgtcttggtgaaagcctgggt

SEQ ID NO: 11573 - DNA, 122 bp, Homo sapiens
  misc_feature (61)..(62): /note="This region represents a CpG dinucleotide"
  misc_feature (61)..(61): /note="Nucleotide may be methylated to form 5-methylcytosine"
agtctgcgcttgcctattgagcgtcctttgcccgtcacagttacccttttcagtagccctcgttggaattttccttctggtggtttcttaacctccacttacttccccttttcgtttcgtca

SEQ ID NO: 11574 - DNA, 122 bp, Homo sapiens
  misc_feature (61)..(62): /note="This region represents a CpG dinucleotide"
  misc_feature (61)..(61): /note="Nucleotide may be methylated to form 5-methylcytosine"
ctgtccctggctgtggtgttgtttctctagtcagttcccctttctgtatttgagttctaccgtcagtcctggcattatttctctctctacaaggagccttaggaggtacggggagctcgcaa

SEQ ID NO: 11575 - DNA, 122 bp, Homo sapiens
  misc_feature (61)..(62): /note="This region represents a CpG dinucleotide"
  misc_feature (61)..(61): /note="Nucleotide may be methylated to form 5-methylcytosine"
tagctcactgtaacatattctactactagagtttcatattcattgcttgtcttcctaatacgtagatataaactcaggcgagcaggctatttctgttcttgttgttcgctgctgtctccctg

SEQ ID NO: 11576 - DNA, 122 bp, Homo sapiens
  misc_feature (61)..(62): /note="This region represents a CpG dinucleotide"
  misc_feature (61)..(61): /note="Nucleotide may be methylated to form 5-methylcytosine"
tgtcattcattggcatgacaattcagccctctggggtcagactcaattgcacaatgtatacgcatatgacagtatgatctatggagtttctaaagaaatgtgcaggagaagcaggcaaatac

SEQ ID NO: 11577 - DNA, 122 bp, Homo sapiens
  misc_feature (61)..(62): /note="This region represents a CpG dinucleotide"
  misc_feature (61)..(61): /note="Nucleotide may be methylated to form 5-methylcytosine"
cttgaagttcagctgggccaaatgaggggaacagggaacccagagctctcagcctcccagcgcccagacctggcatttgtacagctgtgtctgacatgtaattctttcgacataacttctta

SEQ ID NO: 11578 - DNA, 122 bp, Homo sapiens
  misc_feature (61)..(62): /note="This region represents a CpG dinucleotide"
  misc_feature (61)..(61): /note="Nucleotide may be methylated to form 5-methylcytosine"
caggaaaggaagtcatttccccaggaaagcacatctgacccctaaccttgcatgtggtcacggtggccgtggggccccctcccttcccctggcccgcaaggctggactgtgctgtcatcccg

SEQ ID NO: 11579 - DNA, 122 bp, Homo sapiens
  misc_feature (61)..(62): /note="This region represents a CpG dinucleotide"
  misc_feature (61)..(61): /note="Nucleotide may be methylated to form 5-methylcytosine"
atggctctgtcctttcctgggccaagtctctcaacactgaaccctcaggttcagtctctgcgcttatgaatgagaagcagaaaccacaccttcaaggaagtgagctgcgaacagagaagctg

SEQ ID NO: 11580 - DNA, 122 bp, Homo sapiens
  misc_feature (61)..(62): /note="This region represents a CpG dinucleotide"
  misc_feature (61)..(61): /note="Nucleotide may be methylated to form 5-methylcytosine"
accttccaaggtagatactactgatattccctggtcacaaaggaaatctctgaggtcccacgacattaattagtttgtccaggatcaatgtttataaatatcatagctggtatgtgaactca

SEQ ID NO: 11581 - DNA, 122 bp, Homo sapiens
  misc_feature (61)..(62): /note="This region represents a CpG dinucleotide"
  misc_feature (61)..(61): /note="Nucleotide may be methylated to form 5-methylcytosine"
aaagggcaaagagctgtacaatgatgtcttctcaaggactgtgatctgattcattgtgtgcgtgtgggtgggttctgatgaatgattcacaccacagaattgactcaccttgaggcaagggg

SEQ ID NO: 11582 - DNA, 122 bp, Homo sapiens
  misc_feature (61)..(62): /note="This region represents a CpG dinucleotide"
  misc_feature (61)..(61): /note="Nucleotide may be methylated to form 5-methylcytosine"
ggcgtgagggccatactcgggtggtgggggagggggtggggggtgcccatactggggggccgtagcgacttgggccccgacagtgacccccgactggtggacccatccttctcccttcgtag

SEQ ID NO: 11583 - DNA, 122 bp, Homo sapiens
  misc_feature (61)..(62): /note="This region represents a CpG dinucleotide"
  misc_feature (61)..(61): /note="Nucleotide may be methylated to form 5-methylcytosine"
cccgttgctgagagagaccgggggacacgatagcctgttgctgagagagaccggggaacacggtagcctgttgctgagagaggtcatttcccggatctttgtcctgcgtccgcccacagctg

SEQ ID NO: 11584 - DNA, 122 bp, Homo sapiens
  misc_feature (61)..(62): /note="This region represents a CpG dinucleotide"
  misc_feature (61)..(61): /note="Nucleotide may be methylated to form 5-methylcytosine"
aaattaaaagtttggaaattttaaaccaaactgcctttgttgttatgagttctatacagacgcagaaccagaaatgacagacactttggctgaatctaaaatggtggcctctcaactctgct

SEQ ID NO: 11585 - DNA, 122 bp, Homo sapiens
  misc_feature (61)..(62): /note="This region represents a CpG dinucleotide"
  misc_feature (61)..(61): /note="Nucleotide may be methylated to form 5-methylcytosine"
tgtagtcaggccctttggaagctccaagtcagagatcaaacacatcctccccactacccacgcctagggtgactaatgcctgtgggaaaaacaactgaactaaaaagtcccacaggaacctc

SEQ ID NO: 11586 - DNA, 122 bp, Homo sapiens
  misc_feature (61)..(62): /note="This region represents a CpG dinucleotide"
  misc_feature (61)..(61): /note="Nucleotide may be methylated to form 5-methylcytosine"
acagagccatttgttactggggttacaccccctgcaggaatctttcaatgctctttaaatcgtgggcatgcacaatgcacctgaccttgttcaaagccaggggttgcactgccccaggcaaa

SEQ ID NO: 11587 - DNA, 122 bp, Homo sapiens
  misc_feature (61)..(62): /note="This region represents a CpG dinucleotide"
  misc_feature (61)..(61): /note="Nucleotide may be methylated to form 5-methylcytosine"
ctaggaggttggaaacaggccccggcgagcctggtgccatgtcttcatgggagttgcttacgtggtacaccaagcccaggtataagagagggaccagaaatgtcaactgttttctcggtcca

SEQ ID NO: 11588 - DNA, 122 bp, Homo sapiens
  misc_feature (61)..(62): /note="This region represents a CpG dinucleotide"
  misc_feature (61)..(61): /note="Nucleotide may be methylated to form 5-methylcytosine"
ggaatactatattagcgactcataaagagcatctccagttttgttcttttgcttctctgacgatagttttggtaggttagacctcaggaagaactaaagtagatactgcttttttctttgct

SEQ ID NO: 11589 - DNA, 122 bp, Homo sapiens
  misc_feature (61)..(62): /note="This region represents a CpG dinucleotide"
  misc_feature (61)..(61): /note="Nucleotide may be methylated to form 5-methylcytosine"
ttcgagttctgcatgtgtccaggtggccacagctcagggctcggagagggctccgccctgcggttctgaaacccagcagccacgttaattgcctcttaacgcgcgctgcatgttgctgtatg

SEQ ID NO: 11590 - DNA, 122 bp, Homo sapiens
  misc_feature (61)..(62): /note="This region represents a CpG dinucleotide"
  misc_feature (61)..(61): /note="Nucleotide may be methylated to form 5-methylcytosine"
gggtcggcaaacctttttgggaaagggccagggagttaatattttcgtcgttgaaggccacgtggtctccaactcaatcatccagctttgcccttgaggaagaagcagccatacacagtctg

SEQ ID NO: 11591 - DNA, 122 bp, Homo sapiens
  misc_feature (61)..(62): /note="This region represents a CpG dinucleotide"
  misc_feature (61)..(61): /note="Nucleotide may be methylated to form 5-methylcytosine"
atcttcgccccgcgcgggagatccggcctctcccgagatcttcaccccaggaaggagacccgtcctctcgcaagatcttcaccccacgtaggagacaggtcctctcgcgagatcatcacccc

SEQ ID NO: 11592 - DNA, 122 bp, Homo sapiens
  misc_feature (61)..(62): /note="This region represents a CpG dinucleotide"
  misc_feature (61)..(61): /note="Nucleotide may be methylated to form 5-methylcytosine"
caggccagagtgcaatggcgcaatatcggctcactgcaacctccacctcccgggttcaagcgattctcctgcctaagccccccagcagcagggaacacaggtacgtgccaccatgcccggcc

SEQ ID NO: 11593 - DNA, 122 bp, Homo sapiens
  misc_feature (61)..(62): /note="This region represents a CpG dinucleotide"
  misc_feature (61)..(61): /note="Nucleotide may be methylated to form 5-methylcytosine"
aagccacagactgtgtactgtgcaattcctggggcggcattttcataaatatgtgggtggcgccccctggaggtgtgcaatgtacaacttgcataaatggtaagtgatggtatcccaaagtc

SEQ ID NO: 11594 - DNA, 122 bp, Homo sapiens
  misc_feature (61)..(62): /note="This region represents a CpG dinucleotide"
  misc_feature (61)..(61): /note="Nucleotide may be methylated to form 5-methylcytosine"
aaaagatatatacatacacacacacacatagacatatacacacacacaaaattagccgggcgtggtggcagatgcctgtaatcccagctacccagcaggctgaggcaggagaatcgcttgaa

SEQ ID NO: 11595 - DNA, 122 bp, Homo sapiens
  misc_feature (61)..(62): /note="This region represents a CpG dinucleotide"
  misc_feature (61)..(61): /note="Nucleotide may be methylated to form 5-methylcytosine"
acatgtcttgttttccccactagaccataagccacaagggggagggactcttgtcttatccgtcgtcattattcctgctgcttattgaaggtgttgcctgccacagagaagacctcagtaaa

SEQ ID NO: 11596 - DNA, 122 bp, Homo sapiens
  misc_feature (61)..(62): /note="This region represents a CpG dinucleotide"
  misc_feature (61)..(61): /note="Nucleotide may be methylated to form 5-methylcytosine"
tgcttcctcgggtctcaatacaggtcagtctctgagtaatgcttaccacaaatggtctatcgtatgcctggtaggtttagaactttaaccctttttatattactaaatcttcataacacatt

SEQ ID NO: 11597 - DNA, 122 bp, Homo sapiens
  misc_feature (61)..(62): /note="This region represents a CpG dinucleotide"
  misc_feature (61)..(61): /note="Nucleotide may be methylated to form 5-methylcytosine"
agtggcaataggcacctgttcgcacaggtgaacgagctcactcacgccaaacctgcaacacgaaacatcgacagtcatcgcccctctgcgtggagatgggctctgggtgccccggtggggtg

SEQ ID NO: 11598 - DNA, 122 bp, Homo sapiens
  misc_feature (61)..(62): /note="This region represents a CpG dinucleotide"
  misc_feature (61)..(61): /note="Nucleotide may be methylated to form 5-methylcytosine"
ggggaggctggactgtggattgcatggtcaagactggtctttgagaagctgggcttttctcgtaatactgattctgcctactgcacaccccaaacatgatctgtctctaactctcattccta

SEQ ID NO: 11599 - DNA, 122 bp, Homo sapiens
  misc_feature (61)..(62): /note="This region represents a CpG dinucleotide"
  misc_feature (61)..(61): /note="Nucleotide may be methylated to form 5-methylcytosine"
gtctatcttgctgtctttccctggcttacccagagcacctgccttggtgtaatcctccatcgctgccacatggaagtgttttttcccttcctaaacaagttcctcttctggtatggctgtca

SEQ ID NO: 11600 - DNA, 122 bp, Homo sapiens
  misc_feature (61)..(62): /note="This region represents a CpG dinucleotide"
  misc_feature (61)..(61): /note="Nucleotide may be methylated to form 5-methylcytosine"
ctcaaagagacagaaggaggtgacaacgaggaaggaagataatcaagagagtataatgtccgggaatctaaatgaacactgaataaaatgtaaagcctttcctgcatattcatttattcatt

SEQ ID NO: 11601 - DNA, 122 bp, Homo sapiens
  misc_feature (61)..(62): /note="This region represents a CpG dinucleotide"
  misc_feature (61)..(61): /note="Nucleotide may be methylated to form 5-methylcytosine"
taggagaggagtgccgccgaggcggggcggggcggggcgtggagctgggctggcagtgggcgtggcggtgctgcccaggtgagccaccgctgcttctgcccagacacggtcgcctccacatc

SEQ ID NO: 11602 - DNA, 122 bp, Homo sapiens
  misc_feature (61)..(62): /note="This region represents a CpG dinucleotide"
  misc_feature (61)..(61): /note="Nucleotide may be methylated to form 5-methylcytosine"
acagttcttggcccagtgcctggctcatggtgagttctcagtaaataaccatgaccagcacgttgggaggctgagacaggaggatctcctgagcccaggagttcgagaccagcctgggcaac

SEQ ID NO: 11603 - DNA, 122 bp, Homo sapiens
  misc_feature (61)..(62): /note="This region represents a CpG dinucleotide"
  misc_feature (61)..(61): /note="Nucleotide may be methylated to form 5-methylcytosine"
tgcagctcaggccatggagatgggctgcctgcttgtcataaattgtaggcaaactcccttcgttctgttgttggtcccagtgggcttgagctcctgggaaccaaggctttcagttccacaaa

SEQ ID NO: 11604 - DNA, 122 bp, Homo sapiens
  misc_feature (61)..(62): /note="This region represents a CpG dinucleotide"
  misc_feature (61)..(61): /note="Nucleotide may be methylated to form 5-methylcytosine"
gcacaaatcagcagtgctgctatacatcaacagcaaccactctgagaatcaaatcaagaacgcaacccgttttacaatagctgcaaaacaaaattaaaatctggccaggcacggtgactcac

SEQ ID NO: 11605 - DNA, 122 bp, Homo sapiens
  misc_feature (61)..(62): /note="This region represents a CpG dinucleotide"
  misc_feature (61)..(61): /note="Nucleotide may be methylated to form 5-methylcytosine"
tgcacagtgattcacttgggacattatctcaggttcctcatgccagtggcaattgtagaacgtgacaaattgtctgacaattgtggtgcttccctataattagagatggtgcttctcctact

SEQ ID NO: 11606 - DNA, 122 bp, Homo sapiens
  misc_feature (61)..(62): /note="This region represents a CpG dinucleotide"
  misc_feature (61)..(61): /note="Nucleotide may be methylated to form 5-methylcytosine"
tttattagctgaggttttggcccaaatccctaagtcagctcaagtcctagtgaaggacatcgtgtaaatgacatcctctctgtgaggatgtctccttcttgttttttttttttttattttta

SEQ ID NO: 11607 - DNA, 122 bp, Homo sapiens
  misc_feature (61)..(62): /note="This region represents a CpG dinucleotide"
  misc_feature (61)..(61): /note="Nucleotide may be methylated to form 5-methylcytosine"
gaagtaaagcagccaacctggctggaattgactcagagccaggaggaagcactattgtgacggacagaaaggtaagcaagagagccccagcagtctatagtttcaccatgaattctgcaatt

SEQ ID NO: 11608 - DNA, 122 bp, Homo sapiens
  misc_feature (61)..(62): /note="This region represents a CpG dinucleotide"
  misc_feature (61)..(61): /note="Nucleotide may be methylated to form 5-methylcytosine"
gtatctaacatacagccagaatcacagtcatagcacacttaatattttatcagaaacttgcgtgaacaagttaagaggactctcaacttaaaaatgacaccaattgcaatgatcttgttaac

SEQ ID NO: 11609 - DNA, 122 bp, Homo sapiens
  misc_feature (61)..(62): /note="This region represents a CpG dinucleotide"
  misc_feature (61)..(61): /note="Nucleotide may be methylated to form 5-methylcytosine"
ggcccatcgatctggagacggtagggaaaactaggagcagcatagccaccagggccagcacgcaaacgcaccgctgagccatgcttctctcgagctcctgctgtcaggctaccggggtagtt

SEQ ID NO: 11610 - DNA, 122 bp, Homo sapiens
  misc_feature (61)..(62): /note="This region represents a CpG dinucleotide"
  misc_feature (61)..(61): /note="Nucleotide may be methylated to form 5-methylcytosine"
atgactacaaatgtaatcagtgctgaatttgtggggatctcaaaggaaacagaattttatcgtaatcctggttaatacaggaattggtgagtcaggccttgggtttaatttcttctgccaaa

SEQ ID NO: 11611 - DNA, 122 bp, Homo sapiens
  misc_feature (61)..(62): /note="This region represents a CpG dinucleotide"
  misc_feature (61)..(61): /note="Nucleotide may be methylated to form 5-methylcytosine"
ccagaggattggctcacagtcctttcctttgtcttcctttgtcttagctgggattataggcgtgcactaccacgcccggctaatttttgtatttttagtagagacagggttttgccatgttg

SEQ ID NO: 11612 - DNA, 122 bp, Homo sapiens
  misc_feature (61)..(62): /note="This region represents a CpG dinucleotide"
  misc_feature (61)..(61): /note="Nucleotide may be methylated to form 5-methylcytosine"
aaacttacattgctccattggtatagacagtatcgcttccttccacatactgcacctgagcgggatagacatgttgtacctgctgcacagtctgtacctgctgtacctgaaaaacaagtatt

SEQ ID NO: 11613 - DNA, 122 bp, Homo sapiens
  misc_feature (61)..(62): /note="This region represents a CpG dinucleotide"
  misc_feature (61)..(61): /note="Nucleotide may be methylated to form 5-methylcytosine"
cttgtttaaaattagtgcttccaggcatgtctacttgctgtctgggacaacacagggaagcgtcccgggcacctcatgttgcaatcatgttcaaagcctgggctttggtatcaaattgcctg

SEQ ID NO: 11614 - DNA, 122 bp, Homo sapiens
  misc_feature (61)..(62): /note="This region represents a CpG dinucleotide"
  misc_feature (61)..(61): /note="Nucleotide may be methylated to form 5-methylcytosine"
aaaagaatatttagtccacaaaccagtcaaaattaccactgaaatctaaaactaatttaacgcacatttttctccttctgaaatagtccagcctacaaccatgagctaaaatcagttaatac

SEQ ID NO: 11615 - DNA, 122 bp, Homo sapiens
  misc_feature (61)..(62): /note="This region represents a CpG dinucleotide"
  misc_feature (61)..(61): /note="Nucleotide may be methylated to form 5-methylcytosine"
aacttgtgatccggagccagttaacttcacagctaatgtgctgagcagcattccagccagcgtctgaagccagagcagggaggcggacgggccccaggagttcgaggtccgggaagccgaag

SEQ ID NO: 11616 - DNA, 122 bp, Homo sapiens
  misc_feature (61)..(62): /note="This region represents a CpG dinucleotide"
  misc_feature (61)..(61): /note="Nucleotide may be methylated to form 5-methylcytosine"
tgttttcatgtagaaatgcttgcttttgcgtttttgtttcttagcatatatgctttatgtcgcaagttgtagtgagtcagtgggtagagtgctggctctttcaggtgcatttgctatttatt

SEQ ID NO: 11617 - DNA, 122 bp, Homo sapiens
  misc_feature (61)..(62): /note="This region represents a CpG dinucleotide"
  misc_feature (61)..(61): /note="Nucleotide may be methylated to form 5-methylcytosine"
attgagaccatccctagggaggtggcgacgaggagcctggctcggcttaattactgctggcggggcttggctgccatctcatcgctgccatctgttagttgcttgcttcagccagacacaag

SEQ ID NO: 11618 - DNA, 122 bp, Homo sapiens
  misc_feature (61)..(62): /note="This region represents a CpG dinucleotide"
  misc_feature (61)..(61): /note="Nucleotide may be methylated to form 5-methylcytosine"
tttaatttctacattgatgtgacgagctatgatgtggtgagccagtatgtgccagctgtgcgttattctaacagtgtcagttatggtagacgtaaacatgtacatttgcatttgaagctatt

SEQ ID NO: 11619 - DNA, 122 bp, Homo sapiens
  misc_feature (61)..(62): /note="This region represents a CpG dinucleotide"
  misc_feature (61)..(61): /note="Nucleotide may be methylated to form 5-methylcytosine"
agcatcctctgtgtctcagaccttgtgttaagtaactcaggcatgctgacatacatcaggcgtgggtttggcctctttataatatacagtcatatgtcacttaacaatgaagatgggttctg

SEQ ID NO: 11620 - DNA, 122 bp, Homo sapiens
  misc_feature (61)..(62): /note="This region represents a CpG dinucleotide"
  misc_feature (61)..(61): /note="Nucleotide may be methylated to form 5-methylcytosine"
atgagcaggaagctgtgcgctgagcatccttctgattaacttctctcttttctagaactgcgtaacatgtcaggttaagctctgggttatatcggatagctttagttcaagcgtctgagaga

SEQ ID NO: 11621 - DNA, 122 bp, Homo sapiens
  misc_feature (61)..(62): /note="This region represents a CpG dinucleotide"
  misc_feature (61)..(61): /note="Nucleotide may be methylated to form 5-methylcytosine"
tagcccctggaggacaatctatttcctccataataccatacaataaagatcacatcatatcgtaataaatctactaaacaaaatcaaggtgctggtgtctggtaagggccttctcactgtgc

SEQ ID NO: 11622 - DNA, 122 bp, Homo sapiens
  misc_feature (61)..(62): /note="This region represents a CpG dinucleotide"
  misc_feature (61)..(61): /note="Nucleotide may be methylated to form 5-methylcytosine"
atcatagagcctatcagctttacccattagactttccaacaacaaataaaaaatcctgaacgacaagaaaacccaacatcttaccttaacccaagccagcaaacactaaccatttaatgttg

SEQ ID NO: 11623 - DNA, 122 bp, Homo sapiens
  misc_feature (61)..(62): /note="This region represents a CpG dinucleotide"
  misc_feature (61)..(61): /note="Nucleotide may be methylated to form 5-methylcytosine"
atctcaagggaggaagtgaacaattacctaatgagcttgctgtgccttaagaagagggagcggtaactggcactgagatctggggcttgacgttgactcctagccctcccactcagtacatg

SEQ ID NO: 11624 - DNA, 122 bp, Homo sapiens
  misc_feature (61)..(62): /note="This region represents a CpG dinucleotide"
  misc_feature (61)..(61): /note="Nucleotide may be methylated to form 5-methylcytosine"
ccgagcagcgggatctggggtcggcagttgctccatctccagctctttcaaggaattgagcgtggagtctggcaatttcaacagagtatatcttcttctatacctgaatgaaggattattct

SEQ ID NO: 11625 - DNA, 122 bp, Homo sapiens
  misc_feature (61)..(62): /note="This region represents a CpG dinucleotide"
  misc_feature (61)..(61): /note="Nucleotide may be methylated to form 5-methylcytosine"
aaccagtgtaatgctacaaattagttcaactcattgttgcagtaaccgcaactcctagtacgccgatggtgcctacagttcgcacaaaaagaattactgcctacagtttgcacaaaaagaat

SEQ ID NO: 11626 - DNA, 122 bp, Homo sapiens
  misc_feature (61)..(62): /note="This region represents a CpG dinucleotide"
  misc_feature (61)..(61): /note="Nucleotide may be methylated to form 5-methylcytosine"
ctcacaacttcagctgattaatactttgttaaaacctagaccacgaaaacagacagagcccggcgaggtggctcacgcctgtaatcccaacactttgggaggccgaagcgggtggatcacga

SEQ ID NO: 11627 - DNA, 122 bp, Homo sapiens
  misc_feature (61)..(62): /note="This region represents a CpG dinucleotide"
  misc_feature (61)..(61): /note="Nucleotide may be methylated to form 5-methylcytosine"
ccacccagtttatggtattttattatgacaggccaaggtgactgagacagatgcacctttcgagaatgaattattgtgggtgtgaattcttgtaagtgcatgtaaaacttattagctgactt

SEQ ID NO: 11628 - DNA, 122 bp, Homo sapiens
  misc_feature (61)..(62): /note="This region represents a CpG dinucleotide"
  misc_feature (61)..(61): /note="Nucleotide may be methylated to form 5-methylcytosine"
gcatggcccctggggttacaaggtgccatgtctgcctctccctgggttggtggcaagcttcgtttttattggccctgcctcccgggtattctgcccagcagccaagctttgaggctgacttt

SEQ ID NO: 11629 - DNA, 122 bp, Homo sapiens
  misc_feature (61)..(62): /note="This region represents a CpG dinucleotide"
  misc_feature (61)..(61): /note="Nucleotide may be methylated to form 5-methylcytosine"
cagtggccttccttcccaggcactgatgatgcatagactcaccctggctgttttgcttggcgctcagcacgtggctggcactccacacctgtggcgtcaccatcacccccactgagcaccag

SEQ ID NO: 11630 - DNA, 122 bp, Homo sapiens
  misc_feature (61)..(62): /note="This region represents a CpG dinucleotide"
  misc_feature (61)..(61): /note="Nucleotide may be methylated to form 5-methylcytosine"
tgactttcattttgtttgcttcctaagccagtttatgcatgagcccctcaggggaatgtacggggacccttcctgaatctgtgctttgcttctgcctgcaaacattgtgaccctcacctcaa

SEQ ID NO: 11631 - DNA, 122 bp, Homo sapiens
  misc_feature (61)..(62): /note="This region represents a CpG dinucleotide"
  misc_feature (61)..(61): /note="Nucleotide may be methylated to form 5-methylcytosine"
aatctgcattttaagatgatcaccatgtgagtcatatgcccattgggagttgggattggccgaagattctcagtgagaccaggaagttcctgcccctcttgctctggatagtctaacttctc

SEQ ID NO: 11632 - DNA, 122 bp, Homo sapiens
  misc_feature (61)..(62): /note="This region represents a CpG dinucleotide"
  misc_feature (61)..(61): /note="Nucleotide may be methylated to form 5-methylcytosine"
gtcactcctttggagcctgggaaggtccccacatgcattgtctaaactttgggatgaatacgcacagctcttaaatgggagcatattattataggtacctgcctacacaaagggtcctccct

SEQ ID NO: 11633 - DNA, 122 bp, Homo sapiens
  misc_feature (61)..(62): /note="This region represents a CpG dinucleotide"
  misc_feature (61)..(61): /note="Nucleotide may be methylated to form 5-methylcytosine"
cagtgttcagtcaagacgtatacagggtgagcctttcagaaaacgtgtacccggggaccacggtgctacaggtgactgccacggaccaggatgagggtgtcaatgccgagattactttctct

SEQ ID NO: 11634 - DNA, 122 bp, Homo sapiens
  misc_feature (61)..(62): /note="This region represents a CpG dinucleotide"
  misc_feature (61)..(61): /note="Nucleotide may be methylated to form 5-methylcytosine"
atgttctgaaatgtttagatggctgctttcttccagagtcccaaagcttaactgtgccatcgtcactgctagtgcaaacaaggtggctagataacaggaattcacaaaggaagtatgtccct

SEQ ID NO: 11635 - DNA, 122 bp, Homo sapiens
  misc_feature (61)..(62): /note="This region represents a CpG dinucleotide"
  misc_feature (61)..(61): /note="Nucleotide may be methylated to form 5-methylcytosine"
accttgaagcgtttcttgatggtgattcggtgtcgagagtatttgtcatctggggagaaccgagcaggatgggctgagcaggtctgttgtcccatcgggtcaaatttctgctccaggaacac

SEQ ID NO: 11636 - DNA, 122 bp, Homo sapiens
  misc_feature (61)..(62): /note="This region represents a CpG dinucleotide"
  misc_feature (61)..(61): /note="Nucleotide may be methylated to form 5-methylcytosine"
ataaaatctcacctagtctttaaatgtaaacaccgattaagtccacaagcaacagcataacgttctgcagtcattccacatgtatcttcagcacagatgtcaacattttgctgaagaaccat

SEQ ID NO: 11637 - DNA, 122 bp, Homo sapiens
  misc_feature (61)..(62): /note="This region represents a CpG dinucleotide"
  misc_feature (61)..(61): /note="Nucleotide may be methylated to form 5-methylcytosine"
gatccctcctgcttggctggaggcttgcagacccggcaggcaggctcgggaggcagcgggcgacttgaaaatgcactccctaccacaggctcaagagtgacggcgcctgtcagggaccggga

SEQ ID NO: 11638 - DNA, 122 bp, Homo sapiens
  misc_feature (61)..(62): /note="This region represents a CpG dinucleotide"
  misc_feature (61)..(61): /note="Nucleotide may be methylated to form 5-methylcytosine"
ttttgggtttcagattttcagattaaggatacttcacctgtatttattctctccctgccacgccaggatgtaagctctacaagggcagagaatgtatttgattcattgtcagtccccttata

SEQ ID NO: 11639 - DNA, 122 bp, Homo sapiens
  misc_feature (61)..(62): /note="This region represents a CpG dinucleotide"
  misc_feature (61)..(61): /note="Nucleotide may be methylated to form 5-methylcytosine"
cacttcgggcgggagtacaggagcccttccttgggcaccatgcgaaggctgctcaagtagcggcccctgccctcccttcccctgtccccgtccccgtctccgtctccccgtccctgtccccc

SEQ ID NO: 11640 - DNA, 122 bp, Homo sapiens
  misc_feature (61)..(62): /note="This region represents a CpG dinucleotide"
  misc_feature (61)..(61): /note="Nucleotide may be methylated to form 5-methylcytosine"
cccttaatttggccaggccacagggtgccctgcctgggtgacaggagtgggctgggattgcgagagacgcaggcttcgagggcctggccttggtgattgtgaggggaggagtccctggggca

SEQ ID NO: 11641 - DNA, 122 bp, Homo sapiens
  misc_feature (61)..(62): /note="This region represents a CpG dinucleotide"
  misc_feature (61)..(61): /note="Nucleotide may be methylated to form 5-methylcytosine"
aaatgaggcacagagtggttgacttgccagtcatcactcactggtaatccatgttagacacgaatcctatcagtctgatcctatagcctagtgaaggttgaatgtcattaactaagtggtaa

SEQ ID NO: 11642 - DNA, 122 bp, Homo sapiens
  misc_feature (61)..(62): /note="This region represents a CpG dinucleotide"
  misc_feature (61)..(61): /note="Nucleotide may be methylated to form 5-methylcytosine"
tgcttttaatgacatctaactccacacaaagagtcatcatttttatctagacgtgtgtgacgtgcttgattgcaatgtgttttttttttgtgtgtgtgtgttgttgtttttctctttatcat

SEQ ID NO: 11643 - DNA, 122 bp, Homo sapiens
  misc_feature (61)..(62): /note="This region represents a CpG dinucleotide"
  misc_feature (61)..(61): /note="Nucleotide may be methylated to form 5-methylcytosine"
tctgcatcttgcctttatatctgcacccatgtctagtgcactattttgtgccagttagggcgtaagctctgggtaaatatttgttggatgaataaatgaatacccaaaagggcttcttctgg

SEQ ID NO: 11644 - DNA, 122 bp, Homo sapiens
  misc_feature (61)..(62): /note="This region represents a CpG dinucleotide"
  misc_feature (61)..(61): /note="Nucleotide may be methylated to form 5-methylcytosine"
cgtctaaaagatctcatgggcttgggctctgtaggagttggcagtagtaacaccatcacccgatcatctgctggtggccaaaaggaaagcccttatcaaaaaggtatttaggagcctggagt

SEQ ID NO: 11645 - DNA, 122 bp, Homo sapiens
  misc_feature (61)..(62): /note="This region represents a CpG dinucleotide"
  misc_feature (61)..(61): /note="Nucleotide may be methylated to form 5-methylcytosine"
gacagagacagaggtgactcaggaagagtcagcgtggggtttgcttagaaaaatctcccacgcaatttgagcttaggttgggccaaaacggacatcctgggaagctcacattgtggacaata

SEQ ID NO: 11646 - DNA, 122 bp, Homo sapiens
  misc_feature (61)..(62): /note="This region represents a CpG dinucleotide"
  misc_feature (61)..(61): /note="Nucleotide may be methylated to form 5-methylcytosine"
cttgggcaacgtaggagacctccgtctccacaagtaaaattaattagccggctgtggtggcgcgcacctgtggtcccagctactcaggaggctgaggtaggaggatcacctgagcccgggag

SEQ ID NO: 11647 - DNA, 122 bp, Homo sapiens
  misc_feature (61)..(62): /note="This region represents a CpG dinucleotide"
  misc_feature (61)..(61): /note="Nucleotide may be methylated to form 5-methylcytosine"
gttgaaaagttatgataacatttacaatttccttttaaaaacttcaagcctcagaccaggcgcggtggctcacacctgtaatcctagcactttgagaggctgaggagggcagatcacctgag

SEQ ID NO: 11648 - DNA, 122 bp, Homo sapiens
  misc_feature (61)..(62): /note="This region represents a CpG dinucleotide"
  misc_feature (61)..(61): /note="Nucleotide may be methylated to form 5-methylcytosine"
gtctgtgaatgtttgcatgtattttcagcgtttgcttcctcccctcaccactacccctgtcggttaaaagtctgttaaaagaatgagagcgagagagagagagagagagagagagagaggag

SEQ ID NO: 11649 - DNA, 122 bp, Homo sapiens
  misc_feature (61)..(62): /note="This region represents a CpG dinucleotide"
  misc_feature (61)..(61): /note="Nucleotide may be methylated to form 5-methylcytosine"
ctctggaacccacagcacttaaatttatgaatggtttgaaccaccaacctattatgcaagcgtaacctaatgttctttgaatataagcactaggtaaacaagaaaatattgccacatgcatt

SEQ ID NO: 11650 - DNA, 122 bp, Homo sapiens
  misc_feature (61)..(62): /note="This region represents a CpG dinucleotide"
  misc_feature (61)..(61): /note="Nucleotide may be methylated to form 5-methylcytosine"
agctccgacctttctggcctccagcagggaaaggtctggcttttccttttcagggagtagcgggctgggcagaccggcctcccttctcgcagcctcgcacaaggagcctgagcacgtaagac

SEQ ID NO: 11651 - DNA, 122 bp, Homo sapiens
  misc_feature (61)..(62): /note="This region represents a CpG dinucleotide"
  misc_feature (61)..(61): /note="Nucleotide may be methylated to form 5-methylcytosine"
aagtaggaaaaaagtgcatgtgacgcccagaggactctccacagtgtatattcccaaatacgtaatgtctagtttcctacttttagaatagtatggttttaagcagaaaaaaaaaaaagaaa

SEQ ID NO: 11652 - DNA, 122 bp, Homo sapiens
  misc_feature (61)..(62): /note="This region represents a CpG dinucleotide"
  misc_feature (61)..(61): /note="Nucleotide may be methylated to form 5-methylcytosine"
gtctcatagcaatggtcttgctacataattccatcttgaatgtcagaatctaaatattgacgacttcttcctctttgcaaaccttcagacacaaattctaatctccttctcagatctccatc

SEQ ID NO: 11653 - DNA, 122 bp, Homo sapiens
  misc_feature (61)..(62): /note="This region represents a CpG dinucleotide"
  misc_feature (61)..(61): /note="Nucleotide may be methylated to form 5-methylcytosine"
tttttctgtgccagggcccagttttaacagggatgaatgaacagggccagcctagggccgcgaaggagctgaatgcaacctgcaatcctgaaatatggaggctaacatagaccaagggccct

SEQ ID NO: 11654 - DNA, 122 bp, Homo sapiens
  misc_feature (61)..(62): /note="This region represents a CpG dinucleotide"
  misc_feature (61)..(61): /note="Nucleotide may be methylated to form 5-methylcytosine"
ataactagcttagactagcgtaactgctagtcaaggctctttggaaggaagtaacacccacgcaaactactagaacttgaaatgggcagtttatgataagggagtgtgactgtctcagcata

SEQ ID NO: 11655 - DNA, 122 bp, Homo sapiens
  misc_feature (61)..(62): /note="This region represents a CpG dinucleotide"
  misc_feature (61)..(61): /note="Nucleotide may be methylated to form 5-methylcytosine"
acaggaacagcagcagtgtaggtttccctacctagagggtggtatgcagtgattctcaggcgctggttggaaggcacagctgagggacacaaactgccaggaagtaatgtggtaactagcca

SEQ ID NO: 11656 - DNA, 122 bp, Homo sapiens
  misc_feature (61)..(62): /note="This region represents a CpG dinucleotide"
  misc_feature (61)..(61): /note="Nucleotide may be methylated to form 5-methylcytosine"
cttcagcagcagcactgggaaacaagaaggaaggcaatggattgggtctccagcaccgtgcgtggggatgactctttcaggactcaaacacacgctattgtggcattcaggaagaggatttc

SEQ ID NO: 11657 - DNA, 122 bp, Homo sapiens
  misc_feature (61)..(62): /note="This region represents a CpG dinucleotide"
  misc_feature (61)..(61): /note="Nucleotide may be methylated to form 5-methylcytosine"
aggtggaatgaaccacccaggtcaagaaacagaacaaagccaagccccagaggcagactgcgatgactccctaagcggataaaacacaagggagggtgagggaattggagatctgccacgct

SEQ ID NO: 11658 - DNA, 122 bp, Homo sapiens
  misc_feature (61)..(62): /note="This region represents a CpG dinucleotide"
  misc_feature (61)..(61): /note="Nucleotide may be methylated to form 5-methylcytosine"
gaaagaatacatgtatgctgattgaaaaatccactagatacctatttatctttccccagccggacaccattcctcttctcccttgaagtggtcatgtgactgagttctggccagtggaatga

SEQ ID NO: 11659 - DNA, 122 bp, Homo sapiens
  misc_feature (61)..(62): /note="This region represents a CpG dinucleotide"
  misc_feature (61)..(61): /note="Nucleotide may be methylated to form 5-methylcytosine"
ctccacctcataaaggctgaaaatctgtctattcttctgagtcaccccatcacatcctcccgacctcctatctcaggccagcttgagcagaggtactttgatctctgaatgggtggagggat

SEQ ID NO: 11660 - DNA, 122 bp, Homo sapiens
  misc_feature (61)..(62): /note="This region represents a CpG dinucleotide"
  misc_feature (61)..(61): /note="Nucleotide may be methylated to form 5-methylcytosine"
tgccaagttgccctgagctggctgagcagagaggagaaaaaggccacattgggagcaagccgcactttcattcatggcagcacagaggctgttcgtgttttcatgagccaaaaggtattcac

SEQ ID NO: 11661 - DNA, 122 bp, Homo sapiens
  misc_feature (61)..(62): /note="This region represents a CpG dinucleotide"
  misc_feature (61)..(61): /note="Nucleotide may be methylated to form 5-methylcytosine"
actgtagaaaacaggttggcagtgtcttgaaaaccaaccaggcaactaaacatgcaactacgacagtcctgggcatttatcccagaggaatgaaaactcacgttcacagaaaaacctgttca

SEQ ID NO: 11662 - DNA, 122 bp, Homo sapiens
  misc_feature (61)..(62): /note="This region represents a CpG dinucleotide"
  misc_feature (61)..(61): /note="Nucleotide may be methylated to form 5-methylcytosine"
gtatgccatttcgtgaactatgtgttcaaactctttgcctttacagtaactggcctttctcgtactgatttgttggagttctttatatattgataaaagtaggtctttgtgatatgcattgc

SEQ ID NO: 11663 - DNA, 122 bp, Homo sapiens
  misc_feature (61)..(62): /note="This region represents a CpG dinucleotide"
  misc_feature (61)..(61): /note="Nucleotide may be methylated to form 5-methylcytosine"
atgtggaaaaaaaaaaaaggccttgatttatgagatctcagaactgcttcttaggaagggcggattcctccagtaatctaatgggctttcatttcctcattgcctcagtcgctgtctggaga

SEQ ID NO: 11664 - DNA, 122 bp, Homo sapiens
  misc_feature (61)..(62): /note="This region represents a CpG dinucleotide"
  misc_feature (61)..(61): /note="Nucleotide may be methylated to form 5-methylcytosine"
acataagggaggaagagtgtcatatcctttcaattgcttactgcctcctcttgtgagttacgcacactctctacaaaaataagatgtcctcgtgagaattgctttgtcagtattgttacttt

SEQ ID NO: 11665 - DNA, 122 bp, Homo sapiens
  misc_feature (61)..(62): /note="This region represents a CpG dinucleotide"
  misc_feature (61)..(61): /note="Nucleotide may be methylated to form 5-methylcytosine"
aagtgcagcagagttagagcctgggctggactgtcggtggggtagagtctaagttgtttccggtctgagccttcaagttgctgggctgtccttggcgtggcgagtcccaggagaaccagtga

SEQ ID NO: 11666 - DNA, 122 bp, Homo sapiens
  misc_feature (61)..(62): /note="This region represents a CpG dinucleotide"
  misc_feature (61)..(61): /note="Nucleotide may be methylated to form 5-methylcytosine"
ctctgctgcttggtcccaccccagacccactaaaacaaaaactctgggggtggagccctgcggtctgtatttgaacaacctctccaggtgatttgatgcactccaaagtttgagaaccaagt

SEQ ID NO: 11667 - DNA, 122 bp, Homo sapiens
  misc_feature (61)..(62): /note="This region represents a CpG dinucleotide"
  misc_feature (61)..(61): /note="Nucleotide may be methylated to form 5-methylcytosine"
aactaaaactggtgcctcaagtttcctgcctgacatcatggcagaagtattgaagaaagccgtttctacctcagatttgtggttcattcctactccctgctttcaatgaggtaggaggaccc

SEQ ID NO: 11668 - DNA, 122 bp, Homo sapiens
  misc_feature (61)..(62): /note="This region represents a CpG dinucleotide"
  misc_feature (61)..(61): /note="Nucleotide may be methylated to form 5-methylcytosine"
gaataggttatccatgctagtccatcaaggcttcctagaggacatggcagctgcagtgggcgtccccaggcaagtatggcaaagggagtgaggcggggcaggatgttctcctggagcacaca

SEQ ID NO: 11669 - DNA, 122 bp, Homo sapiens
  misc_feature (61)..(62): /note="This region represents a CpG dinucleotide"
  misc_feature (61)..(61): /note="Nucleotide may be methylated to form 5-methylcytosine"
acccattttatagacaatgaaagaaaagctcaaaaagcttccatcacttgcccagacttacggtggaaaggattccaaccaagatttgtggaattccctgttcagagctccctccccaacat

SEQ ID NO: 11670 - DNA, 122 bp, Homo sapiens
  misc_feature (61)..(62): /note="This region represents a CpG dinucleotide"
  misc_feature (61)..(61): /note="Nucleotide may be methylated to form 5-methylcytosine"
ttgaactcctgacctcaggtgatccatccacttggcctcccaaagtgctgggattacaggcgtgagccactgcgcccaacccgggtcaccaatttcaggggctggaaaatcaagcacaggct

SEQ ID NO: 11671 - DNA, 122 bp, Homo sapiens
  misc_feature (61)..(62): /note="This region represents a CpG dinucleotide"
  misc_feature (61)..(61): /note="Nucleotide may be methylated to form 5-methylcytosine"
gatgagctaaaaaaagaacaaaattgcaaaacaaatctcataatgttttaagaaagtttacgaatctgtgcttgactgcattcaaagctgtcatgctctgctggttgacaagcttggattaa

SEQ ID NO: 11672 - DNA, 122 bp, Homo sapiens
  misc_feature (61)..(62): /note="This region represents a CpG dinucleotide"
  misc_feature (61)..(61): /note="Nucleotide may be methylated to form 5-methylcytosine"
cactttaggagatacagagacccatgatacttgtagataaagcgaaacctttagcctcatcgactaattaatggcctcaaagtaaaataatgaggtgtgtggagatagggattcagttactg

SEQ ID NO: 11673 - DNA, 122 bp, Homo sapiens
  misc_feature (61)..(62): /note="This region represents a CpG dinucleotide"
  misc_feature (61)..(61): /note="Nucleotide may be methylated to form 5-methylcytosine"
ctttgggccttactttcttcaactgaaaaactggttcaacatttattcattcttttattccgtaagccaaaaataaaattcaaagccctctgaccatatgaatggatctctcctcttggcta

SEQ ID NO: 11674 - DNA, 122 bp, Homo sapiens
  misc_feature (61)..(62): /note="This region represents a CpG dinucleotide"
  misc_feature (61)..(61): /note="Nucleotide may be methylated to form 5-methylcytosine"
ggagtcctctgggagaagtggttgaacaggtataagaaaaaacactgaatgtgtaacatgcgataacaagagaaggcctctggtagcactacaatccactgtctctcccaatagggcataac

SEQ ID NO: 11675 - DNA, 122 bp, Homo sapiens
  misc_feature (61)..(62): /note="This region represents a CpG dinucleotide"
  misc_feature (61)..(61): /note="Nucleotide may be methylated to form 5-methylcytosine"
aaagttaaaaagctatgaaattttgtcatgtattgccaggtggtaccaatacattttaaacgtattatcaaggtgacagccccattaattctgagaggatagtttggaacccagaaagcata

SEQ ID NO: 11676 - DNA, 122 bp, Homo sapiens
  misc_feature (61)..(62): /note="This region represents a CpG dinucleotide"
  misc_feature (61)..(61): /note="Nucleotide may be methylated to form 5-methylcytosine"
tagctccccattccctgtctgtgatgtagaggcagttgagttttcaacctttgttgaaaacgaggaaaagagaacattggtttgaaatgatcttttgtagtaaatatttaacaccatggcag

SEQ ID NO: 11677 - DNA, 122 bp, Homo sapiens
  misc_feature (61)..(62): /note="This region represents a CpG dinucleotide"
  misc_feature (61)..(61): /note="Nucleotide may be methylated to form 5-methylcytosine"
agaagatcaagtacgccttcagcctgctggtgaggacgcgcccgcccctgggccggggcgcgggcacgacgaacctgtcccgtccccgcacccacgccaaccacctccctccccacgcccca

SEQ ID NO: 11678 - DNA, 122 bp, Homo sapiens
  misc_feature (61)..(62): /note="This region represents a CpG dinucleotide"
  misc_feature (61)..(61): /note="Nucleotide may be methylated to form 5-methylcytosine"
gcggggacttcatttcctacactcccgggttcctcccatcctgcaccgggatctcaagtgcgacaatgtctttatcacgggacctactggctctgtcaaaatcggggacctgggcctggcca

SEQ ID NO: 11679 - DNA, 122 bp, Homo sapiens
  misc_feature (61)..(62): /note="This region represents a CpG dinucleotide"
  misc_feature (61)..(61): /note="Nucleotide may be methylated to form 5-methylcytosine"
attacaggcatgagccactgcgccctgtcaataaacagttttaaagagaaaagaggaaagcgaaattctggagggtacaggtacaaacaatactgaaaacaagggctaacatttacctagcg

SEQ ID NO: 11680 - DNA, 122 bp, Homo sapiens
  misc_feature (61)..(62): /note="This region represents a CpG dinucleotide"
  misc_feature (61)..(61): /note="Nucleotide may be methylated to form 5-methylcytosine"
catgaaaatatctttcatactggacaaatctgcaagcaatgatgctaagatcttgaatcacggtcttattattccaaataagtcttcttaagctgcataaatatgaactgtagattaataat

SEQ ID NO: 11681 - DNA, 122 bp, Homo sapiens
  misc_feature (61)..(62): /note="This region represents a CpG dinucleotide"
  misc_feature (61)..(61): /note="Nucleotide may be methylated to form 5-methylcytosine"
aggtagttttacctgagtggggtaaagagagactgctggagtgagtgctggcaatgttctcgatatggatagtgatgtaagtatttacatatctagacatacatcaaatttctgtgccctta

SEQ ID NO: 11682 - DNA, 122 bp, Homo sapiens
  misc_feature (61)..(62): /note="This region represents a CpG dinucleotide"
  misc_feature (61)..(61): /note="Nucleotide may be methylated to form 5-methylcytosine"
ttcctctgtgtatttgactttcttctatgacctccaaaatattctaccctggtttttttccgtctatcatttcttctctgtgtctatgcctcttccatagccctatacctaaatgttggtat

SEQ ID NO: 11683 - DNA, 122 bp, Homo sapiens
  misc_feature (61)..(62): /note="This region represents a CpG dinucleotide"
  misc_feature (61)..(61): /note="Nucleotide may be methylated to form 5-methylcytosine"
gaatgactatgaggttccttccagctctgagcgtgtttgtcctttgttgactttagaaatcgttaaaactttaaacttgaaagaaagtaggagagaagtaaagaaggaggaagaatgaagcc

SEQ ID NO: 11684 - DNA, 122 bp, Homo sapiens
  misc_feature (61)..(62): /note="This region represents a CpG dinucleotide"
  misc_feature (61)..(61): /note="Nucleotide may be methylated to form 5-methylcytosine"
gtatttcttcatggcccagaaaaactcctatgtaacttcccttagagaaatgaaactgaacgggaagcagaagtagttactggatgatgttggacctgggaattctgaatgagtcagttcaa

SEQ ID NO: 11685 - DNA, 122 bp, Homo sapiens
  misc_feature (61)..(62): /note="This region represents a CpG dinucleotide"
  misc_feature (61)..(61): /note="Nucleotide may be methylated to form 5-methylcytosine"
tcgaactcctgacctcaggtgatccatcacctcggcctcccaaagtgctgggattacaggcgtgagccactaagcccggccagcaacacgcttttaccgctgcaaatccggatcaggcaggc

SEQ ID NO: 11686 - DNA, 122 bp, Homo sapiens
  misc_feature (61)..(62): /note="This region represents a CpG dinucleotide"
  misc_feature (61)..(61): /note="Nucleotide may be methylated to form 5-methylcytosine"
agggctgattgacaaccactggacgatccatcccactcatctggttgttcagtccttctgcgagtggtcagcactgtcattagcataaagatgctcaccctttgtgcctactcccgaaaggg

SEQ ID NO: 11687 - DNA, 122 bp, Homo sapiens
  misc_feature (61)..(62): /note="This region represents a CpG dinucleotide"
  misc_feature (61)..(61): /note="Nucleotide may be methylated to form 5-methylcytosine"
acctaatgtcaatcaaggaaagcataacaaattagagtcagctatccattctcctatgaacgatcagcaaatctcacaggagtcaaggaatagtactgttgtgagtagtgatacattacaga

SEQ ID NO: 11688 - DNA, 122 bp, Homo sapiens
  misc_feature (61)..(62): /note="This region represents a CpG dinucleotide"
  misc_feature (61)..(61): /note="Nucleotide may be methylated to form 5-methylcytosine"
gtaggtattaatgcctgtattctatagacgaggaaactgaggctcagggagattgagtcacgtgcccaatgtcacgtagctggtaaatgacagaactaggatttgaaaccagatgagctggg

SEQ ID NO: 11689 - DNA, 122 bp, Homo sapiens
  misc_feature (61)..(62): /note="This region represents a CpG dinucleotide"
  misc_feature (61)..(61): /note="Nucleotide may be methylated to form 5-methylcytosine"
ggtgaccttggtgagccactaaacccaacctgagtcaccctcttcctgcctttctgttaccgagacaatgggtgtccaggctgttgaagcccttttgagtttagttctgcttcttgcaccca

SEQ ID NO: 11690 - DNA, 122 bp, Homo sapiens
  misc_feature (61)..(62): /note="This region represents a CpG dinucleotide"
  misc_feature (61)..(61): /note="Nucleotide may be methylated to form 5-methylcytosine"
gatttgccatcttgggaccacctttcagccaaaaaggtggtgacttctggcctttctggccgtcctgttggcacaacaaagttggtgaggggaggagactgggaagggaaagaaaactgcta

SEQ ID NO: 11691 - DNA, 122 bp, Homo sapiens
  misc_feature (61)..(62): /note="This region represents a CpG dinucleotide"
  misc_feature (61)..(61): /note="Nucleotide may be methylated to form 5-methylcytosine"
cacgcactgcacacttttgcagcttggcagcagccggctaaaccatgcggcccaagggtgcgggaggctgcacggcccaggctcgtacaagtcattctaggaagttcccgcaaagacaacac

SEQ ID NO: 11692 - DNA, 122 bp, Homo sapiens
  misc_feature (61)..(62): /note="This region represents a CpG dinucleotide"
  misc_feature (61)..(61): /note="Nucleotide may be methylated to form 5-methylcytosine"
cactggcttctgggcgtttactagacacacaatgaactgccaaggactatagaggctgaccgcagggaagagtggctacagaattcttaaaacatgatgctgactccagtctttggtgagac

SEQ ID NO: 11693 - DNA, 122 bp, Homo sapiens
  misc_feature (61)..(62): /note="This region represents a CpG dinucleotide"
  misc_feature (61)..(61): /note="Nucleotide may be methylated to form 5-methylcytosine"
gagctgtggtttcacacagctaagaagtggccagaggcagcttttgaatccctggtcaggcgtctgtgttgagataacctgaaattcctgttgccaagcatgactttctcatcagaccttac

SEQ ID NO: 11694 - DNA, 122 bp, Homo sapiens
  misc_feature (61)..(62): /note="This region represents a CpG dinucleotide"
  misc_feature (61)..(61): /note="Nucleotide may be methylated to form 5-methylcytosine"
cttcctttaaacagaccatataggcatttgcctgtgaacttagtaacctacagcctagtccgttgtctatcctgctagttgccacacacactctttctcaatacctaactcttcatgttctc

SEQ ID NO: 11695 - DNA, 122 bp, Homo sapiens
  misc_feature (61)..(62): /note="This region represents a CpG dinucleotide"
  misc_feature (61)..(61): /note="Nucleotide may be methylated to form 5-methylcytosine"
cctcagccaatcagagacatttcttctgtgtgacttcacccacctcattaccatttactacgcaggccttgtaattaccttcagaagggaacacatcctgtttctgcttgctcaaactctct

SEQ ID NO: 11696 - DNA, 122 bp, Homo sapiens
  misc_feature (61)..(62): /note="This region represents a CpG dinucleotide"
  misc_feature (61)..(61): /note="Nucleotide may be methylated to form 5-methylcytosine"
cccggggagcaggaggtattagcgggcactaattccctggggacagcaggccgggattatcgctgtgtgcccagcccttgccagccctgctggctgccagctgctggcaggggcctcactgt

SEQ ID NO: 11697 - DNA, 122 bp, Homo sapiens
  misc_feature (61)..(62): /note="This region represents a CpG dinucleotide"
  misc_feature (61)..(61): /note="Nucleotide may be methylated to form 5-methylcytosine"
actgggattaatttactcagagatctggagtagcaataacttgtgtctttccaaaacccccgcagtcaattaatgagatcaatttaaagtggcagtattgaaagggaaaacccaaacactta

SEQ ID NO: 11698 - DNA, 122 bp, Homo sapiens
  misc_feature (61)..(62): /note="This region represents a CpG dinucleotide"
  misc_feature (61)..(61): /note="Nucleotide may be methylated to form 5-methylcytosine"
gaaactggcacattacacacacgaaatacaaatgtccttcttgctcctagcagtagtacacgcccacagagtttgcaaaagtttccaagtttccctgtagtgaaaaaggaagtggtcaatat

SEQ ID NO: 11699 - DNA, 122 bp, Homo sapiens
  misc_feature (61)..(62): /note="This region represents a CpG dinucleotide"
  misc_feature (61)..(61): /note="Nucleotide may be methylated to form 5-methylcytosine"
ctgttttgctcaaaaaaaaaaaaaagtctcctggtcaatgaaagctgagctctatggtaccgaaagggagatcaagattcttcaaagattaagtgaattatcccacaatagtatccactcat

SEQ ID NO: 11700 - DNA, 122 bp, Homo sapiens
  misc_feature (61)..(62): /note="This region represents a CpG dinucleotide"
  misc_feature (61)..(61): /note="Nucleotide may be methylated to form 5-methylcytosine"
ctctgtagggcaagccagcaggctggagattcaggtaagagttaatgttgcagtcccaaacgtaaagacttgaaacttgggcagaatgtctatattgccatctggaggcaggattccttctt

SEQ ID NO: 11701 - DNA, 122 bp, Homo sapiens
  misc_feature (61)..(62): /note="This region represents a CpG dinucleotide"
  misc_feature (61)..(61): /note="Nucleotide may be methylated to form 5-methylcytosine"
acctgtccttagacaaccctcagtgtggcccggcctttgtcagaggcatctaaaccagagcgactccatcttgagtaggggctgtgtactataaggctgagacctactgggctgcattccca

SEQ ID NO: 11702 - DNA, 122 bp, Homo sapiens
  misc_feature (61)..(62): /note="This region represents a CpG dinucleotide"
  misc_feature (61)..(61): /note="Nucleotide may be methylated to form 5-methylcytosine"
gctggtgcccgtcttcctcctaaggggccaggccacatccaagtgggcctctgtcgggggcggggcggtaggtccgaaagaaaccgcagacactacgatgcactcctcaagctgtcttttgt

SEQ ID NO: 11703 - DNA, 122 bp, Homo sapiens
  misc_feature (61)..(62): /note="This region represents a CpG dinucleotide"
  misc_feature (61)..(61): /note="Nucleotide may be methylated to form 5-methylcytosine"
acaagtcaaacagagtcacccaaacaagcgtggcacgcaaacctttagagttcagcaaaccgagggctgagttaccaaaccgtgtcctttcagggcatgcaaaaggcttttcctgctctgct

SEQ ID NO: 11704 - DNA, 122 bp, Homo sapiens
  misc_feature (61)..(62): /note="This region represents a CpG dinucleotide"
  misc_feature (61)..(61): /note="Nucleotide may be methylated to form 5-methylcytosine"
ctgtcattaaaccaatcttgacccgggctctgaaggcctttgacaatctacagtcacaaacgtggcttagaagtccaaagttgagtacaggtgacatagccactgaatcctgttctgaaaac

SEQ ID NO: 11705 - DNA, 122 bp, Homo sapiens
  misc_feature (61)..(62): /note="This region represents a CpG dinucleotide"
  misc_feature (61)..(61): /note="Nucleotide may be methylated to form 5-methylcytosine"
gctcccagagacatgcaccacaagggctgtggaccaatgtcctttcctctaacccctctccgctgcctcctgactgcaaaacacccatttctcccttgggagggtggggactctggctgatg

SEQ ID NO: 11706 - DNA, 122 bp, Homo sapiens
  misc_feature (61)..(62): /note="This region represents a CpG dinucleotide"
  misc_feature (61)..(61): /note="Nucleotide may be methylated to form 5-methylcytosine"
tattccggggaggtgttgggcaccaacatttttaaagccccgtgggtggttccctgggatcgcccagaccgaaaggccccgaacgtccagatcgcagggaatggggtcggaggggcggcgct

SEQ ID NO: 11707 - DNA, 122 bp, Homo sapiens
  misc_feature (61)..(62): /note="This region represents a CpG dinucleotide"
  misc_feature (61)..(61): /note="Nucleotide may be methylated to form 5-methylcytosine"
accaccatggaaacacggtcaggttcttagaaacctaacccatattgggaaataacagtgcggcgagaggtggaggcagcaggaaaattctaggctaacatcctagctggccaccagggtgc

SEQ ID NO: 11708 - DNA, 122 bp, Homo sapiens
  misc_feature (61)..(62): /note="This region represents a CpG dinucleotide"
  misc_feature (61)..(61): /note="Nucleotide may be methylated to form 5-methylcytosine"
gtagtgaggaaaggggttctggggccagaatgtcagggctctgaccctgctctgccacatcgtggcagctacagcttgggcctcagttttgtcatccacaaaatgaggatgataatatgcat

SEQ ID NO: 11709 - DNA, 122 bp, Homo sapiens
  misc_feature (61)..(62): /note="This region represents a CpG dinucleotide"
  misc_feature (61)..(61): /note="Nucleotide may be methylated to form 5-methylcytosine"
aagcagatgtaggtgacaaagtaaggatttcaggaggcttattggagagtaagccgtgaacgtgaaagggtgaggaagcgggattggacaagggaatcctttatgccaaaaagcagatatga

SEQ ID NO: 11710 - DNA, 122 bp, Homo sapiens
  misc_feature (61)..(62): /note="This region represents a CpG dinucleotide"
  misc_feature (61)..(61): /note="Nucleotide may be methylated to form 5-methylcytosine"
tggtacagggctcctgagatcatgctgaactggatgcattacaaccagacaggtattactcgccttggttatttagggccttatttaattccatgttggatgcatttgggattctcagaaat

SEQ ID NO: 11711 - DNA, 122 bp, Homo sapiens
  misc_feature (61)..(62): /note="This region represents a CpG dinucleotide"
  misc_feature (61)..(61): /note="Nucleotide may be methylated to form 5-methylcytosine"
aagataaggtgtgtgattaagaataaactcataatagaaaaaaagaattgtggaggttaacgtaagggaggatatcatcgtgaaagggaaattacactgaatttctgcaaaacaggaagagg

SEQ ID NO: 11712 - DNA, 122 bp, Homo sapiens
  misc_feature (61)..(62): /note="This region represents a CpG dinucleotide"
  misc_feature (61)..(61): /note="Nucleotide may be methylated to form 5-methylcytosine"
ccacccccaggggagaagggcaccaggatgtggcttgtcagtgggaagcaatgacctttacgtttgacatgagccatcaagggccaggaagaatctctgcctgctacaaaagtctgcattca

SEQ ID NO: 11713 - DNA, 122 bp, Homo sapiens
  misc_feature (61)..(62): /note="This region represents a CpG dinucleotide"
  misc_feature (61)..(61): /note="Nucleotide may be methylated to form 5-methylcytosine"
tggtcactctcccttacaggggtcaatagcttcactctctctgggtgctagtgcacaccacgtggagccatgcccatccgagcccaagaacatctgtacagcgtcagcagggcagttatacc

SEQ ID NO: 11714 - DNA, 122 bp, Homo sapiens
  misc_feature (61)..(62): /note="This region represents a CpG dinucleotide"
  misc_feature (61)..(61): /note="Nucleotide may be methylated to form 5-methylcytosine"
aaaatcctcaaaacaggaatttcaaaatgtcaacaaacaggcaaaactttctttcaacagcgctattatgactggtatgtttcacttgctttttttttttttttctttttctccagcaaatt

SEQ ID NO: 11715 - DNA, 122 bp, Homo sapiens
  misc_feature (61)..(62): /note="This region represents a CpG dinucleotide"
  misc_feature (61)..(61): /note="Nucleotide may be methylated to form 5-methylcytosine"
gttccacatgactggggaggcatcacaatcatggtggaagacgaaggaacagcaaagttacgtcttacacagtgacagataagagagcttctgcaggagaatggctctttataaaaccatca

SEQ ID NO: 11716 - DNA, 122 bp, Homo sapiens
  misc_feature (61)..(62): /note="This region represents a CpG dinucleotide"
  misc_feature (61)..(61): /note="Nucleotide may be methylated to form 5-methylcytosine"
atctcttctgtttgccccctccaaaaaacaccctaccctctcctccctgccctgtgtccccgagtatagacctcatgcacaggtttcctggctctccagcttccagatgggtctgcccagca

SEQ ID NO: 11717 - DNA, 122 bp, Homo sapiens
  misc_feature (61)..(62): /note="This region represents a CpG dinucleotide"
  misc_feature (61)..(61): /note="Nucleotide may be methylated to form 5-methylcytosine"
gtccgtgcagggtgacacatttcagagctccagaggctgccttttgggtcggtggggtcacggcagcctttgacaggtggacagaaggaggcttggaaagaacagagccaagcatttgttcc

SEQ ID NO: 11718 - DNA, 122 bp, Homo sapiens
  misc_feature (61)..(62): /note="This region represents a CpG dinucleotide"
  misc_feature (61)..(61): /note="Nucleotide may be methylated to form 5-methylcytosine"
cagatgcgggctaggttgcagagaaaaaggaatgcttatatgttgtgggaatcaggaggccggagagatcactgggtgcaacaggaaggttttatttaggtggccactggcccagcggatta

SEQ ID NO: 11719 - DNA, 122 bp, Homo sapiens
  misc_feature (61)..(62): /note="This region represents a CpG dinucleotide"
  misc_feature (61)..(61): /note="Nucleotide may be methylated to form 5-methylcytosine"
tgtggtctcagaattcctgtcttaacagttctgctgagctacccatctggcatttcttcacgtgcctggtccctggaggcttggcccttaatcctgaatattgaaatctcaaaagatcaaaa

SEQ ID NO: 11720 - DNA, 122 bp, Homo sapiens
  misc_feature (61)..(62): /note="This region represents a CpG dinucleotide"
  misc_feature (61)..(61): /note="Nucleotide may be methylated to form 5-methylcytosine"
tctgaactgctcaccctgccaaatattgtggctttcatgtgtcatgcctctgtgcctttgcgcatgtagtgcccctgcctagaaactcaccccctctcttctaccagacagttactcatcct

SEQ ID NO: 11721 - DNA, 122 bp, Homo sapiens
  misc_feature (61)..(62): /note="This region represents a CpG dinucleotide"
  misc_feature (61)..(61): /note="Nucleotide may be methylated to form 5-methylcytosine"
tcctttcccacccacaatgagatgaacactgtgggtgtgcctttgatccctaggcctccccgacccagtgacagagctcagtctgggaagcatgtggcaaggggaaagaaatagatccaagg

SEQ ID NO: 11722 - DNA, 122 bp, Homo sapiens
  misc_feature (61)..(62): /note="This region represents a CpG dinucleotide"
  misc_feature (61)..(61): /note="Nucleotide may be methylated to form 5-methylcytosine"
agggtgaagtcatccaggtttatttataaatgtgctatgagagcgccaaattatctacaacgccgtgtaggttttgaagaatgattcattatttgggctgactggaaatatattaatacatg

SEQ ID NO: 11723 - DNA, 122 bp, Homo sapiens
  misc_feature (61)..(62): /note="This region represents a CpG dinucleotide"
  misc_feature (61)..(61): /note="Nucleotide may be methylated to form 5-methylcytosine"
ttcagaggaactgaattcaacagtcacatcttttcactacacatttactaagcctcttttcgaagccacgccaggttagataccatcccaattactaaggcatagtttatgctaatagagga

SEQ ID NO: 11724 - DNA, 122 bp, Homo sapiens
  misc_feature (61)..(62): /note="This region represents a CpG dinucleotide"
  misc_feature (61)..(61): /note="Nucleotide may be methylated to form 5-methylcytosine"
tgagaattacagctttgtagcttcgtatcccttttcagcaggagccagcataccactcctcgctcatttccccgtgtgctggcctcgctcattttcttttgcagggacttgttctgctgaga

SEQ ID NO: 11725 - DNA, 122 bp, Homo sapiens
  misc_feature (61)..(62): /note="This region represents a CpG dinucleotide"
  misc_feature (61)..(61): /note="Nucleotide may be methylated to form 5-methylcytosine"
ttgcttgcatggtttcctttgccacccttgggcttgttgtgaactagactacttgctgagcgcacaggtggcttcctggggagccctcgttattctgggattccctgcagctttctcatgtg

SEQ ID NO: 11726 - DNA, 122 bp, Homo sapiens
  misc_feature (61)..(62): /note="This region represents a CpG dinucleotide"
  misc_feature (61)..(61): /note="Nucleotide may be methylated to form 5-methylcytosine"
gttaagggagaaataaaatttacgataaaatgtacgttgtaatacataaatactcaggtacggctacaacagaagacagagatgaatgtgacagctacaaatgaaaactgacccttgtgtat

SEQ ID NO: 11727 - DNA, 122 bp, Homo sapiens
  misc_feature (61)..(62): /note="This region represents a CpG dinucleotide"
  misc_feature (61)..(61): /note="Nucleotide may be methylated to form 5-methylcytosine"
ttgtgagcatcaaacaaggtcctatgtgaaaatctgtagctgcagaagatcctgatgccacggcagtgggaaaacccactgaagaataaacagtaaggcaagtctccatgacggctggaggg

SEQ ID NO: 11728 - DNA, 122 bp, Homo sapiens
  misc_feature (61)..(62): /note="This region represents a CpG dinucleotide"
  misc_feature (61)..(61): /note="Nucleotide may be methylated to form 5-methylcytosine"
agccagtggctgttaacaatatattaagtacggaagcactaatggcaaacgccaagtccacgctcatgttctatgtagttggattcttgtggcagccgggtgggggcgtggccacaaggctg

SEQ ID NO: 11729 - DNA, 122 bp, Homo sapiens
  misc_feature (61)..(62): /note="This region represents a CpG dinucleotide"
  misc_feature (61)..(61): /note="Nucleotide may be methylated to form 5-methylcytosine"
attggcggggactttcttcctttgtaatgtgctcactggggttgtcacgtcacatagccacgtggagacagccactgaagttcaaagacaagatgggtgtaaatgtgattcatttcattaaa

SEQ ID NO: 11730 - DNA, 122 bp, Homo sapiens
  misc_feature (61)..(62): /note="This region represents a CpG dinucleotide"
  misc_feature (61)..(61): /note="Nucleotide may be methylated to form 5-methylcytosine"
tcatagtcactcaatcacatccattatgaggcaagtcacagaaacctcagctcaaatcaacgtaagcaatgaggtcatttatcatttcacatagcaagaaattaggaggaagggtggttctg

SEQ ID NO: 11731 - DNA, 122 bp, Homo sapiens
  misc_feature (61)..(62): /note="This region represents a CpG dinucleotide"
  misc_feature (61)..(61): /note="Nucleotide may be methylated to form 5-methylcytosine"
gcttttccataagctataatgactcttcacctatttcacaatattgctaaaggcaggtcccgttcatcttcaaataaactgggatgagtaaaactattcatgaaatacttacaatttgctaa

SEQ ID NO: 11732 - DNA, 122 bp, Homo sapiens
  misc_feature (61)..(62): /note="This region represents a CpG dinucleotide"
  misc_feature (61)..(61): /note="Nucleotide may be methylated to form 5-methylcytosine"
cgggtccacacgggcggccaagagtgcttgggccgtgctattgggcagcgacaagttttgcgtcaggaaacgccagagctcctgcgggtttctggccaccgagtccagagagaaggaagaca

SEQ ID NO: 11733 - DNA, 122 bp, Homo sapiens
  misc_feature (61)..(62): /note="This region represents a CpG dinucleotide"
  misc_feature (61)..(61): /note="Nucleotide may be methylated to form 5-methylcytosine"
atttattcaccaatatttattagacccttgatatgttcaagaccctgtagctggtgctgtcggagtcactaagatgaactatataaataactactctatgtgtacgaataactaccctacaa

SEQ ID NO: 11734 - DNA, 122 bp, Homo sapiens
  misc_feature (61)..(62): /note="This region represents a CpG dinucleotide"
  misc_feature (61)..(61): /note="Nucleotide may be methylated to form 5-methylcytosine"
tactcaggtcaaattctggtccaagaggctctgccaggctggctagagcattatgcctgccgactccacacccaggtggcagccaggaacacagtgttcaggttcgtgggccacagaggtta

SEQ ID NO: 11735 - DNA, 122 bp, Homo sapiens
  misc_feature (61)..(62): /note="This region represents a CpG dinucleotide"
  misc_feature (61)..(61): /note="Nucleotide may be methylated to form 5-methylcytosine"
gagtgtagaggatgggcgtttctaaccctttaccatataccctttagtactacagtcatgcgtcacttaaggacagggatgcgttctgagaaatgcattgtcaggtgattgcatcattgtac

SEQ ID NO: 11736 - DNA, 122 bp, Homo sapiens
  misc_feature (61)..(62): /note="This region represents a CpG dinucleotide"
  misc_feature (61)..(61): /note="Nucleotide may be methylated to form 5-methylcytosine"
ttggaagggatgaaaaacattacatccatgtagagtactattttgctctaatgtgataaacgaaagtgaagcagtttgcgttgttataactttatctgaaggttgaagattttaataacatg

SEQ ID NO: 11737 - DNA, 122 bp, Homo sapiens
  misc_feature (61)..(62): /note="This region represents a CpG dinucleotide"
  misc_feature (61)..(61): /note="Nucleotide may be methylated to form 5-methylcytosine"
ccattgctcttacataatcaaagtgctcaggctctcgctgatgaatccagagactaaccacgtaatctagaagaaattcatctttgtccccaaggctcccagcatttggcaattattgaaca

SEQ ID NO: 11738 - DNA, 122 bp, Homo sapiens
  misc_feature (61)..(62): /note="This region represents a CpG dinucleotide"
  misc_feature (61)..(61): /note="Nucleotide may be methylated to form 5-methylcytosine"
ccatttcaacgtggaggatttttactgttcatcactatggggaactagatgggggataaacgaaaatacaaagaaaaaaagggggggaagttacaacggtgacagttttcatattactgagc

SEQ ID NO: 11739 - DNA, 122 bp, Homo sapiens
  misc_feature (61)..(62): /note="This region represents a CpG dinucleotide"
  misc_feature (61)..(61): /note="Nucleotide may be methylated to form 5-methylcytosine"
ttggagctccagcaggtgttgtctggagtttgaccaaaacaacagtagctcagctgccagcgaactgaattacacctgaagcctttctaggcataaatgactgttctttgcactctctccac

SEQ ID NO: 11740 - DNA, 122 bp, Homo sapiens
  misc_feature (61)..(62): /note="This region represents a CpG dinucleotide"
  misc_feature (61)..(61): /note="Nucleotide may be methylated to form 5-methylcytosine"
ttgtcatcaccttcacctatcaagcagcctggagcttatcgactgtctaggaaaacatcacgagcacattctaggggcaccccacccccgggcacagcacaggaggccaagccaggctggag

SEQ ID NO: 11741 - DNA, 122 bp, Homo sapiens
  misc_feature (61)..(62): /note="This region represents a CpG dinucleotide"
  misc_feature (61)..(61): /note="Nucleotide may be methylated to form 5-methylcytosine"
gcagtcactaggatccccaattgccagcagggcaaactgaggcttggagaggtgaaaacacgacctcaaagtcagccaataaggccgtgagcagcagatcagggataagaacacaggccttc

SEQ ID NO: 11742 - DNA, 122 bp, Homo sapiens
  misc_feature (61)..(62): /note="This region represents a CpG dinucleotide"
  misc_feature (61)..(61): /note="Nucleotide may be methylated to form 5-methylcytosine"
tctcatgtgcactctttaacaacctaagtgttatgaagtctctcaattgagatctttaaccgtaaatagtttttgccttttgtattatgtccagatcctatttaatgcaattagaatacaaa

SEQ ID NO: 11743 - DNA, 122 bp, Homo sapiens
  misc_feature (61)..(62): /note="This region represents a CpG dinucleotide"
  misc_feature (61)..(61): /note="Nucleotide may be methylated to form 5-methylcytosine"
gtgcagccgcatgatcgcagctcactgcaacttctgcctctcgggttcaagtgattatgacgttaaatttctacttatataattcagaatgttgccgggtgcagtggctcatgcctgtaatc

SEQ ID NO: 11744 - DNA, 122 bp, Homo sapiens
  misc_feature (61)..(62): /note="This region represents a CpG dinucleotide"
  misc_feature (61)..(61): /note="Nucleotide may be methylated to form 5-methylcytosine"
accttgtgcaagttacttcacccctgggtgagtcagtgtcttcattataggagagaaaaacggaaaaggtcccacctcatagggttatgaggcttaaatgagcttagcatttgcctggcgtg

SEQ ID NO: 11745 - DNA, 122 bp, Homo sapiens
  misc_feature (61)..(62): /note="This region represents a CpG dinucleotide"
  misc_feature (61)..(61): /note="Nucleotide may be methylated to form 5-methylcytosine"
cactgcatgtataaagatgaataaggcatggcccttgctctcaggaagctcacaaaatagcgggaatgacagacatatatgttaatgatattgcatagtgggatagagttataaccaagcta

SEQ ID NO: 11746 - DNA, 122 bp, Homo sapiens
  misc_feature (61)..(62): /note="This region represents a CpG dinucleotide"
  misc_feature (61)..(61): /note="Nucleotide may be methylated to form 5-methylcytosine"
acgccaccacactccagcctgcgcgaccgtgagactccatctcaaaaaaaaagaaacgaacggctggttcctgtttacaccaggcacattcctgtagtgttgctcaaggtcaggagggattt

SEQ ID NO: 11747 - DNA, 122 bp, Homo sapiens
  misc_feature (61)..(62): /note="This region represents a CpG dinucleotide"
  misc_feature (61)..(61): /note="Nucleotide may be methylated to form 5-methylcytosine"
cttggcataacacaccttggaccaggtccagtggcattcaatcactggcaatgctggaaacgctttgatgaatcatggactcactattaccaaacaatttcatggcccttccctaaggatgg

SEQ ID NO: 11748 - DNA, 122 bp, Homo sapiens
  misc_feature (61)..(62): /note="This region represents a CpG dinucleotide"
  misc_feature (61)..(61): /note="Nucleotide may be methylated to form 5-methylcytosine"
gaacaaagaacatcagttagagttcagtcctcagtgcccccttatctgaggtctatgtgacggtggtcaacattgtctatctggtggggctcctgtttctgaaaaatagctcaaggatacgt

SEQ ID NO: 11749 - DNA, 122 bp, Homo sapiens
  misc_feature (61)..(62): /note="This region represents a CpG dinucleotide"
  misc_feature (61)..(61): /note="Nucleotide may be methylated to form 5-methylcytosine"
ctatccacctgtcggcccctcccacaaggctgtgcacgcccaggagcaggcactctgacacgtccagtgtgagcatcattaagagcccaattgctagccaagcctggctgtgcacctcacct

SEQ ID NO: 11750 - DNA, 122 bp, Homo sapiens
  misc_feature (61)..(62): /note="This region represents a CpG dinucleotide"
  misc_feature (61)..(61): /note="Nucleotide may be methylated to form 5-methylcytosine"
ctgtctcaaaaaaaaaaaaaaaaaaaagtgagactgggagcagaaagcaagcagtactcacgccacactgctgggcagtggtgcttaaagaaagcgaaagaacaaacaaatgaaataccagc

SEQ ID NO: 11751 - DNA, 122 bp, Homo sapiens
  misc_feature (61)..(62): /note="This region represents a CpG dinucleotide"
  misc_feature (61)..(61): /note="Nucleotide may be methylated to form 5-methylcytosine"
aggttggccactgggggcctggccaccctcaaggggtggccctctgaggtctcagggctgcgtgcctgtagggagtcccctacccccagcccagggctgcctgctggcaccgtggcaaggcc

SEQ ID NO: 11752 - DNA, 122 bp, Homo sapiens
  misc_feature (61)..(62): /note="This region represents a CpG dinucleotide"
  misc_feature (61)..(61): /note="Nucleotide may be methylated to form 5-methylcytosine"
ccctatgtcctctagttctcagtcttgagaccagcacccagctggctacatcagaattgccggtggtgatgttttagaagattccaaattcctggactccatccccggaggttcatccccta

SEQ ID NO: 11753 - DNA, 122 bp, Homo sapiens
  misc_feature (61)..(62): /note="This region represents a CpG dinucleotide"
  misc_feature (61)..(61): /note="Nucleotide may be methylated to form 5-methylcytosine"
ataacttttaaatagcacatcattctaagtagcatgatgaaatctggcacaatcccactgcgttctgcctgggacatgaatcattcctttgcccagcaaatccacactgtgtacactactag

SEQ ID NO: 11754 - DNA, 122 bp, Homo sapiens
  misc_feature (61)..(62): /note="This region represents a CpG dinucleotide"
  misc_feature (61)..(61): /note="Nucleotide may be methylated to form 5-methylcytosine"
cccgccccaaaaaaaggcagggttgttcttggggcaaactgtggaatctccttttgcagacgaaatctttctgcaatggctgagtcaagttcagcggaatgggaggagagtgggccgtgggg

SEQ ID NO: 11755 - DNA, 122 bp, Homo sapiens
  misc_feature (61)..(62): /note="This region represents a CpG dinucleotide"
  misc_feature (61)..(61): /note="Nucleotide may be methylated to form 5-methylcytosine"
ggccagacttggggaaaattcaggtcacactgcaaggtagcatgtgttagggcctgcatccgtggtgcagggagtgccctaggaatgtggaagcgggagaactcagggcagatcagatgggc

SEQ ID NO: 11756 - DNA, 122 bp, Homo sapiens
  misc_feature (61)..(62): /note="This region represents a CpG dinucleotide"
  misc_feature (61)..(61): /note="Nucleotide may be methylated to form 5-methylcytosine"
aggtcatctgatttgctaaggctctaattttcttaacacacactccaaatgcaatgcatacgtttgaaaagggaagctttattgaattctctatagctgaacacttctactctgagattgtc

SEQ ID NO: 11757 - DNA, 122 bp, Homo sapiens
  misc_feature (61)..(62): /note="This region represents a CpG dinucleotide"
  misc_feature (61)..(61): /note="Nucleotide may be methylated to form 5-methylcytosine"
aataaggtttagttgaacataagcactgtgatactgccacaatcaatctgataactgagacgactactaagtgactaatgaatgggtagctcatatggcatagatgtgctggacaaaaggac

SEQ ID NO: 11758 - DNA, 122 bp, Homo sapiens
  misc_feature (61)..(62): /note="This region represents a CpG dinucleotide"
  misc_feature (61)..(61): /note="Nucleotide may be methylated to form 5-methylcytosine"
ccagcccctccatccctccctgctcccagggaggtgtagcacctgggtgtgtgcaccgtgcgtgtctgtgtgtacacacatgaacctgcagtctggatgccactggccctgggttccgcaga

SEQ ID NO: 11759 - DNA, 122 bp, Homo sapiens
  misc_feature (61)..(62): /note="This region represents a CpG dinucleotide"
  misc_feature (61)..(61): /note="Nucleotide may be methylated to form 5-methylcytosine"
catggagcagaggggacacagggttcagccttttgaactaggaattgagaagcttggatccgatccctatttcaccacttcctgtattagcttgatgaccttggacaagttacttaccctct

SEQ ID NO: 11760 - DNA, 122 bp, Homo sapiens
  misc_feature (61)..(62): /note="This region represents a CpG dinucleotide"
  misc_feature (61)..(61): /note="Nucleotide may be methylated to form 5-methylcytosine"
ttgatgaattctacttcctgggccttccaaatttatgactaccaaggcttagaaacagttcggttcctcagcctcagctgagagatggagagattacaataaacctcatgcttcactttatc

SEQ ID NO: 11761 - DNA, 122 bp, Homo sapiens
  misc_feature (61)..(62): /note="This region represents a CpG dinucleotide"
  misc_feature (61)..(61): /note="Nucleotide may be methylated to form 5-methylcytosine"
aatgggagggccagagagggtgcctctcactcccatagtctctgagcgtgataacggtagcgccagaccagcacacaggcttcatgattttcagcagcatgttcttcccatccatgcgtatt

SEQ ID NO: 11762 - DNA, 122 bp, Homo sapiens
  misc_feature (61)..(62): /note="This region represents a CpG dinucleotide"
  misc_feature (61)..(61): /note="Nucleotide may be methylated to form 5-methylcytosine"
ttaactcttgtattttagccatcatctgagcgggaagccggtatgactctgcaaggcgttcgtttaaaagttgtgctacttttgaggtgaagttaagagtgtctccatccacgccctctgct

SEQ ID NO: 11763 - DNA, 122 bp, Homo sapiens
  misc_feature (61)..(62): /note="This region represents a CpG dinucleotide"
  misc_feature (61)..(61): /note="Nucleotide may be methylated to form 5-methylcytosine"
tcagggttattgagtaacaggctggctgggtttgcaggccagcgtgttcctggtggcagccgctcactcattaacacttctggaagtgctgcatgtctggttaaactgcaaatgctttgcaa

SEQ ID NO: 11764 - DNA, 122 bp, Homo sapiens
  misc_feature (61)..(62): /note="This region represents a CpG dinucleotide"
  misc_feature (61)..(61): /note="Nucleotide may be methylated to form 5-methylcytosine"
cataccagaatatttataaaatccaatttttgctgagcccttactacatggcaatcactacgttctgtgccccacatgtcttgtttcagttaatcatcacaaccaccccacaaggcagagac

SEQ ID NO: 11765 - DNA, 122 bp, Homo sapiens
  misc_feature (61)..(62): /note="This region represents a CpG dinucleotide"
  misc_feature (61)..(61): /note="Nucleotide may be methylated to form 5-methylcytosine"
ggcctcctacatggaaatgttggggctgtctctggtggctcctaattccctgaaacccttcgtaaatggtttgttgacatctgcagttcctgaggtctcttagattaaacagtgatgtcctg

SEQ ID NO: 11766 - DNA, 122 bp, Homo sapiens
  misc_feature (61)..(62): /note="This region represents a CpG dinucleotide"
  misc_feature (61)..(61): /note="Nucleotide may be methylated to form 5-methylcytosine"
ttatgattatattaggtcatgcctgtcctcttgcttctggcctgaactaattcacttacacgtgcctataaggtgatcgaggtgacccaatgatcttcttttagccacaatacctattccat

SEQ ID NO: 11767 - DNA, 122 bp, Homo sapiens
  misc_feature (61)..(62): /note="This region represents a CpG dinucleotide"
  misc_feature (61)..(61): /note="Nucleotide may be methylated to form 5-methylcytosine"
ctcttcgtggacaaaggcgttcgattttccagaggaggccaagaatgggagccgtgggtccgtagcttggtgtagggcgtgagttccagtggtgagcagtgagacacgctgagctgggctgg

SEQ ID NO: 11768 - DNA, 122 bp, Homo sapiens
  misc_feature (61)..(62): /note="This region represents a CpG dinucleotide"
  misc_feature (61)..(61): /note="Nucleotide may be methylated to form 5-methylcytosine"
cacgcaaggtcaggaagtgccaaagccaccaagagtacatgtgacttcgggggttgggggcgggtgcgcctgcccacccaccacaaatcttagccatctgggctgtggagaaaaaaagggag

SEQ ID NO: 11769 - DNA, 122 bp, Homo sapiens
  misc_feature (61)..(62): /note="This region represents a CpG dinucleotide"
  misc_feature (61)..(61): /note="Nucleotide may be methylated to form 5-methylcytosine"
tagtgaggagctgtggaacttctgattcagaccatgagtcagaggaaccaaattctcacccgggagaccagccctttcctcagtcgagccatcagtgcttcatctgggtcctctcacttaga

SEQ ID NO: 11770 - DNA, 122 bp, Homo sapiens
  misc_feature (61)..(62): /note="This region represents a CpG dinucleotide"
  misc_feature (61)..(61): /note="Nucleotide may be methylated to form 5-methylcytosine"
ctgaatcagagcaacaccccttaccttttagggcgtatgatttatttactgctgggtctccggtatctaatatagtgcctggcacttggtaggtgagcaataaatatttgttgactgaaaga

SEQ ID NO: 11771 - DNA, 122 bp, Homo sapiens
  misc_feature (61)..(62): /note="This region represents a CpG dinucleotide"
  misc_feature (61)..(61): /note="Nucleotide may be methylated to form 5-methylcytosine"
tgaatttatagttcttttcttcagcacttgaaaaatgctgttcttcttccttctggcctccgtggtttctggtgacaaattctttgtcattaaaactggtttctcccctataggtaaggtgt

SEQ ID NO: 11772 - DNA, 122 bp, Homo sapiens
  misc_feature (61)..(62): /note="This region represents a CpG dinucleotide"
  misc_feature (61)..(61): /note="Nucleotide may be methylated to form 5-methylcytosine"
gagttcagggctgcactgacttaggaagggagcccgcagagtgcagcggccaccaggggacgctcccagcgtccagcaccccgcccccagccagcctgctctgtccccgccgcccggcccag

SEQ ID NO: 11773 - DNA, 122 bp, Homo sapiens
  misc_feature (61)..(62): /note="This region represents a CpG dinucleotide"
  misc_feature (61)..(61): /note="Nucleotide may be methylated to form 5-methylcytosine"
acccaggcctccgaggtgtccctagggtggctccggggcctggctctgaaaaggatggcccgcttctgcccagacgctgccctggtcacgctcacagcagcccgggtgactcagggtgacac

SEQ ID NO: 11774 - DNA, 122 bp, Homo sapiens
  misc_feature (61)..(62): /note="This region represents a CpG dinucleotide"
  misc_feature (61)..(61): /note="Nucleotide may be methylated to form 5-methylcytosine"
gatagtgatttccaattgaacttctaactgtgctcatggggcagtcccatagcctaccaacgttcatctttatggaagaggagcctgagcatgcaagatggtcacatctctcacagtgcttt

SEQ ID NO: 11775 - DNA, 122 bp, Homo sapiens
  misc_feature (61)..(62): /note="This region represents a CpG dinucleotide"
  misc_feature (61)..(61): /note="Nucleotide may be methylated to form 5-methylcytosine"
ctccttccctccagtctcctgaaggtgtctccattggccaaaccaaatgggatggagagccggtggatgctgccaattaaggtcaggctcagagtaagaagtagagtggatgtgcagaggca

SEQ ID NO: 11776 - DNA, 122 bp, Homo sapiens
  misc_feature (61)..(62): /note="This region represents a CpG dinucleotide"
  misc_feature (61)..(61): /note="Nucleotide may be methylated to form 5-methylcytosine"
agaggaagcaacacaggatgggatctctatctggttctaggtctcaggctttctccagcccgttttgccaacttacaagcaactaaccaccactaaacttcctctccctggagaaggaaaaa

SEQ ID NO: 11777 - DNA, 122 bp, Homo sapiens
  misc_feature (61)..(62): /note="This region represents a CpG dinucleotide"
  misc_feature (61)..(61): /note="Nucleotide may be methylated to form 5-methylcytosine"
ttactgagaacttgctgtgtcttctcttgggcctcttacctccaaggtaaattttactctcgtcatgtgatcaatgaggatgtgaggctcctagtggggccacgtttgtttgctcagtgagc

SEQ ID NO: 11778 - DNA, 122 bp, Homo sapiens
  misc_feature (61)..(62): /note="This region represents a CpG dinucleotide"
  misc_feature (61)..(61): /note="Nucleotide may be methylated to form 5-methylcytosine"
gccagttcttgtgcaaatagaacattttcaagatagttctgccacttgtacagcactctacgtgctgtagagttcagccctgagagagagggacaggatcctgtgtgtcccgtccgccttgc

SEQ ID NO: 11779 - DNA, 122 bp, Homo sapiens
  misc_feature (61)..(62): /note="This region represents a CpG dinucleotide"
  misc_feature (61)..(61): /note="Nucleotide may be methylated to form 5-methylcytosine"
cctaaagaaggttgtacttccttggggaaaacaaaatctggataaatatttataaaacaacgtgatgcagtataggaaattgggccataacaaaacagtatgttgaaagcttgtggaaataa

SEQ ID NO: 11780 - DNA, 122 bp, Homo sapiens
  misc_feature (61)..(62): /note="This region represents a CpG dinucleotide"
  misc_feature (61)..(61): /note="Nucleotide may be methylated to form 5-methylcytosine"
tggaccctgaaccatcctggctctctgagcgtctgccagcccttctgctctggggcgccgcgctccttagccactctcagcatcagtgccagctctgccccaccacacgcccccggcaggta

SEQ ID NO: 11781 - DNA, 122 bp, Homo sapiens
  misc_feature (61)..(62): /note="This region represents a CpG dinucleotide"
  misc_feature (61)..(61): /note="Nucleotide may be methylated to form 5-methylcytosine"
ccagggggcatttgttgctaagcaaccaagacttctgttaaatcccttcttaaagagtgtcggcaatatgcactatcaaataaacccagctttgcaagatgataccttcctaattgactaag

SEQ ID NO: 11782 - DNA, 122 bp, Homo sapiens
  misc_feature (61)..(62): /note="This region represents a CpG dinucleotide"
  misc_feature (61)..(61): /note="Nucleotide may be methylated to form 5-methylcytosine"
tggaaggcaactggtgctggcctaattccctgtggtacaacctgggctttggggccatcacgtctttataatcatttcgcctcatggccctttgccaagtttccttttaagcaatagtttgg

SEQ ID NO: 11783 - DNA, 122 bp, Homo sapiens
  misc_feature (61)..(62): /note="This region represents a CpG dinucleotide"
  misc_feature (61)..(61): /note="Nucleotide may be methylated to form 5-methylcytosine"
gaagatgtgcaggcaggtgaaacctgatccccgtggccattgtagagaccaagaacaacacggaatgtttacacagtggtttgattttaatagacagaagggctgagtttaagacagcaaaa

SEQ ID NO: 11784 - DNA, 122 bp, Homo sapiens
  misc_feature (61)..(62): /note="This region represents a CpG dinucleotide"
  misc_feature (61)..(61): /note="Nucleotide may be methylated to form 5-methylcytosine"
ggtgctgcctcatcccagagaattttggacacattccccagtgccacaggggcaatgctacggctgatggtgattttggagttcatacataactctggacccagtacttagatctgctaatg

SEQ ID NO: 11785 - DNA, 122 bp, Homo sapiens
  misc_feature (61)..(62): /note="This region represents a CpG dinucleotide"
  misc_feature (61)..(61): /note="Nucleotide may be methylated to form 5-methylcytosine"
cctcaccaacctcactcacactaagtacccacagctcttgtcgggcatcagagacatctccgaggagaccatgactgaggtccacaacctatacaagatgatggccaatgggatcctgaagg

SEQ ID NO: 11786 - DNA, 122 bp, Homo sapiens
  misc_feature (61)..(62): /note="This region represents a CpG dinucleotide"
  misc_feature (61)..(61): /note="Nucleotide may be methylated to form 5-methylcytosine"
gtgcgacctagtatttgcctgaatggagcaggcaagagtggtggggtgaggagattccatcgtggctgctcatgcattagtcattgcttcaccttagggagagacccagaaccctaatgttt

SEQ ID NO: 11787 - DNA, 122 bp, Homo sapiens
  misc_feature (61)..(62): /note="This region represents a CpG dinucleotide"
  misc_feature (61)..(61): /note="Nucleotide may be methylated to form 5-methylcytosine"
gctccccacggggaaataccaaggatatagactgtgccagctgggcctccagcaagccagcgctgttacctgtccaatatctggagggtgaccccaaaatttgcctggggcaatggccacag

SEQ ID NO: 11788 - DNA, 122 bp, Homo sapiens
  misc_feature (61)..(62): /note="This region represents a CpG dinucleotide"
  misc_feature (61)..(61): /note="Nucleotide may be methylated to form 5-methylcytosine"
ggtgccctggcccagcctccttccggttggggttggacccgccctggcagccaggttttgcgtcacctgccccacccgccctgtaacctacttgcccaactgctatcccggtggccgtgagg

SEQ ID NO: 11789 - DNA, 122 bp, Homo sapiens
  misc_feature (61)..(62): /note="This region represents a CpG dinucleotide"
  misc_feature (61)..(61): /note="Nucleotide may be methylated to form 5-methylcytosine"
atgcactgctggggcaggttacgcagctgctccatggtctcatacatgccttggcaggagcgcagcttctccactgagcccagcgtgtggcgcagcaggaccagggccacccggaagatgat

SEQ ID NO: 11790 - DNA, 122 bp, Homo sapiens
  misc_feature (61)..(62): /note="This region represents a CpG dinucleotide"
  misc_feature (61)..(61): /note="Nucleotide may be methylated to form 5-methylcytosine"
aggaatgacacatgtctaaactatgtttcagtgagcaattcccaaactgatttgaccatgcgtttcctttacaaacctataagttccaggaaacaatgctgagaagtgttattttattatcc

SEQ ID NO: 11791 - DNA, 122 bp, Homo sapiens
  misc_feature (61)..(62): /note="This region represents a CpG dinucleotide"
  misc_feature (61)..(61): /note="Nucleotide may be methylated to form 5-methylcytosine"
cagaggagactgagacttggtagttgaggccacctgcctgaagtggtaacaggttggaagcggaaggcattagatttgaatcctgtctgtctgatgcccaagtgcctggtctcttctctgcc

SEQ ID NO: 11792 - DNA, 122 bp, Homo sapiens
  misc_feature (61)..(62): /note="This region represents a CpG dinucleotide"
  misc_feature (61)..(61): /note="Nucleotide may be methylated to form 5-methylcytosine"
caatgccctaatctagagaattacatagttctaagcacagcaaatctcctacaaacagatcgggattcaaatatttcattctacagtcttgggatcctcaatgcaagggacaggctgtaagc

SEQ ID NO: 11793 - DNA, 122 bp, Homo sapiens
  misc_feature (61)..(62): /note="This region represents a CpG dinucleotide"
  misc_feature (61)..(61): /note="Nucleotide may be methylated to form 5-methylcytosine"
ttcaatcagctatgatgtccttatcaagctgtcactaccaagttccttgataagatctgacgtgtgaggtacataaacctgttctgttgtagcactgtggcctgtatggaaaaggttagata

SEQ ID NO: 11794 - DNA, 122 bp, Homo sapiens
  misc_feature (61)..(62): /note="This region represents a CpG dinucleotide"
  misc_feature (61)..(61): /note="Nucleotide may be methylated to form 5-methylcytosine"
cctcatgagccaggaccttcctcagccacatctggatcctcagcccctcacagcacacagcggtagtcagaaagtatgctgagtaagtggagaacaagttaacattgattttcacaaccacg

SEQ ID NO: 11795 - DNA, 122 bp, Homo sapiens
  misc_feature (61)..(62): /note="This region represents a CpG dinucleotide"
  misc_feature (61)..(61): /note="Nucleotide may be methylated to form 5-methylcytosine"
gtccttcacaaaccacaaatgagcaatctcctgaaagtcaataattgtcagaacagtcctcgtggttcggaacaaagactctgccaatctaggcttgtccttgagcaaatggtaccaaagga

SEQ ID NO: 11796 - DNA, 122 bp, Homo sapiens
  misc_feature (61)..(62): /note="This region represents a CpG dinucleotide"
  misc_feature (61)..(61): /note="Nucleotide may be methylated to form 5-methylcytosine"
ctccttgtggccatagaaccagtgcgcagggggtgcaggaaacaggtgcatggctctgatcgtccatctcctcctctggtacaacctgattacctgaaacagcagcagagacatgcagagga

SEQ ID NO: 11797 - DNA, 122 bp, Homo sapiens
  misc_feature (61)..(62): /note="This region represents a CpG dinucleotide"
  misc_feature (61)..(61): /note="Nucleotide may be methylated to form 5-methylcytosine"
gggattgaggagtggggaaaggtatccatatccagtcttttcatgtttctccaaggttaccgtcctattttggtcagaattgtgtaatctcctttgtgggggttttggatattaaccaacat

SEQ ID NO: 11798 - DNA, 122 bp, Homo sapiens
  misc_feature (61)..(62): /note="This region represents a CpG dinucleotide"
  misc_feature (61)..(61): /note="Nucleotide may be methylated to form 5-methylcytosine"
aatagatcccccctccccgccgctgcagcaaatcaacatttctgctcacagggagagcagcgaatctaaagacatggccactgacgcgcatccccttaaaccgcagcggctagggtccagga

SEQ ID NO: 11799 - DNA, 122 bp, Homo sapiens
  misc_feature (61)..(62): /note="This region represents a CpG dinucleotide"
  misc_feature (61)..(61): /note="Nucleotide may be methylated to form 5-methylcytosine"
atattacagcagtcattaaacatctctggatctcaggcagtcttattagcataaactctgcgtattaccacaaggtttcaagtttctattctggcttctcatcttagctaccattttctgtc

SEQ ID NO: 11800 - DNA, 122 bp, Homo sapiens
  misc_feature (61)..(62): /note="This region represents a CpG dinucleotide"
  misc_feature (61)..(61): /note="Nucleotide may be methylated to form 5-methylcytosine"
atcctcatgcccctttgtaatctgtaatctatcatccctcctttactccatttcaggcaacgactggctttgctctctgtcatcacagattagtttgcatttttaaaaactagtctgggcac

SEQ ID NO: 11801 - DNA, 122 bp, Homo sapiens
  misc_feature (61)..(62): /note="This region represents a CpG dinucleotide"
  misc_feature (61)..(61): /note="Nucleotide may be methylated to form 5-methylcytosine"
cattgccatctgggttttggctgccttctttaccgcatcctgttttatcagcagggctttcgtgacctgtactttgtgaaaccagtcttgctgaactcctttcttactttgaaatggacaaa

SEQ ID NO: 11802 - DNA, 122 bp, Homo sapiens
  misc_feature (61)..(62): /note="This region represents a CpG dinucleotide"
  misc_feature (61)..(61): /note="Nucleotide may be methylated to form 5-methylcytosine"
cttatgcctatggatgaaattgtatgcttactttatctgaaaacaattgcatgccccacccggtttccctttgtgccctggtttccaggaagctcagtactaaatttagtgctcaattgtag

SEQ ID NO: 11803 - DNA, 122 bp, Homo sapiens
  misc_feature (61)..(62): /note="This region represents a CpG dinucleotide"
  misc_feature (61)..(61): /note="Nucleotide may be methylated to form 5-methylcytosine"
acatcttaaagtaattggagaatgaagcaagaactgatttgtgtgccttgaagtatacatcgccgattgcaaccgtgcagtcacacaggaaaccaaactctcgctgagcgtttaactgttgc

SEQ ID NO: 11804 - DNA, 122 bp, Homo sapiens
  misc_feature (61)..(62): /note="This region represents a CpG dinucleotide"
  misc_feature (61)..(61): /note="Nucleotide may be methylated to form 5-methylcytosine"
tttgttagcttgtgatttccctgatttttaaggttaacagctgatgttctgtttttctgccgagcagcaaggaaaatactggatttttgttgctgttgcttttgtcattgcttatgtttggt

SEQ ID NO: 11805 - DNA, 122 bp, Homo sapiens
  misc_feature (61)..(62): /note="This region represents a CpG dinucleotide"
  misc_feature (61)..(61): /note="Nucleotide may be methylated to form 5-methylcytosine"
agacatccgagagggtcgacggtagatgtggtgattgggagctgaaaaggatttttcttccgtattcagacataatagacatgatgcaaactaaagtacagaacaagaaaaggcaagtggct

SEQ ID NO: 11806 - DNA, 122 bp, Homo sapiens
  misc_feature (61)..(62): /note="This region represents a CpG dinucleotide"
  misc_feature (61)..(61): /note="Nucleotide may be methylated to form 5-methylcytosine"
cggcagtggctctaaccgctcacttggttgactgcctgaagtgcagggcactgctgagtccgtgtttaatgaggctgagatgccaggcttctgtggcacagtgaactatacaggaggaatcc

SEQ ID NO: 11807 - DNA, 122 bp, Homo sapiens
  misc_feature (61)..(62): /note="This region represents a CpG dinucleotide"
  misc_feature (61)..(61): /note="Nucleotide may be methylated to form 5-methylcytosine"
catgactcagccactcagctccctgcccttgggcaatttatttaactgtatggtacttaacggcttcccacttctgaattagggcttgctggaaagatacaggcaggaataaagaaattaaa

SEQ ID NO: 11808 - DNA, 122 bp, Homo sapiens
  misc_feature (61)..(62): /note="This region represents a CpG dinucleotide"
  misc_feature (61)..(61): /note="Nucleotide may be methylated to form 5-methylcytosine"
ggcatgatctgacttctgtttaccggagatcactctggccgctgataaaacctcaaggagcgcagtggggcacgatcaccccgggaagacaagcagcagctgggaagggctggggtagtagc

SEQ ID NO: 11809 - DNA, 122 bp, Homo sapiens
  misc_feature (61)..(62): /note="This region represents a CpG dinucleotide"
  misc_feature (61)..(61): /note="Nucleotide may be methylated to form 5-methylcytosine"
acagtatttactttattgttgccctcactactgacaaatgccaaagtaatgtggcaaggacggaggaagagggtattcaatacacagcttcaacaccagtatttacgctgagaatactcacc

SEQ ID NO: 11810 - DNA, 122 bp, Homo sapiens
  misc_feature (61)..(62): /note="This region represents a CpG dinucleotide"
  misc_feature (61)..(61): /note="Nucleotide may be methylated to form 5-methylcytosine"
gtttacagtgatgtaactttcccaaagtttatatgtagccttaaagggtttagtgcagagcggattgcaaatgagtaactgccaagaagaaagaaagagggtgatccatccctcccagttag

SEQ ID NO: 11811 - DNA, 122 bp, Homo sapiens
  misc_feature (61)..(62): /note="This region represents a CpG dinucleotide"
  misc_feature (61)..(61): /note="Nucleotide may be methylated to form 5-methylcytosine"
tgacattgagcagaatacagacaaattgtcaggcagttgggtgggatgaaaaagatgggacgacagccaacactatcaaaaggacctgagttcatgaatatctgggctagctcagtgaagct

SEQ ID NO: 11812 - DNA, 122 bp, Homo sapiens
  misc_feature (61)..(62): /note="This region represents a CpG dinucleotide"
  misc_feature (61)..(61): /note="Nucleotide may be methylated to form 5-methylcytosine"
cgacttagcattgggctccattataattgctctgtctttgatctgtcctttcactttctacgtctaactcagtgcaaatgcatgctacagtatctcttaagaaacactatattattcccata

SEQ ID NO: 11813 - DNA, 122 bp, Homo sapiens
  misc_feature (61)..(62): /note="This region represents a CpG dinucleotide"
  misc_feature (61)..(61): /note="Nucleotide may be methylated to form 5-methylcytosine"
ggctggttgccaagagcagggcttttgctcagggccccggtggctgacgattgtgtcctgcgtgggataatcgaaagtgtgcacaagtcactcactgatcagacgtcccagggagaccgagg

SEQ ID NO: 11814 - DNA, 122 bp, Homo sapiens
  misc_feature (61)..(62): /note="This region represents a CpG dinucleotide"
  misc_feature (61)..(61): /note="Nucleotide may be methylated to form 5-methylcytosine"
cctgtgatggggaacaggctctgccaggcagggttctttggctggagtctcaaagcctggcgcttgtatcctgaagatgaatggcctggcccagtcccgactagagacatgcatctcttatc

SEQ ID NO: 11815 - DNA, 122 bp, Homo sapiens
  misc_feature (61)..(62): /note="This region represents a CpG dinucleotide"
  misc_feature (61)..(61): /note="Nucleotide may be methylated to form 5-methylcytosine"
ctgaatcagaatataaatactgacaagatgccccgggattcatatgcacagtagagctggcgaagttccattgtagcctgtgattgttttctgcaacttagtatttctgagttttcccaagg

SEQ ID NO: 11816 - DNA, 122 bp, Homo sapiens
  misc_feature (61)..(62): /note="This region represents a CpG dinucleotide"
  misc_feature (61)..(61): /note="Nucleotide may be methylated to form 5-methylcytosine"
actctcattctcttcttttgtctgagagtggagaatgtctgagagattgcatcacagtcacgttaacccttggtactgcacagcctaacaggataagaaaggttcagtctggataggaacta

SEQ ID NO: 11817 - DNA, 122 bp, Homo sapiens
  misc_feature (61)..(62): /note="This region represents a CpG dinucleotide"
  misc_feature (61)..(61): /note="Nucleotide may be methylated to form 5-methylcytosine"
cagcttgtttattactcaggtacggagctggactatcttactgagcctgttctcctggggcggcctcggctgctgctcctctgagggctcggccctgggtggggtgcaatcacctttggtgg

SEQ ID NO: 11818 - DNA, 122 bp, Homo sapiens
  misc_feature (61)..(62): /note="This region represents a CpG dinucleotide"
  misc_feature (61)..(61): /note="Nucleotide may be methylated to form 5-methylcytosine"
taaagtctagtttcttaatgtagtgggcattgcaaaatgaccccaaaatcttactttagacgtccacaagcacaggagtttagaagcttaagataatgcttataagtaacaagtttgtctaa

SEQ ID NO: 11819 - DNA, 122 bp, Homo sapiens
  misc_feature (61)..(62): /note="This region represents a CpG dinucleotide"
  misc_feature (61)..(61): /note="Nucleotide may be methylated to form 5-methylcytosine"
ttctttctccaaagaacaggttttggctcctctcttccctcccttgcccacccccaagagcgtgctccaaaaaactgggccaggggctatcccagaaatggcattctatggggccagggcat

SEQ ID NO: 11820 - DNA, 122 bp, Homo sapiens
  misc_feature (61)..(62): /note="This region represents a CpG dinucleotide"
  misc_feature (61)..(61): /note="Nucleotide may be methylated to form 5-methylcytosine"
gtaaaggtttgcttttaaaggcaaaaaccgcaattacttttgcaccaacctaataaaatgcgaataagtacacatatcctgaagaattgaagaggaagtccaggggaagtccatggtcaagt

SEQ ID NO: 11821 - DNA, 122 bp, Homo sapiens
  misc_feature (61)..(62): /note="This region represents a CpG dinucleotide"
  misc_feature (61)..(61): /note="Nucleotide may be methylated to form 5-methylcytosine"
aaaattgctacagtttaacctggttctccattgcagactgcttatagttgaatacctatacgtgtatatttacctgtacctgaagtacttggctttagtacatggatttaaatgaatccagg

SEQ ID NO: 11822 - DNA, 122 bp, Homo sapiens
  misc_feature (61)..(62): /note="This region represents a CpG dinucleotide"
  misc_feature (61)..(61): /note="Nucleotide may be methylated to form 5-methylcytosine"
atccaagcatctccccctgggtctctgactaagcctgactaaactaatttactctgagtgcgaggcacactattcacatcaaaagaatgtacttaagtagatatagtgcaaccttcccctgt

SEQ ID NO: 11823 - DNA, 122 bp, Homo sapiens
  misc_feature (61)..(62): /note="This region represents a CpG dinucleotide"
  misc_feature (61)..(61): /note="Nucleotide may be methylated to form 5-methylcytosine"
taagacaggccactaaatctagctaagatggctcaacaaaaatgagagttctcaggcctgcgcagaacctgtgaccaagttgctgttagccataaacacctgcattgtgggagctatttgaa

SEQ ID NO: 11824 - DNA, 122 bp, Homo sapiens
  misc_feature (61)..(62): /note="This region represents a CpG dinucleotide"
  misc_feature (61)..(61): /note="Nucleotide may be methylated to form 5-methylcytosine"
ctgtagttaaagtttctaaaatgcatcttgctttcttacagtgaaagcgctacagacccacgcagtcaagcccctagtgagattcctttccaagaggctgtaggttccttcttgagctggtg

SEQ ID NO: 11825 - DNA, 122 bp, Homo sapiens
  misc_feature (61)..(62): /note="This region represents a CpG dinucleotide"
  misc_feature (61)..(61): /note="Nucleotide may be methylated to form 5-methylcytosine"
cgtagcccatagtcaactatagaatcagttggaatcaataacacctctggcttagcatcccgaaggctcacatcagacctttaaaaaacatattttgagaaagtagcctcatcggtcctaag

SEQ ID NO: 11826 - DNA, 122 bp, Homo sapiens
  misc_feature (61)..(62): /note="This region represents a CpG dinucleotide"
  misc_feature (61)..(61): /note="Nucleotide may be methylated to form 5-methylcytosine"
gggacaggcgggttgtggtgaaagctgcagtcgtgaaaaaggctattgtttaatctaccccgtccctcgctgaagctatggcaacaaattccgttggtgaattaactatgtcattgtgcact

SEQ ID NO: 11827 - DNA, 122 bp, Homo sapiens
  misc_feature (61)..(62): /note="This region represents a CpG dinucleotide"
  misc_feature (61)..(61): /note="Nucleotide may be methylated to form 5-methylcytosine"
agctagcactctgtcactgttagtaggtgtccggcagccaaaccattttgctctgtgctccgctggcaaggacttgcggcatcgattgctcaggatgcaggcagcctgcagcaaggtgtgtc

SEQ ID NO: 11828 - DNA, 122 bp, Homo sapiens
  misc_feature (61)..(62): /note="This region represents a CpG dinucleotide"
  misc_feature (61)..(61): /note="Nucleotide may be methylated to form 5-methylcytosine"
tatgacactctgtcgcaatgctgaactggcagtgagtcacagctcccagtcagccacgcacgagattccatgggtaaataactgatattgtatagtgtattgtgttgcaagatgattttgcc

SEQ ID NO: 11829 - DNA, 122 bp, Homo sapiens
  misc_feature (61)..(62): /note="This region represents a CpG dinucleotide"
  misc_feature (61)..(61): /note="Nucleotide may be methylated to form 5-methylcytosine"
cagcagccaggaatgtttccaagggtgacattacaaggatatctccagcagcctggctctcggtgaggaagatagagcagggcgcccgaggggcacacgttggacggcaagggcgtgtggct

SEQ ID NO: 11830 - DNA, 122 bp, Homo sapiens
  misc_feature (61)..(62): /note="This region represents a CpG dinucleotide"
  misc_feature (61)..(61): /note="Nucleotide may be methylated to form 5-methylcytosine"
gcctgaagacagagaggtaagaagccacaagagttttcgtggtggagggagttagttatgcggtaattgcaataatggcttatctgactgtgcaaccatggccaagggcttaacagcctttg

SEQ ID NO: 11831 - DNA, 122 bp, Homo sapiens
  misc_feature (61)..(62): /note="This region represents a CpG dinucleotide"
  misc_feature (61)..(61): /note="Nucleotide may be methylated to form 5-methylcytosine"
attttatcttcagatccttagctccttaagggcagagactgtcttgaaactgggcactaccgttagcatggcaaatttcttctgggcatctcctcagacacaccctccaacacccacaccct

SEQ ID NO: 11832 - DNA, 122 bp, Homo sapiens
  misc_feature (61)..(62): /note="This region represents a CpG dinucleotide"
  misc_feature (61)..(61): /note="Nucleotide may be methylated to form 5-methylcytosine"
acgatgtgcagaggctacctgtagtgatggtgctgagtcaagcctgtcaaccactgtgctcgttagtgaccaaggctgctttgacaggctgccagcttgtcagtggtttgcagccccccaga

SEQ ID NO: 11833 - DNA, 122 bp, Homo sapiens
  misc_feature (61)..(62): /note="This region represents a CpG dinucleotide"
  misc_feature (61)..(61): /note="Nucleotide may be methylated to form 5-methylcytosine"
gaatttttctgtaggaaaaattcagaagtgtggcatgtgctcacttttagaaaattctaacgaaagacatgaacagccagaaatggaaaggaacagacttgtgcaagaaaagaacctttctc

SEQ ID NO: 11834 - DNA, 122 bp, Homo sapiens
  misc_feature (61)..(62): /note="This region represents a CpG dinucleotide"
  misc_feature (61)..(61): /note="Nucleotide may be methylated to form 5-methylcytosine"
atattcacagagttgtgcaactatctgttgtgcaaccacaatctaattttagaatactttcgtcaccccacaaagaaaccttgtatccattagcggtcatttcccatgtaccccactccttt

SEQ ID NO: 11835 - DNA, 122 bp, Homo sapiens
  misc_feature (61)..(62): /note="This region represents a CpG dinucleotide"
  misc_feature (61)..(61): /note="Nucleotide may be methylated to form 5-methylcytosine"
gcagtccttgcaaccacctttagagtccttcttctacggaaggttatctgagacagcaggcgcactgtgtggctttccctccttgcttttcctccagctccaaaccttaactctttgctagt

SEQ ID NO: 11836 - DNA, 122 bp, Homo sapiens
  misc_feature (61)..(62): /note="This region represents a CpG dinucleotide"
  misc_feature (61)..(61): /note="Nucleotide may be methylated to form 5-methylcytosine"
gctaagaatatagttgtaagattactcaaggacaaatgtactgtccttgaaaggcaaatacgaaataagcatacacacaaatggaagttagcagtctgagtcatggcagaggccatgaagga

SEQ ID NO: 11837 - DNA, 122 bp, Homo sapiens
  misc_feature (61)..(62): /note="This region represents a CpG dinucleotide"
  misc_feature (61)..(61): /note="Nucleotide may be methylated to form 5-methylcytosine"
ttgctcttagcattttttttcttttcatgtaaccctttgttctttcaggaatttactttgcggtaagaaatgggctggcttccagttttatgtttcccaaatggtgattcagctgttccatt

SEQ ID NO: 11838 - DNA, 122 bp, Homo sapiens
  misc_feature (61)..(62): /note="This region represents a CpG dinucleotide"
  misc_feature (61)..(61): /note="Nucleotide may be methylated to form 5-methylcytosine"
cccagcatcctgctcatcttgctggtaggcaaccactcattcatttctacattcagaaatcgtgggccttctctctctgagagccggtttactgaggtcaggaggcacccacatctgcttca

SEQ ID NO: 11839 - DNA, 122 bp, Homo sapiens
  misc_feature (61)..(62): /note="This region represents a CpG dinucleotide"
  misc_feature (61)..(61): /note="Nucleotide may be methylated to form 5-methylcytosine"
tggcagccagcaggaaacagggactttctagcactaaagcattagtgctgaggtcctggccgtgcccagaaattgccatgtgggtgctctggagttttgaggttgacaactgcaagttgtgt

SEQ ID NO: 11840 - DNA, 122 bp, Homo sapiens
  misc_feature (61)..(62): /note="This region represents a CpG dinucleotide"
  misc_feature (61)..(61): /note="Nucleotide may be methylated to form 5-methylcytosine"
gataagcatgttgacaacttacatttactgactgtttactgctttccacatactatgctacgtgcttgatgtgtcattcagtcctctcaacaactttactataattatcagcatttttttat

SEQ ID NO: 11841 - DNA, 122 bp, Homo sapiens
  misc_feature (61)..(62): /note="This region represents a CpG dinucleotide"
  misc_feature (61)..(61): /note="Nucleotide may be methylated to form 5-methylcytosine"
ggctgaagagtgtgagaagctagacctctgcaggttaccgaagtcaagaacctcattaatcggtaacaagaagtgcagagcgggcttttgagtccatgcctgagtaagaaagtcccaaaaaa

SEQ ID NO: 11842 - DNA, 122 bp, Homo sapiens
  misc_feature (61)..(62): /note="This region represents a CpG dinucleotide"
  misc_feature (61)..(61): /note="Nucleotide may be methylated to form 5-methylcytosine"
agaagccagaagcagacactggacattgttcaggcacctggatcaagccacacctgaaggcggacatccctgaactttccatataactttcatgattcaggctccacccagtttgtctgggt

SEQ ID NO: 11843 - DNA, 122 bp, Homo sapiens
  misc_feature (61)..(62): /note="This region represents a CpG dinucleotide"
  misc_feature (61)..(61): /note="Nucleotide may be methylated to form 5-methylcytosine"
acagctagttgtgagttcctttaaaagtcagtacaggggcaggcgacctttggggagtggcgtctgtgagtcagtcatttggaagttggaacatattccccatggaaacaatatcccacata

SEQ ID NO: 11844 - DNA, 122 bp, Homo sapiens
  misc_feature (61)..(62): /note="This region represents a CpG dinucleotide"
  misc_feature (61)..(61): /note="Nucleotide may be methylated to form 5-methylcytosine"
tggtcgagctttgtgaactttgtcttcatgccccgacaccctacttcccaaagcctggaccggtaaagttcttttcaccagaaaggacaagggcaagtgagtgcaagagagaaagtggcaca

SEQ ID NO: 11845 - DNA, 122 bp, Homo sapiens
  misc_feature (61)..(62): /note="This region represents a CpG dinucleotide"
  misc_feature (61)..(61): /note="Nucleotide may be methylated to form 5-methylcytosine"
ggcccacctcactccgcacacaagagaaatttaggcagctcagtttattgtcccataattcgtcccgttatggctcgataacggatagcggctcaggagaatattaagagcatcgactctgg

SEQ ID NO: 11846 - DNA, 122 bp, Homo sapiens
  misc_feature (61)..(62): /note="This region represents a CpG dinucleotide"
  misc_feature (61)..(61): /note="Nucleotide may be methylated to form 5-methylcytosine"
gttacatacttgattttacagcaatttaaaaagccagactttgagacacttcctatatcacgaggctcttgctgtccagcagaatctcatttcctgaaatttgtgcacatttggctcctaat

SEQ ID NO: 11847 - DNA, 122 bp, Homo sapiens
  misc_feature (61)..(62): /note="This region represents a CpG dinucleotide"
  misc_feature (61)..(61): /note="Nucleotide may be methylated to form 5-methylcytosine"
acttcttcaaatatgcagacaccagtgcaagtccataaggatctcaaatgatcagggaaacgtgacaccatcaaaggaacaaaataaagctttagctatgataatttgttgataaatatata

SEQ ID NO: 11848 - DNA, 122 bp, Homo sapiens
  misc_feature (61)..(62): /note="This region represents a CpG dinucleotide"
  misc_feature (61)..(61): /note="Nucleotide may be methylated to form 5-methylcytosine"
gagaaatcttcagtgtcaccaaagattgcttctcaccaaccctgtgctttcagctgcagacgtgcatgcctgacagcctgtacctctggagtgcaactggagccattgccattggttccccc

SEQ ID NO: 11849 - DNA, 122 bp, Homo sapiens
  misc_feature (61)..(62): /note="This region represents a CpG dinucleotide"
  misc_feature (61)..(61): /note="Nucleotide may be methylated to form 5-methylcytosine"
tgtcttgtgccgggtgcagaggacattgaggtggggctgcctcatgcttcacagtcctagcgttattttccatgccatctgtgttctgactaaacccactttaggtatggggaaactgatgc

SEQ ID NO: 11850 - DNA, 122 bp, Homo sapiens
  misc_feature (61)..(62): /note="This region represents a CpG dinucleotide"
  misc_feature (61)..(61): /note="Nucleotide may be methylated to form 5-methylcytosine"
ccactagactctgcaggtccccatgggaagcgccctgccctccacgcccacctacgaggtcgcgacccccctaccccgaaccgccctctgcagacaacgaggctcggaggaggcaagcagcg

SEQ ID NO: 11851 - DNA, 122 bp, Homo sapiens
  misc_feature (61)..(62): /note="This region represents a CpG dinucleotide"
  misc_feature (61)..(61): /note="Nucleotide may be methylated to form 5-methylcytosine"
aggaagggcctgtggacagggtctcttctatgtagtaatcccacttcttgaggctagagacgtttacattgggctttagagcctgttaaagaaaacagaaatatagtttcatcttgacccca

SEQ ID NO: 11852 - DNA, 122 bp, Homo sapiens
  misc_feature (61)..(62): /note="This region represents a CpG dinucleotide"
  misc_feature (61)..(61): /note="Nucleotide may be methylated to form 5-methylcytosine"
tcttctcgtctttgcagtgggcatgttcacacgcaacccgcaggctggcggtgacggtttcgtggggcgatgtgcatgagcaggtgctcatgaagccggccccgcccacacatgcagatggc

SEQ ID NO: 11853 - DNA, 122 bp, Homo sapiens
  misc_feature (61)..(62): /note="This region represents a CpG dinucleotide"
  misc_feature (61)..(61): /note="Nucleotide may be methylated to form 5-methylcytosine"
gagcacagcctgaacccaaggctggttttgaggtggcagttaattactagcccggaaagccgaagccccggagccgatgtctgggctgacagggttccctcctcagcctcggggcagtcaga

SEQ ID NO: 11854 - DNA, 122 bp, Homo sapiens
  misc_feature (61)..(62): /note="This region represents a CpG dinucleotide"
  misc_feature (61)..(61): /note="Nucleotide may be methylated to form 5-methylcytosine"
taatgtattcaaggtcatactattatctaggtccagaacatgctggaacacagggatccccgaagtttttatctaacacgacatcactatgcccgccagattcttctcaattacatatccat

SEQ ID NO: 11855 - DNA, 122 bp, Homo sapiens
  misc_feature (61)..(62): /note="This region represents a CpG dinucleotide"
  misc_feature (61)..(61): /note="Nucleotide may be methylated to form 5-methylcytosine"
gcacaggcacacaactctgcacattatgtaaccatgtgaggcacattaggcgatcatacacgtgagctcatgattggcttggagccactattgtctgtaagaggtataattaccctgctaac

SEQ ID NO: 11856 - DNA, 122 bp, Homo sapiens
  misc_feature (61)..(62): /note="This region represents a CpG dinucleotide"
  misc_feature (61)..(61): /note="Nucleotide may be methylated to form 5-methylcytosine"
acataacatttgccattttaaccattttaaagtataaaattcagtggcattaagtgctttcgcagtgttgtgcaaccatcaccactatcaaggtccagaactttttgatgactcaaatggaa

SEQ ID NO: 11857 - DNA, 122 bp, Homo sapiens
  misc_feature (61)..(62): /note="This region represents a CpG dinucleotide"
  misc_feature (61)..(61): /note="Nucleotide may be methylated to form 5-methylcytosine"
actccacagtgaatcatccatttctgtctccaacaggaaaagaaaatcatgatgaatcagcgaaaggtcacacccttggtgactgagccatttgtgcaaaagcttcattcttttccagaaac

SEQ ID NO: 11858 - DNA, 122 bp, Homo sapiens
  misc_feature (61)..(62): /note="This region represents a CpG dinucleotide"
  misc_feature (61)..(61): /note="Nucleotide may be methylated to form 5-methylcytosine"
ctgatgggaaggtaaaacttcggaaaacagcttggccatttttaaaagttaaatatcagccgggtgtggtggctcacgcctgtaatcccagcactttgggaggccgaggcgggcggatcacc

SEQ ID NO: 11859 - DNA, 122 bp, Homo sapiens
  misc_feature (61)..(62): /note="This region represents a CpG dinucleotide"
  misc_feature (61)..(61): /note="Nucleotide may be methylated to form 5-methylcytosine"
gaggtgactttcttctgaaggaatgtgtggttgtttgcagataatatcaaatccatttcacgtcagatcaggatgacagacagccagaggctattggggtctcacattaaatggctctttta

SEQ ID NO: 11860 - DNA, 122 bp, Homo sapiens
  misc_feature (61)..(62): /note="This region represents a CpG dinucleotide"
  misc_feature (61)..(61): /note="Nucleotide may be methylated to form 5-methylcytosine"
tctgcggctccttcccagcccccggcctagctctgcgaacggtgactgcccatccttggccgcaatgagccaccacccgtcgggcctccgggccggcttcagctccacctcataccgccgta

SEQ ID NO: 11861 - DNA, 122 bp, Homo sapiens
  misc_feature (61)..(62): /note="This region represents a CpG dinucleotide"
  misc_feature (61)..(61): /note="Nucleotide may be methylated to form 5-methylcytosine"
catgcaggaggatgtgcgcagtctataggccaacatggcattttatgtaagtgacttaagcgtcccacggaggagcctggaaccaccctccatggatactgaggaatttataaacgcaaatc

SEQ ID NO: 11862 - DNA, 122 bp, Homo sapiens
  misc_feature (61)..(62): /note="This region represents a CpG dinucleotide"
  misc_feature (61)..(61): /note="Nucleotide may be methylated to form 5-methylcytosine"
atctttaacaagcctgtaacctctcaagtgaaagaacatgcacctgtcaagctcatagtgcgggatgtacacacagatgtgtttaataaatatctgcccacagggagattagaggtttgctt

SEQ ID NO: 11863 - DNA, 122 bp, Homo sapiens
  misc_feature (61)..(62): /note="This region represents a CpG dinucleotide"
  misc_feature (61)..(61): /note="Nucleotide may be methylated to form 5-methylcytosine"
gtcttaaaggtcacccagtgtccttgcctatctgggcctgtctctgttcaagtggcaaggcggaccatcccctttatcactgacttgcagcttgcctgggttttgtaaaaagcttgtcattg

SEQ ID NO: 11864 - DNA, 122 bp, Homo sapiens
  misc_feature (61)..(62): /note="This region represents a CpG dinucleotide"
  misc_feature (61)..(61): /note="Nucleotide may be methylated to form 5-methylcytosine"
ccaatgactcattgaagagatataataacaggctctgggtggtaagtcatcaattcatgacgaaatgtgcaggcatgagataactctttggcggtacttaaggtatctcctgtggctggaag

SEQ ID NO: 11865 - DNA, 122 bp, Homo sapiens
  misc_feature (61)..(62): /note="This region represents a CpG dinucleotide"
  misc_feature (61)..(61): /note="Nucleotide may be methylated to form 5-methylcytosine"
tcattgtggcaatgttgctggtgacaacaaaaatgatccaccaacggaaacaactggcttcgctgctcaggtgattatcctgaagcatccagtccaaatcagtgctggctattcccctctac

SEQ ID NO: 11866 - DNA, 122 bp, Homo sapiens
  misc_feature (61)..(62): /note="This region represents a CpG dinucleotide"
  misc_feature (61)..(61): /note="Nucleotide may be methylated to form 5-methylcytosine"
agatgttgtagactgttgctcggtcagtgcaaatgagagctgctagcctcgctgtaacctcgctggctgggtactctcagagattgttaagagttttaaaatttttctaatcactaagcatg

SEQ ID NO: 11867 - DNA, 122 bp, Homo sapiens
  misc_feature (61)..(62): /note="This region represents a CpG dinucleotide"
  misc_feature (61)..(61): /note="Nucleotide may be methylated to form 5-methylcytosine"
acctgtatagtctctaaaagtttgtatgccctagaagttcacattgaatttcgatgaaaacgactcgcttcccttccatccaattgcttgcgactgtcttacccgatctttccctttccttt

SEQ ID NO: 11868 - DNA, 122 bp, Homo sapiens
  misc_feature (61)..(62): /note="This region represents a CpG dinucleotide"
  misc_feature (61)..(61): /note="Nucleotide may be methylated to form 5-methylcytosine"
ccagcgttttctaaccgcgctgaggcagtcgcctctccgggtcgctccactcccggactccggcagcctgttggccttcctgtcaccacctcgcatggagcaccctgccctaagccctggaa

SEQ ID NO: 11869 - DNA, 122 bp, Homo sapiens
  misc_feature (61)..(62): /note="This region represents a CpG dinucleotide"
  misc_feature (61)..(61): /note="Nucleotide may be methylated to form 5-methylcytosine"
atgactgggaaggttggctactccaaactgggcatctagatgtctctgggcaggtgacatcgtagcagggcctttaacaagaaggaaccagccacgcagaggtctggggagggagttcctca

SEQ ID NO: 11870 - DNA, 122 bp, Homo sapiens
  misc_feature (61)..(62): /note="This region represents a CpG dinucleotide"
  misc_feature (61)..(61): /note="Nucleotide may be methylated to form 5-methylcytosine"
ttaaaaaaaaaaaaagaaaattggaaatgactgcagccaggtgtgtgtgattgggccccgcgacctttttcttaggcaaacagggctttgtggatgcagaaagacttctttggttgtgtagt

SEQ ID NO: 11871 - DNA, 122 bp, Homo sapiens
  misc_feature (61)..(62): /note="This region represents a CpG dinucleotide"
  misc_feature (61)..(61): /note="Nucleotide may be methylated to form 5-methylcytosine"
cttgagagccctccctgaccacagactcagtgctcgcttctacagagaaaattacaattacgccagagtgtgttgaaactaacttgtcactgggctcaggaaagaccatgttattcatggga

SEQ ID NO: 11872 - DNA, 122 bp, Homo sapiens
  misc_feature (61)..(62): /note="This region represents a CpG dinucleotide"
  misc_feature (61)..(61): /note="Nucleotide may be methylated to form 5-methylcytosine"
ggtgggggctctgcgcctgcctggagagccctgtggtttgctttgtggttcccatgtggccgccagctaaccagaagctcccctcccattctcagcgtcgctggcaggcatgagactggagg

SEQ ID NO: 11873 - DNA, 122 bp, Homo sapiens
  misc_feature (61)..(62): /note="This region represents a CpG dinucleotide"
  misc_feature (61)..(61): /note="Nucleotide may be methylated to form 5-methylcytosine"
tggtttcttttgagcagccactcccatgggaacaggtgtctgacttgagccatcttggagcggagcctccatgaatgcattccagcaaaggagactggggcaagaaaatgtgccccagggca

SEQ ID NO: 11874 - DNA, 122 bp, Homo sapiens
  misc_feature (61)..(62): /note="This region represents a CpG dinucleotide"
  misc_feature (61)..(61): /note="Nucleotide may be methylated to form 5-methylcytosine"
agattgcccatcaggtcactgtgggtgtgacagccactggctccagaagctcagtcctggcggcagctgtcaaaccaacacccacatagcctgcaagcagagggcaggcggggcagtttgta

SEQ ID NO: 11875 - DNA, 122 bp, Homo sapiens
  misc_feature (61)..(62): /note="This region represents a CpG dinucleotide"
  misc_feature (61)..(61): /note="Nucleotide may be methylated to form 5-methylcytosine"
aggaggggcacacagagcttgaaaccaccgcccccagtactccccctctcccccaaggtgcgtcctaggcaggtccagtgacaaacatacacaatttctagagttaccgcggctggcaagag

SEQ ID NO: 11876 - DNA, 122 bp, Homo sapiens
  misc_feature (61)..(62): /note="This region represents a CpG dinucleotide"
  misc_feature (61)..(61): /note="Nucleotide may be methylated to form 5-methylcytosine"
cagccacccttcaggaatgcagaagtccctgtaccatgtcctaagactttgtggtttccccgttatgacattttctcctaactggttgtctattttcccccttccaactcattccccctgct

SEQ ID NO: 11877 - DNA, 122 bp, Homo sapiens
  misc_feature (61)..(62): /note="This region represents a CpG dinucleotide"
  misc_feature (61)..(61): /note="Nucleotide may be methylated to form 5-methylcytosine"
tatagcactgtagtagatcaacaaacatatcttcaggctgaatttggccctcaggttgtccgttggctttacctactctaatccatgatttggttctcagaactgaaatcttaaacccaaca

SEQ ID NO: 11878 - DNA, 122 bp, Homo sapiens
  misc_feature (61)..(62): /note="This region represents a CpG dinucleotide"
  misc_feature (61)..(61): /note="Nucleotide may be methylated to form 5-methylcytosine"
caggggcgggcagggggcgtggggaagtctgcagccgagagtccaggtaggagtctcctgcgtggtcccgggagaggaaggggcctggcccggggcggggtgtggaggtgggaggacggcgg

SEQ ID NO: 11879 - DNA, 122 bp, Homo sapiens
  misc_feature (61)..(62): /note="This region represents a CpG dinucleotide"
  misc_feature (61)..(61): /note="Nucleotide may be methylated to form 5-methylcytosine"
gtggtcctttgtgccccgtcttccattcagctccacgcccagtccaccaggaaatcctgccgctccgccgtcagaatcctctccgcatgtccaccccgtccccaaagtggggccaccctcgt

SEQ ID NO: 11880 - DNA, 122 bp, Homo sapiens
  misc_feature (61)..(62): /note="This region represents a CpG dinucleotide"
  misc_feature (61)..(61): /note="Nucleotide may be methylated to form 5-methylcytosine"
aaccacccacagggaaaaggaagagaaaccacttcccacagctggggctttcctcatttccgaagctacagaagaatgatcatagtactcagaggaagcactgctggcctggaggtcatttg

SEQ ID NO: 11881 - DNA, 122 bp, Homo sapiens
  misc_feature (61)..(62): /note="This region represents a CpG dinucleotide"
  misc_feature (61)..(61): /note="Nucleotide may be methylated to form 5-methylcytosine"
atttaatgtagatacttacgggcaaagccaggatttgaacctcattctgcctggcaccagcgtgtttggacaatctttcttcaggcatggttatactcatgacaaacatgattcatttatta

SEQ ID NO: 11882 - DNA, 122 bp, Homo sapiens
  misc_feature (61)..(62): /note="This region represents a CpG dinucleotide"
  misc_feature (61)..(61): /note="Nucleotide may be methylated to form 5-methylcytosine"
atgataacatatcaaaacccaaatctcagtggcttaaaacatcaaggtttatttcctactcgtgctacatgttcatgtggaggagagggagctctgctccacagaatcactcaggaatccag

SEQ ID NO: 11883 - DNA, 122 bp, Homo sapiens
  misc_feature (61)..(62): /note="This region represents a CpG dinucleotide"
  misc_feature (61)..(61): /note="Nucleotide may be methylated to form 5-methylcytosine"
caaagtgctgggattacaggcgtgagccaccgcacccggccatcattagtcatttttctacgagttattaggcataaattgtgaaacattcacaggagggattgtgtgtttgagatcatctc

SEQ ID NO: 11884 - DNA, 122 bp, Homo sapiens
  misc_feature (61)..(62): /note="This region represents a CpG dinucleotide"
  misc_feature (61)..(61): /note="Nucleotide may be methylated to form 5-methylcytosine"
atttgctttgtaccacttcctctacctcaagagcaagccttgatcctagcacggctaacacgaggtgagattcgtgagacctaactcccgggctgactctgaactgtcgttttagagggagt

SEQ ID NO: 11885 - DNA, 122 bp, Homo sapiens
  misc_feature (61)..(62): /note="This region represents a CpG dinucleotide"
  misc_feature (61)..(61): /note="Nucleotide may be methylated to form 5-methylcytosine"
atcctggtttcataagaagtcagagggaaggaaatattcatcactgttgaaatcaccatgcgttgcacaaggcttcttgagaaagagatgtacagtatataagagctgattgatggaaggtt

SEQ ID NO: 11886 - DNA, 122 bp, Homo sapiens
  misc_feature (61)..(62): /note="This region represents a CpG dinucleotide"
  misc_feature (61)..(61): /note="Nucleotide may be methylated to form 5-methylcytosine"
tgggggcacgtttctcagccttgctcctagcagcctggcttccagccatgccaggcctgccgccccacagggcttctgtctgctgtgagcactgttgtccctttggctccctctcagggctt

SEQ ID NO: 11887 - DNA, 122 bp, Homo sapiens
  misc_feature (61)..(62): /note="This region represents a CpG dinucleotide"
  misc_feature (61)..(61): /note="Nucleotide may be methylated to form 5-methylcytosine"
agttggagggaagctcagaaataataacacctgaactcctgctggatacaggaatctcctcgcattataaatcaaagagtgtagtggtttagagcataggatctggaaacagactttcctgg

SEQ ID NO: 11888 - DNA, 122 bp, Homo sapiens
  misc_feature (61)..(62): /note="This region represents a CpG dinucleotide"
  misc_feature (61)..(61): /note="Nucleotide may be methylated to form 5-methylcytosine"
tcacagggtcaggagcaggtcgagaaaagagggaggaggcgagagccaggagacatcagccggcaggtgcccttagaggtttatggctcctttgtgcaagacagcttccccgggaccctcta

SEQ ID NO: 11889 - DNA, 122 bp, Homo sapiens
  misc_feature (61)..(62): /note="This region represents a CpG dinucleotide"
  misc_feature (61)..(61): /note="Nucleotide may be methylated to form 5-methylcytosine"
tgggggccccatcttcccttctttgttgccatgtgtacagtaaagaaccaggcaacatggcgatggccacctgtctgcataataaaaggttagggtggggcaccagcttttatacatgctat

SEQ ID NO: 11890 - DNA, 122 bp, Homo sapiens
  misc_feature (61)..(62): /note="This region represents a CpG dinucleotide"
  misc_feature (61)..(61): /note="Nucleotide may be methylated to form 5-methylcytosine"
taagaaaatccatgtggcagcggccaaccggaaacagttttgtcccaggctgcacagggtcggaggccccaaggtcaccggggccactgcccgtcacaggtccaccttgaccccctttatga

SEQ ID NO: 11891 - DNA, 122 bp, Homo sapiens
  misc_feature (61)..(62): /note="This region represents a CpG dinucleotide"
  misc_feature (61)..(61): /note="Nucleotide may be methylated to form 5-methylcytosine"
aggaagtcactccccaactaggagctcaagatcctggtggtcgggtgggaaattcctctgcgaggctctcaggtttgtgttttaaagctgttcctataaccctgggggttccagccaggcaa

SEQ ID NO: 11892 - DNA, 122 bp, Homo sapiens
  misc_feature (61)..(62): /note="This region represents a CpG dinucleotide"
  misc_feature (61)..(61): /note="Nucleotide may be methylated to form 5-methylcytosine"
ctgccccttattttcattacaaacaaaggtccacagagggcacatttaaaacgaagaagtcgtcactactgtccacccactgcctggcctacgtctttgtaacaaaggccctcttgggtttt

SEQ ID NO: 11893 - DNA, 122 bp, Homo sapiens
  misc_feature (61)..(62): /note="This region represents a CpG dinucleotide"
  misc_feature (61)..(61): /note="Nucleotide may be methylated to form 5-methylcytosine"
ggtagttcctcaagttacagagtttccacatgacccagcaattatgctcccaggtagatacgcaaaagaatgaaaaacagtgactcagacagatatttgtaggacattgctcaatgcagcgt

SEQ ID NO: 11894 - DNA, 122 bp, Homo sapiens
  misc_feature (61)..(62): /note="This region represents a CpG dinucleotide"
  misc_feature (61)..(61): /note="Nucleotide may be methylated to form 5-methylcytosine"
gacccagaactgtgatctattttcttttgtgttttcagctgttgagcatgttgggcagcacggagtgtagctacaactgtgtgaccccacctgtgtgactgactccacctgtgtgactccag

SEQ ID NO: 11895 - DNA, 122 bp, Homo sapiens
  misc_feature (61)..(62): /note="This region represents a CpG dinucleotide"
  misc_feature (61)..(61): /note="Nucleotide may be methylated to form 5-methylcytosine"
aaagtgcaactggcaatgctctagagaaatagatacaattgcaactctctcattcaaccacgaaagcttttctccacgaacaggactttaacatgtcccacctaagggaagaagacagtagg

SEQ ID NO: 11896 - DNA, 122 bp, Homo sapiens
  misc_feature (61)..(62): /note="This region represents a CpG dinucleotide"
  misc_feature (61)..(61): /note="Nucleotide may be methylated to form 5-methylcytosine"
acaggcttaagccaccgcgcccagcctactctgttttattaaagagaactgaagttctgacgggttcagaacctctcacaaagtggctgaaggaacaccagctttagcagaaactgatgaaa

SEQ ID NO: 11897 - DNA, 122 bp, Homo sapiens
  misc_feature (61)..(62): /note="This region represents a CpG dinucleotide"
  misc_feature (61)..(61): /note="Nucleotide may be methylated to form 5-methylcytosine"
tcttcttttgaaaagtagtgattatactgtacgttctcaacctcatttccatttgattctcggatctcacaggaatccttcaactgctttctaccaagcgttccatttgaacacgttaaagg

SEQ ID NO: 11898 - DNA, 122 bp, Homo sapiens
  misc_feature (61)..(62): /note="This region represents a CpG dinucleotide"
  misc_feature (61)..(61): /note="Nucleotide may be methylated to form 5-methylcytosine"
aaaagaggttgagtcttcctgtcctatctctgtaatactgaggctcctctcagcagccaccggcctcatgcctgcccgccttggccctggattgtcaccttgcagggcagcagtttgttatt

SEQ ID NO: 11899 - DNA, 122 bp, Homo sapiens
  misc_feature (61)..(62): /note="This region represents a CpG dinucleotide"
  misc_feature (61)..(61): /note="Nucleotide may be methylated to form 5-methylcytosine"
tcccagccttcctggctctcaccccccaccagactgtgagcttctccaaaagcagaatcacggaaacaagctacatgtaccgatcacttattatggtgccagctgctgtcctaagtgtgtta

SEQ ID NO: 11900 - DNA, 122 bp, Homo sapiens
  misc_feature (61)..(62): /note="This region represents a CpG dinucleotide"
  misc_feature (61)..(61): /note="Nucleotide may be methylated to form 5-methylcytosine"
taatgggtaggtgcaggtagtagataagagtgtagccacataaaccacatgcttagtgaacggttttgttttgtgtgtatgtgagggattagcatctctgagtatattttgttttccctttt

SEQ ID NO: 11901 - DNA, 122 bp, Homo sapiens
  misc_feature (61)..(62): /note="This region represents a CpG dinucleotide"
  misc_feature (61)..(61): /note="Nucleotide may be methylated to form 5-methylcytosine"
tcctctagagcactgagttatatgacccatgagccaatggctgcatttacaacaaagacccgtgaaagttgtaattcatttacaaataactcatgagttcagtcctatccagaaggtgatgc

SEQ ID NO: 11902 - DNA, 122 bp, Homo sapiens
  misc_feature (61)..(62): /note="This region represents a CpG dinucleotide"
  misc_feature (61)..(61): /note="Nucleotide may be methylated to form 5-methylcytosine"
cctatgctacacacctgtacagcgtattttgtaccgaatactgtaggcaattgtaagcaccgtgatacttgtgtatctaaacacagaaaaggtaatgtgttggttggctaccacatcagtag

SEQ ID NO: 11903 - DNA, 122 bp, Homo sapiens
  misc_feature (61)..(62): /note="This region represents a CpG dinucleotide"
  misc_feature (61)..(61): /note="Nucleotide may be methylated to form 5-methylcytosine"
agagtgagtgggcagtcaaaaagccacaaagaaggtcctgcaacatccgtctcttaaattcgttttctgtgatctctgctcactttttatgccaccatctacctatctacacttgatctcta

SEQ ID NO: 11904 - DNA, 122 bp, Homo sapiens
  misc_feature (61)..(62): /note="This region represents a CpG dinucleotide"
  misc_feature (61)..(61): /note="Nucleotide may be methylated to form 5-methylcytosine"
gttgtgatcagttagttgtaaccactgcatttggaccagccaggataaatatatttcaaacgtacaaaaatttcaacaaacttacttccaagtatcgtgtcttaagaagctactcgacaata

SEQ ID NO: 11905 - DNA, 122 bp, Homo sapiens
  misc_feature (61)..(62): /note="This region represents a CpG dinucleotide"
  misc_feature (61)..(61): /note="Nucleotide may be methylated to form 5-methylcytosine"
tggactaacttttatgcaacacaggaggcctcagcctgacattcaaggctggactcagaccgcccaacccatttcctggactaacttttatgcaacacaagaggcctcagcctgacattcaa

SEQ ID NO: 11906 - DNA, 122 bp, Homo sapiens
  misc_feature (61)..(62): /note="This region represents a CpG dinucleotide"
  misc_feature (61)..(61): /note="Nucleotide may be methylated to form 5-methylcytosine"
cataggctttgtaatgccctgacaactttaattgtttcttttggtggttgtcctttttatcgtgagtagttgttctcagttgctaaaaatttaggctgggaataatttccaacctaggaggt

SEQ ID NO: 11907 - DNA, 122 bp, Homo sapiens
  misc_feature (61)..(62): /note="This region represents a CpG dinucleotide"
  misc_feature (61)..(61): /note="Nucleotide may be methylated to form 5-methylcytosine"
agatccagataaaggcctggagggaagccacaccacagtaaccacattaacttggggagccggccaggctccccaagtgcggtcagagtggactttacccttctctgttacgtttccattct

SEQ ID NO: 11908 - DNA, 122 bp, Homo sapiens
  misc_feature (61)..(62): /note="This region represents a CpG dinucleotide"
  misc_feature (61)..(61): /note="Nucleotide may be methylated to form 5-methylcytosine"
gacagagggatcagatagagctgggttcaaaactctgctcctcatctcctagctctgtggcgttgggcaagtcactcagcttctctgagcctcagtagtcttgtctgtgaaatgggataccc

SEQ ID NO: 11909 - DNA, 122 bp, Homo sapiens
  misc_feature (61)..(62): /note="This region represents a CpG dinucleotide"
  misc_feature (61)..(61): /note="Nucleotide may be methylated to form 5-methylcytosine"
acctggcccagttcctgaatggaatgctgcaaagtcctaagttctcctgcatggcactgacgaaagggatttattaaatgaaggtaaaaactctcaatgaaaaactgtcttcaatctaagga

SEQ ID NO: 11910 - DNA, 122 bp, Homo sapiens
  misc_feature (61)..(62): /note="This region represents a CpG dinucleotide"
  misc_feature (61)..(61): /note="Nucleotide may be methylated to form 5-methylcytosine"
cagtagagatcccaggtagagcaatttacctgcacattgttgccagggaacaagggaaggcgagtcaaactatttggggatttagctgagctttgaaataactgaaaagctatgcttcaatt

SEQ ID NO: 11911 - DNA, 122 bp, Homo sapiens
  misc_feature (61)..(62): /note="This region represents a CpG dinucleotide"
  misc_feature (61)..(61): /note="Nucleotide may be methylated to form 5-methylcytosine"
tactcccaggaaattagagtcacataacactgcagaaagaacaattcagaatcttagacccgggctttagccctggatgtgtccactcctaggaccccaaacatctctgtgacctccttgct

SEQ ID NO: 11912 - DNA, 122 bp, Homo sapiens
  misc_feature (61)..(62): /note="This region represents a CpG dinucleotide"
  misc_feature (61)..(61): /note="Nucleotide may be methylated to form 5-methylcytosine"
gaccccttttcacctggctgcctcccctgtgccccaaggctcctggggaaatggcccagccggttcacctgtgtcctggcctctagtgagcagcttagccctgggtgttgctaaggagtatt

SEQ ID NO: 11913 - DNA, 122 bp, Homo sapiens
  misc_feature (61)..(62): /note="This region represents a CpG dinucleotide"
  misc_feature (61)..(61): /note="Nucleotide may be methylated to form 5-methylcytosine"
atgggacagtcacacaacagtgttgcctgtatattgggccatagactttgcaaactatcccgtaaaatttattagaagctctgaaaaactttcacacttagaagaggccacttgatactaat

SEQ ID NO: 11914 - DNA, 122 bp, Homo sapiens
  misc_feature (61)..(62): /note="This region represents a CpG dinucleotide"
  misc_feature (61)..(61): /note="Nucleotide may be methylated to form 5-methylcytosine"
aatacagctttagtttctgtccactttgaggtctgatcatatgtcatgttttatttactacggtccttcatgaaacttcgaaaccacatagccacaagagaggaaatgaacccttcaagacc

SEQ ID NO: 11915 - DNA, 122 bp, Homo sapiens
  misc_feature (61)..(62): /note="This region represents a CpG dinucleotide"
  misc_feature (61)..(61): /note="Nucleotide may be methylated to form 5-methylcytosine"
gagccagattgcagggtgtgaatcccatttactagctctgtgatttggggcaggttaactcgctgtgcctctttcttcatttgggctgttgtgaggatttagtgaattcatatatataagcc

SEQ ID NO: 11916 - DNA, 122 bp, Homo sapiens
  misc_feature (61)..(62): /note="This region represents a CpG dinucleotide"
  misc_feature (61)..(61): /note="Nucleotide may be methylated to form 5-methylcytosine"
tgcacacaccgtcctggcacacgccgtgctggctgcagtcattcgggcactgcctcacaccgcaatcctcgccagagtagccgtcctcgcacacacaccgcccatctaggcactggccgcgg

SEQ ID NO: 11917 - DNA, 122 bp, Homo sapiens
  misc_feature (61)..(62): /note="This region represents a CpG dinucleotide"
  misc_feature (61)..(61): /note="Nucleotide may be methylated to form 5-methylcytosine"
cgtaatcaaattgtttcttagcttctgaaagtcttgttaaatcatttaaggtctatgtgacgatagatggtcgttagagaaaagtcaaaaccagattcttggctgtgtccccactcgtgcca

SEQ ID NO: 11918 - DNA, 122 bp, Homo sapiens
  misc_feature (61)..(62): /note="This region represents a CpG dinucleotide"
  misc_feature (61)..(61): /note="Nucleotide may be methylated to form 5-methylcytosine"
cttaccaagcctgttccttgagcactaacactgaagtaacaccttacaaaatttctgggccgggcatggtggctcatgcctataatcccagcactttaggaagccaagatgggtagatcgct

SEQ ID NO: 11919 - DNA, 122 bp, Homo sapiens
  misc_feature (61)..(62): /note="This region represents a CpG dinucleotide"
  misc_feature (61)..(61): /note="Nucleotide may be methylated to form 5-methylcytosine"
ctcctgggcgcgcattcttaacttggcaaatacacctcctaaaatgattgagacttgtctcgtcatgtttcttgattgacagaagctaacacagagaacatttttagatgagaaacccaata

SEQ ID NO: 11920 - DNA, 122 bp, Homo sapiens
  misc_feature (61)..(62): /note="This region represents a CpG dinucleotide"
  misc_feature (61)..(61): /note="Nucleotide may be methylated to form 5-methylcytosine"
cgtagcctatatggtttctgctgccactactcaagcttgccattgtagtgtcaaagtagccgtagacaatacgtaaatgaatgtgactgtgtcccaataaaactttatttacaaaaggaagc

SEQ ID NO: 11921 - DNA, 122 bp, Homo sapiens
  misc_feature (61)..(62): /note="This region represents a CpG dinucleotide"
  misc_feature (61)..(61): /note="Nucleotide may be methylated to form 5-methylcytosine"
cagttccttcttcctccagctagagcctcaggtgcccatagatagacagctctgagtacacgagagtaaaagggaagcaccatgtcctattcactttaccattccatagcatccttctttct

SEQ ID NO: 11922 - DNA, 122 bp, Homo sapiens
  misc_feature (61)..(62): /note="This region represents a CpG dinucleotide"
  misc_feature (61)..(61): /note="Nucleotide may be methylated to form 5-methylcytosine"
caatctggaaagtgggactttgtatgtaaaaactagagtggagaccaaaataaaacttcacggttcatgggtattgtgacaatgtggaagtggccacatcataatgaatcactatctgccag

SEQ ID NO: 11923 - DNA, 122 bp, Homo sapiens
  misc_feature (61)..(62): /note="This region represents a CpG dinucleotide"
  misc_feature (61)..(61): /note="Nucleotide may be methylated to form 5-methylcytosine"
tgggcaggtataatcccggaagcctttctgcaagaggtagcatgattcagccaaaggcatcgggaggacattagggcaagggcataacagcatcagggtaaaggtgcctggcatgagtgtgc

SEQ ID NO: 11924 - DNA, 122 bp, Homo sapiens
  misc_feature (61)..(62): /note="This region represents a CpG dinucleotide"
  misc_feature (61)..(61): /note="Nucleotide may be methylated to form 5-methylcytosine"
ttggactacctcaagattccctaaaagtataagatttgactctgcccccagattttgatacggctggcttctatttctttatgtcagtcataataaaaagaacatagtggccacatccacaa

SEQ ID NO: 11925 - DNA, 122 bp, Homo sapiens
  misc_feature (61)..(62): /note="This region represents a CpG dinucleotide"
  misc_feature (61)..(61): /note="Nucleotide may be methylated to form 5-methylcytosine"
tcatgcagctccagaatgaagccataatccaattttagaaaacgtatcatctgggccgggcgcagtggctcacacctgtaatcccagcactttgggaggcccaggtggcagatcacttgagg

SEQ ID NO: 11926 - DNA, 122 bp, Homo sapiens
  misc_feature (61)..(62): /note="This region represents a CpG dinucleotide"
  misc_feature (61)..(61): /note="Nucleotide may be methylated to form 5-methylcytosine"
caagctgcccagagcagtcagccagtccctctggtccagaccctaccaagctcacttaaacgaccacatccgtgcttgtccagagctgctgttcagcaagcagcaggaacctaccaggggaa

SEQ ID NO: 11927 - DNA, 122 bp, Homo sapiens
  misc_feature (61)..(62): /note="This region represents a CpG dinucleotide"
  misc_feature (61)..(61): /note="Nucleotide may be methylated to form 5-methylcytosine"
ttccgtgtgtgggtgggatggaaagaaagaggagtccaggtcaattagacctggttatctcgctaggacttatatcagaacagaaatcagaatgaattgttatggaaaggggatgttgcatt

SEQ ID NO: 11928 - DNA, 122 bp, Homo sapiens
  misc_feature (61)..(62): /note="This region represents a CpG dinucleotide"
  misc_feature (61)..(61): /note="Nucleotide may be methylated to form 5-methylcytosine"
tttttttgctttcttacctttgcttgttcccgtctctttctctgtttccttggtcccatccgtttgtttttttttgttttttaaactgggtcaacaacctttgttgtaaaacaaaggtgccc

SEQ ID NO: 11929 - DNA, 122 bp, Homo sapiens
  misc_feature (61)..(62): /note="This region represents a CpG dinucleotide"
  misc_feature (61)..(61): /note="Nucleotide may be methylated to form 5-methylcytosine"
gaggcttagtgtgtgaaacaccacttcattacatactatgtgactcaaggtggaaaagagcggtcacagcacaggtggagggactgaagtagacaagagttagcccaaactggaatgcagta

SEQ ID NO: 11930 - DNA, 122 bp, Homo sapiens
  misc_feature (61)..(62): /note="This region represents a CpG dinucleotide"
  misc_feature (61)..(61): /note="Nucleotide may be methylated to form 5-methylcytosine"
gaaggcagctgttggccgtggaatgaggtcctatggctctgtctgtgtcttgccaggagccgcaccacttctgtctgggccttggtttgctcatttgttatctgagcaagttgtcctcacca

SEQ ID NO: 11931 - DNA, 122 bp, Homo sapiens
  misc_feature (61)..(62): /note="This region represents a CpG dinucleotide"
  misc_feature (61)..(61): /note="Nucleotide may be methylated to form 5-methylcytosine"
ccttggagggggggaaatggttctcatatgcagaaagtttacctttatcctgcttttgtgcgcagctcacccctgccctgcaaccccccactcccagcccaggggactcagtaaacaagcag

SEQ ID NO: 11932 - DNA, 122 bp, Homo sapiens
  misc_feature (61)..(62): /note="This region represents a CpG dinucleotide"
  misc_feature (61)..(61): /note="Nucleotide may be methylated to form 5-methylcytosine"
agctttctcctggcttctctgagtctcatctgtgaaacagatgtataaattggtgtgaaacgcctaatttatagggtaagagtatggaataaaagagataatgtgctttatcaggcacttag

SEQ ID NO: 11933 - DNA, 122 bp, Homo sapiens
  misc_feature (61)..(62): /note="This region represents a CpG dinucleotide"
  misc_feature (61)..(61): /note="Nucleotide may be methylated to form 5-methylcytosine"
cggattctgagctgtgcctgttaggctcctagacagagccatttagacacaatcagggggcgctctgcagtgggtggggctgggtttttaactccaggagctttggcgactctggaggcaag

SEQ ID NO: 11934 - DNA, 122 bp, Homo sapiens
  misc_feature (61)..(62): /note="This region represents a CpG dinucleotide"
  misc_feature (61)..(61): /note="Nucleotide may be methylated to form 5-methylcytosine"
gaccagcaggttgaagtgtgcggaggagggagggaagagttctgttggggcatgtggagtcgaaggaacctgcaggacatccaaatggagatgtacaggaggcagttagagaaataggtcat

SEQ ID NO: 11935 - DNA, 122 bp, Homo sapiens
  misc_feature (61)..(62): /note="This region represents a CpG dinucleotide"
  misc_feature (61)..(61): /note="Nucleotide may be methylated to form 5-methylcytosine"
ctgccgtcccctcttgggtggaggggctgtgatgctctatccttacaagccccagcaagacgcctggcccttagagaagtactcacaagaggcttgcagaatcgaattagatcttaagatag

SEQ ID NO: 11936 - DNA, 122 bp, Homo sapiens
  misc_feature (61)..(62): /note="This region represents a CpG dinucleotide"
  misc_feature (61)..(61): /note="Nucleotide may be methylated to form 5-methylcytosine"
atctgcctgcctcggcctcccaaagtgctgggattacaggcgtgagtcaccacgccgggccggtaaggcttttgaaaagagatataagacctgattatggagctggccctcttagtcccatt

SEQ ID NO: 11937 - DNA, 122 bp, Homo sapiens
  misc_feature (61)..(62): /note="This region represents a CpG dinucleotide"
  misc_feature (61)..(61): /note="Nucleotide may be methylated to form 5-methylcytosine"
attcagtcatgcaaaaaaatgaagtgctgatacatgctataatgtggtgaactttgaaaacgttatgctaaatgaaagaagccagcctttcctgtgggctttgtggaaaataagcttagaaa

SEQ ID NO: 11938 - DNA, 122 bp, Homo sapiens
  misc_feature (61)..(62): /note="This region represents a CpG dinucleotide"
  misc_feature (61)..(61): /note="Nucleotide may be methylated to form 5-methylcytosine"
gcaggcaacaaaaccagtatgttagctatgtctgtgactctgtcaccaatgtgggttagccgtatctctgaccctgtcaccaattgcaattacagatgtctccacatcacattagtgttgtt

SEQ ID NO: 11939 - DNA, 122 bp, Homo sapiens
  misc_feature (61)..(62): /note="This region represents a CpG dinucleotide"
  misc_feature (61)..(61): /note="Nucleotide may be methylated to form 5-methylcytosine"
attatgtggcaataccgaatggagcatctccagaggacatttctcaatagcaccattgttcgtggtaagtgaatacttcactttttctcctgcttctgtcaagtaattgatcacgaattagc

SEQ ID NO: 11940 - DNA, 122 bp, Homo sapiens
  misc_feature (61)..(62): /note="This region represents a CpG dinucleotide"
  misc_feature (61)..(61): /note="Nucleotide may be methylated to form 5-methylcytosine"
cattccattgtcttgtttgtttgtgcaatcccaaacacccacagtctccaagtggagatgcggaagcaggcctgcagcatgggtgtcaggagggtgtaaaatgaaagggacactaggagcaa

SEQ ID NO: 11941 - DNA, 122 bp, Homo sapiens
  misc_feature (61)..(62): /note="This region represents a CpG dinucleotide"
  misc_feature (61)..(61): /note="Nucleotide may be methylated to form 5-methylcytosine"
aaagaaaggtgaagctgtaagttttggtgccacacccagtccctgaactacaaaggtttacggagttttagcctaggactgagttgtactggcaggttgggccaagtgtgagtgcaaggaga

SEQ ID NO: 11942 - DNA, 122 bp, Homo sapiens
  misc_feature (61)..(62): /note="This region represents a CpG dinucleotide"
  misc_feature (61)..(61): /note="Nucleotide may be methylated to form 5-methylcytosine"
acgagagcaacagttgggtacgaaggtccctcggctcctgtccccgttcccacccacactcgagacctcattagtcacaacaagcaaacaactgttaaagcagtcagactcaaagccaactg

SEQ ID NO: 11943 - DNA, 122 bp, Homo sapiens
  misc_feature (61)..(62): /note="This region represents a CpG dinucleotide"
  misc_feature (61)..(61): /note="Nucleotide may be methylated to form 5-methylcytosine"
tctggcctcccatactctctctctagtgccccctattggcagatcctagcagggagtagccgataaagcccaaatgcagtcccagtcctggcattgcagagatgagtattaaagggtggatt

SEQ ID NO: 11944 - DNA, 122 bp, Homo sapiens
  misc_feature (61)..(62): /note="This region represents a CpG dinucleotide"
  misc_feature (61)..(61): /note="Nucleotide may be methylated to form 5-methylcytosine"
acatgactcaaactggagaaagcaggaatcacttgtatcagccaagcactcaagagatgccggtaaacaggaaaagactgaagggtgctcagtaggtgactcttcactgatgtcctcctctt

SEQ ID NO: 11945 - DNA, 122 bp, Homo sapiens
  misc_feature (61)..(62): /note="This region represents a CpG dinucleotide"
  misc_feature (61)..(61): /note="Nucleotide may be methylated to form 5-methylcytosine"
tgtggtgattaattatctgtgtacagtgacaacagcttcccctgcaggagagattgtcaccgtcacagtggggatggagatagaaacatttccagagcttcagaggcagctcgagggagccc

SEQ ID NO: 11946 - DNA, 122 bp, Homo sapiens
  misc_feature (61)..(62): /note="This region represents a CpG dinucleotide"
  misc_feature (61)..(61): /note="Nucleotide may be methylated to form 5-methylcytosine"
catctgaacacttgttgtaatgcccgtcttacaaggttatttgaggtttacataagttaacgtctataaagagctcagcataatacccggcacgtagcaagtatccagtgtgctaagttctg

SEQ ID NO: 11947 - DNA, 122 bp, Homo sapiens
  misc_feature (61)..(62): /note="This region represents a CpG dinucleotide"
  misc_feature (61)..(61): /note="Nucleotide may be methylated to form 5-methylcytosine"
tgacatccaaccatcaacactgtcctggctcaatgagtcaggatcaccctcagcagatgacgctccttctgacataatgtctgaaggtcaatagtagccctaaactatgccacaataccagg

SEQ ID NO: 11948 - DNA, 122 bp, Homo sapiens
  misc_feature (61)..(62): /note="This region represents a CpG dinucleotide"
  misc_feature (61)..(61): /note="Nucleotide may be methylated to form 5-methylcytosine"
ttgaggtggggcccagcactctgagttttaataagtccagtgagtcagcctgcaggatgacgtatagtttcctgtgtgagaaactgtaggaactgttggtccttagtttgtaactgccatct

SEQ ID NO: 11949 - DNA, 122 bp, Homo sapiens
  misc_feature (61)..(62): /note="This region represents a CpG dinucleotide"
  misc_feature (61)..(61): /note="Nucleotide may be methylated to form 5-methylcytosine"
ttgtctggcgggaaagtccttggccagcgagaggacactgcgggtgagctgccaaggacacgcaggcctctgtagctcctctgtttgaggttaggatttctccggaaggcgtggtatcactg

SEQ ID NO: 11950 - DNA, 122 bp, Homo sapiens
  misc_feature (61)..(62): /note="This region represents a CpG dinucleotide"
  misc_feature (61)..(61): /note="Nucleotide may be methylated to form 5-methylcytosine"
tagtattccgaaaggggttaaaagacacctcctgattgtcattttggttttgtttttaagcggtggtgtctgtggatgggcggcccgtgagactccaactctgtgacactgccggacaggtc

SEQ ID NO: 11951 - DNA, 122 bp, Homo sapiens
  misc_feature (61)..(62): /note="This region represents a CpG dinucleotide"
  misc_feature (61)..(61): /note="Nucleotide may be methylated to form 5-methylcytosine"
ctttaatcctcacaacccctcgaggtgggtatgtttaccttctgcatttaataggtaagccgcagacagacagtgactcacccaaggtcatgcagctcataagagcagatctgcctgactca

SEQ ID NO: 11952 - DNA, 122 bp, Homo sapiens
  misc_feature (61)..(62): /note="This region represents a CpG dinucleotide"
  misc_feature (61)..(61): /note="Nucleotide may be methylated to form 5-methylcytosine"
cacccgcctcggcctcccaaagtgctgggattacaggagtgagccaccatgcccagcccacggatgtttacagagcttctgaagacacttggggttcaaaaagcactgcttccatttgcaat

SEQ ID NO: 11953 - DNA, 122 bp, Homo sapiens
  misc_feature (61)..(62): /note="This region represents a CpG dinucleotide"
  misc_feature (61)..(61): /note="Nucleotide may be methylated to form 5-methylcytosine"
ttagggggtgctttgtgccacttcccttggcagggtggggtcccctgggaaaccaacgctcgcctcacagtgagctcagagcgaagtcctggttccaggctgatgctctaggctcaaaataa

SEQ ID NO: 11954 - DNA, 122 bp, Homo sapiens
  misc_feature (61)..(62): /note="This region represents a CpG dinucleotide"
  misc_feature (61)..(61): /note="Nucleotide may be methylated to form 5-methylcytosine"
cctgctgccagcgcttgggctgaggtgaggtgctgctcttagaaagcctgtcacagttggcggtgtggggcgaggaccgcctcagagactgcactgcttgcggctcggctttgcgcctttta

SEQ ID NO: 11955 - DNA, 122 bp, Homo sapiens
  misc_feature (61)..(62): /note="This region represents a CpG dinucleotide"
  misc_feature (61)..(61): /note="Nucleotide may be methylated to form 5-methylcytosine"
aaagcagggggagctttgcaaggctactgatgcctgagtagaatcactaactggttccctcgctctgtgctaggccgtctgtattcactgtatcacaagcttgaaaccagacctcatttgac

SEQ ID NO: 11956 - DNA, 122 bp, Homo sapiens
  misc_feature (61)..(62): /note="This region represents a CpG dinucleotide"
  misc_feature (61)..(61): /note="Nucleotide may be methylated to form 5-methylcytosine"
gcgatccacctacctaagcctcccaaagtgttgtaattacatgcctgagccactgcaccccggctcattatcccatttcactgagggtgcaagaggtcaagtcagttgcccaagctcacaca

SEQ ID NO: 11957 - DNA, 122 bp, Homo sapiens
  misc_feature (61)..(62): /note="This region represents a CpG dinucleotide"
  misc_feature (61)..(61): /note="Nucleotide may be methylated to form 5-methylcytosine"
aggaagtacataaaccagtcacataatctttattatcattatcaagtgttatgtaccacccgtaattgtatgtgctagacttctctattcctggcagtgtggcgggtttgtttataccagtg

SEQ ID NO: 11958 - DNA, 122 bp, Homo sapiens
  misc_feature (61)..(62): /note="This region represents a CpG dinucleotide"
  misc_feature (61)..(61): /note="Nucleotide may be methylated to form 5-methylcytosine"
gagctgcaggcgggccctgatgaggtggccatgaggatcagcagtcatctgcttggtcaccgtggttgcatcccagtccctgtcccatgatcacacagagctgtccccccaactttgaggag

SEQ ID NO: 11959 - DNA, 122 bp, Homo sapiens
  misc_feature (61)..(62): /note="This region represents a CpG dinucleotide"
  misc_feature (61)..(61): /note="Nucleotide may be methylated to form 5-methylcytosine"
taatccaggaaaatctccccatctcaaaatccttaacttaatctgtcaaatcctttttgccgcataaggtaacattcacaggttccagggattagggcatggacggctttgggaccattatt

SEQ ID NO: 11960 - DNA, 122 bp, Homo sapiens
  misc_feature (61)..(62): /note="This region represents a CpG dinucleotide"
  misc_feature (61)..(61): /note="Nucleotide may be methylated to form 5-methylcytosine"
tttttctattccttgcctccaactttcatcctttttaattctcatataattaaaaattgtcgttggactatatatttgtgcttattgttttttgcatacttgagtatatgtggcatttagat

SEQ ID NO: 11961 - DNA, 122 bp, Homo sapiens
  misc_feature (61)..(62): /note="This region represents a CpG dinucleotide"
  misc_feature (61)..(61): /note="Nucleotide may be methylated to form 5-methylcytosine"
ctccaggaagaagcatttcatgactcatatttttaacatgactaatgttacctagaaccacgtatcctccttctgttgaaaagtaagttcctgtttccatggggccttcaaagcaaggggtc

SEQ ID NO: 11962 - DNA, 122 bp, Homo sapiens
  misc_feature (61)..(62): /note="This region represents a CpG dinucleotide"
  misc_feature (61)..(61): /note="Nucleotide may be methylated to form 5-methylcytosine"
cagctcttagcatcttagcatcttaacataccaaagaaactttctggtttgctggggagacgaggacatgataaagctgaagattgtgaaccactcaaaaaggagcacagattaaagtaatt

SEQ ID NO: 11963 - DNA, 122 bp, Homo sapiens
  misc_feature (61)..(62): /note="This region represents a CpG dinucleotide"
  misc_feature (61)..(61): /note="Nucleotide may be methylated to form 5-methylcytosine"
ggctggctcgggccaggcctgccaggagctggctgagacaccgttactgtgtctgggaaacgggtgccctgggccccctgcatggcgtgtcagagggcagcgggacagacagcaggagagga

SEQ ID NO: 11964 - DNA, 122 bp, Homo sapiens
  misc_feature (61)..(62): /note="This region represents a CpG dinucleotide"
  misc_feature (61)..(61): /note="Nucleotide may be methylated to form 5-methylcytosine"
ctttgtacacaacaaccacacggagcaccagcaatcaagattagctcccgggaactctggcgtgccctgtaccaggaagcacagtggattactacaacttttgataatgattgtttgctttg

SEQ ID NO: 11965 - DNA, 122 bp, Homo sapiens
  misc_feature (61)..(62): /note="This region represents a CpG dinucleotide"
  misc_feature (61)..(61): /note="Nucleotide may be methylated to form 5-methylcytosine"
gtgtgcatgtgggtcctaagcctgagttactccatattctttcatttcccttactgcacacgtgtcaggagatggaattttccaccgccgacgtgtctggttctacgtaacatttttatcta

SEQ ID NO: 11966 - DNA, 122 bp, Homo sapiens
  misc_feature (61)..(62): /note="This region represents a CpG dinucleotide"
  misc_feature (61)..(61): /note="Nucleotide may be methylated to form 5-methylcytosine"
gagcccgccgctgccgccatcgcctgagggaagcgagaagaggccgcgaccgggagaaaacgcagagtcgtcaccggagagaagtcgactccctagcagcagtcgacgccagagggccgccc

SEQ ID NO: 11967 - DNA, 122 bp, Homo sapiens
  misc_feature (61)..(62): /note="This region represents a CpG dinucleotide"
  misc_feature (61)..(61): /note="Nucleotide may be methylated to form 5-methylcytosine"
gtggagggcaggcatatttctttcatctattcattcagtcagtcgcttattctttcaacacgtatttattgctgactgtgtgcattgcgcagtgctgagtgagcctggaaatacagcatgca

SEQ ID NO: 11968 - DNA, 122 bp, Homo sapiens
  misc_feature (61)..(62): /note="This region represents a CpG dinucleotide"
  misc_feature (61)..(61): /note="Nucleotide may be methylated to form 5-methylcytosine"
gctgactcctggggccaaggtggagacccctggtcttcagggggccctgccaggacgccccgcattcatgttgggcggggcctgccacctgctatcagatctcgggtggggctgccaggacg

SEQ ID NO: 11969 - DNA, 122 bp, Homo sapiens
  misc_feature (61)..(62): /note="This region represents a CpG dinucleotide"
  misc_feature (61)..(61): /note="Nucleotide may be methylated to form 5-methylcytosine"
gaaaacttcttactatgatttgagcctcctctcttgcctctctcccctggctcactttagcgttcttggcttcctttcagttctatgggcaagccaggctctttcccgctgccaggacgttg

SEQ ID NO: 11970 - DNA, 122 bp, Homo sapiens
  misc_feature (61)..(62): /note="This region represents a CpG dinucleotide"
  misc_feature (61)..(61): /note="Nucleotide may be methylated to form 5-methylcytosine"
tgaagtcacttgcctagggtcacacggctagtcactagtcagccacaaagcaaaggccagcgttgccaaacacaccgcctgctgagtgattgatggcagcactgaccactgtgagcctgccc

SEQ ID NO: 11971 - DNA, 122 bp, Homo sapiens
  misc_feature (61)..(62): /note="This region represents a CpG dinucleotide"
  misc_feature (61)..(61): /note="Nucleotide may be methylated to form 5-methylcytosine"
taattctacctgtggctaggaggattcttctgagtattaggcaagggaacatatgtcaaacgcttagcacattgcccagcacgtaaagcgcttagccagtgtttgcagctgtatgataatcc

SEQ ID NO: 11972 - DNA, 122 bp, Homo sapiens
  misc_feature (61)..(62): /note="This region represents a CpG dinucleotide"
  misc_feature (61)..(61): /note="Nucleotide may be methylated to form 5-methylcytosine"
cctaagactgacagcaccaccccaggcaaggagtgaaaggtgtgcggacttcgtcgtggacgccttcttgccaccagcctgactgaaagctggtgcggcctctgctctgggcagagaaggag

SEQ ID NO: 11973 - DNA, 122 bp, Homo sapiens
  misc_feature (61)..(62): /note="This region represents a CpG dinucleotide"
  misc_feature (61)..(61): /note="Nucleotide may be methylated to form 5-methylcytosine"
aggcagtctgtctcatctcttaatcatgagtttgtgctacctctcgtctgtggatctaggcgtgaggaggtagaagggagcccctggtcacgcccctgtgccgccttctagtggcatggcct

SEQ ID NO: 11974 - DNA, 122 bp, Homo sapiens
  misc_feature (61)..(62): /note="This region represents a CpG dinucleotide"
  misc_feature (61)..(61): /note="Nucleotide may be methylated to form 5-methylcytosine"
caaactctgtgcaggaggaagtggccagagagggaaatcagttgccaatggataaacagccggggcccagggaccaaagttcttatttacacagcctcccagtgtttacccaggaagtgagg

SEQ ID NO: 11975 - DNA, 122 bp, Homo sapiens
  misc_feature (61)..(62): /note="This region represents a CpG dinucleotide"
  misc_feature (61)..(61): /note="Nucleotide may be methylated to form 5-methylcytosine"
gtgtcggctgagaccaaggtggccgactggctggtgcagaatgacccgagcctgctgcaccgggttggccctggggatgaccgccacagcaccaagagcgacctgcctgtccacacccgcac

SEQ ID NO: 11976 - DNA, 122 bp, Homo sapiens
  misc_feature (61)..(62): /note="This region represents a CpG dinucleotide"
  misc_feature (61)..(61): /note="Nucleotide may be methylated to form 5-methylcytosine"
aggagtgtggcgtaattagttcatgcagctgtactcactgagctcctgctctagccctagcggtgttctaagctctagctggctcattagatgcagtgagtgtagcaatcagggaaggttac

SEQ ID NO: 11977 - DNA, 122 bp, Homo sapiens
  misc_feature (61)..(62): /note="This region represents a CpG dinucleotide"
  misc_feature (61)..(61): /note="Nucleotide may be methylated to form 5-methylcytosine"
agacagtatcagatccagcctttctgccccacccctttttggaggtaccgctcttttctacgctataaatgactgaccagttgggactgaacttggctgggacaatctctgttttcactccc

SEQ ID NO: 11978 - DNA, 122 bp, Homo sapiens
  misc_feature (61)..(62): /note="This region represents a CpG dinucleotide"
  misc_feature (61)..(61): /note="Nucleotide may be methylated to form 5-methylcytosine"
atggctggtaagtgtcacggggctgccatccttaatggtttggtgatggctgcctgggtgcgggagttgaagaaccctgggggcctcccgggctgagcagggaggacactgtgattgttcag

SEQ ID NO: 11979 - DNA, 122 bp, Homo sapiens
  misc_feature (61)..(62): /note="This region represents a CpG dinucleotide"
  misc_feature (61)..(61): /note="Nucleotide may be methylated to form 5-methylcytosine"
aaagacaaattaaccacttgcctgtctctaccttgtcagttttactaccttagtctccaccggttctcaaaaagccctcctgcccactcagtccttcatccctgcctgctctctgttgaagt

SEQ ID NO: 11980 - DNA, 122 bp, Homo sapiens
  misc_feature (61)..(62): /note="This region represents a CpG dinucleotide"
  misc_feature (61)..(61): /note="Nucleotide may be methylated to form 5-methylcytosine"
ttgtttgtttctgcttttattgtctgtgcttttgtgtcacctccaaaaaaacctgaacaacgtgattaagaaatgggcaaaggatctttgcattagctcattttcacgctgctgataaagac

SEQ ID NO: 11981 - DNA, 122 bp, Homo sapiens
  misc_feature (61)..(62): /note="This region represents a CpG dinucleotide"
  misc_feature (61)..(61): /note="Nucleotide may be methylated to form 5-methylcytosine"
ctagcagtttggatgtttggcaagattattctctgtccgcagaaagggacagcacagatacgtttcccctccacccccatgcccacccaagtttcaaacttaagcataccactgtatttcaa

SEQ ID NO: 11982 - DNA, 122 bp, Homo sapiens
  misc_feature (61)..(62): /note="This region represents a CpG dinucleotide"
  misc_feature (61)..(61): /note="Nucleotide may be methylated to form 5-methylcytosine"
gggaggttctgataggacaggcatctgcactgtggctttttaaccagcctggttggaggacggaaaatggaggcaagagaatgtgctcaatgattttgtcaattagaagtgattaagtttcc

SEQ ID NO: 11983 - DNA, 122 bp, Homo sapiens
  misc_feature (61)..(62): /note="This region represents a CpG dinucleotide"
  misc_feature (61)..(61): /note="Nucleotide may be methylated to form 5-methylcytosine"
cacgtggtgtatccacagaatggaactcagcaacaacatagtcgaaactcagaaacattacgctgtgtgagggaaccaaacataaaaggctacatatgtgattccattataagaaatgtcta

SEQ ID NO: 11984 - DNA, 122 bp, Homo sapiens
  misc_feature (61)..(62): /note="This region represents a CpG dinucleotide"
  misc_feature (61)..(61): /note="Nucleotide may be methylated to form 5-methylcytosine"
tataagtcacagtgctctttcaattgtgagtcataagaatccagagcaatatttcagcttcgtcttcaccaacatccccagcctcctccctattcaagcctttcactgagccgctgacaaga

SEQ ID NO: 11985 - DNA, 122 bp, Homo sapiens
  misc_feature (61)..(62): /note="This region represents a CpG dinucleotide"
  misc_feature (61)..(61): /note="Nucleotide may be methylated to form 5-methylcytosine"
catagcaggaaggggaatattttcaatctgtttccttctacatggctgtaagaaacatgacgcccatccatcatgcaaagagagcctgacgaggcagaggaaagatcatggcaggacttctg

SEQ ID NO: 11986 - DNA, 122 bp, Homo sapiens
  misc_feature (61)..(62): /note="This region represents a CpG dinucleotide"
  misc_feature (61)..(61): /note="Nucleotide may be methylated to form 5-methylcytosine"
tctgccggttggtactttctactgtcttcaagacattctcaattctgttgagcctgtactcgcaatatgccttttcaaaggagagagagttattggctaacagtttggtgcaagtattgatg

SEQ ID NO: 11987 - DNA, 122 bp, Homo sapiens
  misc_feature (61)..(62): /note="This region represents a CpG dinucleotide"
  misc_feature (61)..(61): /note="Nucleotide may be methylated to form 5-methylcytosine"
tgcgattggcatctgaaatgggggctgtcttgtgagactgagtcctaaacttgggtctgacgttaactccagttagacagtgtcagaatgaaattgaattgtaggatgcccagttggtatct

SEQ ID NO: 11988 - DNA, 122 bp, Homo sapiens
  misc_feature (61)..(62): /note="This region represents a CpG dinucleotide"
  misc_feature (61)..(61): /note="Nucleotide may be methylated to form 5-methylcytosine"
tgtagttttcttaacaatattggccaatattattttaaagaacatctctgaatgttttcacgtaagaaaagagactgtcccagaaatcctggacccagttatcctgaagtttcctctgattc

SEQ ID NO: 11989 - DNA, 122 bp, Homo sapiens
  misc_feature (61)..(62): /note="This region represents a CpG dinucleotide"
  misc_feature (61)..(61): /note="Nucleotide may be methylated to form 5-methylcytosine"
aattgccaacaaagaaggcagagcttccctgtagtgcctggacagagcaagtgttcttagcgtgactcaaagggagataaagtgactatgactcagtaaacctgtaagaagcacaactacat

SEQ ID NO: 11990 - DNA, 122 bp, Homo sapiens
  misc_feature (61)..(62): /note="This region represents a CpG dinucleotide"
  misc_feature (61)..(61): /note="Nucleotide may be methylated to form 5-methylcytosine"
ggctttaatttactggtacattatcttgacatttctgcagcagaatagattagttggttccggctctgtaaaggaagtcaaggtagctgatttgactagttgattaacattcctaattggct

SEQ ID NO: 11991 - DNA, 122 bp, Homo sapiens
  misc_feature (61)..(62): /note="This region represents a CpG dinucleotide"
  misc_feature (61)..(61): /note="Nucleotide may be methylated to form 5-methylcytosine"
tttttgaaccagtttcccaggagattcatgtgcggtgcgtttaggatccaaggggctggacggctttcacagtccagcttagagtgatctggttctgacaggacagagctgtctgaacaatg

SEQ ID NO: 11992 - DNA, 122 bp, Homo sapiens
  misc_feature (61)..(62): /note="This region represents a CpG dinucleotide"
  misc_feature (61)..(61): /note="Nucleotide may be methylated to form 5-methylcytosine"
cccatcccttcctcaccatcctctgttgggggtaggagggttggccaaggtttggccaggcgtggtgacaaagtcaggtcccaatctgatgtttgtcaacctgttgtgcttttgcttttaac

SEQ ID NO: 11993 - DNA, 122 bp, Homo sapiens
  misc_feature (61)..(62): /note="This region represents a CpG dinucleotide"
  misc_feature (61)..(61): /note="Nucleotide may be methylated to form 5-methylcytosine"
catgtaatgtacagagtagctgtaccttacaacttgatcataaagttgttctctgcaaaacgaaactagttgggaaagacagaatcaatatgatgaaagaagtggtcataccaggagacaca

SEQ ID NO: 11994 - DNA, 122 bp, Homo sapiens
  misc_feature (61)..(62): /note="This region represents a CpG dinucleotide"
  misc_feature (61)..(61): /note="Nucleotide may be methylated to form 5-methylcytosine"
caccctccttgtcaaaactagatatacctacattttataagttctttctaatattaaggacgttttaaactatgaagcacattccttgaactttctgaaatcagactccttgagatcaaaca

SEQ ID NO: 11995 - DNA, 122 bp, Homo sapiens
  misc_feature (61)..(62): /note="This region represents a CpG dinucleotide"
  misc_feature (61)..(61): /note="Nucleotide may be methylated to form 5-methylcytosine"
gcgtccaatctaatctcaaggtttgagtagctgtggacagcccaacaggcacaggcctcccgttagtacatccatacgagaagttaagaatgagtgaaaatagtttttttttttttaattta

SEQ ID NO: 11996 - DNA, 122 bp, Homo sapiens
  misc_feature (61)..(62): /note="This region represents a CpG dinucleotide"
  misc_feature (61)..(61): /note="Nucleotide may be methylated to form 5-methylcytosine"
taaatatctgtcacctgctctcaaaagtaaggttatgtcctttctaaaaaccatcagggccgtatggctcccatttctatgggtattaaataagcttttctgttgagtctcagtgattgtgt

SEQ ID NO: 11997 - DNA, 122 bp, Homo sapiens
  misc_feature (61)..(62): /note="This region represents a CpG dinucleotide"
  misc_feature (61)..(61): /note="Nucleotide may be methylated to form 5-methylcytosine"
ggtagagtggaaaggttacctaggtttcagtgcttgaaaagatttcagaaagcagtagtacgtctggttagactagaatcagtcctctcctgggggcagtggaatataatattttctgactg

SEQ ID NO: 11998 - DNA, 122 bp, Homo sapiens
  misc_feature (61)..(62): /note="This region represents a CpG dinucleotide"
  misc_feature (61)..(61): /note="Nucleotide may be methylated to form 5-methylcytosine"
tgtgtgccagatgtccctgaaatttacaaagaaccaagaaccaaaaatgacagttagctccgtaagcccaacaaaagaaaaaaaaaaaaaaaaggaaaagagcaaaaaagcaaaagaacaaa

SEQ ID NO: 11999 - DNA, 122 bp, Homo sapiens
  misc_feature (61)..(62): /note="This region represents a CpG dinucleotide"
  misc_feature (61)..(61): /note="Nucleotide may be methylated to form 5-methylcytosine"
agtgcgatgggaaactcgggctgggtctctgtggccaatgactcctgagcctcgccggcacgttttattcccggctgtccttccagtccggaagcctgaagtggacaccgaggaactgcggt

SEQ ID NO: 12000 - DNA, 122 bp, Homo sapiens
  misc_feature (61)..(62): /note="This region represents a CpG dinucleotide"
  misc_feature (61)..(61): /note="Nucleotide may be methylated to form 5-methylcytosine"
agaatcactgtgctgctccacaagcagatatgaagagccagtccagtcacacaaagaaaacggacaggcatcccacacggcaggacgtctgtgactcatcaaagctggagtgcaggacagca

SEQ ID NO: 12001 - DNA, 122 bp, Homo sapiens
  misc_feature (61)..(62): /note="This region represents a CpG dinucleotide"
  misc_feature (61)..(61): /note="Nucleotide may be methylated to form 5-methylcytosine"
agtggcccgtaagtaatataacacaacatccccagagtgggtggctttcctttttcactacgctgcttcttgcactcgcccacggcaccttccacttcccttgtgggcgcatggccgaccat

SEQ ID NO: 12002 - DNA, 122 bp, Homo sapiens
  misc_feature (61)..(62): /note="This region represents a CpG dinucleotide"
  misc_feature (61)..(61): /note="Nucleotide may be methylated to form 5-methylcytosine"
accaggtttctgaatggatcaaaggtattatcagacatacgtcacttcctacactaactacgtaagtcattttctcttgctctgcctcagtttctgtgtctttaaaatcaaggattgataaa

SEQ ID NO: 12003 - DNA, 122 bp, Homo sapiens
  misc_feature (61)..(62): /note="This region represents a CpG dinucleotide"
  misc_feature (61)..(61): /note="Nucleotide may be methylated to form 5-methylcytosine"
tacttcagtctatttcagtgacacctactgcctcaggaaaagcacagggaagcctgctaacggcagctgaatcacagcacctcatcagcttgcagccttggctgtgacagtcacagcacttg

SEQ ID NO: 12004 - DNA, 122 bp, Homo sapiens
  misc_feature (61)..(62): /note="This region represents a CpG dinucleotide"
  misc_feature (61)..(61): /note="Nucleotide may be methylated to form 5-methylcytosine"
ggtgaagtaacttttgtaagaccacagaaatgggaaatactgactctagcattcaaaccccggtttgtcttgttcaaaatctacaggcttaccactatttatttttgccaatatcttgtttg

SEQ ID NO: 12005 - DNA, 122 bp, Homo sapiens
  misc_feature (61)..(62): /note="This region represents a CpG dinucleotide"
  misc_feature (61)..(61): /note="Nucleotide may be methylated to form 5-methylcytosine"
tccattagagtgaaaaagaattgtagaaatccaggtccctgctgtgccctttttgaagaacgaggcatacaagctgttgataaatgctatgtctccgtcagagagaataggatcttgacatc

SEQ ID NO: 12006 - DNA, 122 bp, Homo sapiens
  misc_feature (61)..(62): /note="This region represents a CpG dinucleotide"
  misc_feature (61)..(61): /note="Nucleotide may be methylated to form 5-methylcytosine"
actgaccggtccaacttcttcacctttgaaacgaggtgaggacattattaactccactggcgcagcatcgaggtcttgatttacttatgaaaatgtaatcaatccaaagaacagtggctgac

SEQ ID NO: 12007 - DNA, 122 bp, Homo sapiens
  misc_feature (61)..(62): /note="This region represents a CpG dinucleotide"
  misc_feature (61)..(61): /note="Nucleotide may be methylated to form 5-methylcytosine"
tagttgtttactaaaaacattttcaagatttcctaatatgtaccttttacactcactgtacgggaatggaagaacaacaaacacaaactgtttatttttcatggatttttttttttttgagt

SEQ ID NO: 12008 - DNA, 122 bp, Homo sapiens
  misc_feature (61)..(62): /note="This region represents a CpG dinucleotide"
  misc_feature (61)..(61): /note="Nucleotide may be methylated to form 5-methylcytosine"
gttgcccaggtcctcagcctgagtgttgaggctgcggtagacccagcttccgcgggtgcccgtgggggaaggtggtaagtgtgccagtctggctgatagatcagtttacaccaggatgccca

SEQ ID NO: 12009 - DNA, 122 bp, Homo sapiens
  misc_feature (61)..(62): /note="This region represents a CpG dinucleotide"
  misc_feature (61)..(61): /note="Nucleotide may be methylated to form 5-methylcytosine"
gggcccatggcagtaatgtgcgtctgtggatccctttgctatgaggcttgacttcttgatcgggttcacaaggctggtgggcagcctgagatctttgcttatttcctacgtcttctgaaagg

SEQ ID NO: 12010 - DNA, 122 bp, Homo sapiens
  misc_feature (61)..(62): /note="This region represents a CpG dinucleotide"
  misc_feature (61)..(61): /note="Nucleotide may be methylated to form 5-methylcytosine"
tccccacgggccccaggagttctccacacgtaacccgactcaccgccagacgccgaccagcgcttctgtccggttcaaacttcggaccaacctactcaccatgcgcatgctcactttcaaaa

SEQ ID NO: 12011 - DNA, 122 bp, Homo sapiens
  misc_feature (61)..(62): /note="This region represents a CpG dinucleotide"
  misc_feature (61)..(61): /note="Nucleotide may be methylated to form 5-methylcytosine"
cttgatggttgaactcagtctagccttccaggctatttttttctcctttcctttttacaacggagccttttgctgtgctagattcctgagatgtgccttatggttctctgactttgttcaca

SEQ ID NO: 12012 - DNA, 122 bp, Homo sapiens
  misc_feature (61)..(62): /note="This region represents a CpG dinucleotide"
  misc_feature (61)..(61): /note="Nucleotide may be methylated to form 5-methylcytosine"
atgttgagtaaggtcttggccccagagtgtcctgtctagctgcagagcaaggatcttatgcgtggcagttcctgggcatgtactaggtctgctgggtgttgggccccgtgctgagtgctggc

SEQ ID NO: 12013 - DNA, 122 bp, Homo sapiens
  misc_feature (61)..(62): /note="This region represents a CpG dinucleotide"
  misc_feature (61)..(61): /note="Nucleotide may be methylated to form 5-methylcytosine"
aatgttatggccatgtcccctggttatattacccaggtcatttttatggcttcctacaaacgcgctttgtatttgactacatttggaaatactcagaaggttttcaaatgaagcctatatga

SEQ ID NO: 12014 - DNA, 122 bp, Homo sapiens
  misc_feature (61)..(62): /note="This region represents a CpG dinucleotide"
  misc_feature (61)..(61): /note="Nucleotide may be methylated to form 5-methylcytosine"
acaatgaatcataacccatacctcacactgcatattcaaaatgaattgaaaatcaccgggcgtggtggatcatgcctgtaattccagcactttaggaggccgaggctcaggtggatcaactg

SEQ ID NO: 12015 - DNA, 122 bp, Homo sapiens
  misc_feature (61)..(62): /note="This region represents a CpG dinucleotide"
  misc_feature (61)..(61): /note="Nucleotide may be methylated to form 5-methylcytosine"
tgagctgctgcacccggcccaagcctcttctcttaatccagtcactggtgattaactatccggaagggctcactcaatactccccactctacctcctgcccatttcctgacctttgcccctg

SEQ ID NO: 12016 - DNA, 122 bp, Homo sapiens
  misc_feature (61)..(62): /note="This region represents a CpG dinucleotide"
  misc_feature (61)..(61): /note="Nucleotide may be methylated to form 5-methylcytosine"
aaagaggaatcacccaacctagcaacattccagaatgttccaacatagatatggaggctccgaggcagagtgatctggtaaattgaacacgacctcagtcttagatcccagatgtaaggata

SEQ ID NO: 12017 - DNA, 122 bp, Homo sapiens
  misc_feature (61)..(62): /note="This region represents a CpG dinucleotide"
  misc_feature (61)..(61): /note="Nucleotide may be methylated to form 5-methylcytosine"
gtaggtttgttaccaccagcatcaccacaaacacgtgagtaatgtgttgtgacattgcaacggctgtgtcaccagacgataggaatttttcaattccattataatcttacggaaccactgtc

SEQ ID NO: 12018 - DNA, 122 bp, Homo sapiens
  misc_feature (61)..(62): /note="This region represents a CpG dinucleotide"
  misc_feature (61)..(61): /note="Nucleotide may be methylated to form 5-methylcytosine"
gttattcgattggtcagttcagggcctgccttcctatggctcttttgttgcaaagtgggacgtcacatgtaaggacagtataatgtcaacttctaaacttctccaggtacatgtaaaagttt

SEQ ID NO: 12019 - DNA, 122 bp, Homo sapiens
  misc_feature (61)..(62): /note="This region represents a CpG dinucleotide"
  misc_feature (61)..(61): /note="Nucleotide may be methylated to form 5-methylcytosine"
tgtgaatttacctactctagttcccttctaactgcctctattacctcatactgccagccccgcgatctatttcctgagagacttgcttaaaatcttgagctgatgttccaagcccaagacct

SEQ ID NO: 12020 - DNA, 122 bp, Homo sapiens
  misc_feature (61)..(62): /note="This region represents a CpG dinucleotide"
  misc_feature (61)..(61): /note="Nucleotide may be methylated to form 5-methylcytosine"
gagtcctgggctggcagcggtaaccttatccttgtgcaaaaatctgcttcgtatggcagacgtggaaccagtggactcattgcgctgcctactctgaaaagtgtttttatttttattttttt

SEQ ID NO: 12021 - DNA, 122 bp, Homo sapiens
  misc_feature (61)..(62): /note="This region represents a CpG dinucleotide"
  misc_feature (61)..(61): /note="Nucleotide may be methylated to form 5-methylcytosine"
ttttgtcttcaacatcttgtacagtgtgacataaatagctcccaataaatatttggtgaacgagtgggtaaatgaatgaatggacaagctgagaacatggacaccctgttttatgatagctc

SEQ ID NO: 12022 - DNA, 122 bp, Homo sapiens
  misc_feature (61)..(62): /note="This region represents a CpG dinucleotide"
  misc_feature (61)..(61): /note="Nucleotide may be methylated to form 5-methylcytosine"
gagaagattcattctcgctgtgaggaacccaaggctaggtcttctaaaacctcatctgaacgttcctgagaacaattcattttctttttctttttcttttttctttctttgttgagacaagg

SEQ ID NO: 12023 - DNA, 122 bp, Homo sapiens
  misc_feature (61)..(62): /note="This region represents a CpG dinucleotide"
  misc_feature (61)..(61): /note="Nucleotide may be methylated to form 5-methylcytosine"
atgactgagcacatgatgtgtacaagtatgtgtatgagtctgggggaccccggtgagggacgaattaattgtacttggagatccttgaaggatggagttccaggtgacacaaattttgcttc

SEQ ID NO: 12024 - DNA, 122 bp, Homo sapiens
  misc_feature (61)..(62): /note="This region represents a CpG dinucleotide"
  misc_feature (61)..(61): /note="Nucleotide may be methylated to form 5-methylcytosine"
gcattaggaccaggagtgacgcgcacgcttggctctgggttgtgtctggcagagggctctcggctgagtggagctatgtgtgaaaggaaaccaggcactgcctgccggctttacatctgttg

SEQ ID NO: 12025 - DNA, 122 bp, Homo sapiens
  misc_feature (61)..(62): /note="This region represents a CpG dinucleotide"
  misc_feature (61)..(61): /note="Nucleotide may be methylated to form 5-methylcytosine"
aggtgagttttgtaggtctaggaagagtctagcactagaaacctaacctcagggagtaagcgttcttgaagttctgtgtcaggtcacaaattcattcttaggaatgtctagaaaccaaaacc

SEQ ID NO: 12026 - DNA, 122 bp, Homo sapiens
  misc_feature (61)..(62): /note="This region represents a CpG dinucleotide"
  misc_feature (61)..(61): /note="Nucleotide may be methylated to form 5-methylcytosine"
cctgatccccagagcattcactgcaagaactgtttgcatattcagttattgtttctgctgcgtcagtcatctgttgaagttcactctaatgtggccctgatcaattctgccagctgtgctta

SEQ ID NO: 12027 - DNA, 122 bp, Homo sapiens
  misc_feature (61)..(62): /note="This region represents a CpG dinucleotide"
  misc_feature (61)..(61): /note="Nucleotide may be methylated to form 5-methylcytosine"
aaatcatcttccaccacatgggtgcactggagtctctgagcctattctggctcaggaggccgcctgattcacgaatcattttttgctcaaagtcttttaaatttaatttggctaaagttttt

SEQ ID NO: 12028 - DNA, 122 bp, Homo sapiens
  misc_feature (61)..(62): /note="This region represents a CpG dinucleotide"
  misc_feature (61)..(61): /note="Nucleotide may be methylated to form 5-methylcytosine"
tatcatttatatttgtgtcttacatcttttcctcagtttcaaacatcttcaaggcagaaacgtgttgtatttgcatgctgtttagaaggcagtgtactgaatagtaccagttttttcagaga

SEQ ID NO: 12029 - DNA, 122 bp, Homo sapiens
  misc_feature (61)..(62): /note="This region represents a CpG dinucleotide"
  misc_feature (61)..(61): /note="Nucleotide may be methylated to form 5-methylcytosine"
gacgtgggttaggaaaccatcccaacgtcaaagagaaacaatccatctaaggcaggggaacgctgacgtggtaacacccagtgctgacacccacaggaggatcccatctaggccccacccca

SEQ ID NO: 12030 - DNA, 122 bp, Homo sapiens
  misc_feature (61)..(62): /note="This region represents a CpG dinucleotide"
  misc_feature (61)..(61): /note="Nucleotide may be methylated to form 5-methylcytosine"
acttccccactcataagcggacttggaattttcgccgtaagtcctttgctataagttctacgcacattcaacagggacacctctgtgtagcaagttacctaaatgaatattcaggctgtttt

SEQ ID NO: 12031 - DNA, 122 bp, Homo sapiens
  misc_feature (61)..(62): /note="This region represents a CpG dinucleotide"
  misc_feature (61)..(61): /note="Nucleotide may be methylated to form 5-methylcytosine"
tgcttcactgccagatttctttaaaggggtttctgtatttgctgactccataggttcactcgctactgtatctgcaatccactgcagtgtgatccttgcacccatatcgctgaccttctctt

SEQ ID NO: 12032 - DNA, 122 bp, Homo sapiens
  misc_feature (61)..(62): /note="This region represents a CpG dinucleotide"
  misc_feature (61)..(61): /note="Nucleotide may be methylated to form 5-methylcytosine"
actatatgttacacagcatggtgaatatagtaaataataatgtattatacagttcaaaatcgctaagagtacatttcaaaagttctcaccatgaaaactgagaagtatttgaggtggatatg

SEQ ID NO: 12033 - DNA, 122 bp, Homo sapiens
  misc_feature (61)..(62): /note="This region represents a CpG dinucleotide"
  misc_feature (61)..(61): /note="Nucleotide may be methylated to form 5-methylcytosine"
ctacagtgaacggtgtctgaacaactttttgagggaataaggcagaatttctcccttatgcggataacaaaagagctagccatcctgaaaacttgccacatcgtaattttcagagatggtca

SEQ ID NO: 12034 - DNA, 122 bp, Homo sapiens
  misc_feature (61)..(62): /note="This region represents a CpG dinucleotide"
  misc_feature (61)..(61): /note="Nucleotide may be methylated to form 5-methylcytosine"
tttctaataacagctttacttagatgtactttacatgccataaaattcacccttttaaagcgtacaattaagtggtttttagtatattcacagaattgtgcaaccatcaccactatttaatt

SEQ ID NO: 12035 - DNA, 122 bp, Homo sapiens
  misc_feature (61)..(62): /note="This region represents a CpG dinucleotide"
  misc_feature (61)..(61): /note="Nucleotide may be methylated to form 5-methylcytosine"
ttccctcacttgtgttcaatactgtaaataatctgccttgctttttgtgagctcaaaggacgccgtggcagacatccacagcagcagcagggggaattcgtttacttggaaaccatcagcga

SEQ ID NO: 12036 - DNA, 122 bp, Homo sapiens
  misc_feature (61)..(62): /note="This region represents a CpG dinucleotide"
  misc_feature (61)..(61): /note="Nucleotide may be methylated to form 5-methylcytosine"
cctactcctctgatggactccccaatttcagttcatggcaacttcatctttcccgttgctcggaacaaaaagcctcttttgattacaccccacacccaatctgatggcaaactggtttgtgt

SEQ ID NO: 12037 - DNA, 122 bp, Homo sapiens
  misc_feature (61)..(62): /note="This region represents a CpG dinucleotide"
  misc_feature (61)..(61): /note="Nucleotide may be methylated to form 5-methylcytosine"
ctggtagttttcagacctccctatgattgcttgcactttctttctacgtttgtgttgagccgtattttttacctttaccatctgtttgttgttgctatatagaaatgcaattgcttttggta

SEQ ID NO: 12038 - DNA, 122 bp, Homo sapiens
  misc_feature (61)..(62): /note="This region represents a CpG dinucleotide"
  misc_feature (61)..(61): /note="Nucleotide may be methylated to form 5-methylcytosine"
gcttctgtggacacaacaacactgttaatcaacaggaactaatcagcatttatgtaacaccgcaaacgcagccgaatacacattttattcgtgtcgatgggacatttagcaagatatgaagt

SEQ ID NO: 12039 - DNA, 122 bp, Homo sapiens
  misc_feature (61)..(62): /note="This region represents a CpG dinucleotide"
  misc_feature (61)..(61): /note="Nucleotide may be methylated to form 5-methylcytosine"
tggattcctcactagacctagcccaagagggcgagggctgtgtctgtcctcttcctgccgcggcagctcctgccaccactggcagagggattgtgaaatagtcattccttcttttaacaaat

SEQ ID NO: 12040 - DNA, 122 bp, Homo sapiens
  misc_feature (61)..(62): /note="This region represents a CpG dinucleotide"
  misc_feature (61)..(61): /note="Nucleotide may be methylated to form 5-methylcytosine"
tcattgttaaagtatcacatggtttgtacagcaggatgatttgcattatatgaaggacaccgaaacacagaaaatgaaaggtctacggtgtatgacaaacaggacaaatgctctagcaaaaa

SEQ ID NO: 12041 - DNA, 122 bp, Homo sapiens
  misc_feature (61)..(62): /note="This region represents a CpG dinucleotide"
  misc_feature (61)..(61): /note="Nucleotide may be methylated to form 5-methylcytosine"
aaaatcaatgccatttttattttcattcctcataactgacataattgcatatatacacatcgtgtgattatattgtataccctggtgggtttccttaaaacagattccattttccctttctc

SEQ ID NO: 12042 - DNA, 122 bp, Homo sapiens
  misc_feature (61)..(62): /note="This region represents a CpG dinucleotide"
  misc_feature (61)..(61): /note="Nucleotide may be methylated to form 5-methylcytosine"
cagattatttggaatcacttggtgttgcaatgtcatgattaacttcaaacaagatgtgtgcgaaggagacacactctgccatgtaaacagtggttttctccaattcatttctttcctatttg

SEQ ID NO: 12043 - DNA, 122 bp, Homo sapiens
  misc_feature (61)..(62): /note="This region represents a CpG dinucleotide"
  misc_feature (61)..(61): /note="Nucleotide may be methylated to form 5-methylcytosine"
ttcccaatgtgggctggaatttccaggctaaagggcgagcattgcactggctgatgtcaccgtccagtagatgcctagtttaggcgaggagccagctctggtgtctgctgttagcacccaga

SEQ ID NO: 12044 - DNA, 122 bp, Homo sapiens
  misc_feature (61)..(62): /note="This region represents a CpG dinucleotide"
  misc_feature (61)..(61): /note="Nucleotide may be methylated to form 5-methylcytosine"
acgcaccgtctgcagtcaggaagtcccaggcggcgtgcaaggcggttgcggcgtgcgggccgccgacctgcggagtgcgcgggttgggctaggggctgtccctggagcgccgggtggccctg

SEQ ID NO: 12045 - DNA, 122 bp, Homo sapiens
  misc_feature (61)..(62): /note="This region represents a CpG dinucleotide"
  misc_feature (61)..(61): /note="Nucleotide may be methylated to form 5-methylcytosine"
gtggctgccttatttatttggggccatttctctcagatcatatgctccaggaacgaccatcgtggtgactggctttgccaagctgtgactctgagttgaaccttcttgaaaactagcttttg

SEQ ID NO: 12046 - DNA, 122 bp, Homo sapiens
  misc_feature (61)..(62): /note="This region represents a CpG dinucleotide"
  misc_feature (61)..(61): /note="Nucleotide may be methylated to form 5-methylcytosine"
gaacaagccctgggatgattgtgatcttcccttttcaattcctgagttgattttcactaacgtgatgcaacgatctcattcactttgcagatgaaaaataaggcacagagaagtttcaagat

SEQ ID NO: 12047 - DNA, 122 bp, Homo sapiens
  misc_feature (61)..(62): /note="This region represents a CpG dinucleotide"
  misc_feature (61)..(61): /note="Nucleotide may be methylated to form 5-methylcytosine"
ctgcgaggatctggaggatcatatttttcctttggcatccctgttagtctgcattcagcgcgccaggatccgggcggcggcggcggcggtggcgatggggcggctggtgctggtgctgcggc

SEQ ID NO: 12048 - DNA, 122 bp, Homo sapiens
  misc_feature (61)..(62): /note="This region represents a CpG dinucleotide"
  misc_feature (61)..(61): /note="Nucleotide may be methylated to form 5-methylcytosine"
attgatcttgtcttccccaacaaaagcagaggccatgctgtattcaatgttttagcaccacgtctgccatatggtggacgcccagcaagtaattacagtatgaatggaaaaacaaatatttg

SEQ ID NO: 12049 - DNA, 122 bp, Homo sapiens
  misc_feature (61)..(62): /note="This region represents a CpG dinucleotide"
  misc_feature (61)..(61): /note="Nucleotide may be methylated to form 5-methylcytosine"
cagcaactatacccctgggcattttccccagataaatgattatatatattaatacaaaaacgtgtacatgaatgtttatagacagtttatttgtaataggcagaactggaaacaacccagat

SEQ ID NO: 12050 - DNA, 122 bp, Homo sapiens
  misc_feature (61)..(62): /note="This region represents a CpG dinucleotide"
  misc_feature (61)..(61): /note="Nucleotide may be methylated to form 5-methylcytosine"
ctccaccccagtgggtcagctggaaatgggctcaaaacttaatcacacaattacctcagccgtggcttccctgcagcctctgaggaggcagagttttttctcctttgctggtaggtttctgc

SEQ ID NO: 12051 - DNA, 122 bp, Homo sapiens
  misc_feature (61)..(62): /note="This region represents a CpG dinucleotide"
  misc_feature (61)..(61): /note="Nucleotide may be methylated to form 5-methylcytosine"
ggaattcacaggaaatgatttcttcccttgtgggagctaaggcattcaagtaaatctgagcgcctgtcagagaagcagccgtcactaggcttgctgattacatttgcagttaaaacccaaaa

SEQ ID NO: 12052 - DNA, 122 bp, Homo sapiens
  misc_feature (61)..(62): /note="This region represents a CpG dinucleotide"
  misc_feature (61)..(61): /note="Nucleotide may be methylated to form 5-methylcytosine"
actccagacaagacccccgagggtcatgctacaaagctgctctcctgacttcctcagaaacgcccaaggacaggaaagacaaagaaagctgaggacttgtccagattcaagaagcccaagga

SEQ ID NO: 12053 - DNA, 122 bp, Homo sapiens
  misc_feature (61)..(62): /note="This region represents a CpG dinucleotide"
  misc_feature (61)..(61): /note="Nucleotide may be methylated to form 5-methylcytosine"
ctctctcctatgttgcaaaggggcctgtccctgctgtctgtgctccaggggctgcggctgcgcagtggcactaatgcctgagtgtgtctaattcaagagcagagtatcaacaaggccacccg

SEQ ID NO: 12054 - DNA, 122 bp, Homo sapiens
  misc_feature (61)..(62): /note="This region represents a CpG dinucleotide"
  misc_feature (61)..(61): /note="Nucleotide may be methylated to form 5-methylcytosine"
ggaaagaaagaaggcaagcataaaaggaataattcttatgcttgctcagtgatgaagtaacgactccagatacaatggcttatgcagtcaaacaggctttcactgtaacaatagaaacagct

SEQ ID NO: 12055 - DNA, 122 bp, Homo sapiens
  misc_feature (61)..(62): /note="This region represents a CpG dinucleotide"
  misc_feature (61)..(61): /note="Nucleotide may be methylated to form 5-methylcytosine"
aaaatcttcaccacaatctgggtaatgaaaatacctgtcactccaaaagtttcctagtgtcgctttgtaatcctcccttctgctccactccccatccgcagataatcactggttttgactaa

SEQ ID NO: 12056 - DNA, 122 bp, Homo sapiens
  misc_feature (61)..(62): /note="This region represents a CpG dinucleotide"
  misc_feature (61)..(61): /note="Nucleotide may be methylated to form 5-methylcytosine"
atcttattatgttacccacactggagtccattggtgcaatcatgactcactgtaccattacgtaacaaactcctaggctcaagcagtcctcctgagtagctgggactacggatgtgcactac

SEQ ID NO: 12057 - DNA, 122 bp, Homo sapiens
  misc_feature (61)..(62): /note="This region represents a CpG dinucleotide"
  misc_feature (61)..(61): /note="Nucleotide may be methylated to form 5-methylcytosine"
gggtgggaatttcctgaaactgaggcttcctcccccttttagacaatatagggtaatttccggacattgccatggtatttgtaggctgtcttggtgctggtagaagtgtgttttagcaagct

SEQ ID NO: 12058 - DNA, 122 bp, Homo sapiens
  misc_feature (61)..(62): /note="This region represents a CpG dinucleotide"
  misc_feature (61)..(61): /note="Nucleotide may be methylated to form 5-methylcytosine"
ttccttgcttattttaaattctgagtgggattttattcacacaagcatttcttcaagggtcgtaaggtctgggtaatacttgaaataccctttctggcaggaatcctcaatgcagggattgt

SEQ ID NO: 12059 - DNA, 122 bp, Homo sapiens
  misc_feature (61)..(62): /note="This region represents a CpG dinucleotide"
  misc_feature (61)..(61): /note="Nucleotide may be methylated to form 5-methylcytosine"
tatttctgtcacttgccagcattatccatatgattcaagagagagcctttattactcatccgaccaagcttgcagtgaaactttttgtaagaaaaggaatggtgtgttgagaattaaaatta

SEQ ID NO: 12060 - DNA, 122 bp, Homo sapiens
  misc_feature (61)..(62): /note="This region represents a CpG dinucleotide"
  misc_feature (61)..(61): /note="Nucleotide may be methylated to form 5-methylcytosine"
ccgggagacagttttggacatagcttttctcacagtggtagtagctcccactatacccaccgtgactcggggctgttcagaatccacccaggcgccctgagctctggggcctcctgggtagg

SEQ ID NO: 12061 - DNA, 122 bp, Homo sapiens
  misc_feature (61)..(62): /note="This region represents a CpG dinucleotide"
  misc_feature (61)..(61): /note="Nucleotide may be methylated to form 5-methylcytosine"
cccatgctacacagaagaactgcagttgctaaactggccgcatacttcctctgctaggaacgaggaaggcacagggcttgcagaagggcaggttcctgttttcagtaaccactctgagcaag

SEQ ID NO: 12062 - DNA, 122 bp, Homo sapiens
  misc_feature (61)..(62): /note="This region represents a CpG dinucleotide"
  misc_feature (61)..(61): /note="Nucleotide may be methylated to form 5-methylcytosine"
ttccacgaaccatttgagactaagtggctgacctgattcccctgaagccctgaatactttcgtgtctgcttcctgaaactagggcactttcttgcatccggaaataccgtcaatcctcaggc

SEQ ID NO: 12063 - DNA, 122 bp, Homo sapiens
  misc_feature (61)..(62): /note="This region represents a CpG dinucleotide"
  misc_feature (61)..(61): /note="Nucleotide may be methylated to form 5-methylcytosine"
ctatgtacaataaatagcattcccacggtgaccacaagtcttggaatcagttccaggtgtcgtcgtggccgttgacaccgctgccttctgacggtaaatgtattgtagaattcatgttgttc

SEQ ID NO: 12064 - DNA, 122 bp, Homo sapiens
  misc_feature (61)..(62): /note="This region represents a CpG dinucleotide"
  misc_feature (61)..(61): /note="Nucleotide may be methylated to form 5-methylcytosine"
catttgctctagacaaactgctaaacgcaattgtttctgacaatggattactctgtatcccgtgggggaattctcagacagcagcattagaaggggccttagagatcaaccatttctcttat

SEQ ID NO: 12065 - DNA, 122 bp, Homo sapiens
  misc_feature (61)..(62): /note="This region represents a CpG dinucleotide"
  misc_feature (61)..(61): /note="Nucleotide may be methylated to form 5-methylcytosine"
gtctggatggtttacacagacacggtgagagacgttacccggacgcaaaagagtacacagcgtgtgataccgttccatgtacagtcatacgttgcttaacgacgggctgtgttctgagaaat

SEQ ID NO: 12066 - DNA, 122 bp, Homo sapiens
  misc_feature (61)..(62): /note="This region represents a CpG dinucleotide"
  misc_feature (61)..(61): /note="Nucleotide may be methylated to form 5-methylcytosine"
gaggaagctaacaggcttgggtctccaggaaaaacttttgcaggttaagttccttctctacggtggagatgatcttatgatgcttaccgctgcaagctgagacactgaacattacaagtaac

SEQ ID NO: 12067 - DNA, 122 bp, Homo sapiens
  misc_feature (61)..(62): /note="This region represents a CpG dinucleotide"
  misc_feature (61)..(61): /note="Nucleotide may be methylated to form 5-methylcytosine"
ttctatttgtgacaatatgcattgataatttctctcctcacactgctgcactctcacctccgttcccagattagctcctggaactcgagatatttttgtggctagagattgctttcttaatg

SEQ ID NO: 12068 - DNA, 122 bp, Homo sapiens
  misc_feature (61)..(62): /note="This region represents a CpG dinucleotide"
  misc_feature (61)..(61): /note="Nucleotide may be methylated to form 5-methylcytosine"
taacagacaaaataaaacaagaacttccgtcttaaaattgtagtggtggaattcatccttcgggatgtattaggtgattcccctaggacgacagctgagttacagggggctaaatataccct

SEQ ID NO: 12069 - DNA, 122 bp, Homo sapiens
  misc_feature (61)..(62): /note="This region represents a CpG dinucleotide"
  misc_feature (61)..(61): /note="Nucleotide may be methylated to form 5-methylcytosine"
aagaaacagaaatgcagccctatgtgtgataaacctatgtaatatttgcaaccccaactgcgatatctgatgaaagaatgccaaacccactgcaagtcaaacaggaaggcagggaggagctg

SEQ ID NO: 12070 - DNA, 122 bp, Homo sapiens
  misc_feature (61)..(62): /note="This region represents a CpG dinucleotide"
  misc_feature (61)..(61): /note="Nucleotide may be methylated to form 5-methylcytosine"
tccatgtcatgtacctttctttgactataatgttgacataagctgaatgccttttagcatcgttcataacaatcagttgaagataaactgtatttgtaaactatctcatatgtataatatga

SEQ ID NO: 12071 - DNA, 122 bp, Homo sapiens
  misc_feature (61)..(62): /note="This region represents a CpG dinucleotide"
  misc_feature (61)..(61): /note="Nucleotide may be methylated to form 5-methylcytosine"
gactccagctttattatcaaacctccaatcgagtgcaagatgctaagctggggtagatgccggtaatagcgtgggccttgccctgggagctcacggccagcctggctacaactgtgtggagt

SEQ ID NO: 12072 - DNA, 122 bp, Homo sapiens
  misc_feature (61)..(62): /note="This region represents a CpG dinucleotide"
  misc_feature (61)..(61): /note="Nucleotide may be methylated to form 5-methylcytosine"
cgccgtcgctgctccagagactgcatgtccaggcagacagcgctgacattttctctcctgcgtggggaccagcgctgagccatacaggctccctcagggtggggtctcttgcgcgcccctcg

SEQ ID NO: 12073 - DNA, 122 bp, Homo sapiens
  misc_feature (61)..(62): /note="This region represents a CpG dinucleotide"
  misc_feature (61)..(61): /note="Nucleotide may be methylated to form 5-methylcytosine"
tattacctgtctacccagagagagctcctcacgccatgaatagtccacctgtgagacatccgagctgcagctgggcaggagccaagcatcttcttttcaaatgcacatggccctagtgccct

SEQ ID NO: 12074 - DNA, 122 bp, Homo sapiens
  misc_feature (61)..(62): /note="This region represents a CpG dinucleotide"
  misc_feature (61)..(61): /note="Nucleotide may be methylated to form 5-methylcytosine"
cattccattaagccacttgttgttgggaattctctcaaactgatctgcaattcagaaccacggtgagcaacctgttgcctcaccagactgcctggaactgagcttgaatgttgcttgggcaa

SEQ ID NO: 12075 - DNA, 122 bp, Homo sapiens
  misc_feature (61)..(62): /note="This region represents a CpG dinucleotide"
  misc_feature (61)..(61): /note="Nucleotide may be methylated to form 5-methylcytosine"
tgtttttttttttactggaaatttcatgcgttaaatgttgggtaggattaagtgatgagacgacgggtccaaatgtattaatcactgggaagtgttgaagtattaccgaccatcttactcat

SEQ ID NO: 12076 - DNA, 122 bp, Homo sapiens
  misc_feature (61)..(62): /note="This region represents a CpG dinucleotide"
  misc_feature (61)..(61): /note="Nucleotide may be methylated to form 5-methylcytosine"
taaaagtatatttttatcaataaagtggaaagtacacatatttgctcaagattctctgtccgcccccacacctccaggaggtcggtaagaactctctgaagctgtggtgtcagatcctttct

SEQ ID NO: 12077 - DNA, 122 bp, Homo sapiens
  misc_feature (61)..(62): /note="This region represents a CpG dinucleotide"
  misc_feature (61)..(61): /note="Nucleotide may be methylated to form 5-methylcytosine"
gtgtatggagattttgctttatttgaagataattattttaaggaagtctaaacagacaagcgtctgctgggaaaaagctagtctacctgcttatataaagagctggcacttacaaaacccat

SEQ ID NO: 12078 - DNA, 122 bp, Homo sapiens
  misc_feature (61)..(62): /note="This region represents a CpG dinucleotide"
  misc_feature (61)..(61): /note="Nucleotide may be methylated to form 5-methylcytosine"
taagtcagagctgtgggagtccagcagcttttacacgttagatttttctatttcctcattcgtcagcatttgacatcattttctgatgttataaaggataacagaaaaaaaaaccctgtgca

SEQ ID NO: 12079 - DNA, 122 bp, Homo sapiens
  misc_feature (61)..(62): /note="This region represents a CpG dinucleotide"
  misc_feature (61)..(61): /note="Nucleotide may be methylated to form 5-methylcytosine"
cagtggctggctaacaatcaaaaataggttttggtaatgttgggtaacgttgctcaaatacggctatattatgcagagcacatggcaatcgttgaagagtaaaacacagataattccacttc

SEQ ID NO: 12080 - DNA, 122 bp, Homo sapiens
  misc_feature (61)..(62): /note="This region represents a CpG dinucleotide"
  misc_feature (61)..(61): /note="Nucleotide may be methylated to form 5-methylcytosine"
agtggtgagcattagtgcccacaggagaactaagcatgtatgtggattaattaacagattcgttaagggtacctagtttaaatgtatctatttgtaaattagccaagagggattcaaggtga

SEQ ID NO: 12081 - DNA, 122 bp, Homo sapiens
  misc_feature (61)..(62): /note="This region represents a CpG dinucleotide"
  misc_feature (61)..(61): /note="Nucleotide may be methylated to form 5-methylcytosine"
ctctgtcaggaggattccggatgatttagtcacaaaacagtgactagaacaaaatccttacgcatgtacatacttctgattatgaaagccaattatgcttgttgggaaatttttaagtaagc

SEQ ID NO: 12082 - DNA, 122 bp, Homo sapiens
  misc_feature (61)..(62): /note="This region represents a CpG dinucleotide"
  misc_feature (61)..(61): /note="Nucleotide may be methylated to form 5-methylcytosine"
caagtcacaggcactacgaatttgaatttcctgactctcacttggtttagtggatgattacggcgtcagcatgtgcatttgaaacaggtccccaaagaggaagcacattcaggtcacttgaa

SEQ ID NO: 12083 - DNA, 122 bp, Homo sapiens
  misc_feature (61)..(62): /note="This region represents a CpG dinucleotide"
  misc_feature (61)..(61): /note="Nucleotide may be methylated to form 5-methylcytosine"
gaacttcaaggtctacactagatactttccaaggctgcttcctctgttggtcagatcagacgctgctttgttagctgtggttgctacagaagctctgtttcagttccagagctctgtgctga

SEQ ID NO: 12084 - DNA, 122 bp, Homo sapiens
  misc_feature (61)..(62): /note="This region represents a CpG dinucleotide"
  misc_feature (61)..(61): /note="Nucleotide may be methylated to form 5-methylcytosine"
ccgcacctcggctgacatgttggacaggcagcaccatggcccctccccgggccgggggctcggggtcctcctgtcacagggcctggcagcccctgtccaggccctggagccctggctgcatg

SEQ ID NO: 12085 - DNA, 122 bp, Homo sapiens
  misc_feature (61)..(62): /note="This region represents a CpG dinucleotide"
  misc_feature (61)..(61): /note="Nucleotide may be methylated to form 5-methylcytosine"
gggctggaatttagaagccaacatgtctagttttacggtccacattcttaaccattaggacgtatggccctaacgttttcagttgcatgccgagggcagtgtacaccaattaagcaaggaag

SEQ ID NO: 12086 - DNA, 122 bp, Homo sapiens
  misc_feature (61)..(62): /note="This region represents a CpG dinucleotide"
  misc_feature (61)..(61): /note="Nucleotide may be methylated to form 5-methylcytosine"
gtctgggctgccgcgaggcaggtggcaacgtggcccggggaggccgacacgaggcaagagcggggcccggagagaccgctgtcaggcaggagctgggcttctccaggccaccagggagccga

SEQ ID NO: 12087 - DNA, 122 bp, Homo sapiens
  misc_feature (61)..(62): /note="This region represents a CpG dinucleotide"
  misc_feature (61)..(61): /note="Nucleotide may be methylated to form 5-methylcytosine"
tctggacttacacctcactccgtgactcacctattcataagtgtctcgggaactttcctccgagtgtgtgtggtatagtaacactcaagagaacataattccgagcatgtgtcataaactaa

SEQ ID NO: 12088 - DNA, 122 bp, Homo sapiens
  misc_feature (61)..(62): /note="This region represents a CpG dinucleotide"
  misc_feature (61)..(61): /note="Nucleotide may be methylated to form 5-methylcytosine"
gctttatgtaccccctcacctgctggtaaacatttgggtgatttccggtctttccagctacggaaagtgctgctgagaattgctaagaacattctcgtatgcattgcccaaagcatgtgtac

SEQ ID NO: 12089 - DNA, 122 bp, Homo sapiens
  misc_feature (61)..(62): /note="This region represents a CpG dinucleotide"
  misc_feature (61)..(61): /note="Nucleotide may be methylated to form 5-methylcytosine"
ttcgctcttcacaatacatcttgctgctgctcactcgctcactgactcactctttgtgtccgtgccacctttaagagctgtaacactcactgcaaaaattcccagcttcattctggaagtca

SEQ ID NO: 12090 - DNA, 122 bp, Homo sapiens
  misc_feature (61)..(62): /note="This region represents a CpG dinucleotide"
  misc_feature (61)..(61): /note="Nucleotide may be methylated to form 5-methylcytosine"
agtgaatcactgtgaggctagctacagactcggtgggggcattccaggggccgttattaccgttaatcaattaggaagagttaagaatttctgaatatatgccaaatgcagtgctggtcatt

SEQ ID NO: 12091 - DNA, 122 bp, Homo sapiens
  misc_feature (61)..(62): /note="This region represents a CpG dinucleotide"
  misc_feature (61)..(61): /note="Nucleotide may be methylated to form 5-methylcytosine"
ggaggtcaaggctgcagtgagtcatgattgcaccactgcactccagcctgggcaacagagcgagactgtatcaaagaaaaaagaaaaatttgtttctgagacctgggatatcttctatcctc

SEQ ID NO: 12092 - DNA, 122 bp, Homo sapiens
  misc_feature (61)..(62): /note="This region represents a CpG dinucleotide"
  misc_feature (61)..(61): /note="Nucleotide may be methylated to form 5-methylcytosine"
ctatgaggagcctcccttctctcccccatctaactcagatgccccttctctgggtctctgcggcctcctgcactgccatgagtcatggcacgtatgacattatctatgatttatctgtgcac

SEQ ID NO: 12093 - DNA, 122 bp, Homo sapiens
  misc_feature (61)..(62): /note="This region represents a CpG dinucleotide"
  misc_feature (61)..(61): /note="Nucleotide may be methylated to form 5-methylcytosine"
tttggagaggcctacgaaaaactcccggcctgagtccgggaggccgcggaggtttgagggcgggagtgagttagaaacaaggctccagacggccgagtctcccaaactctacttccctgtgc

SEQ ID NO: 12094 - DNA, 122 bp, Homo sapiens
  misc_feature (61)..(62): /note="This region represents a CpG dinucleotide"
  misc_feature (61)..(61): /note="Nucleotide may be methylated to form 5-methylcytosine"
gtctgaggctgggagagaaatcccaagcccggcccggttgggaggccgtgggcatccacacggggcatgtgctggcggccctgaagcgccgatgtccccggactcgccgcacgcggactggg

SEQ ID NO: 12095 - DNA, 122 bp, Homo sapiens
  misc_feature (61)..(62): /note="This region represents a CpG dinucleotide"
  misc_feature (61)..(61): /note="Nucleotide may be methylated to form 5-methylcytosine"
gcgcaagtgggaggcagaagaatttgcagagcagatcagggcctacctggagggcacgtgcgtggagaggctcgcagacacctggagaacgggaaggagacgctgcagctcacgggtaccag

SEQ ID NO: 12096 - DNA, 122 bp, Homo sapiens
  misc_feature (61)..(62): /note="This region represents a CpG dinucleotide"
  misc_feature (61)..(61): /note="Nucleotide may be methylated to form 5-methylcytosine"
gggctcggcccctcccggcccagctgccaatcatgcacgaccctgcccggagcagcctcccgcaggactccggacccagggtcaaggccagactcacccgaggcaaaggccgaacgctcccg

SEQ ID NO: 12097 - DNA, 122 bp, Homo sapiens
  misc_feature (61)..(62): /note="This region represents a CpG dinucleotide"
  misc_feature (61)..(61): /note="Nucleotide may be methylated to form 5-methylcytosine"
ccctgtcttatagaagcagtgccctagggagaaatctgtgagctcctgctgctgaaataccggtgctgctcaatttccatgctttctgagcttagtgttttggctcttccttagattctgtg

SEQ ID NO: 12098 - DNA, 122 bp, Homo sapiens
  misc_feature (61)..(62): /note="This region represents a CpG dinucleotide"
  misc_feature (61)..(61): /note="Nucleotide may be methylated to form 5-methylcytosine"
tgctttttacctacctatctatctgcattaagctagcataaactccaacttaaagctgaacgccttcagagaaaccacatccctgccccctgcataagagaatgctgaataactaatgattc

SEQ ID NO: 12099 - DNA, 122 bp, Homo sapiens
  misc_feature (61)..(62): /note="This region represents a CpG dinucleotide"
  misc_feature (61)..(61): /note="Nucleotide may be methylated to form 5-methylcytosine"
cctgctttcagtccctgaatagcaaaggctatgccttggccatcgctgctggaagagacacggctcagtgttggatgaatgtcctgactgttttcgccccagagaatgaaaggcgccaaccg

SEQ ID NO: 12100 - DNA, 122 bp, Homo sapiens
  misc_feature (61)..(62): /note="This region represents a CpG dinucleotide"
  misc_feature (61)..(61): /note="Nucleotide may be methylated to form 5-methylcytosine"
tatgtactttaccttcctgttctgcttataaatactcattgcttacagttgcagagctctcggaacctcttctggttctgagtactgcctgattcaagaatcattctttactcaaataaact

SEQ ID NO: 12101 - DNA, 122 bp, Homo sapiens
  misc_feature (61)..(62): /note="This region represents a CpG dinucleotide"
  misc_feature (61)..(61): /note="Nucleotide may be methylated to form 5-methylcytosine"
ggagttatttaagccatctacagagctgaggaaacagtgtaatgtgtctctgccccattgcgcagctccacccattgtgccccaggccagcccgcgtcacctacacttccttctgtgccctg

SEQ ID NO: 12102 - DNA, 122 bp, Homo sapiens
  misc_feature (61)..(62): /note="This region represents a CpG dinucleotide"
  misc_feature (61)..(61): /note="Nucleotide may be methylated to form 5-methylcytosine"
tcaagagcttcgggactacaatcctagcatgccccaggctcgggagcctggtgaagttctcggggggaggagcgaagcggcgcgcgcctggccaggcacgctggaaacggtagctcttaacg

SEQ ID NO: 12103 - DNA, 122 bp, Homo sapiens
  misc_feature (61)..(62): /note="This region represents a CpG dinucleotide"
  misc_feature (61)..(61): /note="Nucleotide may be methylated to form 5-methylcytosine"
aactgggtctgtgatctcagcttcttccctaggccccaaggcatgcaaggtacaaggctgcgccccttcacccaggaattcaggcagacacagcagtaactcaaggataaaggagattgata

SEQ ID NO: 12104 - DNA, 122 bp, Homo sapiens
  misc_feature (61)..(62): /note="This region represents a CpG dinucleotide"
  misc_feature (61)..(61): /note="Nucleotide may be methylated to form 5-methylcytosine"
ctggggactgtgcctggtgacacaatagtcctgcattcccatgtagtgtatcagtccaagcgtgagaaagctctctgtgtttcctgagctggccagtggccagatgtgcaatgtggattacg

SEQ ID NO: 12105 - DNA, 122 bp, Homo sapiens
  misc_feature (61)..(62): /note="This region represents a CpG dinucleotide"
  misc_feature (61)..(61): /note="Nucleotide may be methylated to form 5-methylcytosine"
gagaaaaacttgagtctatggcctccatctgctctgggaaataggaagtgggttcttgggcgtgccagtgctccctgacctggtggttcctgagggctgactctgcctgccttggcctcctg

SEQ ID NO: 12106 - DNA, 122 bp, Homo sapiens
  misc_feature (61)..(62): /note="This region represents a CpG dinucleotide"
  misc_feature (61)..(61): /note="Nucleotide may be methylated to form 5-methylcytosine"
agataaccatttgggtggcacatttcacaacacagatgcacttcttaagagtcctccatccgtcagcgttgtaaaaaaggaagtggcacgtttgcatgtagttcttctgagacggagattta

SEQ ID NO: 12107 - DNA, 122 bp, Homo sapiens
  misc_feature (61)..(62): /note="This region represents a CpG dinucleotide"
  misc_feature (61)..(61): /note="Nucleotide may be methylated to form 5-methylcytosine"
cagacaagagcagagctttcaatggacattttaaacacatgggattaagatcctgaagcacgtctttgaagaactataagagaaggtgaaacatggctctaccggtatgactctgaagacaa

SEQ ID NO: 12108 - DNA, 122 bp, Homo sapiens
  misc_feature (61)..(62): /note="This region represents a CpG dinucleotide"
  misc_feature (61)..(61): /note="Nucleotide may be methylated to form 5-methylcytosine"
actctgtactttgtgagttccctgtaaatgttgaatgaatgacattgttttctagcttcacgtaacctgaaggcaaagacttggatgctgggaaagtcattaccaccccactaggcttgcct

SEQ ID NO: 12109 - DNA, 122 bp, Homo sapiens
  misc_feature (61)..(62): /note="This region represents a CpG dinucleotide"
  misc_feature (61)..(61): /note="Nucleotide may be methylated to form 5-methylcytosine"
gacatgtaataaatgtgtttccatgataagcttgaatcaattaataaaagaggaaagtaacgtgccttgtttgaaacctctctttaaggccacaggtcttgtcctgctgtattagaaaaggc

SEQ ID NO: 12110 - DNA, 122 bp, Homo sapiens
  misc_feature (61)..(62): /note="This region represents a CpG dinucleotide"
  misc_feature (61)..(61): /note="Nucleotide may be methylated to form 5-methylcytosine"
cagcaacaggaggaagcacagcattctgtgctcagactagtgtggcaggcctgcagaatgcgtgtgggcccttgttcctgtgcttggctgagggcttcctgagagcagttgctccatctctg

SEQ ID NO: 12111 - DNA, 122 bp, Homo sapiens
  misc_feature (61)..(62): /note="This region represents a CpG dinucleotide"
  misc_feature (61)..(61): /note="Nucleotide may be methylated to form 5-methylcytosine"
gaatgccacatggaagaatatctaaggccaccatgccgcccaaatattttatgcacattgcggctactgcatgggatggaaagccactacatcaggctgagtgatttatgtttctgaaaacc

SEQ ID NO: 12112 - DNA, 122 bp, Homo sapiens
  misc_feature (61)..(62): /note="This region represents a CpG dinucleotide"
  misc_feature (61)..(61): /note="Nucleotide may be methylated to form 5-methylcytosine"
tcttccttgttttggtggcaggcaagtgtctgtggtcaggagccatggagactcgtgccacggactgcgaagccacccagccatctggcccaagctcctgtgaccggaagagcttgttttgc

SEQ ID NO: 12113 - DNA, 122 bp, Homo sapiens
  misc_feature (61)..(62): /note="This region represents a CpG dinucleotide"
  misc_feature (61)..(61): /note="Nucleotide may be methylated to form 5-methylcytosine"
ctcaagagataacaaaagcacccgcctcctaggatgacatgagttcatgtgcacagagtgcgtagaacaagtgagtcagcttactcagtgattacaggaagtgtctacggggttatccctgc

SEQ ID NO: 12114 - DNA, 122 bp, Homo sapiens
  misc_feature (61)..(62): /note="This region represents a CpG dinucleotide"
  misc_feature (61)..(61): /note="Nucleotide may be methylated to form 5-methylcytosine"
tccagagctaggagggagttacggggcgaggcccagggcttttcagggccgggggtcgtgcggccaggcgcgggtggactaggccagcggccactgaggggcagagaggtctggggttctaa

SEQ ID NO: 12115 - DNA, 122 bp, Homo sapiens
  misc_feature (61)..(62): /note="This region represents a CpG dinucleotide"
  misc_feature (61)..(61): /note="Nucleotide may be methylated to form 5-methylcytosine"
tctcaaaaacaaaacaaaacaaaacaaaacaaaataaccacacacatagaattagctgggcgtgctggcgggtgccacctgtaggattataagattacacctgtaatcctaacactttggga

SEQ ID NO: 12116 - DNA, 122 bp, Homo sapiens
  misc_feature (61)..(62): /note="This region represents a CpG dinucleotide"
  misc_feature (61)..(61): /note="Nucleotide may be methylated to form 5-methylcytosine"
cttagattaggataattagagggaagtttatacacaaaggatgattcacagagatgtgggcgcaggggaaccactagggatggtgtactaaccttggactactattgatgggcaagatgaag

SEQ ID NO: 12117 - DNA, 122 bp, Homo sapiens
  misc_feature (61)..(62): /note="This region represents a CpG dinucleotide"
  misc_feature (61)..(61): /note="Nucleotide may be methylated to form 5-methylcytosine"
ggtagaaaaggctctggctccaaatgtgtggagcacaggagtgcaacataactgtcaactcgttttcttctggaatccatctgaactgactccatcctggagccctggctcctgggtgggct

SEQ ID NO: 12118 - DNA, 122 bp, Homo sapiens
  misc_feature (61)..(62): /note="This region represents a CpG dinucleotide"
  misc_feature (61)..(61): /note="Nucleotide may be methylated to form 5-methylcytosine"
agcggacagggtgttcagggatgagctgggcaggcgctggggcctccccatgtcagaggccgcttggcttctgggtacctgccctcctcttccccttcctctcccccacccccaaatgtcac

SEQ ID NO: 12119 - DNA, 122 bp, Homo sapiens
  misc_feature (61)..(62): /note="This region represents a CpG dinucleotide"
  misc_feature (61)..(61): /note="Nucleotide may be methylated to form 5-methylcytosine"
aagggcaagagtaggggcaggaggggcccttcctgcccctgctcctggtccccacttggccgccagcagagaaggcaaaaagcaggaactagaggccagcaaggtacaggatgggggaggga

SEQ ID NO: 12120 - DNA, 122 bp, Homo sapiens
  misc_feature (61)..(62): /note="This region represents a CpG dinucleotide"
  misc_feature (61)..(61): /note="Nucleotide may be methylated to form 5-methylcytosine"
atgggaagttggttcctgatattcatacatttattgagcaaacatttattgattactgtgcgtcaggcatgtgtgagcctgaatacatatcactcctttcttctctcaggttcaggatcagt

SEQ ID NO: 12121 - DNA, 122 bp, Homo sapiens
  misc_feature (61)..(62): /note="This region represents a CpG dinucleotide"
  misc_feature (61)..(61): /note="Nucleotide may be methylated to form 5-methylcytosine"
caacaacaaaaaagactcaaacagctatttgtacaccagcattcatagtagcattatgcacgatagctgaaaggtggaaacaactcacatgttcatcagtggataaatggataaacaaaatg

SEQ ID NO: 12122 - DNA, 122 bp, Homo sapiens
  misc_feature (61)..(62): /note="This region represents a CpG dinucleotide"
  misc_feature (61)..(61): /note="Nucleotide may be methylated to form 5-methylcytosine"
gagtgcctactatatgcttggcagggagatatctgtttaataaatgtctttattcagacacgttcctatctcccgtattccctaactcctttcacttattttaggtgggtaactcaagcgca

SEQ ID NO: 12123 - DNA, 122 bp, Homo sapiens
  misc_feature (61)..(62): /note="This region represents a CpG dinucleotide"
  misc_feature (61)..(61): /note="Nucleotide may be methylated to form 5-methylcytosine"
ggcacctagggacagccacactctgtgtccacgcacctagggacggccacaccttgtccacgcaccgagggacagccacacctgtatccacacacctaaggatggccacacctgtgtccacg

SEQ ID NO: 12124 - DNA, 122 bp, Homo sapiens
  misc_feature (61)..(62): /note="This region represents a CpG dinucleotide"
  misc_feature (61)..(61): /note="Nucleotide may be methylated to form 5-methylcytosine"
ctttcttgaggagaaaaaaattatcatgaagacagaatctgaccactgaaattactcatacgaagactcacaaatgaggaagctgtcttgtgaaagataagcagatactcaatgcaaaggat

SEQ ID NO: 12125 - DNA, 122 bp, Homo sapiens
  misc_feature (61)..(62): /note="This region represents a CpG dinucleotide"
  misc_feature (61)..(61): /note="Nucleotide may be methylated to form 5-methylcytosine"
gcctcgcacctgatgaacactggctgttaatcagcagcagtgcaattactctcacaccatcgtccttactacaaatgccttcactgccttctcattgtcctcaaattaaaggccaagcacct

SEQ ID NO: 12126 - DNA, 122 bp, Homo sapiens
  misc_feature (61)..(62): /note="This region represents a CpG dinucleotide"
  misc_feature (61)..(61): /note="Nucleotide may be methylated to form 5-methylcytosine"
aacagttcatgactcaacagctacgtagtctatccacccattcatgtgacattgtgaaggcgacactgccacaagccacaaccaagccttctacagggatgaaggccaaggggactctatgc

SEQ ID NO: 12127 - DNA, 122 bp, Homo sapiens
  misc_feature (61)..(62): /note="This region represents a CpG dinucleotide"
  misc_feature (61)..(61): /note="Nucleotide may be methylated to form 5-methylcytosine"
agtgagagaccacaagcagcctctgaagtcatcttcctctctcttctcagaagcatttctcgaatattctgctgacaagaggttagcaggacttcacaagacaccccaacacacacacacac

SEQ ID NO: 12128 - DNA, 122 bp, Homo sapiens
  misc_feature (61)..(62): /note="This region represents a CpG dinucleotide"
  misc_feature (61)..(61): /note="Nucleotide may be methylated to form 5-methylcytosine"
cctgtgcccgggcacacacgcagcacatgcacacatttgcccaccacacacgcacgtgcgcgcgcacacacgcacacaggcgttcaccccggtatgcatgcccagatctctcaacaccaaaa

SEQ ID NO: 12129 - DNA, 122 bp, Homo sapiens
  misc_feature (61)..(62): /note="This region represents a CpG dinucleotide"
  misc_feature (61)..(61): /note="Nucleotide may be methylated to form 5-methylcytosine"
attcctttccacattgaatcaagaaagatcagagtggccaataaaatacagcagaagtgacggtgggtcagagactaagctataaatgccactgatcatcctgtttactcatttctgtatca

SEQ ID NO: 12130 - DNA, 122 bp, Homo sapiens
  misc_feature (61)..(62): /note="This region represents a CpG dinucleotide"
  misc_feature (61)..(61): /note="Nucleotide may be methylated to form 5-methylcytosine"
ccagggactttccttggtaagccttcccatttttgtttgcccagctttcccaggcagagacgatgttagtgcagatgaaggtcaaggagaatctcaagtctttttttttttttaaaaaaagg

SEQ ID NO: 12131 - DNA, 122 bp, Homo sapiens
  misc_feature (61)..(62): /note="This region represents a CpG dinucleotide"
  misc_feature (61)..(61): /note="Nucleotide may be methylated to form 5-methylcytosine"
aatcagagcgcgctgcttaacacgctcccgggtgactcgtacgtagtcagtgctgggaagcgctggtctacagtcatgtttctcaagcttgaatgcacatccgaatcccccggaaggtttgc

SEQ ID NO: 12132 - DNA, 122 bp, Homo sapiens
  misc_feature (61)..(62): /note="This region represents a CpG dinucleotide"
  misc_feature (61)..(61): /note="Nucleotide may be methylated to form 5-methylcytosine"
gtcctgagcgtatgcagctgcagcagcaagtaagcaactgactagctctgtgtgggcctgcgtgctctcagaggaaagggaggagcaaaaaaggaagcagtgggcaggtcctgagtacctga

SEQ ID NO: 12133 - DNA, 122 bp, Homo sapiens
  misc_feature (61)..(62): /note="This region represents a CpG dinucleotide"
  misc_feature (61)..(61): /note="Nucleotide may be methylated to form 5-methylcytosine"
cagtataagtaccccatttggtggttgcccttctcttccagaatcttcacctttgtgacacgtgcccacaatgaatcatgtcctcaaggcagtcctgggtggttatggctcatggtgacttt

SEQ ID NO: 12134 - DNA, 122 bp, Homo sapiens
  misc_feature (61)..(62): /note="This region represents a CpG dinucleotide"
  misc_feature (61)..(61): /note="Nucleotide may be methylated to form 5-methylcytosine"
tctggtggtgacttgcagtgacgtggtggatatcttctggctgcatgccagcaaatgacccgtccttctggggataagctcgtggcccagggagccttgggcatggttgtggtgcatagaga

SEQ ID NO: 12135 - DNA, 122 bp, Homo sapiens
  misc_feature (61)..(62): /note="This region represents a CpG dinucleotide"
  misc_feature (61)..(61): /note="Nucleotide may be methylated to form 5-methylcytosine"
tgtcatcgatgtcactaataaatgcagtaatatatccaggaatgctatgtatatcagatacgggagtgtctgtcatcttcttttaagaggtactgactttttggaaatacaaaacaatagtc

SEQ ID NO: 12136 - DNA, 122 bp, Homo sapiens
  misc_feature (61)..(62): /note="This region represents a CpG dinucleotide"
  misc_feature (61)..(61): /note="Nucleotide may be methylated to form 5-methylcytosine"
gtggcaagttcacggtcaagctaagcttaaacaaggcttgattcaggctcatgattcagccgctagactctactgcctcttgcacaagtagcaactcactgctctccctgccctcttgatgt

SEQ ID NO: 12137 - DNA, 122 bp, Homo sapiens
  misc_feature (61)..(62): /note="This region represents a CpG dinucleotide"
  misc_feature (61)..(61): /note="Nucleotide may be methylated to form 5-methylcytosine"
tcagcactattgactttttgaggccagatgatccttcattatgggggctgccctgtgtaccgtaagctgtttagctgcattcctggcttccacccatagatgccagcagcatccccactccc

SEQ ID NO: 12138 - DNA, 122 bp, Homo sapiens
  misc_feature (61)..(62): /note="This region represents a CpG dinucleotide"
  misc_feature (61)..(61): /note="Nucleotide may be methylated to form 5-methylcytosine"
ttgggacacgtacatgttgacatcctgaggatcatgcagctcataaatgtcaccactgaccgcttctgaagggtttttatgtgtgtgtggatgtgtttgttgaggcacagggggcagaggtg

SEQ ID NO: 12139 - DNA, 122 bp, Homo sapiens
  misc_feature (61)..(62): /note="This region represents a CpG dinucleotide"
  misc_feature (61)..(61): /note="Nucleotide may be methylated to form 5-methylcytosine"
ttaagccaccaacttgtgggaactggttatagcagccacaggaaagcccctgctggacatcgttatgatcccttttgccccagccctgaatattccagactggtccagaacctcagccccaa

SEQ ID NO: 12140 - DNA, 122 bp, Homo sapiens
  misc_feature (61)..(62): /note="This region represents a CpG dinucleotide"
  misc_feature (61)..(61): /note="Nucleotide may be methylated to form 5-methylcytosine"
ctgcagaaagcaagtggccagaggcacagagaatagtgatgtactcaagttctccttctgcggcagaattaagaattaaatctagctccagtgaggaagcagcagaccatgcattcaagacc

SEQ ID NO: 12141 - DNA, 122 bp, Homo sapiens
  misc_feature (61)..(62): /note="This region represents a CpG dinucleotide"
  misc_feature (61)..(61): /note="Nucleotide may be methylated to form 5-methylcytosine"
actaacccgagttttaaatagataccattgcatttaaggaatgaaaaatcagagcaccaacgggcttgtccagtcatattgcttatctgtgagccaggaggaatgtaattctgccttcacca

SEQ ID NO: 12142 - DNA, 122 bp, Homo sapiens
  misc_feature (61)..(62): /note="This region represents a CpG dinucleotide"
  misc_feature (61)..(61): /note="Nucleotide may be methylated to form 5-methylcytosine"
ggtttccatatgctgcttatgacacaccacagagctgactttcttggcattacaaaccttcgtggtatttccatttagctagacactcccttggcatctcaatttaccccaggtctaatcta

SEQ ID NO: 12143 - DNA, 122 bp, Homo sapiens
  misc_feature (61)..(62): /note="This region represents a CpG dinucleotide"
  misc_feature (61)..(61): /note="Nucleotide may be methylated to form 5-methylcytosine"
caaaccactgttcatgaaatctgtgggtgcaaacaaattgagctgtcaggctgcaggacgcgagcaaacactggccaggcaaatggcatttcctccctccagcacatttctgctgctgaccc

SEQ ID NO: 12144 - DNA, 122 bp, Homo sapiens
  misc_feature (61)..(62): /note="This region represents a CpG dinucleotide"
  misc_feature (61)..(61): /note="Nucleotide may be methylated to form 5-methylcytosine"
gagaggtgcttcggtgatggatttccctggtgacttgccaagacagggctttactgcctccgccctggactggctgagtcagactgtgcaggggtggacactttgactggtatttgggaggc

SEQ ID NO: 12145 - DNA, 122 bp, Homo sapiens
  misc_feature (61)..(62): /note="This region represents a CpG dinucleotide"
  misc_feature (61)..(61): /note="Nucleotide may be methylated to form 5-methylcytosine"
ttattcataatggatcagccaattcattccttattaatttaatggagtacaagtaagcagcgtaacagcttgagtttaggagtgtttcacaaatggggctttttgtctgtaatcacttaatc

SEQ ID NO: 12146 - DNA, 122 bp, Homo sapiens
  misc_feature (61)..(62): /note="This region represents a CpG dinucleotide"
  misc_feature (61)..(61): /note="Nucleotide may be methylated to form 5-methylcytosine"
ttcttaaaaatcttccttttaaaaagtaggggaatgtaggcttagagaataaatttcattcggcaagctgagtccttactgcgtgtggcactgtgacatagtggaagaagaactcttgttgt

SEQ ID NO: 12147 - DNA, 122 bp, Homo sapiens
  misc_feature (61)..(62): /note="This region represents a CpG dinucleotide"
  misc_feature (61)..(61): /note="Nucleotide may be methylated to form 5-methylcytosine"
ctggaaatccactatggagaattgagggtcagatgccatggggaacaaatgtaaaagcaacgcccaaaggtccagtgtggacgattaatttctgagaacagcaagagtcgggagggcacctt

SEQ ID NO: 12148 - DNA, 122 bp, Homo sapiens
  misc_feature (61)..(62): /note="This region represents a CpG dinucleotide"
  misc_feature (61)..(61): /note="Nucleotide may be methylated to form 5-methylcytosine"
ggtgaacacagggaactgcaggcaacaatgctgctgaatacacccgagtgcacagtcagacgtgttccgtaaacggtaaatgtgtaagaccaattatcttgagagggtatcttgctccagaa

SEQ ID NO: 12149 - DNA, 122 bp, Homo sapiens
  misc_feature (61)..(62): /note="This region represents a CpG dinucleotide"
  misc_feature (61)..(61): /note="Nucleotide may be methylated to form 5-methylcytosine"
agtccttcatctgaagactgaagtccagtctagtgctgagaaccactcccttaccgagagcgagcgcttagcacaacatagccataataatagctgcctaataaccttttcctttctgcctg

SEQ ID NO: 12150 - DNA, 122 bp, Homo sapiens
  misc_feature (61)..(62): /note="This region represents a CpG dinucleotide"
  misc_feature (61)..(61): /note="Nucleotide may be methylated to form 5-methylcytosine"
acgcgcgtggtgacggcagggctgggcttgcacatcctcagcaggctgacctgtttccttcgcagggcgccttctggggactcatcgggggcctgctgatgggcctggcacgcctgattccc

SEQ ID NO: 12151 - DNA, 122 bp, Homo sapiens
  misc_feature (61)..(62): /note="This region represents a CpG dinucleotide"
  misc_feature (61)..(61): /note="Nucleotide may be methylated to form 5-methylcytosine"
aggcggaagcgtcctttagagaacatagagtccaatgtccttgttatatatatgaggaaacggagttctactgaggggaaggaccttgccaccaagatctcctgatttttcatccaggaaac

SEQ ID NO: 12152 - DNA, 122 bp, Homo sapiens
  misc_feature (61)..(62): /note="This region represents a CpG dinucleotide"
  misc_feature (61)..(61): /note="Nucleotide may be methylated to form 5-methylcytosine"
tctcctttgaaggaggggtttaatcacttcaaatggataacattaaggttaaattaagggcgaagttgatatttggccctgacttttatatgaaggtaacatttttgcaagtaaattgtaga

SEQ ID NO: 12153 - DNA, 122 bp, Homo sapiens
  misc_feature (61)..(62): /note="This region represents a CpG dinucleotide"
  misc_feature (61)..(61): /note="Nucleotide may be methylated to form 5-methylcytosine"
ggcttcagctgaaagtgtctctccatccttatctttcatcaacatctaggtcaatggttccgtagcagatgctcttagatggctctgggtaatgatagatgaacaaattgaacaaattaatt

SEQ ID NO: 12154 - DNA, 122 bp, Homo sapiens
  misc_feature (61)..(62): /note="This region represents a CpG dinucleotide"
  misc_feature (61)..(61): /note="Nucleotide may be methylated to form 5-methylcytosine"
tccagtgtgcatgcgggcccctagtctgagccattccacattgatttatttcccttactgcgcatgtgttaagggactgaatttttcactgctggcatgtttaggcaagcctcctgtgcaca

SEQ ID NO: 12155 - DNA, 122 bp, Homo sapiens
  misc_feature (61)..(62): /note="This region represents a CpG dinucleotide"
  misc_feature (61)..(61): /note="Nucleotide may be methylated to form 5-methylcytosine"
agccaggagtggacagttgcagactgtgtggacatggatcatcaagtgcatactgtttgtcgtatgatatctgattgaaacctaggttctgacctagctcctggatcttgtctaatggcaga

SEQ ID NO: 12156 - DNA, 122 bp, Homo sapiens
  misc_feature (61)..(62): /note="This region represents a CpG dinucleotide"
  misc_feature (61)..(61): /note="Nucleotide may be methylated to form 5-methylcytosine"
ggggtgccaggcttttcctgaataattgagaaatgatcagatgatctaccctttgactgacgtatactggtatatgcattactattgctcttcgagtgactgtactggcttactcatttctt

SEQ ID NO: 12157 - DNA, 122 bp, Homo sapiens
  misc_feature (61)..(62): /note="This region represents a CpG dinucleotide"
  misc_feature (61)..(61): /note="Nucleotide may be methylated to form 5-methylcytosine"
gtgaccacttcttactcactcagagctttgtcatttcctgtttaaaatctttcagttggccgggtgcggtggctcacgcctgtaatcccagcactttgggaggctgaggcgggcggatcacg

SEQ ID NO: 12158 - DNA, 122 bp, Homo sapiens
  misc_feature (61)..(62): /note="This region represents a CpG dinucleotide"
  misc_feature (61)..(61): /note="Nucleotide may be methylated to form 5-methylcytosine"
gaagttagcttctcgtctcacaattttacttttgaaaccatctttcctcaaccaaaatagcgcctggggttgttttgcaaaacaaaacagttttcggcctctgctgactgtaaaaaataact

SEQ ID NO: 12159 - DNA, 122 bp, Homo sapiens
  misc_feature (61)..(62): /note="This region represents a CpG dinucleotide"
  misc_feature (61)..(61): /note="Nucleotide may be methylated to form 5-methylcytosine"
catttgctcaatacatttgcacttcataggcttctttagctgtcttccttttaccccggacgggatgtagatgttaattctggaacaattgcagctacaagaatttgtcatcctgccccttt

SEQ ID NO: 12160 - DNA, 122 bp, Homo sapiens
  misc_feature (61)..(62): /note="This region represents a CpG dinucleotide"
  misc_feature (61)..(61): /note="Nucleotide may be methylated to form 5-methylcytosine"
tcatgcatattccaatgaagctgctgcctcttttcctcatctaccctcactggaggagcacgtttccgtcggctgctcattttcaagttttcttggctggtaactgtgaactctagaggaca

SEQ ID NO: 12161 - DNA, 122 bp, Homo sapiens
  misc_feature (61)..(62): /note="This region represents a CpG dinucleotide"
  misc_feature (61)..(61): /note="Nucleotide may be methylated to form 5-methylcytosine"
tactgtggtttgagtgagtgttgcaaagagccgcagaccacagtggcttgttgaggctgccgatgatcttgaggtcagtgtcctacagtcacaaaacccctgactcctacccactagatgac

SEQ ID NO: 12162 - DNA, 122 bp, Homo sapiens
  misc_feature (61)..(62): /note="This region represents a CpG dinucleotide"
  misc_feature (61)..(61): /note="Nucleotide may be methylated to form 5-methylcytosine"
tcttagaagtaaattgtcaggccatactttaagcgtatgtttaatgtagtgagaaatgagcgggctgatcttgagtgtagactttttggccgactttgcctgaaaagagatgtgacctgagg

SEQ ID NO: 12163 - DNA, 122 bp, Homo sapiens
  misc_feature (61)..(62): /note="This region represents a CpG dinucleotide"
  misc_feature (61)..(61): /note="Nucleotide may be methylated to form 5-methylcytosine"
tcctgtcaaattgaaacctcctgcatcctgagtgcctcatgtctcacgtatttagggtaccgtgaatatttagtgcctccttggtctttctgtcccttttgatctctgtacacacgaatatg

SEQ ID NO: 12164 - DNA, 122 bp, Homo sapiens
  misc_feature (61)..(62): /note="This region represents a CpG dinucleotide"
  misc_feature (61)..(61): /note="Nucleotide may be methylated to form 5-methylcytosine"
caatacaaagagtcagaggtataataaaagaataaagaatgttggggagagatgtgaacccgttgagagtcctgagagaactggagaaaaacttcacacagtaggggtgacacttcagaagg

SEQ ID NO: 12165 - DNA, 122 bp, Homo sapiens
  misc_feature (61)..(62): /note="This region represents a CpG dinucleotide"
  misc_feature (61)..(61): /note="Nucleotide may be methylated to form 5-methylcytosine"
caggaagttcattgctcacccaagatgcctccagaagaaagcagaaacttccgagaggagcgtgaatgctctgtttctgtgctgcagaaacaattcctagtttatttgtttcctaaattaag

SEQ ID NO: 12166 - DNA, 122 bp, Homo sapiens
  misc_feature (61)..(62): /note="This region represents a CpG dinucleotide"
  misc_feature (61)..(61): /note="Nucleotide may be methylated to form 5-methylcytosine"
acctgtcctgcagattcactagtacttgacagcatggtgcagtctcattcctcatgccttcgcattgtggcccgccacgctcctgagaaggacacacctccatagcatggagaggaaacaga

SEQ ID NO: 12167 - DNA, 122 bp, Homo sapiens
  misc_feature (61)..(62): /note="This region represents a CpG dinucleotide"
  misc_feature (61)..(61): /note="Nucleotide may be methylated to form 5-methylcytosine"
ttgccgatgatgtttcattgttcctttctgaaaccacatccgaacaaaagctgaatcatccgtggtgtgactcatcagattagtccgacaaaagaattaccaaaatagggctggagagaaga

SEQ ID NO: 12168 - DNA, 122 bp, Homo sapiens
  misc_feature (61)..(62): /note="This region represents a CpG dinucleotide"
  misc_feature (61)..(61): /note="Nucleotide may be methylated to form 5-methylcytosine"
agtggcagaaaccaaatgaaaactcaggtcttgtctgatgcagaagccagaacaaacctccgtacattgctagagatggcagggcccttgaatgcacccacgtctccccacccctagctgac

SEQ ID NO: 12169 - DNA, 122 bp, Homo sapiens
  misc_feature (61)..(62): /note="This region represents a CpG dinucleotide"
  misc_feature (61)..(61): /note="Nucleotide may be methylated to form 5-methylcytosine"
tcaggttccccagcaccgccactgccatctgttatgtctcctagcagggttgcagctagtcgactggctcagcaaggaagtgatttaattgttcctgcaggtattcactgcactgattggat

SEQ ID NO: 12170 - DNA, 122 bp, Homo sapiens
  misc_feature (61)..(62): /note="This region represents a CpG dinucleotide"
  misc_feature (61)..(61): /note="Nucleotide may be methylated to form 5-methylcytosine"
gtgggttctaggcctggctttggcactgacggtgtctggcctgacggtgtttggcactgacggtgtggtctggcctcggttttccggtcaagtggactttgtgtgcgtcctattgtaaggtt

SEQ ID NO: 12171 - DNA, 122 bp, Homo sapiens
  misc_feature (61)..(62): /note="This region represents a CpG dinucleotide"
  misc_feature (61)..(61): /note="Nucleotide may be methylated to form 5-methylcytosine"
ttctgtgaatattccagtacaagtttttgcatggacatatgtttttacctctcttggttacgtacctaggattagaattgctgggttacatggtgactcttaagtttaacattttgaggaac

SEQ ID NO: 12172 - DNA, 122 bp, Homo sapiens
  misc_feature (61)..(62): /note="This region represents a CpG dinucleotide"
  misc_feature (61)..(61): /note="Nucleotide may be methylated to form 5-methylcytosine"
aaaacaatatgcattccaagaggaagttagaagctagacacatgtgaatcaaatacatcacggtaagttcaactgaaaataggcaagaaaataaggaagtggaacaaataacatttttagag

SEQ ID NO: 12173 - DNA, 122 bp, Homo sapiens
  misc_feature (61)..(62): /note="This region represents a CpG dinucleotide"
  misc_feature (61)..(61): /note="Nucleotide may be methylated to form 5-methylcytosine"
ccaattgtcatgcctctcgtgggttagttgtaaatggaacacaactctagcatgacattgcgacttaaaagagcatatccagtatttcgatgatcattctggaaatatatttcctcttcaaa

SEQ ID NO: 12174 - DNA, 122 bp, Homo sapiens
  misc_feature (61)..(62): /note="This region represents a CpG dinucleotide"
  misc_feature (61)..(61): /note="Nucleotide may be methylated to form 5-methylcytosine"
tttccaggacaaaggtcattctttgctaagcccagaatgatccccaggatagttaatcaccgtaagaaggcacagataaaaacttttttctgtgagctactacttacatttcaccaaattca

SEQ ID NO: 12175 - DNA, 122 bp, Homo sapiens
  misc_feature (61)..(62): /note="This region represents a CpG dinucleotide"
  misc_feature (61)..(61): /note="Nucleotide may be methylated to form 5-methylcytosine"
ctgtgtctgacttttaatagcagattgtatcgtgatatccttgtctcctgatttcactgtcgtggatcaattctaaaacatcctaatagcattgatagttttttgttaatttattaagatct

SEQ ID NO: 12176 - DNA, 122 bp, Homo sapiens
  misc_feature (61)..(62): /note="This region represents a CpG dinucleotide"
  misc_feature (61)..(61): /note="Nucleotide may be methylated to form 5-methylcytosine"
aacatggtgagactccatctctacccaaaatacaaaaaataagctgggtgtggtggttcgcgcccgtagtcccagctactggggaggctgaggcaggattgcttgagccccagaaccagagg

SEQ ID NO: 12177 - DNA, 122 bp, Homo sapiens
  misc_feature (61)..(62): /note="This region represents a CpG dinucleotide"
  misc_feature (61)..(61): /note="Nucleotide may be methylated to form 5-methylcytosine"
caatttaagctctgagcagctggtagccagaaaccaggcaacgtcaaagacaggcacatgcgtgttctctctttagccatgggctctcccggcacatgtgtgcgaggccgcaagactgtttc

SEQ ID NO: 12178 - DNA, 122 bp, Homo sapiens
  misc_feature (61)..(62): /note="This region represents a CpG dinucleotide"
  misc_feature (61)..(61): /note="Nucleotide may be methylated to form 5-methylcytosine"
tgcgagagaggaagtctttcccacagtgcagctgagtggtggagccaggtcttgcttgtgcgtgtgcatcctgtctccctcctctgtgttattctgcttagtcacacacctagtgtcagcct

SEQ ID NO: 12179 - DNA, 122 bp, Homo sapiens
  misc_feature (61)..(62): /note="This region represents a CpG dinucleotide"
  misc_feature (61)..(61): /note="Nucleotide may be methylated to form 5-methylcytosine"
cactgtcagggttcccctagttcatgaacaatgtcaataaggtagaatgctctggaagaacgggaccaggtatgaagttgggagtcagggagggaggacagatgaagagaggaaccaaagac

SEQ ID NO: 12180 - DNA, 122 bp, Homo sapiens
  misc_feature (61)..(62): /note="This region represents a CpG dinucleotide"
  misc_feature (61)..(61): /note="Nucleotide may be methylated to form 5-methylcytosine"
cctctgtgcggatcttggcctagaggtcagtcatctgtccgttcctgactctgctggtgacgtgatcactgtagaatggtgtcatctcataccccaaaagcataagcacttctgacctttaa

SEQ ID NO: 12181 - DNA, 122 bp, Homo sapiens
  misc_feature (61)..(62): /note="This region represents a CpG dinucleotide"
  misc_feature (61)..(61): /note="Nucleotide may be methylated to form 5-methylcytosine"
aactcgggtcttcagcacatggtggggagcagcagcagatctagtcaaacctgcagctaacgtatgtgacactgtgtgctgcacagtaggcgaccagggaagctttcgttttcatcttctta

SEQ ID NO: 12182 - DNA, 122 bp, Homo sapiens
  misc_feature (61)..(62): /note="This region represents a CpG dinucleotide"
  misc_feature (61)..(61): /note="Nucleotide may be methylated to form 5-methylcytosine"
gacagtgaagtaaaatggcctgctcatacattactaacaagaatataggccaggcacggtcgctcacgcctgtaatcccagtactttgggaggccgaggcgggtggatcatctgaggtcagg

SEQ ID NO: 12183 - DNA, 122 bp, Homo sapiens
  misc_feature (61)..(62): /note="This region represents a CpG dinucleotide"
  misc_feature (61)..(61): /note="Nucleotide may be methylated to form 5-methylcytosine"
atacagaaatcggtgctgctcccaacagcagatcaaggcagtcgtcaggaactcaggatccggggtgagtgtcctcatcttgccttggggatgggtggcccaggtctttggcagaagtcaca

SEQ ID NO: 12184 - DNA, 122 bp, Homo sapiens
  misc_feature (61)..(62): /note="This region represents a CpG dinucleotide"
  misc_feature (61)..(61): /note="Nucleotide may be methylated to form 5-methylcytosine"
tggccaggaacctgttttttaaccctgggcccttaacagaggctgtgtagaaatggggggcgtcacaggccaagggcttagtccacttcagtccagcatccatggggaagcctggttgcagg

SEQ ID NO: 12185 - DNA, 122 bp, Homo sapiens
  misc_feature (61)..(62): /note="This region represents a CpG dinucleotide"
  misc_feature (61)..(61): /note="Nucleotide may be methylated to form 5-methylcytosine"
tcttaagaaaaaagccacaacttttgcttatcaccagcacacaatataagaattgaaatacgtgttaagatcactatcttctgatgtatgagttcaagtaaatacacagcattataaggaat

SEQ ID NO: 12186 - DNA, 122 bp, Homo sapiens
  misc_feature (61)..(62): /note="This region represents a CpG dinucleotide"
  misc_feature (61)..(61): /note="Nucleotide may be methylated to form 5-methylcytosine"
tcttcaactttctcagcattctcagcagcagttttatatctcagaacctgtccctcaagccggctaatctgtaagtatgagaacataggcctctagtactgggcactagaagtcaccacttt

SEQ ID NO: 12187 - DNA, 122 bp, Homo sapiens
  misc_feature (61)..(62): /note="This region represents a CpG dinucleotide"
  misc_feature (61)..(61): /note="Nucleotide may be methylated to form 5-methylcytosine"
cccccggaacccccccgtgcgatccttccaatccagggcagcctcactgtcctggacgcccggccactgcatcctctgcccttgtgtgacctcctgcaagaaggcgggagcacgccgttccc

SEQ ID NO: 12188 - DNA, 122 bp, Homo sapiens
  misc_feature (61)..(62): /note="This region represents a CpG dinucleotide"
  misc_feature (61)..(61): /note="Nucleotide may be methylated to form 5-methylcytosine"
ttcaggccacggtccaggggtatcagccaagtggcaagcacatgatcagtcacagggccacgaaaattgctttgcttcatggatggctttattttagggtcttgcaaagcagattcataatt

SEQ ID NO: 12189 - DNA, 122 bp, Homo sapiens
  misc_feature (61)..(62): /note="This region represents a CpG dinucleotide"
  misc_feature (61)..(61): /note="Nucleotide may be methylated to form 5-methylcytosine"
agcaagtgctgctatagaagctgcagccagttatctggaagatttaactaagatcactgacgaacatggctacactaaactgtagcacataccactgcacctgggagcatttttatttttaa

SEQ ID NO: 12190 - DNA, 122 bp, Homo sapiens
  misc_feature (61)..(62): /note="This region represents a CpG dinucleotide"
  misc_feature (61)..(61): /note="Nucleotide may be methylated to form 5-methylcytosine"
ggcatctgttgctcttataaggtcacttcctttcttggtcacctcttaggcagaggtggccgctcccattctcttgccccataactcacttgtcatagagcctgcttatctgatacatgttg

SEQ ID NO: 12191 - DNA, 122 bp, Homo sapiens
  misc_feature (61)..(62): /note="This region represents a CpG dinucleotide"
  misc_feature (61)..(61): /note="Nucleotide may be methylated to form 5-methylcytosine"
aggatgttgacaggactggtatcacaagatacaggtcacaaagacgctgctgataaaacacgatgcagtaaagaagaaagccaaaacccactgaaaccaagagggcaacagaagtgatctct

SEQ ID NO: 12192 - DNA, 122 bp, Homo sapiens
  misc_feature (61)..(62): /note="This region represents a CpG dinucleotide"
  misc_feature (61)..(61): /note="Nucleotide may be methylated to form 5-methylcytosine"
ccaaccaacccaatgcctcccttcctcccaagacccttcctcccaactctgaataaactccgcaagttcaacattagtgggtgaggagcagagcacctggacagacctgcacaggaaggagc

SEQ ID NO: 12193 - DNA, 122 bp, Homo sapiens
  misc_feature (61)..(62): /note="This region represents a CpG dinucleotide"
  misc_feature (61)..(61): /note="Nucleotide may be methylated to form 5-methylcytosine"
tgcgtggtccagtacacaatgaatgctcattttgtgaagtcacagggtcaaatctttctccgtgcctcatcccacttaatccttgcaacattctcaagaggcgggtagacggggtgtggcca

SEQ ID NO: 12194 - DNA, 122 bp, Homo sapiens
  misc_feature (61)..(62): /note="This region represents a CpG dinucleotide"
  misc_feature (61)..(61): /note="Nucleotide may be methylated to form 5-methylcytosine"
aaaggagtgagaacattcagatatccttcaaatggaaagggacaatagtgaattcctgatcgggcaatctggggctggcttagaaagcttctaaagcactcctgctctctataccaacctga

SEQ ID NO: 12195 - DNA, 122 bp, Homo sapiens
  misc_feature (61)..(62): /note="This region represents a CpG dinucleotide"
  misc_feature (61)..(61): /note="Nucleotide may be methylated to form 5-methylcytosine"
tacctctcgaggggttgtgaggattaaatgaaatgatattatatgagatatgacttagtacggtgagtaatctcttctaatgtattggttacataaatccagatttctatggatcagatgtt

SEQ ID NO: 12196 - DNA, 122 bp, Homo sapiens
  misc_feature (61)..(62): /note="This region represents a CpG dinucleotide"
  misc_feature (61)..(61): /note="Nucleotide may be methylated to form 5-methylcytosine"
ggctttaaaacttaaattagtttcccatgaataaaaccaatcaatcattttaaagaccttcggcattcaacatttcatgctgcctgtccagcctcatttctgcaactccctcaaacataccc

SEQ ID NO: 12197 - DNA, 122 bp, Homo sapiens
  misc_feature (61)..(62): /note="This region represents a CpG dinucleotide"
  misc_feature (61)..(61): /note="Nucleotide may be methylated to form 5-methylcytosine"
acagcacaccaactcaaacctcattcattcattcattcattcatgtgtccttttaacagacgtctactagacaccttgtgtgtccatgaaccaaataccatgcttaagaccaaggattcaga

SEQ ID NO: 12198 - DNA, 122 bp, Homo sapiens
  misc_feature (61)..(62): /note="This region represents a CpG dinucleotide"
  misc_feature (61)..(61): /note="Nucleotide may be methylated to form 5-methylcytosine"
ttgggtctgcaagtgtatccagagccagtgagtcagcactgccatgagctcctgggcttccggttcattgggtttgaatgttgggccctctaatttaggtttgcctcttgttcttgccagga

SEQ ID NO: 12199 - DNA, 122 bp, Homo sapiens
  misc_feature (61)..(62): /note="This region represents a CpG dinucleotide"
  misc_feature (61)..(61): /note="Nucleotide may be methylated to form 5-methylcytosine"
caagcaaaaaacagcaggataaagaaagctggaggcaaaagacaaagccaatgcaatccacgcttgtttttcgagtggcactgactcatgtgagacacccactgctaggacacctgacttca

SEQ ID NO: 12200 - DNA, 122 bp, Homo sapiens
  misc_feature (61)..(62): /note="This region represents a CpG dinucleotide"
  misc_feature (61)..(61): /note="Nucleotide may be methylated to form 5-methylcytosine"
ttccagagtgtaccggaagccgctacctcccggggccagtgagctgtccgaggtgctgaccgggtgcgggcatcgcctcaccgactctgagaactagcttctagggaacaggggtggagtga

SEQ ID NO: 12201 - DNA, 122 bp, Homo sapiens
  misc_feature (61)..(62): /note="This region represents a CpG dinucleotide"
  misc_feature (61)..(61): /note="Nucleotide may be methylated to form 5-methylcytosine"
ttactttgctcttatggctacccagtctgattccacatgccctcttttggccaaaccatccgcaatttgtgctctccctgtcttctatctttgccttccttcttctttcttagatatttaat

SEQ ID NO: 12202 - DNA, 122 bp, Homo sapiens
  misc_feature (61)..(62): /note="This region represents a CpG dinucleotide"
  misc_feature (61)..(61): /note="Nucleotide may be methylated to form 5-methylcytosine"
ttcctattttggatttcagctcagcaaaggctttcctgaattaatcactgaagaagcacacggcaccatatttccttcatctggtcactgcagaaagcaaaaatgtttataccagatggtgc

SEQ ID NO: 12203 - DNA, 122 bp, Homo sapiens
  misc_feature (61)..(62): /note="This region represents a CpG dinucleotide"
  misc_feature (61)..(61): /note="Nucleotide may be methylated to form 5-methylcytosine"
tgagggacagcacgtggctgctgtgggcgcctgccctgtcttgtcctgccatgtatgaaacggatcaatcggaaagtgctctgcaagagggcacatcgacgttttggtcatctggttgccgg

SEQ ID NO: 12204 - DNA, 122 bp, Homo sapiens
  misc_feature (61)..(62): /note="This region represents a CpG dinucleotide"
  misc_feature (61)..(61): /note="Nucleotide may be methylated to form 5-methylcytosine"
tgagccgtgtagatgtacagctgaaaaaacgctttctaaaatcattaccagtccaggcaccggtggcttatgcctgtaatcccagtgcaggaggatcagttgaggccaggagcctgaggcca

SEQ ID NO: 12205 - DNA, 122 bp, Homo sapiens
  misc_feature (61)..(62): /note="This region represents a CpG dinucleotide"
  misc_feature (61)..(61): /note="Nucleotide may be methylated to form 5-methylcytosine"
aatgctgaacatatgtgcagagtttgtgtgttcttgatcgggaacgggaggcccaggacacgttttctgtggcagctcgaatgcagctgagggcgcttgcgggccagagcgaccagtcccct

SEQ ID NO: 12206 - DNA, 122 bp, Homo sapiens
  misc_feature (61)..(62): /note="This region represents a CpG dinucleotide"
  misc_feature (61)..(61): /note="Nucleotide may be methylated to form 5-methylcytosine"
cttgtagttctctctttctgacatatttttccttgttacttttgtctgtctgtctcctttcgttatccagatctcaagcttaaatattacatctttagaaaggtcttccctaaccacccaat

SEQ ID NO: 12207 - DNA, 122 bp, Homo sapiens
  misc_feature (61)..(62): /note="This region represents a CpG dinucleotide"
  misc_feature (61)..(61): /note="Nucleotide may be methylated to form 5-methylcytosine"
gatgagtcttttacatcttttaacttcaggaaaacagccatggtggttctgccagcaagtcgttgaatggattaagtgagataatcatacaatgtgtttagcactgtgcctggcatgtaata

SEQ ID NO: 12208 - DNA, 122 bp, Homo sapiens
  misc_feature (61)..(62): /note="This region represents a CpG dinucleotide"
  misc_feature (61)..(61): /note="Nucleotide may be methylated to form 5-methylcytosine"
ttcccttcctgaagaactagtccaaaagtcattatgaaaccaactttgcaaaattatgaccgtgaaagaaatcagacctaaccgaccctatcttgcttctaacccttaagctgccctggttc

SEQ ID NO: 12209 - DNA, 122 bp, Homo sapiens
  misc_feature (61)..(62): /note="This region represents a CpG dinucleotide"
  misc_feature (61)..(61): /note="Nucleotide may be methylated to form 5-methylcytosine"
catgggacagggttcagagccgctggactgcctggcagggcttgcgcacgtttgagagcacggtgctcccgtttccatcccagctgcagtcctcatcctcttgactgtggcttctttccctc

SEQ ID NO: 12210 - DNA, 122 bp, Homo sapiens
  misc_feature (61)..(62): /note="This region represents a CpG dinucleotide"
  misc_feature (61)..(61): /note="Nucleotide may be methylated to form 5-methylcytosine"
gaaggatcaggggcagagccggcttcatggacaggaaacctgggccctgtgttttcatcccgggccctgtaaactctgcagccagccgggatgagtagctttctctgtaaagtacccatgcc

SEQ ID NO: 12211 - DNA, 122 bp, Homo sapiens
  misc_feature (61)..(62): /note="This region represents a CpG dinucleotide"
  misc_feature (61)..(61): /note="Nucleotide may be methylated to form 5-methylcytosine"
aaggtcagagtctggttccaggcttgactaatgttaggtaagtcatttcccttctctggccgtcagcttccacatctttaaaataatggggctaaactagacaagcagagtggtgctgtagg

SEQ ID NO: 12212 - DNA, 122 bp, Homo sapiens
  misc_feature (61)..(62): /note="This region represents a CpG dinucleotide"
  misc_feature (61)..(61): /note="Nucleotide may be methylated to form 5-methylcytosine"
tttacagaggcaatagaacttaaccttataacaaataatctcaaatttgagtccccctcacgtgcacataaagtaggattgccagcaatggactgataattacaaacttccactgtgacaaa

SEQ ID NO: 12213 - DNA, 122 bp, Homo sapiens
  misc_feature (61)..(62): /note="This region represents a CpG dinucleotide"
  misc_feature (61)..(61): /note="Nucleotide may be methylated to form 5-methylcytosine"
tgttgaatacctgcatgggactctgagtcttggtgttcgaagagggaaaatggaaatactcggccctacattgcctaagcccctcactagggagagctgtaagctcttgggaagggcttgcc

SEQ ID NO: 12214 - DNA, 122 bp, Homo sapiens
  misc_feature (61)..(62): /note="This region represents a CpG dinucleotide"
  misc_feature (61)..(61): /note="Nucleotide may be methylated to form 5-methylcytosine"
ttggagacaaaaatagaatatgacacagatgtcaaactcctcactcatctccaattttaccgtgtttcatgccccaggacataaaaacctctcaggaacaaaataagcgagtattttagatt

SEQ ID NO: 12215 - DNA, 122 bp, Homo sapiens
  misc_feature (61)..(62): /note="This region represents a CpG dinucleotide"
  misc_feature (61)..(61): /note="Nucleotide may be methylated to form 5-methylcytosine"
accccctctctgctggccgagagctttcttcttttccctccaacctcatctttgtgtccacgctccttaatgttcttggaggtaggacgaagaactctgggttttatctcaggcgagagact

SEQ ID NO: 12216 - DNA, 122 bp, Homo sapiens
  misc_feature (61)..(62): /note="This region represents a CpG dinucleotide"
  misc_feature (61)..(61): /note="Nucleotide may be methylated to form 5-methylcytosine"
acgagaaatgaaagagggcaggctccagcgagagccaggatagccttctcagcccgccttcgtcttaccctacaccacctagggcaataaatcacagggctttaaggtctaggcagcaagtc

SEQ ID NO: 12217 - DNA, 122 bp, Homo sapiens
  misc_feature (61)..(62): /note="This region represents a CpG dinucleotide"
  misc_feature (61)..(61): /note="Nucleotide may be methylated to form 5-methylcytosine"
aagttgctagccaatcgggacaaatacagaatgtgaggtcctgttctagccaatggaaaccggacacagcagtaaggtggtaaggtggacgcatcaagttataaatgaccctgtctcctttg

SEQ ID NO: 12218 - DNA, 122 bp, Homo sapiens
  misc_feature (61)..(62): /note="This region represents a CpG dinucleotide"
  misc_feature (61)..(61): /note="Nucleotide may be methylated to form 5-methylcytosine"
tctatctttggtcaacatctatctgactaaaagctagttctgaagtatgtaaacatcagccgtctctgcttctgaactgggcagctgaagcctgctggaaaaaaaaatgtagatagattgtt

SEQ ID NO: 12219 - DNA, 122 bp, Homo sapiens
  misc_feature (61)..(62): /note="This region represents a CpG dinucleotide"
  misc_feature (61)..(61): /note="Nucleotide may be methylated to form 5-methylcytosine"
actttccacaacccctgcccactcaatgatgaggcaagaaggcatgcttcctccaagactcgggactggggtggaaagcaagactttgccttgaaagctcagaagctatagtctgaacccag

SEQ ID NO: 12220 - DNA, 122 bp, Homo sapiens
  misc_feature (61)..(62): /note="This region represents a CpG dinucleotide"
  misc_feature (61)..(61): /note="Nucleotide may be methylated to form 5-methylcytosine"
taacatatccatataatggaatatattactctgcaataacaaggaaagaactatgatagacgcaacaatatgaacgaatcttgaaatcattaggctgagggggaaaagtcagaggtaagagt

SEQ ID NO: 12221 - DNA, 122 bp, Homo sapiens
  misc_feature (61)..(62): /note="This region represents a CpG dinucleotide"
  misc_feature (61)..(61): /note="Nucleotide may be methylated to form 5-methylcytosine"
gaccttgttgtgttaccaatgtgtcactgaatcctaattcaatgcttcaagcgtggtaaacgttaatgaatgaataaggtttttgaaaagcaggaacattgtgttgaccttactcatagtat

SEQ ID NO: 12222 - DNA, 122 bp, Homo sapiens
  misc_feature (61)..(62): /note="This region represents a CpG dinucleotide"
  misc_feature (61)..(61): /note="Nucleotide may be methylated to form 5-methylcytosine"
tggctaatttggaccagtggcaagcagaagcaactaattgagagaaaaaaggcagagaaacgtaggcagagaggtcttttgatcccaggaattagtttctcttgaatacagcctcttcctgt

SEQ ID NO: 12223 - DNA, 122 bp, Homo sapiens
  misc_feature (61)..(62): /note="This region represents a CpG dinucleotide"
  misc_feature (61)..(61): /note="Nucleotide may be methylated to form 5-methylcytosine"
aagggaagcaacagggctggctcatacacccactttccctttggttgatatcaggttttgcgttagttttgagagtctgttttgccgtagtgcacttccccttgggtttttctgaaatgttt

SEQ ID NO: 12224 - DNA, 122 bp, Homo sapiens
  misc_feature (61)..(62): /note="This region represents a CpG dinucleotide"
  misc_feature (61)..(61): /note="Nucleotide may be methylated to form 5-methylcytosine"
tcctgggctgtggattctagtgcagattctgtggacagacagcctgactcatacccagcccgtccacttacaagctgtgtgactttgcctcagttccttaacctctctgggcctcagtttct

SEQ ID NO: 12225 - DNA, 122 bp, Homo sapiens
  misc_feature (61)..(62): /note="This region represents a CpG dinucleotide"
  misc_feature (61)..(61): /note="Nucleotide may be methylated to form 5-methylcytosine"
aacatatgggaaaatacaagcacaggacactcaggacaatgtgatgtgctgaagacacagcggcaaacaaaagagaccggatgccactgacctgtccaagaagaagaacaggaagtattaca

SEQ ID NO: 12226 - DNA, 122 bp, Homo sapiens
  misc_feature (61)..(62): /note="This region represents a CpG dinucleotide"
  misc_feature (61)..(61): /note="Nucleotide may be methylated to form 5-methylcytosine"
aacccttccagccgtgatgactgtgcctcagcctgccctttgtcctcgcagctgctgtcacgcgtgtgacacaagagaacactgatgcagccctggccatcaatgggcatcaagccaggcac

SEQ ID NO: 12227 - DNA, 122 bp, Homo sapiens
  misc_feature (61)..(62): /note="This region represents a CpG dinucleotide"
  misc_feature (61)..(61): /note="Nucleotide may be methylated to form 5-methylcytosine"
tataaaatactatgcattgttctaggcgttactcagaactaagtttgatgcagcataccacgactgaacttaatgcttctttaaagttgagaatgttctaactcatgaattcacaattttaa

SEQ ID NO: 12228 - DNA, 122 bp, Homo sapiens
  misc_feature (61)..(62): /note="This region represents a CpG dinucleotide"
  misc_feature (61)..(61): /note="Nucleotide may be methylated to form 5-methylcytosine"
gggtagatggcacattgccagcaggtgggcaggcaatccgcatgaaaattcttatcttaacgtttgttttatcactcctaaggacaatggctgcggattgggttccctgggaagccaacttt

SEQ ID NO: 12229 - DNA, 122 bp, Homo sapiens
  misc_feature (61)..(62): /note="This region represents a CpG dinucleotide"
  misc_feature (61)..(61): /note="Nucleotide may be methylated to form 5-methylcytosine"
ggtgtctcctggctcagaccctgatgtggccctgttaccctggtgcccgacggaaataggcggccggcagcctgccagagtggggcagtccagccaagagcaagggtagggtggggtgagga

SEQ ID NO: 12230 - DNA, 122 bp, Homo sapiens
  misc_feature (61)..(62): /note="This region represents a CpG dinucleotide"
  misc_feature (61)..(61): /note="Nucleotide may be methylated to form 5-methylcytosine"
ctgcatgatcttgggcaagtcacttcacttgggtcactgaccctcagtttcttccttcagcgaaatgtgcacgatgataggaactacctcttgggcctttattacaaccaggtccaggcaca

SEQ ID NO: 12231 - DNA, 122 bp, Homo sapiens
  misc_feature (61)..(62): /note="This region represents a CpG dinucleotide"
  misc_feature (61)..(61): /note="Nucleotide may be methylated to form 5-methylcytosine"
ctgttatttccccgtgtgcagctaaaactataatcactctgttctccgacaggatgtttgcgttcaagccaaaactgcctcctctatccaacttgctgcagttcggttcagcacagggcaat

SEQ ID NO: 12232 - DNA, 122 bp, Homo sapiens
  misc_feature (61)..(62): /note="This region represents a CpG dinucleotide"
  misc_feature (61)..(61): /note="Nucleotide may be methylated to form 5-methylcytosine"
aattttgtaaccttccgctcagtttccggtaaccgccattttgtctcctgtaacaatttacgcgccgtgtaactgtgaatctttcaaaggtatgttttactggagtgatttctggttatttc

SEQ ID NO: 12233 - DNA, 122 bp, Homo sapiens
  misc_feature (61)..(62): /note="This region represents a CpG dinucleotide"
  misc_feature (61)..(61): /note="Nucleotide may be methylated to form 5-methylcytosine"
gacatttctgttggacatgaccttaggttgactatcatttcagtcactcacgacactgagcgtctaaagtccacagtccttttttaaaccgtttctactcattcacttgccttacaactcca

SEQ ID NO: 12234 - DNA, 122 bp, Homo sapiens
  misc_feature (61)..(62): /note="This region represents a CpG dinucleotide"
  misc_feature (61)..(61): /note="Nucleotide may be methylated to form 5-methylcytosine"
gtatatagataaatagctctttgaggaagacgcggtcgtaggtgttgcggatcgctgatccgcacgctcctgctactgactcaccgctgttcgccctcgccgaggaaccagtcgctcaggaa

SEQ ID NO: 12235 - DNA, 122 bp, Homo sapiens
  misc_feature (61)..(62): /note="This region represents a CpG dinucleotide"
  misc_feature (61)..(61): /note="Nucleotide may be methylated to form 5-methylcytosine"
catcagaagagacattaacgttcacattcgagtgtcaagtctggatgtctcagcataaaccgtaaatcagtatacaactagaagtaaataaaatgggaaggctagtgtggattgggtatgat

SEQ ID NO: 12236 - DNA, 122 bp, Homo sapiens
  misc_feature (61)..(62): /note="This region represents a CpG dinucleotide"
  misc_feature (61)..(61): /note="Nucleotide may be methylated to form 5-methylcytosine"
agcagtgtagcctcttcaggaagtggtgggagtgaacacttagaagatcagaccactgctcgtaacacattccaagaagaaggtagtgggatgaaaggtgagtgactaaatgagaaaccact

SEQ ID NO: 12237 - DNA, 122 bp, Homo sapiens
  misc_feature (61)..(62): /note="This region represents a CpG dinucleotide"
  misc_feature (61)..(61): /note="Nucleotide may be methylated to form 5-methylcytosine"
gagcattttccctgcagggtctaggcctgaggtcagcttgctgcttctgcagcctgagtgcgtagagggtgacggagaccacaggaagtgtggtggcagcaggagagggcatcggctgtggg

SEQ ID NO: 12238 - DNA, 122 bp, Homo sapiens
  misc_feature (61)..(62): /note="This region represents a CpG dinucleotide"
  misc_feature (61)..(61): /note="Nucleotide may be methylated to form 5-methylcytosine"
ttccacatggtcctccccaattaaaatcttggcagcaacttctaggcttactatctgaggcgttgacaccaaaaacagcatcacaaatttctggctcattacccttaaagacttgtctttgc

SEQ ID NO: 12239 - DNA, 122 bp, Homo sapiens
  misc_feature (61)..(62): /note="This region represents a CpG dinucleotide"
  misc_feature (61)..(61): /note="Nucleotide may be methylated to form 5-methylcytosine"
acttacacaaacctagatggtacagccaactacacacgtagcctatatggtatagcctatcgctcctaggttacaaacctgcacagcatgttcatttactgaatactgtaggcaattacagc

SEQ ID NO: 12240 - DNA, 122 bp, Homo sapiens
  misc_feature (61)..(62): /note="This region represents a CpG dinucleotide"
  misc_feature (61)..(61): /note="Nucleotide may be methylated to form 5-methylcytosine"
atccatcacttaacttctgtgcaaatataaccaccctttttaatggagatgttttgaaagcgttgagtgtttagagtagaacaaacattagagcacaaatgtcatgatgtttaacttttaca

SEQ ID NO: 12241 - DNA, 122 bp, Homo sapiens
  misc_feature (61)..(62): /note="This region represents a CpG dinucleotide"
  misc_feature (61)..(61): /note="Nucleotide may be methylated to form 5-methylcytosine"
aaagaacagctatttatctggaatatcatcagaggctagctgtgtcagcagaaaagagagcgtggtgaatcacttactggttctcaaaacttctgcccagaaggaagtgacacaagttattt

SEQ ID NO: 12242 - DNA, 122 bp, Homo sapiens
  misc_feature (61)..(62): /note="This region represents a CpG dinucleotide"
  misc_feature (61)..(61): /note="Nucleotide may be methylated to form 5-methylcytosine"
ctgggccaaaaccatggagttcccattttgcaaacacaccttggggtctgtaaccaggtgcggctccctgcaggtgccaaccacctgtggtaaaggcatgatgagtccacttcctgtaaggc

SEQ ID NO: 12243 - DNA, 122 bp, Homo sapiens
  misc_feature (61)..(62): /note="This region represents a CpG dinucleotide"
  misc_feature (61)..(61): /note="Nucleotide may be methylated to form 5-methylcytosine"
gttctttgtgagagaggaaactcgcttatgaataacaggactggacgccgtaaaagttggcggctggaattcttgtttctcaggcgccgctgttttctcttgactttttatctctggttttt

SEQ ID NO: 12244 - DNA, 122 bp, Homo sapiens
  misc_feature (61)..(62): /note="This region represents a CpG dinucleotide"
  misc_feature (61)..(61): /note="Nucleotide may be methylated to form 5-methylcytosine"
actgaattcgaaagtaacgcaagtgcagtcccacatgccaagccctgatcgaaatgagaacgtttaggatgtgggagattaacattgttaataaagcatgatctacggcccatggtactgat

SEQ ID NO: 12245 - DNA, 122 bp, Homo sapiens
  misc_feature (61)..(62): /note="This region represents a CpG dinucleotide"
  misc_feature (61)..(61): /note="Nucleotide may be methylated to form 5-methylcytosine"
aaatccatactagatccatagataagtgcccctgggagatgaagtcacacaagccagtaacgtccaacagggacacaagttggcagacacggcaaatagcaggattcaaccctaagactgca

SEQ ID NO: 12246 - DNA, 122 bp, Homo sapiens
  misc_feature (61)..(62): /note="This region represents a CpG dinucleotide"
  misc_feature (61)..(61): /note="Nucleotide may be methylated to form 5-methylcytosine"
aaactgctcccctgcacctcagctttacttgcccttgtcttatgtggcttccctttgaaacgggtcgctctcatcacagcacgtagcatgctgccagccgccacatggctatttggcagcta

SEQ ID NO: 12247 - DNA, 122 bp, Homo sapiens
  misc_feature (61)..(62): /note="This region represents a CpG dinucleotide"
  misc_feature (61)..(61): /note="Nucleotide may be methylated to form 5-methylcytosine"
gaagaactcagtggagaattctaaagcatggggtccacctgaagagtcccagactgatgccgtctcttctacagccactggtgtcattgttaatcttgtccagtcacatgtcaatgtaactc

SEQ ID NO: 12248 - DNA, 122 bp, Homo sapiens
  misc_feature (61)..(62): /note="This region represents a CpG dinucleotide"
  misc_feature (61)..(61): /note="Nucleotide may be methylated to form 5-methylcytosine"
cctccgacagcgccgcattcctgggccttgggaggaggctctgagtagggccgcctggggcgcgtcttcagggtcctcccggcactggggtgaccgccgagctagacgcgcctgagggctga

SEQ ID NO: 12249 - DNA, 122 bp, Homo sapiens
  misc_feature (61)..(62): /note="This region represents a CpG dinucleotide"
  misc_feature (61)..(61): /note="Nucleotide may be methylated to form 5-methylcytosine"
ttacacttttaggctattgagagtgaaaacaagcactgacatgaacacccaaccagctgccggtgacatcgtccccttctgagatctgaggacatggatacccaaccacctgccggtgacat

SEQ ID NO: 12250 - DNA, 122 bp, Homo sapiens
  misc_feature (61)..(62): /note="This region represents a CpG dinucleotide"
  misc_feature (61)..(61): /note="Nucleotide may be methylated to form 5-methylcytosine"
tcagcctgggcccttggacaccttggccagggtgagctaaacagatgtggctggcagccacgaagagaatggcagatcactagatatggaaaggacctcgactctctgtgtttttcgatgtt

SEQ ID NO: 12251 - DNA, 122 bp, Homo sapiens
  misc_feature (61)..(62): /note="This region represents a CpG dinucleotide"
  misc_feature (61)..(61): /note="Nucleotide may be methylated to form 5-methylcytosine"
cgtggggcgcggagaaggggaggggaggcgcgcaggcagagaacagcatgtacgaggccccgcatcaggaaggcgcttggcacgttccaggaacagtgagaagccaggaaagcccaagtgta

SEQ ID NO: 12252 - DNA, 122 bp, Homo sapiens
  misc_feature (61)..(62): /note="This region represents a CpG dinucleotide"
  misc_feature (61)..(61): /note="Nucleotide may be methylated to form 5-methylcytosine"
tccagaggaatcctttttcttccgtctgagttcagcaaacttcctgcttcctctacccagcgcagcgagcccctctctgtactgatcagcaagggtgacagggcttggcagccatggtggca

SEQ ID NO: 12253 - DNA, 122 bp, Homo sapiens
  misc_feature (61)..(62): /note="This region represents a CpG dinucleotide"
  misc_feature (61)..(61): /note="Nucleotide may be methylated to form 5-methylcytosine"
tccttaaggccttcattctttaaacaaacaggttgaaatggtatgttgtaaaagagaagacgggagagaggtatttagatgataagtgtacttcacaaaaatgccaaagtttgaaaaatagg

SEQ ID NO: 12254 - DNA, 122 bp, Homo sapiens
  misc_feature (61)..(62): /note="This region represents a CpG dinucleotide"
  misc_feature (61)..(61): /note="Nucleotide may be methylated to form 5-methylcytosine"
aggaaatgtccactcctttgggggtgatttttctcctcaagttgtagccaacattttgtccgtaactgatttcagggcaaacatttctgacatcttcctccagctcagtctgccatgccttg

SEQ ID NO: 12255 - DNA, 122 bp, Homo sapiens
  misc_feature (61)..(62): /note="This region represents a CpG dinucleotide"
  misc_feature (61)..(61): /note="Nucleotide may be methylated to form 5-methylcytosine"
atgaatacctgaaactaaaagtcagaaaccaatccaaatcagtcagtgtccgcacagaaacggaccatttgagtgtttcaaaaagaattcagttcagggaattggtcatacaggggatggaa

SEQ ID NO: 12256 - DNA, 122 bp, Homo sapiens
  misc_feature (61)..(62): /note="This region represents a CpG dinucleotide"
  misc_feature (61)..(61): /note="Nucleotide may be methylated to form 5-methylcytosine"
actggatctttttttactgggagactctgttgagagccagcctcaggcaatgggctgatccgtgaagtgaacagtggcctgagctccctgataaaccctgtaggaaaggatgaagataggca

SEQ ID NO: 12257 - DNA, 122 bp, Homo sapiens
  misc_feature (61)..(62): /note="This region represents a CpG dinucleotide"
  misc_feature (61)..(61): /note="Nucleotide may be methylated to form 5-methylcytosine"
gagggtgagttaccctgtgccaacaacagcggggtgagctaaggtgcttgagggtagagacgcagtcaagcctctcaagcaaaaaatgcagcagctaatttcagagtgggaaatgcccctct

SEQ ID NO: 12258 - DNA, 122 bp, Homo sapiens
  misc_feature (61)..(62): /note="This region represents a CpG dinucleotide"
  misc_feature (61)..(61): /note="Nucleotide may be methylated to form 5-methylcytosine"
cactcccccaaatacccacaaatctagctgtcttacttgttcaaagctctgctgaaacatcgtcttatcagataggtctttcctgaccagtttatccaaataatagttccaccccatcactc

SEQ ID NO: 12259 - DNA, 122 bp, Homo sapiens
  misc_feature (61)..(62): /note="This region represents a CpG dinucleotide"
  misc_feature (61)..(61): /note="Nucleotide may be methylated to form 5-methylcytosine"
agttctacgtaggatagatagtcagcacactccaccctgtttttcccagggccgcaactacgaacctcagaaagaatgcttggagcagctatacgaggactctgaaaagtaaacaggagcag

SEQ ID NO: 12260 - DNA, 122 bp, Homo sapiens
  misc_feature (61)..(62): /note="This region represents a CpG dinucleotide"
  misc_feature (61)..(61): /note="Nucleotide may be methylated to form 5-methylcytosine"
gattactgatgacagcacaataagagattaagtgttaacagcattaaaatgtcaaagatgcggaacagacagtacagtgtactaaaaaattaacgacattttgggggaggctaagaaaaagg

SEQ ID NO: 12261 - DNA, 122 bp, Homo sapiens
  misc_feature (61)..(62): /note="This region represents a CpG dinucleotide"
  misc_feature (61)..(61): /note="Nucleotide may be methylated to form 5-methylcytosine"
tctctcacagaaggctagaggtgaaggaacattcagacacattggtttctaagaagagtccgctgacaacatacccaaggtgtcttctgaaaattataagaaatcctgagtttctgttaggg

SEQ ID NO: 12262 - DNA, 122 bp, Homo sapiens
  misc_feature (61)..(62): /note="This region represents a CpG dinucleotide"
  misc_feature (61)..(61): /note="Nucleotide may be methylated to form 5-methylcytosine"
tggcaactgttaattaattggatgatgatgaagtggaggaagaaaaaaagccaaccagaacggatacaactctagaggaagtcatggtgtgtagtaattatatgaatttcattcagcaaagg

SEQ ID NO: 12263 - DNA, 122 bp, Homo sapiens
  misc_feature (61)..(62): /note="This region represents a CpG dinucleotide"
  misc_feature (61)..(61): /note="Nucleotide may be methylated to form 5-methylcytosine"
agtatatgcagagagcctcagaccatgatgcacgcctgacaattttgcagaaggaaaagacgaaggaaggaggattaggtggaaagaacctaagactacagtgcaggtctgcgaaagtctca

SEQ ID NO: 12264 - DNA, 122 bp, Homo sapiens
  misc_feature (61)..(62): /note="This region represents a CpG dinucleotide"
  misc_feature (61)..(61): /note="Nucleotide may be methylated to form 5-methylcytosine"
agcagggtgttgttatccctggcttgttttcttattagtttatgtggggaatgaagtaaacggaatgtgctagacatacatcctgtaatgaggctattagccatttatgggcacctcctttg

SEQ ID NO: 12265 - DNA, 122 bp, Homo sapiens
  misc_feature (61)..(62): /note="This region represents a CpG dinucleotide"
  misc_feature (61)..(61): /note="Nucleotide may be methylated to form 5-methylcytosine"
ataagaaaatagttgtcaagcagtagaactggtcctgactgaatttattaagtgttacctcgtaatctattccttcctttacaaacttttacattattacactaagaaaatacaggtgtcta

SEQ ID NO: 12266 - DNA, 122 bp, Homo sapiens
  misc_feature (61)..(62): /note="This region represents a CpG dinucleotide"
  misc_feature (61)..(61): /note="Nucleotide may be methylated to form 5-methylcytosine"
aataattatagccatatatcataacatgtcataagtccaggacaaagctcagtagcctttcgtaagcagcagccaacaatgcaagaaaagcaagtgaatgaggtaatggatttcttttccct

SEQ ID NO: 12267 - DNA, 122 bp, Homo sapiens
  misc_feature (61)..(62): /note="This region represents a CpG dinucleotide"
  misc_feature (61)..(61): /note="Nucleotide may be methylated to form 5-methylcytosine"
cttgtccttgtccttgggataacctccttaatgtgcctgacaaagctctgtctctgttggcgtctgctaatttctccagccccatctgttggcactgctccctcagcccatgccaatattat

SEQ ID NO: 12268 - DNA, 122 bp, Homo sapiens
  misc_feature (61)..(62): /note="This region represents a CpG dinucleotide"
  misc_feature (61)..(61): /note="Nucleotide may be methylated to form 5-methylcytosine"
ctcaggtgatccacccgctttggcctcccaaagtgctaggattataggcattagccaccacgcctggctatctctgggtttaagatgcctacttttgttctgcccatctcagccagcaggaa

SEQ ID NO: 12269 - DNA, 122 bp, Homo sapiens
  misc_feature (61)..(62): /note="This region represents a CpG dinucleotide"
  misc_feature (61)..(61): /note="Nucleotide may be methylated to form 5-methylcytosine"
cacttaactttgtgctcagaactgatgctgacttcaagtgtgatctggtcatcaggttgccggtatccaatatgagactttaccaacttagaggcggatgaatcatcagtaccatttcttcc

SEQ ID NO: 12270 - DNA, 122 bp, Homo sapiens
  misc_feature (61)..(62): /note="This region represents a CpG dinucleotide"
  misc_feature (61)..(61): /note="Nucleotide may be methylated to form 5-methylcytosine"
tccagttgcactctgtcttccttccacaggggctcttatgcagaagacggcatatgtgaacgctgtagctctccttgcagaacatgtgaaggaaacgccaccaactgccattcttgtgaagg

SEQ ID NO: 12271 - DNA, 122 bp, Homo sapiens
  misc_feature (61)..(62): /note="This region represents a CpG dinucleotide"
  misc_feature (61)..(61): /note="Nucleotide may be methylated to form 5-methylcytosine"
gaataaataaaactttgcatattgaatgttgaaagctccaggctcttctctaactcagctcgtagaatgctggtcttacatgctgcaggctggagtttggaagactcacctctaggaaatct

SEQ ID NO: 12272 - DNA, 122 bp, Homo sapiens
  misc_feature (61)..(62): /note="This region represents a CpG dinucleotide"
  misc_feature (61)..(61): /note="Nucleotide may be methylated to form 5-methylcytosine"
ggactgccttctcgagactgtgagctgtcagtgactaagggttcatcatttttatgctctcggtacttggcacagagctaaacgaatcaggccttgcattataaagcactgatctatctact

SEQ ID NO: 12273 - DNA, 122 bp, Homo sapiens
  misc_feature (61)..(62): /note="This region represents a CpG dinucleotide"
  misc_feature (61)..(61): /note="Nucleotide may be methylated to form 5-methylcytosine"
gggagctgcagtgccctgaattccccctcttactccaccccctcaatactgacacacagccgacactcaataaaagtttgttgaattgacaaaaataaatttgcggcttcttgcccagtact

SEQ ID NO: 12274 - DNA, 122 bp, Homo sapiens
  misc_feature (61)..(62): /note="This region represents a CpG dinucleotide"
  misc_feature (61)..(61): /note="Nucleotide may be methylated to form 5-methylcytosine"
gcaaacacaatctgcaggtaattaacattattgtttcccattttagggagcagtcatgcacgcagatgatcaaaggttggtttctggacaacataagtaaacaagcctgtttgagataaatt

SEQ ID NO: 12275 - DNA, 122 bp, Homo sapiens
  misc_feature (61)..(62): /note="This region represents a CpG dinucleotide"
  misc_feature (61)..(61): /note="Nucleotide may be methylated to form 5-methylcytosine"
agaatcaacccgtctcctgcatctactccgaagtcaagagcattacaatacaatttacagcgcctttaacaactcgcaagtaaagcattaaaattcgctttaattgagaaaatattgatttt

SEQ ID NO: 12276 - DNA, 122 bp, Homo sapiens
  misc_feature (61)..(62): /note="This region represents a CpG dinucleotide"
  misc_feature (61)..(61): /note="Nucleotide may be methylated to form 5-methylcytosine"
cctccaattcactggaggccaccctgctgtagggctgctgaaacaggcagtgccagggatcgtgtctcagcagtgacgtggctggggtgtatgagctgagccatttcataaccgagttctgc

SEQ ID NO: 12277 - DNA, 122 bp, Homo sapiens
  misc_feature (61)..(62): /note="This region represents a CpG dinucleotide"
  misc_feature (61)..(61): /note="Nucleotide may be methylated to form 5-methylcytosine"
acctcttcaaaaagctatacctgactcaccctagagaatttggttcctctggcgtgtgctcgtgatacttcatttgctggatggaacatgagtgaatggagtggtggcattcctgtcggcct

SEQ ID NO: 12278 - DNA, 122 bp, Homo sapiens
  misc_feature (61)..(62): /note="This region represents a CpG dinucleotide"
  misc_feature (61)..(61): /note="Nucleotide may be methylated to form 5-methylcytosine"
ctagtggcatgaagtacaattacagtgttgtgcaaccatcaccagcatccatcttccaaacgtttcatcttccaaaactgaaacaatatccccattaaacagtaatgtccaaatctcccctc

SEQ ID NO: 12279 - DNA, 122 bp, Homo sapiens
  misc_feature (61)..(62): /note="This region represents a CpG dinucleotide"
  misc_feature (61)..(61): /note="Nucleotide may be methylated to form 5-methylcytosine"
tctctggcattgttccataccattctatgacagccatcagccattcagtcagggtgtggtcgcctcgcccctgtgttaaccgcctgctcacctgcaatcgctgttggagggatgggtcataa

SEQ ID NO: 12280 - DNA, 122 bp, Homo sapiens
  misc_feature (61)..(62): /note="This region represents a CpG dinucleotide"
  misc_feature (61)..(61): /note="Nucleotide may be methylated to form 5-methylcytosine"
aaacttagatggtatagcctactacacatctaggctttattatatagcttattgctcttacgctacaaacctgtatagcatgttactatatttagtactatagacaattgtaacagaatggt

SEQ ID NO: 12281 - DNA, 122 bp, Homo sapiens
  misc_feature (61)..(62): /note="This region represents a CpG dinucleotide"
  misc_feature (61)..(61): /note="Nucleotide may be methylated to form 5-methylcytosine"
aaatatactaattcctctttccctacccactgccaccaacaagcatactctccattgacccgtctgagtgactcacacagtttgctgtgatgcatctggagcttttcagattcctgcctgct

SEQ ID NO: 12282 - DNA, 122 bp, Homo sapiens
  misc_feature (61)..(62): /note="This region represents a CpG dinucleotide"
  misc_feature (61)..(61): /note="Nucleotide may be methylated to form 5-methylcytosine"
acctgctgtaatttcgctgtggttcgtgaggacgcgtcctgggctgccctgagaagcctacgtctccccttcgaggcccgggaagacctccaaccccgctgacaatgctgggccctcagcca

SEQ ID NO: 12283 - DNA, 122 bp, Homo sapiens
  misc_feature (61)..(62): /note="This region represents a CpG dinucleotide"
  misc_feature (61)..(61): /note="Nucleotide may be methylated to form 5-methylcytosine"
tgattttcttattggagcatgttctaaagatcatttgacatgtttttttcaccatagatacgtcttgtgctgctgggagagcttacactatagtctgaacttctacagagccttttcctact

SEQ ID NO: 12284 - DNA, 122 bp, Homo sapiens
  misc_feature (61)..(62): /note="This region represents a CpG dinucleotide"
  misc_feature (61)..(61): /note="Nucleotide may be methylated to form 5-methylcytosine"
tcagcagtaaaccccaggacacaggcagtgaccctagacgagcagggcaggtccaggtgacgggaggcgtgccacgtttctccatcccgaagttcttcttggtttttatcctaagtactgat

SEQ ID NO: 12285 - DNA, 122 bp, Homo sapiens
  misc_feature (61)..(62): /note="This region represents a CpG dinucleotide"
  misc_feature (61)..(61): /note="Nucleotide may be methylated to form 5-methylcytosine"
atgaaatgcaaggaaaggagaaaaacattatgacataagtattaagaaagatgctgtttacgggaactctgaaagactggaattcagagccgctaccaattaagaaagttaatgatgacttg

SEQ ID NO: 12286 - DNA, 122 bp, Homo sapiens
  misc_feature (61)..(62): /note="This region represents a CpG dinucleotide"
  misc_feature (61)..(61): /note="Nucleotide may be methylated to form 5-methylcytosine"
tcctcattaaagcacagatagaatgtgctattcttaagcttgttactcaggtgagaaaaacgagtttcagggaattctcaagatcactcatccaggaagtgatagagccaccaccagaaccc

SEQ ID NO: 12287 - DNA, 122 bp, Homo sapiens
  misc_feature (61)..(62): /note="This region represents a CpG dinucleotide"
  misc_feature (61)..(61): /note="Nucleotide may be methylated to form 5-methylcytosine"
gattcatgcaagatatgagtcaaaacccttcaatggctacacatcacttggactaaaagccgtttccttttcatggcctatgtactcctgaataatctggtcctcggtggacagagccctct

SEQ ID NO: 12288 - DNA, 122 bp, Homo sapiens
  misc_feature (61)..(62): /note="This region represents a CpG dinucleotide"
  misc_feature (61)..(61): /note="Nucleotide may be methylated to form 5-methylcytosine"
gggaaccattggcatactgagggtattcattacagtcttgtggctgaggtcaccacgcagcgaggagggaagggacaaggaagcagcagaggtgtgtgtgagaaggagctgaggaggggcag

SEQ ID NO: 12289 - DNA, 122 bp, Homo sapiens
  misc_feature (61)..(62): /note="This region represents a CpG dinucleotide"
  misc_feature (61)..(61): /note="Nucleotide may be methylated to form 5-methylcytosine"
gggagcacctgtgcagggtggtgcaagggaagcatactcctgtcactcatgtcaggaaggcgacaccttctgctgaggatgtgagtgaaacctagtctttacctacatgcagttcaatggtc

SEQ ID NO: 12290 - DNA, 122 bp, Homo sapiens
  misc_feature (61)..(62): /note="This region represents a CpG dinucleotide"
  misc_feature (61)..(61): /note="Nucleotide may be methylated to form 5-methylcytosine"
atatgaaataaagttttgactgcaacccatgacatgaggtcaggtgcggaattttccactcgtggcatcctgtcagtgctcaaaagtttcccattttagatttggggattagaaatgctcaa

SEQ ID NO: 12291 - DNA, 122 bp, Homo sapiens
  misc_feature (61)..(62): /note="This region represents a CpG dinucleotide"
  misc_feature (61)..(61): /note="Nucleotide may be methylated to form 5-methylcytosine"
gtgtcaaaattaaaccctttcttctgacagaagacctaatacttgaactcagattacagtcgtgtgttgcttaacaacaggcatacattctgagaaatgcatcatcaggcaattttgtcatt

SEQ ID NO: 12292 - DNA, 122 bp, Homo sapiens
  misc_feature (61)..(62): /note="This region represents a CpG dinucleotide"
  misc_feature (61)..(61): /note="Nucleotide may be methylated to form 5-methylcytosine"
ggtattttcaaattaggcaccttctaaatttgactcatacattatggaaatctgatgacacgaggggtggataggcttgctttgattttatgaaatattaatcatagctgtgattaatgatt

SEQ ID NO: 12293 - DNA, 122 bp, Homo sapiens
  misc_feature (61)..(62): /note="This region represents a CpG dinucleotide"
  misc_feature (61)..(61): /note="Nucleotide may be methylated to form 5-methylcytosine"
ccatgttcacagccctaataataattctgatcacgccacttcagcatcttgtgtcaaagtcgaaactggcttccccgcccccttcaatctgaaagctgccaagtcctcacacacttcacatt

SEQ ID NO: 12294 - DNA, 122 bp, Homo sapiens
  misc_feature (61)..(62): /note="This region represents a CpG dinucleotide"
  misc_feature (61)..(61): /note="Nucleotide may be methylated to form 5-methylcytosine"
tgacgatggttggtatgagggagttatgaatggagtgactgggctttttcctgggaattacgttgagtctatcatgcattattctgagtaaagctcagcagggctgtgcttgcctcacagga

SEQ ID NO: 12295 - DNA, 122 bp, Homo sapiens
  misc_feature (61)..(62): /note="This region represents a CpG dinucleotide"
  misc_feature (61)..(61): /note="Nucleotide may be methylated to form 5-methylcytosine"
gcatcaacacatgcctcatgggtgaggtgagccagtattcagggttgaacacgtgttcagcgagtcaaactgcacactgagtcagccatgaaacaagcgtctagataggggatgtggtaagg

SEQ ID NO: 12296 - DNA, 122 bp, Homo sapiens
  misc_feature (61)..(62): /note="This region represents a CpG dinucleotide"
  misc_feature (61)..(61): /note="Nucleotide may be methylated to form 5-methylcytosine"
ctgcaatattggctacacatagctgacttaataaatagtcccttgactggtataagctgacgttacaaaaactggtaattccgaaaccactcatactggacttattaaataatccctcaact

SEQ ID NO: 12297 - DNA, 122 bp, Homo sapiens
  misc_feature (61)..(62): /note="This region represents a CpG dinucleotide"
  misc_feature (61)..(61): /note="Nucleotide may be methylated to form 5-methylcytosine"
gaaagtcgctgccagtggcagctaatgctcaggatgtatcaggtctctttcctggcaacacgtttatgtccttcggactgttaccatgaatggaatctttatcgaaagacttatatcaaggc

SEQ ID NO: 12298 - DNA, 122 bp, Homo sapiens
  misc_feature (61)..(62): /note="This region represents a CpG dinucleotide"
  misc_feature (61)..(61): /note="Nucleotide may be methylated to form 5-methylcytosine"
ctccagcctgggcaacgagagaggaaaaaaaaaaaagctaaggtcacaatgcattacatacggtaccacagtaatcaggtgtttgccttagcagagcagagatattgatctctcctgttcca

SEQ ID NO: 12299 - DNA, 122 bp, Homo sapiens
  misc_feature (61)..(62): /note="This region represents a CpG dinucleotide"
  misc_feature (61)..(61): /note="Nucleotide may be methylated to form 5-methylcytosine"
tttagcaagagaaaaagccagacctttgccctggcccagctcacaggtgatggggttaatcgggaattctttccctcctcagggctgctggtaggggtccagctccccgatgacctggggac

SEQ ID NO: 12300 - DNA, 122 bp, Homo sapiens
  misc_feature (61)..(62): /note="This region represents a CpG dinucleotide"
  misc_feature (61)..(61): /note="Nucleotide may be methylated to form 5-methylcytosine"
catgaggaagccaactttaaccaggcccacatgatgcaacagcaggtgtccctttcactacgccacctgcctttctgaaaaggtagggcacagaacatgatacagctgcaggggccagccct

SEQ ID NO: 12301 - DNA, 122 bp, Homo sapiens
  misc_feature (61)..(62): /note="This region represents a CpG dinucleotide"
  misc_feature (61)..(61): /note="Nucleotide may be methylated to form 5-methylcytosine"
gagatcatatctaaaggaaggcagcagttccaagggaaatggggaaatggctctgggccccggcggatgtcagcaatgggcattgccatccttcccagccagcccacccttggcaagagcag

SEQ ID NO: 12302 - DNA, 122 bp, Homo sapiens
  misc_feature (61)..(62): /note="This region represents a CpG dinucleotide"
  misc_feature (61)..(61): /note="Nucleotide may be methylated to form 5-methylcytosine"
attatttcagctgaccagaatcaaacagaattaaattgtatgtgggatatcttgcatttacgttttgctttattttaaattagttgcacgtgtactagaagcatgggatggaaggaactggc

SEQ ID NO: 12303 - DNA, 122 bp, Homo sapiens
  misc_feature (61)..(62): /note="This region represents a CpG dinucleotide"
  misc_feature (61)..(61): /note="Nucleotide may be methylated to form 5-methylcytosine"
ctttccactccggctgtgaatgactgatgcaaaccacaaatgacgtgtcattgtgcctcacgtaccaagcacagaatgtagcatgtactggtgcttaacaaacattgattattgagttccaa

SEQ ID NO: 12304 - DNA, 122 bp, Homo sapiens
  misc_feature (61)..(62): /note="This region represents a CpG dinucleotide"
  misc_feature (61)..(61): /note="Nucleotide may be methylated to form 5-methylcytosine"
caatgaggcagaatcagttcaaaggtcagtctgacccaaaggattcaaatcccatctgtgcgtcacacaaacaaatcattagcaaactgcatccttctgctctgcagctatccagtcttggc

SEQ ID NO: 12305 - DNA, 122 bp, Homo sapiens
  misc_feature (61)..(62): /note="This region represents a CpG dinucleotide"
  misc_feature (61)..(61): /note="Nucleotide may be methylated to form 5-methylcytosine"
ctcctaacaccatcacattgggagttagatttcatcatatgaattttgtggggacacagacgatcagtccatagcattcagggaacatcaatcaaggcaggaaagcctggaggtgggagcag

SEQ ID NO: 12306 - DNA, 122 bp, Homo sapiens
  misc_feature (61)..(62): /note="This region represents a CpG dinucleotide"
  misc_feature (61)..(61): /note="Nucleotide may be methylated to form 5-methylcytosine"
tgtatgagcccagagaactggctggcagtcactaagcaggctctggacagcatgaagccacgtgagattaatcacggggaggacctggccagccatctactgcaattgagagcacacctgac

SEQ ID NO: 12307 - DNA, 122 bp, Homo sapiens
  misc_feature (61)..(62): /note="This region represents a CpG dinucleotide"
  misc_feature (61)..(61): /note="Nucleotide may be methylated to form 5-methylcytosine"
aatgagttctggtatcagtaagttcagctccctgttctttattttaaagcttaacttcctcgttctcttctctccttgcccctagtttcagtaaacaaactcctcctagcctctatcacctg

SEQ ID NO: 12308 - DNA, 122 bp, Homo sapiens
  misc_feature (61)..(62): /note="This region represents a CpG dinucleotide"
  misc_feature (61)..(61): /note="Nucleotide may be methylated to form 5-methylcytosine"
actgaagaactcggtaaatatgattagcatgcacgcaccaacacatcactgtgatgaaaacgcaaatcacagtatgtgagtcactactctcaacattgccatgcccctgccttaaacctgcc

SEQ ID NO: 12309 - DNA, 122 bp, Homo sapiens
  misc_feature (61)..(62): /note="This region represents a CpG dinucleotide"
  misc_feature (61)..(61): /note="Nucleotide may be methylated to form 5-methylcytosine"
gacccctggtgaagacgctaagaaatgatggtgctctaaaagaagtctctttggctgtttcgtttatcccatcagaaaagaacagagattcaaatcttgctatcaccatattgccttttcat

SEQ ID NO: 12310 - DNA, 122 bp, Homo sapiens
  misc_feature (61)..(62): /note="This region represents a CpG dinucleotide"
  misc_feature (61)..(61): /note="Nucleotide may be methylated to form 5-methylcytosine"
aagcagcttcagagaattatgggctttccacgtttgtgctaatagatccccttgtttgcacgttgcatcagggatgagtcatctaagaacaagctcaaagtttgaacctgtggtttgacaaa

SEQ ID NO: 12311 - DNA, 122 bp, Homo sapiens
  misc_feature (61)..(62): /note="This region represents a CpG dinucleotide"
  misc_feature (61)..(61): /note="Nucleotide may be methylated to form 5-methylcytosine"
aatgaagcagtgcaggttaggggcaagagcatcagcttgggcatcacacaggactgggaacgtgtgggccatgctgctagcacatagttgaatagctgtgggccaattgctggatctctctg

SEQ ID NO: 12312 - DNA, 122 bp, Homo sapiens
  misc_feature (61)..(62): /note="This region represents a CpG dinucleotide"
  misc_feature (61)..(61): /note="Nucleotide may be methylated to form 5-methylcytosine"
agacggcaacattctgagaagagtcaacagtgcccctttgatcaatggacttgggtgagccgggttgagatactggaggaggcaagcggtggggaggaggtgttcgggaaagtgatttccta

SEQ ID NO: 12313 - DNA, 122 bp, Homo sapiens
  misc_feature (61)..(62): /note="This region represents a CpG dinucleotide"
  misc_feature (61)..(61): /note="Nucleotide may be methylated to form 5-methylcytosine"
cttcaccatccctgcagaatctgaggccagaccagaaggtgaggcccacaggcctgggcacgctgagcctcacccttgcgaatgaaaccagatggagagacccaggccaaggcagagagaag

SEQ ID NO: 12314 - DNA, 122 bp, Homo sapiens
  misc_feature (61)..(62): /note="This region represents a CpG dinucleotide"
  misc_feature (61)..(61): /note="Nucleotide may be methylated to form 5-methylcytosine"
tgcaagagccggcaggaaattcccctcctcctgaaccacagagtatttctgggtgggcatcgattgtctatgggccatggcgtaagacccccaccccccgaccccccggcaacaaaagtatc

SEQ ID NO: 12315 - DNA, 122 bp, Homo sapiens
  misc_feature (61)..(62): /note="This region represents a CpG dinucleotide"
  misc_feature (61)..(61): /note="Nucleotide may be methylated to form 5-methylcytosine"
ggggtgaccttggccctttcttcttctggaagacccccccgcttccctcggctgccggaccgggactctgggcctctgctgggaactcacagtcgacaccaggatgcccagagccaggaccc

SEQ ID NO: 12316 - DNA, 122 bp, Homo sapiens
  misc_feature (61)..(62): /note="This region represents a CpG dinucleotide"
  misc_feature (61)..(61): /note="Nucleotide may be methylated to form 5-methylcytosine"
ccaagcaacgtaattcctgttttcatgggtcctgtagatgtttgagtcaggaaggtaaggcggggagtgactgaataaactctgccttttaaattgagcatctgggccgggcatggtggctc

SEQ ID NO: 12317 - DNA, 122 bp, Homo sapiens
  misc_feature (61)..(62): /note="This region represents a CpG dinucleotide"
  misc_feature (61)..(61): /note="Nucleotide may be methylated to form 5-methylcytosine"
tggctgcttttgtcacccttgcatgctggtcactctgccctcagcaggtatggatgatgacgccactcacagattcaaagaaagggcaaactggcagagtgagtcattggatgttgctggca

SEQ ID NO: 12318 - DNA, 122 bp, Homo sapiens
  misc_feature (61)..(62): /note="This region represents a CpG dinucleotide"
  misc_feature (61)..(61): /note="Nucleotide may be methylated to form 5-methylcytosine"
ttagctttaggaacaacaatagcatgagccacccacttattgaggactagaatttctaaacggtaattaaacattttaaataaagaacagtttgatggttaaggagacacccagacattatc

SEQ ID NO: 12319 - DNA, 122 bp, Homo sapiens
  misc_feature (61)..(62): /note="This region represents a CpG dinucleotide"
  misc_feature (61)..(61): /note="Nucleotide may be methylated to form 5-methylcytosine"
gattggagatcctttccttaccctgaatgccacatttctaatcaggatagcctgatagtgcgttaacttttacagggccttgtcacactgagtcattgagcttgtgggcaacccaatccctt

SEQ ID NO: 12320 - DNA, 122 bp, Homo sapiens
  misc_feature (61)..(62): /note="This region represents a CpG dinucleotide"
  misc_feature (61)..(61): /note="Nucleotide may be methylated to form 5-methylcytosine"
ctcagtatcaaaggagaatatcgtccttcatctggtgagcacattagctgatcctgtttacgtttgcttctaagagttggaggcggtccatgtattagactaatccaatcaacaaatattaa

SEQ ID NO: 12321 - DNA, 122 bp, Homo sapiens
  misc_feature (61)..(62): /note="This region represents a CpG dinucleotide"
  misc_feature (61)..(61): /note="Nucleotide may be methylated to form 5-methylcytosine"
ctttcaacaccatcaatgttacaaaatgcctttccccactgactagtgtaggttgttccccgcatcgtaatctcaccacagttcattcagtcacttgctccttcattcattcacacgcgttt

SEQ ID NO: 12322 - DNA, 122 bp, Homo sapiens
  misc_feature (61)..(62): /note="This region represents a CpG dinucleotide"
  misc_feature (61)..(61): /note="Nucleotide may be methylated to form 5-methylcytosine"
gtccacgaagtcaccacctgaaagaaacaagacagcaatagacgtcattcataagcaatacgttttgttttaggagagacttttatggatgtgattaagccctgttaaacatcctatgccac

SEQ ID NO: 12323 - DNA, 122 bp, Homo sapiens
  misc_feature (61)..(62): /note="This region represents a CpG dinucleotide"
  misc_feature (61)..(61): /note="Nucleotide may be methylated to form 5-methylcytosine"
ggccgagtgtctcatttgcttaaggcacaaacttctggtagctctaccccatcctcctaacgtgcatgtgtgcccttggcttgagttactccatattgctttgtaacccttactgcacatgt

SEQ ID NO: 12324 - DNA, 122 bp, Homo sapiens
  misc_feature (61)..(62): /note="This region represents a CpG dinucleotide"
  misc_feature (61)..(61): /note="Nucleotide may be methylated to form 5-methylcytosine"
taaaatgtaagctggattgcgtcattgcctggtccacaatgcccaggtggctctccatttcgctcagaggaaatgcttgagtttcaacaatggcctccagggccctatatcatctgacccca

SEQ ID NO: 12325 - DNA, 122 bp, Homo sapiens
  misc_feature (61)..(62): /note="This region represents a CpG dinucleotide"
  misc_feature (61)..(61): /note="Nucleotide may be methylated to form 5-methylcytosine"
gttgaaactttatttcctccttatgaatcaactatcttattaggagtgattgaaattatacgaagtttgttcttcactggtgtgcaggcttatactgtaattgccttttaagtatttaaagt

SEQ ID NO: 12326 - DNA, 122 bp, Homo sapiens
  misc_feature (61)..(62): /note="This region represents a CpG dinucleotide"
  misc_feature (61)..(61): /note="Nucleotide may be methylated to form 5-methylcytosine"
caactggcagaaatttcaaacaaggggttctgccttgcactccggtgcaagggttgggcacgtggactcacatgtgaccaatcacattgtctttcctgagatcctgcattttgaccagagga

SEQ ID NO: 12327 - DNA, 122 bp, Homo sapiens
  misc_feature (61)..(62): /note="This region represents a CpG dinucleotide"
  misc_feature (61)..(61): /note="Nucleotide may be methylated to form 5-methylcytosine"
ctcaaacaaccctcccaccttggcctctcaaagtgctgggattacaggcatgagtcactacgcccagccacaaattcttgagaagggaggaaatacacaaattgatttaatgtgtgataaaa

SEQ ID NO: 12328 - DNA, 122 bp, Homo sapiens
  misc_feature (61)..(62): /note="This region represents a CpG dinucleotide"
  misc_feature (61)..(61): /note="Nucleotide may be methylated to form 5-methylcytosine"
gctgattagccaccactgtggacctttgcaggtcagggctcttggttgccattgaggcctcgctgcccactgtggtggttccaggcaaccagccatggaagggagccagcctcatgtgattg

SEQ ID NO: 12329 - DNA, 122 bp, Homo sapiens
  misc_feature (61)..(62): /note="This region represents a CpG dinucleotide"
  misc_feature (61)..(61): /note="Nucleotide may be methylated to form 5-methylcytosine"
tcttataaaggcaccagttccattttcatgataacccaataatacattaacccattaatccgttaattcgtaagtggattgattctttcatgagggcagagcccttaaaggcccacttctca

SEQ ID NO: 12330 - DNA, 122 bp, Homo sapiens
  misc_feature (61)..(62): /note="This region represents a CpG dinucleotide"
  misc_feature (61)..(61): /note="Nucleotide may be methylated to form 5-methylcytosine"
tgcttgaggcagaaaaggaagtctctaaaacaacccaaatggttccccagggagctttcccgtgagtgtacactttaaaggtcaggcacataaagttaaatgagcaatagataactaaaaat

SEQ ID NO: 12331 - DNA, 122 bp, Homo sapiens
  misc_feature (61)..(62): /note="This region represents a CpG dinucleotide"
  misc_feature (61)..(61): /note="Nucleotide may be methylated to form 5-methylcytosine"
gaggaaggaggctgccagcttcctgggtgcacaaggccgtggccagcttccgggctcagtcgtggacaaaggcctcctgggacagagaagtggcctctaagcaaaggcggtggtgtgacgct

SEQ ID NO: 12332 - DNA, 122 bp, Homo sapiens
  misc_feature (61)..(62): /note="This region represents a CpG dinucleotide"
  misc_feature (61)..(61): /note="Nucleotide may be methylated to form 5-methylcytosine"
ttaaattcttgtttacaattctctttactacttcgaggcctctagttttgatcaaatccccgctagtttccttgtcttcaaacccagggggaaatgatttgcaacagatgatgtgtataggg

SEQ ID NO: 12333 - DNA, 122 bp, Homo sapiens
  misc_feature (61)..(62): /note="This region represents a CpG dinucleotide"
  misc_feature (61)..(61): /note="Nucleotide may be methylated to form 5-methylcytosine"
taacatccaacaccgggtactacgctagattttgagaatactaaaatgaaaaagactgcacgactgtggaaccacatctcctggatttcaatcctgtgactctgtgcctcagtttccccgta

SEQ ID NO: 12334 - DNA, 122 bp, Homo sapiens
  misc_feature (61)..(62): /note="This region represents a CpG dinucleotide"
  misc_feature (61)..(61): /note="Nucleotide may be methylated to form 5-methylcytosine"
caggccctgattgctatggtcaggccggccactaaccaggctgcctccattccagctccacgtcccacacccaagggcccagctggcaatgctccatgaggcatgaccaggccatgcggggt

SEQ ID NO: 12335 - DNA, 122 bp, Homo sapiens
  misc_feature (61)..(62): /note="This region represents a CpG dinucleotide"
  misc_feature (61)..(61): /note="Nucleotide may be methylated to form 5-methylcytosine"
ccattaatgattcaccacctgttgcaagttcaataagttatccacacaccaaattgtggtcgcagaattcagtgagataaactaagttagaaagatttggggtgaataaatgtttgctaaat

SEQ ID NO: 12336 - DNA, 122 bp, Homo sapiens
  misc_feature (61)..(62): /note="This region represents a CpG dinucleotide"
  misc_feature (61)..(61): /note="Nucleotide may be methylated to form 5-methylcytosine"
cccagcgtgggatgacattttgttttttctcatttcattacttttcttccctatccctctcgttaagaactggcattaaatgctctgtggggtttgatcagaaatacacagagaatttagac

SEQ ID NO: 12337 - DNA, 122 bp, Homo sapiens
  misc_feature (61)..(62): /note="This region represents a CpG dinucleotide"
  misc_feature (61)..(61): /note="Nucleotide may be methylated to form 5-methylcytosine"
ggaaagaagaagtagaagtaggaggagaagaagaaggggaggaggaggaaggaagaaagacgtggctgaaatgagacgtaggcaagtaactatggtcctcacacacaaatctgtagcataaa

SEQ ID NO: 12338 - DNA, 122 bp, Homo sapiens
  misc_feature (61)..(62): /note="This region represents a CpG dinucleotide"
  misc_feature (61)..(61): /note="Nucleotide may be methylated to form 5-methylcytosine"
gcactaatggagaaggccaggaaagcctggattctgtgtgtcctcattgtgctccctcatcgatacactgtctctcaccagcctttggaatttccttcctttggttttctgccatttttttc

SEQ ID NO: 12339 - DNA, 122 bp, Homo sapiens
  misc_feature (61)..(62): /note="This region represents a CpG dinucleotide"
  misc_feature (61)..(61): /note="Nucleotide may be methylated to form 5-methylcytosine"
tggctggtagaacccatttcactttgaattctgcccagaaaccacaggaggatcagtccacggaagagaaaaatctaattggttacagggacttagcatctgcccagaagacattcatgccc

SEQ ID NO: 12340 - DNA, 122 bp, Homo sapiens
  misc_feature (61)..(62): /note="This region represents a CpG dinucleotide"
  misc_feature (61)..(61): /note="Nucleotide may be methylated to form 5-methylcytosine"
ttttgctttattcagcctttattcaagatggagtcactctggtttggactcctctgacagcgggagtgaagtagaagtgatagggtttctttacagttcttatatccaactatttgatttag

SEQ ID NO: 12341 - DNA, 122 bp, Homo sapiens
  misc_feature (61)..(62): /note="This region represents a CpG dinucleotide"
  misc_feature (61)..(61): /note="Nucleotide may be methylated to form 5-methylcytosine"
ttttgttgtctgctgacttccttctcaggcaagttttccccatgtggtggcagaggcagccgccagcaacaacagggaaagagcccctccttcctaattggcctgggaacagtttcaagttc

SEQ ID NO: 12342 - DNA, 122 bp, Homo sapiens
  misc_feature (61)..(62): /note="This region represents a CpG dinucleotide"
  misc_feature (61)..(61): /note="Nucleotide may be methylated to form 5-methylcytosine"
gtgtctggaaagtcttgaccgggtcaaaagggctgacattgagcgagccaagacacgtttcgacccgccgctcccctcccgggggaagcaggacttccgcatctttgaaaatactgtcaagt

SEQ ID NO: 12343 - DNA, 122 bp, Homo sapiens
  misc_feature (61)..(62): /note="This region represents a CpG dinucleotide"
  misc_feature (61)..(61): /note="Nucleotide may be methylated to form 5-methylcytosine"
tcaactcgtgggggaggctcacaaagacaagggtaagaattaagtgctgaggttgtccatcgaggcatcagcaaaatggaggaagctgaaagacctcggaacacaagcgttttgcttggtca

SEQ ID NO: 12344 - DNA, 122 bp, Homo sapiens
  misc_feature (61)..(62): /note="This region represents a CpG dinucleotide"
  misc_feature (61)..(61): /note="Nucleotide may be methylated to form 5-methylcytosine"
gctctgcgccgccctcgccctcggatcccctggagggtgcgcagccgggcgtcaccagatcgggtccctctcatgccccgtgaacgcaactattctccggggcaactggctccactgcccag

SEQ ID NO: 12345 - DNA, 122 bp, Homo sapiens
  misc_feature (61)..(62): /note="This region represents a CpG dinucleotide"
  misc_feature (61)..(61): /note="Nucleotide may be methylated to form 5-methylcytosine"
gaagtgaaggcagctttgtgggactgagccctgtaacctgtgaggtctgcattaacttgacgcaattagtgacagaattaaagcgaattataggacacccagatgatgtcagtgaacttaat

SEQ ID NO: 12346 - DNA, 122 bp, Homo sapiens
  misc_feature (61)..(62): /note="This region represents a CpG dinucleotide"
  misc_feature (61)..(61): /note="Nucleotide may be methylated to form 5-methylcytosine"
cagtcacatgtctttcactttaagtcaaaagctagaaatgattaagctcagtgagaaaggcgtgttgaaagctgaggtaggttaaaagctggacttcttgcaccagttagcccagtcattag

SEQ ID NO: 12347 - DNA, 122 bp, Homo sapiens
  misc_feature (61)..(62): /note="This region represents a CpG dinucleotide"
  misc_feature (61)..(61): /note="Nucleotide may be methylated to form 5-methylcytosine"
ggccactagcccagcggattaatatccaaaggctgagccccaaacagagacagggcttgacgtttatacatgcaaccaaagggagttggtcagtcagtggtgcgaaacctgtaaggcgggta

SEQ ID NO: 12348 - DNA, 122 bp, Homo sapiens
  misc_feature (61)..(62): /note="This region represents a CpG dinucleotide"
  misc_feature (61)..(61): /note="Nucleotide may be methylated to form 5-methylcytosine"
ctagtagggcaggaaggttccaagagccggcacatgacctcatcccttcagctgctggtacggagtgtttccatgagggtgggtgggggtagggcctgggatgtctcactgggccctcaccc

SEQ ID NO: 12349 - DNA, 122 bp, Homo sapiens
  misc_feature (61)..(62): /note="This region represents a CpG dinucleotide"
  misc_feature (61)..(61): /note="Nucleotide may be methylated to form 5-methylcytosine"
taattagggtctgccttagaagatcttcaagctgccttattttcatgtgcattattcagacgtctgagaagttcctggtgcaatgtgtcttgtgaaatatattaggcattcagtgcagctgt

SEQ ID NO: 12350 - DNA, 122 bp, Homo sapiens
  misc_feature (61)..(62): /note="This region represents a CpG dinucleotide"
  misc_feature (61)..(61): /note="Nucleotide may be methylated to form 5-methylcytosine"
aaccaaccactttccttacttttcccaaggactaagtaactattagagcagacattaaaccgtaaccaccaccagctatacccgatgactcaactcaggttataattaggggaaggaaacgc

SEQ ID NO: 12351 - DNA, 122 bp, Homo sapiens
  misc_feature (61)..(62): /note="This region represents a CpG dinucleotide"
  misc_feature (61)..(61): /note="Nucleotide may be methylated to form 5-methylcytosine"
aagtttgtccatgtgtctctagctctgcctactctgatttcaagtgttctgtcctagttccgtaggcaaaatccctggcgggaggaaaagggcctgaaggagatgcttcctggagaaaggca

SEQ ID NO: 12352 - DNA, 122 bp, Homo sapiens
  misc_feature (61)..(62): /note="This region represents a CpG dinucleotide"
  misc_feature (61)..(61): /note="Nucleotide may be methylated to form 5-methylcytosine"
aaaggagtaattttgtctcaaccatcaaacctgcaacacattgccctgtagatgtcataacgagtttgcatgtctagaaatttggaccccatccctagctgctgcagggctgactttaagct

SEQ ID NO: 12353 - DNA, 122 bp, Homo sapiens
  misc_feature (61)..(62): /note="This region represents a CpG dinucleotide"
  misc_feature (61)..(61): /note="Nucleotide may be methylated to form 5-methylcytosine"
atagggaattataacacagtgtcatcaagttcgtggtagaagtacaggatgcagcagggccgcatcagctaccttatgcagcgctgttgggtcatggatgacttcttagagaaagtgacagc

SEQ ID NO: 12354 - DNA, 122 bp, Homo sapiens
  misc_feature (61)..(62): /note="This region represents a CpG dinucleotide"
  misc_feature (61)..(61): /note="Nucleotide may be methylated to form 5-methylcytosine"
cttttgagcggtccctggagtcaagactcctcacagttctttacttttaatatttccccacgtcagccacactagactaacacaaaagttgggacatcagcctacagggaggaactgtacca

SEQ ID NO: 12355 - DNA, 122 bp, Homo sapiens
  misc_feature (61)..(62): /note="This region represents a CpG dinucleotide"
  misc_feature (61)..(61): /note="Nucleotide may be methylated to form 5-methylcytosine"
gcagagtcagtcacagagaagagaatgcaggacagtaagcccagcgctcaaagccactgtcgccttgaggccactggtggatccaaatgaatgtgctcataaatgcactgcctgtctgatgg

SEQ ID NO: 12356 - DNA, 122 bp, Homo sapiens
  misc_feature (61)..(62): /note="This region represents a CpG dinucleotide"
  misc_feature (61)..(61): /note="Nucleotide may be methylated to form 5-methylcytosine"
acgccattgcataacactctatggcacaataaccactttacaaggctgtgtaatactctacgccacaataaccctttcatgtggttgtgtaatcttccatggtgcaataaccacttcacttg

SEQ ID NO: 12357 - DNA, 122 bp, Homo sapiens
  misc_feature (61)..(62): /note="This region represents a CpG dinucleotide"
  misc_feature (61)..(61): /note="Nucleotide may be methylated to form 5-methylcytosine"
attgaattgacatggtgaaaccacgcctagtagaggggagaagtggtggtgtggactagacgagtatacattttggtcagacatggctggattccagtcactttgtagttttgtgaccttgg

SEQ ID NO: 12358 - DNA, 122 bp, Homo sapiens
  misc_feature (61)..(62): /note="This region represents a CpG dinucleotide"
  misc_feature (61)..(61): /note="Nucleotide may be methylated to form 5-methylcytosine"
ctgcaagattgtccttgataatcttttcacagcaataaaagcactgacgaagagtcagggcgttgtcatcaaagagactaaactgctgcagactacaactttcccaggacaaaaatattcaa

SEQ ID NO: 12359 - DNA, 122 bp, Homo sapiens
  misc_feature (61)..(62): /note="This region represents a CpG dinucleotide"
  misc_feature (61)..(61): /note="Nucleotide may be methylated to form 5-methylcytosine"
gattcacctaacttcatgtgccctagcagaggaaacctcaatttgcttgtgtgtctgtcccgccaagaaaatgcaggtcacttcctctggctttcttgccttaagagttcctgtttctgccg

SEQ ID NO: 12360 - DNA, 122 bp, Homo sapiens
  misc_feature (61)..(62): /note="This region represents a CpG dinucleotide"
  misc_feature (61)..(61): /note="Nucleotide may be methylated to form 5-methylcytosine"
tggcatttgtaccctgtgttccatctgtgctgttatttactcagtatttttaagttgactcgcttctctaactgaaatttatttagaaaggttacaagtggaaaattagcatgacttcgtac

SEQ ID NO: 12361 - DNA, 122 bp, Homo sapiens
  misc_feature (61)..(62): /note="This region represents a CpG dinucleotide"
  misc_feature (61)..(61): /note="Nucleotide may be methylated to form 5-methylcytosine"
caggcactcctttgcttgtttacagtcctctatgataaagtgaacactcataaccctggacgcactcttcctgtgtctaattaaattcaagtacccttttcttcaggtttgacttctgggtt

SEQ ID NO: 12362 - DNA, 122 bp, Homo sapiens
  misc_feature (61)..(62): /note="This region represents a CpG dinucleotide"
  misc_feature (61)..(61): /note="Nucleotide may be methylated to form 5-methylcytosine"
gcaactctcaagtgacccagaaaagtcaaatcgagtttgaaaggaggttaccacatttcacggtaagaaatcttccgaggcctttgtgaaagggatagggattatacaattagaggtgagga

SEQ ID NO: 12363 - DNA, 122 bp, Homo sapiens
  misc_feature (61)..(62): /note="This region represents a CpG dinucleotide"
  misc_feature (61)..(61): /note="Nucleotide may be methylated to form 5-methylcytosine"
cttaagagatagacaaatataaatagaaacctaattctaacatgatttctatagagaagacgagaaagagacagagtgaacagacctgaggtgctacatgcatgaatacttgctactggttt

SEQ ID NO: 12364 - DNA, 122 bp, Homo sapiens
  misc_feature (61)..(62): /note="This region represents a CpG dinucleotide"
  misc_feature (61)..(61): /note="Nucleotide may be methylated to form 5-methylcytosine"
cgaatttctagctcctgcgtctccattgccggtcctaaaagtcgccgtttcactaagcttcggaacctgactccgagaaatctattcgttcgtcccaagatctcagccagaaagagaaatcc

SEQ ID NO: 12365 - DNA, 122 bp, Homo sapiens
  misc_feature (61)..(62): /note="This region represents a CpG dinucleotide"
  misc_feature (61)..(61): /note="Nucleotide may be methylated to form 5-methylcytosine"
gttaattgtcaactaagatctgctgagaatccccaaggtgctccaggattttcagtgttgcggtagctcttagtctcactctgagttttacagtcccctgggctgttatctgaccgacctca

SEQ ID NO: 12366 - DNA, 122 bp, Homo sapiens
  misc_feature (61)..(62): /note="This region represents a CpG dinucleotide"
  misc_feature (61)..(61): /note="Nucleotide may be methylated to form 5-methylcytosine"
ccttcacagcaacgcctagattagtgtttgactgagtaactgtggactctagcctggccacgtcaacacataacactagcctcacagataggaatagtgaaagcaaacactttatggggttc

SEQ ID NO: 12367 - DNA, 122 bp, Homo sapiens
  misc_feature (61)..(62): /note="This region represents a CpG dinucleotide"
  misc_feature (61)..(61): /note="Nucleotide may be methylated to form 5-methylcytosine"
atgatgcagactcctatccgcgagatacctgctgtaatttcgctgtggttcgtgaggacgcgtcctgggctgccctgagaagcctacgtctccccttcgaggcccgggaagacctccaaccc

SEQ ID NO: 12368 - DNA, 122 bp, Homo sapiens
  misc_feature (61)..(62): /note="This region represents a CpG dinucleotide"
  misc_feature (61)..(61): /note="Nucleotide may be methylated to form 5-methylcytosine"
ggttctccataatcttctggaaaagacttctgatggctttcacttcttcctttgactaagcgtgctttgatgggagtatgacaggatgtgaggaatgaactttcccaggaaacttaaggtca

SEQ ID NO: 12369 - DNA, 122 bp, Homo sapiens
  misc_feature (61)..(62): /note="This region represents a CpG dinucleotide"
  misc_feature (61)..(61): /note="Nucleotide may be methylated to form 5-methylcytosine"
cttctcagaaagtgacccaaggtaaataaaccatgtatacctgaaaagctctgcatcttacgtaggtggtttatggacaactcacagactcttatactaacaatgcatttctcatcaaatct

SEQ ID NO: 12370 - DNA, 122 bp, Homo sapiens
  misc_feature (61)..(62): /note="This region represents a CpG dinucleotide"
  misc_feature (61)..(61): /note="Nucleotide may be methylated to form 5-methylcytosine"
gtaacttacaagtaacttattgctacaagatgctaacagttatctgaacctgcagtgagccgtagtctttttgctcatggaagatgttgcctcaatgttgatagctgttgactcatcagggt

SEQ ID NO: 12371 - DNA, 122 bp, Homo sapiens
  misc_feature (61)..(62): /note="This region represents a CpG dinucleotide"
  misc_feature (61)..(61): /note="Nucleotide may be methylated to form 5-methylcytosine"
aaatggtctacattcaaatggtaagtttgatccccgcatcatcaatcatcctttcagtttcgtttgatcaaatgttgggcatttatacagctcattttacaaaccatacaaatcagaaggta

SEQ ID NO: 12372 - DNA, 122 bp, Homo sapiens
  misc_feature (61)..(62): /note="This region represents a CpG dinucleotide"
  misc_feature (61)..(61): /note="Nucleotide may be methylated to form 5-methylcytosine"
tccctcttgtcaggtcatccatgactttagagaacagacacaagtgtatccagctgtccacgggtggagctacccgttgggcttatgagtgacctggagtgacagctgagtcaccctgggta

SEQ ID NO: 12373 - DNA, 122 bp, Homo sapiens
  misc_feature (61)..(62): /note="This region represents a CpG dinucleotide"
  misc_feature (61)..(61): /note="Nucleotide may be methylated to form 5-methylcytosine"
ttgcagcaagtacagcctcagctgtcatctgtgccctagggcagggttcagtaggttaggcgttaagagacagtgtacctcataagaagtggtcaggtttctttctgagtttcagttcttca

SEQ ID NO: 12374 - DNA, 122 bp, Homo sapiens
  misc_feature (61)..(62): /note="This region represents a CpG dinucleotide"
  misc_feature (61)..(61): /note="Nucleotide may be methylated to form 5-methylcytosine"
tcttattctatgtttaccagccttcctctttcttctgtgctgtgacccttaagaacttggcgctttcacttttcctattgagttgtttcaagttttgtggttaaattagtcagtcttctgct

SEQ ID NO: 12375 - DNA, 122 bp, Homo sapiens
  misc_feature (61)..(62): /note="This region represents a CpG dinucleotide"
  misc_feature (61)..(61): /note="Nucleotide may be methylated to form 5-methylcytosine"
actgctagacctggaaactgaaggagagtaataaggatttacaacaatagtcatggggaacggaaaaaggaatcatcaaatgagggattaattgccgagcagcattgaaagtctaactttca

SEQ ID NO: 12376 - DNA, 122 bp, Homo sapiens
  misc_feature (61)..(62): /note="This region represents a CpG dinucleotide"
  misc_feature (61)..(61): /note="Nucleotide may be methylated to form 5-methylcytosine"
aagcagccttctgtgggttgtggtttcagtgtcagctcccagttcccctttcaaagccttcgctgtgctgtttgaacctgccccacgtgtgtgccccgcaccccaccccggtctcccctgag

SEQ ID NO: 12377 - DNA, 122 bp, Homo sapiens
  misc_feature (61)..(62): /note="This region represents a CpG dinucleotide"
  misc_feature (61)..(61): /note="Nucleotide may be methylated to form 5-methylcytosine"
aaggacctttgcttcctaatattcttggtaagcatggcatgcacttacttagttcacttccgttatttttaaattacttgggtaaacacacacacatttacatttataaacatccttgccaa

SEQ ID NO: 12378 - DNA, 122 bp, Homo sapiens
  misc_feature (61)..(62): /note="This region represents a CpG dinucleotide"
  misc_feature (61)..(61): /note="Nucleotide may be methylated to form 5-methylcytosine"
taacttaagcatgctaagcaaaaaataacaaacttagattgtaaagtatttcaaaaagtccgcaggagatataatctttccaaagttaattatatacatgaagcttggcctaactgtgctga

SEQ ID NO: 12379 - DNA, 122 bp, Homo sapiens
  misc_feature (61)..(62): /note="This region represents a CpG dinucleotide"
  misc_feature (61)..(61): /note="Nucleotide may be methylated to form 5-methylcytosine"
cctgcagtttcaaaacagatctacattccatagcttcctcatttcaaatggccaatttatcgctaacttcaaaaacgtgctctgtgtcactttttaaaacaaatcagcaagtcacatcttac

SEQ ID NO: 12380 - DNA, 122 bp, Homo sapiens
  misc_feature (61)..(62): /note="This region represents a CpG dinucleotide"
  misc_feature (61)..(61): /note="Nucleotide may be methylated to form 5-methylcytosine"
ttccctcccagtgggtggtgaaagttgttctttagctcattatctcccccttcagccttccgataaaggaagatgatgaagttaaaagaagcagggaggctcagcccctctgtagaaaaggt

SEQ ID NO: 12381 - DNA, 122 bp, Homo sapiens
  misc_feature (61)..(62): /note="This region represents a CpG dinucleotide"
  misc_feature (61)..(61): /note="Nucleotide may be methylated to form 5-methylcytosine"
aaaaacaatccaaccatgactatcatggcttcagaggtctatgaactcccaggaattatacgcagattttttcctgaggacagtctacacttccttattggcttctcaaagagggtcactga

SEQ ID NO: 12382 - DNA, 122 bp, Homo sapiens
  misc_feature (61)..(62): /note="This region represents a CpG dinucleotide"
  misc_feature (61)..(61): /note="Nucleotide may be methylated to form 5-methylcytosine"
acaacaacactgttaatcaacaggaactaatcagcatttatgtaacaccgcaaacgcagccgaatacacattttattcgtgtcgatgggacatttagcaagatatgaagtaacctgggtcat

SEQ ID NO: 12383 - DNA, 122 bp, Homo sapiens
  misc_feature (61)..(62): /note="This region represents a CpG dinucleotide"
  misc_feature (61)..(61): /note="Nucleotide may be methylated to form 5-methylcytosine"
cccttgcacttccccacgcctgttacacaagcccaggctgggagcagagggcgagctccacgacagcctgcagaggccatgccagaaatatggggtctgcagccccacatgagcccaggaaa

SEQ ID NO: 12384 - DNA, 122 bp, Homo sapiens
  misc_feature (61)..(62): /note="This region represents a CpG dinucleotide"
  misc_feature (61)..(61): /note="Nucleotide may be methylated to form 5-methylcytosine"
ctgtggacagcacatagcacatactattcttcctggtctcttcagttaaatcttgggtttcgttttgtttcgttttttcatgaacaatatacctcagaggctatttcacctcagtgagcaaa

SEQ ID NO: 12385 - DNA, 122 bp, Homo sapiens
  misc_feature (61)..(62): /note="This region represents a CpG dinucleotide"
  misc_feature (61)..(61): /note="Nucleotide may be methylated to form 5-methylcytosine"
atcttttgattccgctattgaggtagaggcgggacgggggaagcagctttcagtaagacccgcccgctcttgccctgtcagtttaccattgccatggcaacacccggaagttgccgccccct

SEQ ID NO: 12386 - DNA, 122 bp, Homo sapiens
  misc_feature (61)..(62): /note="This region represents a CpG dinucleotide"
  misc_feature (61)..(61): /note="Nucleotide may be methylated to form 5-methylcytosine"
aagatgtggcttaaagttcatgttactctcatctttgtcccaacatgagatctcatcaaacgtatgcagcacgttgggagatagatatttataatttgcaggaacatttggacaggaagtgt

SEQ ID NO: 12387 - DNA, 122 bp, Homo sapiens
  misc_feature (61)..(62): /note="This region represents a CpG dinucleotide"
  misc_feature (61)..(61): /note="Nucleotide may be methylated to form 5-methylcytosine"
gcagcacatcacagcatctgctacatcagatctttctgtatttcatgacctttcagcttccgttgctgctgctcattgctaaagtctttcccaattcaaatcactgacagtgagaatctgat

SEQ ID NO: 12388 - DNA, 122 bp, Homo sapiens
  misc_feature (61)..(62): /note="This region represents a CpG dinucleotide"
  misc_feature (61)..(61): /note="Nucleotide may be methylated to form 5-methylcytosine"
tcttgacttaaaaggaaagaagaaagacagtaccacaatacaggagtgccgctcgtcacacgctctggccacttgggacacctgcccatcagggtggcatgtcactgcctccccatcaccaa

SEQ ID NO: 12389 - DNA, 122 bp, Homo sapiens
  misc_feature (61)..(62): /note="This region represents a CpG dinucleotide"
  misc_feature (61)..(61): /note="Nucleotide may be methylated to form 5-methylcytosine"
ggaggaccccagaggttggaagcccctccaagattaggggcgcagtgctcccctggcctgcggaagagtcagaggagtggggacaacatccaacatcagcctctactaccgctagcgcgact

SEQ ID NO: 12390 - DNA, 122 bp, Homo sapiens
  misc_feature (61)..(62): /note="This region represents a CpG dinucleotide"
  misc_feature (61)..(61): /note="Nucleotide may be methylated to form 5-methylcytosine"
agcaataataccagaatgccaatatcacacaacgcatacctcctgtgcaggctgggctttcgctgtgtttactgacgagccatctttcaaatgaatatttgcttctgtagtagaattgactc

SEQ ID NO: 12391 - DNA, 122 bp, Homo sapiens
  misc_feature (61)..(62): /note="This region represents a CpG dinucleotide"
  misc_feature (61)..(61): /note="Nucleotide may be methylated to form 5-methylcytosine"
ttcccattatatttcataatcctcttctgatttcattaacctctccataacaaagacgggcgaactcaatctttcattttgcctttttgacttctgggatatcttctcttttctcctggctc

SEQ ID NO: 12392 - DNA, 122 bp, Homo sapiens
  misc_feature (61)..(62): /note="This region represents a CpG dinucleotide"
  misc_feature (61)..(61): /note="Nucleotide may be methylated to form 5-methylcytosine"
ggggctgagcacacccaatgtgctaaatatttccctgctgcagaatctattttgctgctgcggctgctgcttggcagcaaagagacaggaagctatttagatatattatcttccttttcagg

SEQ ID NO: 12393 - DNA, 122 bp, Homo sapiens
  misc_feature (61)..(62): /note="This region represents a CpG dinucleotide"
  misc_feature (61)..(61): /note="Nucleotide may be methylated to form 5-methylcytosine"
gccaggctcactggagtggaagcgtgcactctcatctgtgaggctaggctgttccctggccgtcacctcaccctttcatctctgcttacctgcatctggtgtcaagaatcagaatgggagag

SEQ ID NO: 12394 - DNA, 122 bp, Homo sapiens
  misc_feature (61)..(62): /note="This region represents a CpG dinucleotide"
  misc_feature (61)..(61): /note="Nucleotide may be methylated to form 5-methylcytosine"
ttgacctcaacatcttagtcaacgcttatatgaaattttagcaaaacagtgattgaaaagcggagaatgtaaagtcccagagttggaggagtagttcatccggaagcatccgccaagtgatc

SEQ ID NO: 12395 - DNA, 122 bp, Homo sapiens
  misc_feature (61)..(62): /note="This region represents a CpG dinucleotide"
  misc_feature (61)..(61): /note="Nucleotide may be methylated to form 5-methylcytosine"
ttggagactcttctgaggagcgggcactgcctggcagggactgcacctctgaaggtacaacgaagctggttttggggctcttgcaaaatgggctggagactggaatcacgttccagggtgaa

SEQ ID NO: 12396 - DNA, 122 bp, Homo sapiens
  misc_feature (61)..(62): /note="This region represents a CpG dinucleotide"
  misc_feature (61)..(61): /note="Nucleotide may be methylated to form 5-methylcytosine"
aaattaacattgacaagttagtctgtaacacctggggcaatccaatattgtacaactgtacggaaattgcagacttgacttcttcaattgcaaggtcaatggtgaaaaaaactgactctgct

SEQ ID NO: 12397 - DNA, 122 bp, Homo sapiens
  misc_feature (61)..(62): /note="This region represents a CpG dinucleotide"
  misc_feature (61)..(61): /note="Nucleotide may be methylated to form 5-methylcytosine"
agatgattttatttaatcctcacattgactccctaaggtagctgtattgtccttatttcacgtatgggaaaattgagattcagagaagttaagtttcccagggacaccgcagatcacgaaca

SEQ ID NO: 12398 - DNA, 122 bp, Homo sapiens
  misc_feature (61)..(62): /note="This region represents a CpG dinucleotide"
  misc_feature (61)..(61): /note="Nucleotide may be methylated to form 5-methylcytosine"
tgctgcagaggcagtggttttaaagctgcattgtgctggagatgttccctcccatgaccccgtcacctccacctccaccacagccaccatgcctaggatcacagtgcaggtgtctactgagg

SEQ ID NO: 12399 - DNA, 122 bp, Homo sapiens
  misc_feature (61)..(62): /note="This region represents a CpG dinucleotide"
  misc_feature (61)..(61): /note="Nucleotide may be methylated to form 5-methylcytosine"
tctgtcattctttttggccacctagtatctgaactttccttctatgtctatggaattcctcgctttgagtttcaggaggaagcagagcctacctcccaatctagatgctgatgatatcagta

SEQ ID NO: 12400 - DNA, 122 bp, Homo sapiens
  misc_feature (61)..(62): /note="This region represents a CpG dinucleotide"
  misc_feature (61)..(61): /note="Nucleotide may be methylated to form 5-methylcytosine"
catagaaataatttatatttccaccagcagggtataatcattcccttttctctgcagtctcgccagcatctgtggttttctgaccagccattctgactgatgtgagatggtatctcattgtg

SEQ ID NO: 12401 - DNA, 122 bp, Homo sapiens
  misc_feature (61)..(62): /note="This region represents a CpG dinucleotide"
  misc_feature (61)..(61): /note="Nucleotide may be methylated to form 5-methylcytosine"
ttctaggctgaggaaacagcatgtgctatggtacgaaggagtggctggctttgcgtcttccgttgagtttctgagagttgatatcagtggaatcaaggctaagaggtggtgagcctgtgcgt

SEQ ID NO: 12402 - DNA, 122 bp, Homo sapiens
  misc_feature (61)..(62): /note="This region represents a CpG dinucleotide"
  misc_feature (61)..(61): /note="Nucleotide may be methylated to form 5-methylcytosine"
gacagacatatttaacatgatttggcaagctaagagtaaacctagggataaaaagataagcgattactaagaggtagcaataagaataatttattgagagtatataatgggccagagacagt

SEQ ID NO: 12403 - DNA, 122 bp, Homo sapiens
  misc_feature (61)..(62): /note="This region represents a CpG dinucleotide"
  misc_feature (61)..(61): /note="Nucleotide may be methylated to form 5-methylcytosine"
atactggcatcacaggtaaaatgttgctcctggctgcccaccgcaggatcgccaagtcagcgacagccttgcagccagttctgtagagtgagtaaataagcctgatatgagcatttcaaata

SEQ ID NO: 12404 - DNA, 122 bp, Homo sapiens
  misc_feature (61)..(62): /note="This region represents a CpG dinucleotide"
  misc_feature (61)..(61): /note="Nucleotide may be methylated to form 5-methylcytosine"
atttgcacaccgaattttgtaagcatttatccagcatataatctctgaacactcctcaaacgtagccagagtgtgttgaatagcaaaacacaatattaacaactgcatggaggtagcggaac

SEQ ID NO: 12405 - DNA, 122 bp, Homo sapiens
  misc_feature (61)..(62): /note="This region represents a CpG dinucleotide"
  misc_feature (61)..(61): /note="Nucleotide may be methylated to form 5-methylcytosine"
tcataaatagtccggtcccctcggcgctcgcggtcctcattctggaggaagctgactacacgtgcggcaagctcaaagaggaacttaattgtgaagaagaatgcaaccacagacactgtgat

SEQ ID NO: 12406 - DNA, 122 bp, Homo sapiens
  misc_feature (61)..(62): /note="This region represents a CpG dinucleotide"
  misc_feature (61)..(61): /note="Nucleotide may be methylated to form 5-methylcytosine"
agtagcacagtggtatgctgaaagctgaggtgggaacttgtggcttcccttaccttgtaacgagcaggtttgagctggtccttcccaagcacagtaaataaatgtcactttgcatgggagag

SEQ ID NO: 12407 - DNA, 122 bp, Homo sapiens
  misc_feature (61)..(62): /note="This region represents a CpG dinucleotide"
  misc_feature (61)..(61): /note="Nucleotide may be methylated to form 5-methylcytosine"
gcacacaaatcagtggagtaaatatttgcatatggttagagagagagtgagaggacaccacggctgccctaaataatcaagcccaggggagatgaaagagatagcatgcctgccacatgcat

SEQ ID NO: 12408 - DNA, 122 bp, Homo sapiens
  misc_feature (61)..(62): /note="This region represents a CpG dinucleotide"
  misc_feature (61)..(61): /note="Nucleotide may be methylated to form 5-methylcytosine"
cgtgtgacctctgaggagacaaggtactgttgctatcctcagtcatagacgatgcaaccacggctcagggaccatgagctcccttccctcagctcacacagaagacccaggttcaattcctg

SEQ ID NO: 12409 - DNA, 122 bp, Homo sapiens
  misc_feature (61)..(62): /note="This region represents a CpG dinucleotide"
  misc_feature (61)..(61): /note="Nucleotide may be methylated to form 5-methylcytosine"
ataagagacagagaaaagataaccttaaagctaagcagggcagaagtaagagagatggaacgagggagaaagagacctcaaagagaaatcactaaataatggctttgaaaatctactcagtt

SEQ ID NO: 12410 - DNA, 122 bp, Homo sapiens
  misc_feature (61)..(62): /note="This region represents a CpG dinucleotide"
  misc_feature (61)..(61): /note="Nucleotide may be methylated to form 5-methylcytosine"
agggtgagtcagtcggaagttgagtccaggctcctttctttcttacaactttgtgactcccgcaagctcattcccctagaggcatcactttcatgtattgtctggagcagttcctggtatat

SEQ ID NO: 12411 - DNA, 122 bp, Homo sapiens
  misc_feature (61)..(62): /note="This region represents a CpG dinucleotide"
  misc_feature (61)..(61): /note="Nucleotide may be methylated to form 5-methylcytosine"
aaaggggtcagggagagatccagcaggaaaggctcttctagtggaccaaccgcttacatccggactattactccacccagtcttccaaggagattctccagtgttagcctttcaggttccta

SEQ ID NO: 12412 - DNA, 122 bp, Homo sapiens
  misc_feature (61)..(62): /note="This region represents a CpG dinucleotide"
  misc_feature (61)..(61): /note="Nucleotide may be methylated to form 5-methylcytosine"
aataataccgctattagataacaactaccccagcttaaaagcatgctgttccaggtgctgcgtcaaatccacctttacatgtgttatctcattaatcttcacaacagtgccaccagtattgg

SEQ ID NO: 12413 - DNA, 122 bp, Homo sapiens
  misc_feature (61)..(62): /note="This region represents a CpG dinucleotide"
  misc_feature (61)..(61): /note="Nucleotide may be methylated to form 5-methylcytosine"
ttactgaagctgaaccagcaaagtaccaggatccagcttactggatcgcactgatacatccgtctctattcagataactcacctttcctctgccttcaaaacacagatttgactgccacaag

SEQ ID NO: 12414 - DNA, 122 bp, Homo sapiens
  misc_feature (61)..(62): /note="This region represents a CpG dinucleotide"
  misc_feature (61)..(61): /note="Nucleotide may be methylated to form 5-methylcytosine"
tcttctgagactgtaagatgttcttttggggactgggattgctgcctgccttccccgagacgtgtgtgtgtgtgtgtgtgtgtgtgtgtgtgtgtgtgtgtccagcatgtgtgcagctgggg

SEQ ID NO: 12415 - DNA, 122 bp, Homo sapiens
  misc_feature (61)..(62): /note="This region represents a CpG dinucleotide"
  misc_feature (61)..(61): /note="Nucleotide may be methylated to form 5-methylcytosine"
gacaggaaaacgttctgcgcagggcagcccagggcacgtgggtgcttaggaatgctgctgcgcatgtgtgagagaaaaaacagcactctcaattctgtgttgttataggggaggccaccagg

SEQ ID NO: 12416 - DNA, 122 bp, Homo sapiens
  misc_feature (61)..(62): /note="This region represents a CpG dinucleotide"
  misc_feature (61)..(61): /note="Nucleotide may be methylated to form 5-methylcytosine"
ccacttcctgttttgagaacaccaactcagataactggactctttatttgttttcctgggcgtgggtccatgtgataaactgtctctttccacaatgccaccttagatgtttggatcctatg

SEQ ID NO: 12417 - DNA, 122 bp, Homo sapiens
  misc_feature (61)..(62): /note="This region represents a CpG dinucleotide"
  misc_feature (61)..(61): /note="Nucleotide may be methylated to form 5-methylcytosine"
gagacaaatctgcccttttaacagctggttctgattcaggtgatcccaggaacttactgtcgttgagtcactgtggtctcccaacttgttccttctttttgtatcaggaaggtgacttctca

SEQ ID NO: 12418 - DNA, 122 bp, Homo sapiens
  misc_feature (61)..(62): /note="This region represents a CpG dinucleotide"
  misc_feature (61)..(61): /note="Nucleotide may be methylated to form 5-methylcytosine"
gagaggattttggttggcagatgttataattgatccatctctcttgatttttgacctgtacgctagtgaagcagacacttttatatagttctagtggaattattttgcatgttgtaacaaga

SEQ ID NO: 12419 - DNA, 122 bp, Homo sapiens
  misc_feature (61)..(62): /note="This region represents a CpG dinucleotide"
  misc_feature (61)..(61): /note="Nucleotide may be methylated to form 5-methylcytosine"
gtgtttgtgagagaggatggtttggaaagctctgccaacatccgcggaagtgtaacatgacggaagaacaaagcaagaatctgtgtgaatcagcagatggcatattgtgctcggggaagggt

SEQ ID NO: 12420 - DNA, 122 bp, Homo sapiens
  misc_feature (61)..(62): /note="This region represents a CpG dinucleotide"
  misc_feature (61)..(61): /note="Nucleotide may be methylated to form 5-methylcytosine"
ggcaatccacctgcctcagcctcccaaagtgctaggattataggagtgagccaccgtgcccggcagcaagtattcttaatcaagaggttgagtgcagtggctcatgcctgtaatcccagcac

SEQ ID NO: 12421 - DNA, 122 bp, Homo sapiens
  misc_feature (61)..(62): /note="This region represents a CpG dinucleotide"
  misc_feature (61)..(61): /note="Nucleotide may be methylated to form 5-methylcytosine"
gtttccccctgcccgtgctgagatccttatttggtcaagcttctacctatgccctggcctcggagcgagcccgatagcgctggatcacagcagagggagcgaggcggctgacgtcccatccc

SEQ ID NO: 12422 - DNA, 122 bp, Homo sapiens
  misc_feature (61)..(62): /note="This region represents a CpG dinucleotide"
  misc_feature (61)..(61): /note="Nucleotide may be methylated to form 5-methylcytosine"
tcctacagctctttgttggttgttttgctggcactcaccaggaagcagagttcaccctggcggaagaggtttgagccctctccagcgcaggcagctgtgttcaggacctctggagaatgcag

SEQ ID NO: 12423 - DNA, 122 bp, Homo sapiens
  misc_feature (61)..(62): /note="This region represents a CpG dinucleotide"
  misc_feature (61)..(61): /note="Nucleotide may be methylated to form 5-methylcytosine"
gcgactcgcccctctctggctggccgagtgtctggcgccaacctcgctggaggaggctgtcgggggcgggccagccagcggggctgccctcctcgcagtgacgtcccagggggcggaggggc

SEQ ID NO: 12424 - DNA, 122 bp, Homo sapiens
  misc_feature (61)..(62): /note="This region represents a CpG dinucleotide"
  misc_feature (61)..(61): /note="Nucleotide may be methylated to form 5-methylcytosine"
cgagggcgagagtctgcggcgccttggccttccgcacaaccagttggccgcccaggccggcgccaccacgccttccgccgagtccctgggctccgaggccagcgccacgtcgggctcctcag

SEQ ID NO: 12425 - DNA, 122 bp, Homo sapiens
  misc_feature (61)..(62): /note="This region represents a CpG dinucleotide"
  misc_feature (61)..(61): /note="Nucleotide may be methylated to form 5-methylcytosine"
tgaatcccaggtgacaaagaggctggcatcatataaacgcttaatgacagagtaccacatcgcaagtcattctctcaaggcacagaacccggacacacctgcccaggaacagtatcgtgtcc

SEQ ID NO: 12426 - DNA, 122 bp, Homo sapiens
  misc_feature (61)..(62): /note="This region represents a CpG dinucleotide"
  misc_feature (61)..(61): /note="Nucleotide may be methylated to form 5-methylcytosine"
ggaaggggtactgtcggaggtagtcggccatgcgccggggcagtggcaggcagtccacgtcggccaccagacggttgatgacaaggcggcacaggtgttgcaggctgcgggcactgcttctg

SEQ ID NO: 12427 - DNA, 122 bp, Homo sapiens
  misc_feature (61)..(62): /note="This region represents a CpG dinucleotide"
  misc_feature (61)..(61): /note="Nucleotide may be methylated to form 5-methylcytosine"
gttccacaatggcgagtctgaggagagccacgagcagttcctgaaggcgctgcagaacgccgtcaccaccttcgtgaaccgcatgaagagtaaccacatgcggggccgcagcatcaccaatg

SEQ ID NO: 12428 - DNA, 122 bp, Homo sapiens
  misc_feature (61)..(62): /note="This region represents a CpG dinucleotide"
  misc_feature (61)..(61): /note="Nucleotide may be methylated to form 5-methylcytosine"
ctcaggtgatctgcccgcctgggcctctcaaagtgctgggattacagacatgagccaccacgcccggccctagctcccaattatttaacatgcttaaaggagattaaaattcttttctatta

SEQ ID NO: 12429 - DNA, 122 bp, Homo sapiens
  misc_feature (61)..(62): /note="This region represents a CpG dinucleotide"
  misc_feature (61)..(61): /note="Nucleotide may be methylated to form 5-methylcytosine"
atcaccctgcgattgagcatcccaggacctgaaaacttaatgttttgaggtttatgaacacgttcaagttccagtgcaactatgttaaaataaaattgggctggtgccaggcacggtggctc

SEQ ID NO: 12430 - DNA, 122 bp, Homo sapiens
  misc_feature (61)..(62): /note="This region represents a CpG dinucleotide"
  misc_feature (61)..(61): /note="Nucleotide may be methylated to form 5-methylcytosine"
tggctcaaggtcacggggttcgtggtggcatctgcagcttctgggtctggccaactctggcgctcacatgctcacattctttcttcaatattttactcaaaacaatggttggggccaggtgc

SEQ ID NO: 12431 - DNA, 122 bp, Homo sapiens
  misc_feature (61)..(62): /note="This region represents a CpG dinucleotide"
  misc_feature (61)..(61): /note="Nucleotide may be methylated to form 5-methylcytosine"
aggctgtaaggtagagtgataaaccacgaaggcacacaaggaaatgcgacctcagaccagcggccgcttttagagggagggagaggctgtggttttgatgggggcacctgaaggggtttctg

SEQ ID NO: 12432 - DNA, 122 bp, Homo sapiens
  misc_feature (61)..(62): /note="This region represents a CpG dinucleotide"
  misc_feature (61)..(61): /note="Nucleotide may be methylated to form 5-methylcytosine"
tgaaccagatctgacttcaagcctgagttcctaacaaagataggaagaacaaggcaaccccggatgatacagtagccagacacttgctagtaaaggccagaacactgactcactaagctctg

SEQ ID NO: 12433 - DNA, 122 bp, Homo sapiens
  misc_feature (61)..(62): /note="This region represents a CpG dinucleotide"
  misc_feature (61)..(61): /note="Nucleotide may be methylated to form 5-methylcytosine"
ttttctgttctacatcttactctcttttaaagatacagacccaggatttacagtgactgacggacacaggaggctgagaaatagtctaattcaagagactgttgaaactcgttacttggtaa

SEQ ID NO: 12434 - DNA, 122 bp, Homo sapiens
  misc_feature (61)..(62): /note="This region represents a CpG dinucleotide"
  misc_feature (61)..(61): /note="Nucleotide may be methylated to form 5-methylcytosine"
ttaggcaaaataagtggcaccatgtgtaagttcacacagtttggagaataatgcaaagaacgaacaaccgcaaacatctaataattgtcattgttagagaaatgagtagggaatggggcaga

SEQ ID NO: 12435 - DNA, 122 bp, Homo sapiens
  misc_feature (61)..(62): /note="This region represents a CpG dinucleotide"
  misc_feature (61)..(61): /note="Nucleotide may be methylated to form 5-methylcytosine"
tgaagacagctgaatgttggtttgggcaacagggccctggagattgccttcctgaagacacggcagatcccaaagccagcttgtggggagcccaccggtgtggggtaaccaggttgcatcaa

SEQ ID NO: 12436 - DNA, 122 bp, Homo sapiens
  misc_feature (61)..(62): /note="This region represents a CpG dinucleotide"
  misc_feature (61)..(61): /note="Nucleotide may be methylated to form 5-methylcytosine"
tggtgggtgcctcgcaaccctggagctgcatttaagtggactgtctcccagtgacagaggcgggcggctgcacttagctgtgccgtgggcttactcacagggggtggagacaagatgacatc

SEQ ID NO: 12437 - DNA, 122 bp, Homo sapiens
  misc_feature (61)..(62): /note="This region represents a CpG dinucleotide"
  misc_feature (61)..(61): /note="Nucleotide may be methylated to form 5-methylcytosine"
tcgcagccggtaatcctccgtgtgaatgactttctgcacagtgatctcaacaccgtcgtacgccacctgctcctccggccaatactcggtgcatttctgcaggggcccagatcaggctgcca

SEQ ID NO: 12438 - DNA, 122 bp, Homo sapiens
  misc_feature (61)..(62): /note="This region represents a CpG dinucleotide"
  misc_feature (61)..(61): /note="Nucleotide may be methylated to form 5-methylcytosine"
ggttgtcttcatgcttgctgtttgttttaatgcctctggattttctgctttcctgttcctcgtacaaacctacacttctcccttccccacatgcacactgggccttaaactaaaacaaagag

SEQ ID NO: 12439 - DNA, 122 bp, Homo sapiens
  misc_feature (61)..(62): /note="This region represents a CpG dinucleotide"
  misc_feature (61)..(61): /note="Nucleotide may be methylated to form 5-methylcytosine"
ctgcagggaatgtgaactgaagagaaaggtgtcctctcttctcataaagagacccaaagacgaatgccccgcaggtaaaaccagtcacattttgccttccctgttggcccatttcctcaacc

SEQ ID NO: 12440 - DNA, 122 bp, Homo sapiens
  misc_feature (61)..(62): /note="This region represents a CpG dinucleotide"
  misc_feature (61)..(61): /note="Nucleotide may be methylated to form 5-methylcytosine"
agatggacaaacatgacctcatgatccctctgctaatgtgaatctttgtgaaaaattaagcgtattttttaaacaatcggtttaaggtttaagtgcattgaggtagataaaatgggatcacc

SEQ ID NO: 12441 - DNA, 122 bp, Homo sapiens
  misc_feature (61)..(62): /note="This region represents a CpG dinucleotide"
  misc_feature (61)..(61): /note="Nucleotide may be methylated to form 5-methylcytosine"
cagcttaaaaaattaaatttctaaagccacatctgagataacagcacttctctattttgacgtaatgagctgcacatagggtgggaagtaaattatccttccccatgtttactttagataaa

SEQ ID NO: 12442 - DNA, 122 bp, Homo sapiens
  misc_feature (61)..(62): /note="This region represents a CpG dinucleotide"
  misc_feature (61)..(61): /note="Nucleotide may be methylated to form 5-methylcytosine"
gtgatggtatttacatagtgtgctgtagaaacacaaaggaagggaacctagttcaccttacgggttcctctggtagggatttggttcacttaagagttttatgccactgtcgtagaactgaa

SEQ ID NO: 12443 - DNA, 122 bp, Homo sapiens
  misc_feature (61)..(62): /note="This region represents a CpG dinucleotide"
  misc_feature (61)..(61): /note="Nucleotide may be methylated to form 5-methylcytosine"
tcagttggaatgtttggacatcccagctcagcggctgtggtaccaggagctgtcaggaggcgggaatgcagagaatgtggctcactgtgctcccgcccgcccaggctgaatccgcagagagg

SEQ ID NO: 12444 - DNA, 122 bp, Homo sapiens
  misc_feature (61)..(62): /note="This region represents a CpG dinucleotide"
  misc_feature (61)..(61): /note="Nucleotide may be methylated to form 5-methylcytosine"
tccaatttaaagccagggcgagcaattaacttttctatcatcttgtcaggggagaaggttcgtgtttaatttgagacaaagtgacagaaatatatatacactgtatgtattactccaattta

SEQ ID NO: 12445 - DNA, 122 bp, Homo sapiens
  misc_feature (61)..(62): /note="This region represents a CpG dinucleotide"
  misc_feature (61)..(61): /note="Nucleotide may be methylated to form 5-methylcytosine"
cgtagggttcctaggttctggcttcactgctctggaggagggtgttgacaatgagtggcacgttgcctgtgcctttgagcaagagagcttttcaaaagcagagatacaggagggttcaggat

SEQ ID NO: 12446 - DNA, 122 bp, Homo sapiens
  misc_feature (61)..(62): /note="This region represents a CpG dinucleotide"
  misc_feature (61)..(61): /note="Nucleotide may be methylated to form 5-methylcytosine"
ccgaccgattcgcagcaccccacccccagtcggggccatccatccacctgattaactcgccggcagcaactcccagcgtagaaagtagggcaaatgaacacacacagtcggtaaagcaggaa

SEQ ID NO: 12447 - DNA, 122 bp, Homo sapiens
  misc_feature (61)..(62): /note="This region represents a CpG dinucleotide"
  misc_feature (61)..(61): /note="Nucleotide may be methylated to form 5-methylcytosine"
gagagatgggtgaaggattctgtccccagcctgacccccaggtgtgccaggcaggtactccggggaccgccaggatgagagagtgggcctgagcccgggcttttgctgaaaaggaggccgat

SEQ ID NO: 12448 - DNA, 122 bp, Homo sapiens
  misc_feature (61)..(62): /note="This region represents a CpG dinucleotide"
  misc_feature (61)..(61): /note="Nucleotide may be methylated to form 5-methylcytosine"
catgtcctgtgccagattctcgctggtgcccgagacactccccgatggagggttagggctcggagccctttaactccttcggcacagtggagaaaggtttaggaaatagcagaacaaacgca

SEQ ID NO: 12449 - DNA, 122 bp, Homo sapiens
  misc_feature (61)..(62): /note="This region represents a CpG dinucleotide"
  misc_feature (61)..(61): /note="Nucleotide may be methylated to form 5-methylcytosine"
ggaggctggaggtaaccagggctgcatttcactacagaggccacccaggacctggcctggcgcctgccccagcacccaggcttatccaatgcccacagggccaacagtgcagaggcattcct

SEQ ID NO: 12450 - DNA, 122 bp, Homo sapiens
  misc_feature (61)..(62): /note="This region represents a CpG dinucleotide"
  misc_feature (61)..(61): /note="Nucleotide may be methylated to form 5-methylcytosine"
ttagggcctgcttcctcataggtgaggctttctcactgtaacctcatatggccgaaggggcgagggagtctctcaggtctcttttataaaagcactgatctcattcctaaggcctctgccct

SEQ ID NO: 12451 - DNA, 122 bp, Homo sapiens
  misc_feature (61)..(62): /note="This region represents a CpG dinucleotide"
  misc_feature (61)..(61): /note="Nucleotide may be methylated to form 5-methylcytosine"
gaccttgctgcttcctgggctaagcagctgcagtgagggtgtgttgccctgaagcagttacgtcattcattaatccaaattctgaaagacaaatgagcatatggtgctaaaatacttttttt

SEQ ID NO: 12452 - DNA, 122 bp, Homo sapiens
  misc_feature (61)..(62): /note="This region represents a CpG dinucleotide"
  misc_feature (61)..(61): /note="Nucleotide may be methylated to form 5-methylcytosine"
tggggcgacacctgctctgatgctgcagacattctgtttgatgcggagaggccagccattcggctgtgattttgtagtctctggggagatattttttcatcactgttggtggagtgggagga

SEQ ID NO: 12453 - DNA, 122 bp, Homo sapiens
  misc_feature (61)..(62): /note="This region represents a CpG dinucleotide"
  misc_feature (61)..(61): /note="Nucleotide may be methylated to form 5-methylcytosine"
gagagcggcggctgctcctggaagttgtggtgtcgggagcccagccggtgccgccgcagccgccgcctagggcggtggggaggaggagggagccgcggggcttggcggggtcgggagggagg

SEQ ID NO: 12454 - DNA, 122 bp, Homo sapiens
  misc_feature (61)..(62): /note="This region represents a CpG dinucleotide"
  misc_feature (61)..(61): /note="Nucleotide may be methylated to form 5-methylcytosine"
tttggctctatcactgtgagaacctgggcaacttaatctgtcaggacctcggatcatcatcgctgaaatgaggatgacctcatattacttcaaaaggttgtggtgagggtagaattaatacg

SEQ ID NO: 12455 - DNA, 122 bp, Homo sapiens
  misc_feature (61)..(62): /note="This region represents a CpG dinucleotide"
  misc_feature (61)..(61): /note="Nucleotide may be methylated to form 5-methylcytosine"
gctgccagcctgggcagtgggtgagaagccgctctgctgggttacacatggcaggcccagcgccctgcaggctcagggaggagctctgccctgacccagccgaatctcacccatgcaggtgg

SEQ ID NO: 12456 - DNA, 122 bp, Homo sapiens
  misc_feature (61)..(62): /note="This region represents a CpG dinucleotide"
  misc_feature (61)..(61): /note="Nucleotide may be methylated to form 5-methylcytosine"
tcttttctcttaccagatgtcttgttaaccttctcagaggtatttagttttcctgaggggcgcagctgtttcccattgttctgtgggccagatgcttctggcactcccttcgaatcatttcc

SEQ ID NO: 12457 - DNA, 122 bp, Homo sapiens
  misc_feature (61)..(62): /note="This region represents a CpG dinucleotide"
  misc_feature (61)..(61): /note="Nucleotide may be methylated to form 5-methylcytosine"
tctgtaactggttgtgatcggttacctgtaaacaccactgcacttggaccagccagcagccgaattttcctaataaaagttgacacgcttttttaaaatttggtgacttggtaggaaggaaa

SEQ ID NO: 12458 - DNA, 122 bp, Homo sapiens
  misc_feature (61)..(62): /note="This region represents a CpG dinucleotide"
  misc_feature (61)..(61): /note="Nucleotide may be methylated to form 5-methylcytosine"
tgttcattgatgttggtgatgcctgtgagtcaccaccgccccctccctgccccaacagaccgttcccatgtggacaagagctaggagctagatttgtctctgtaaaaggtcaggtcactgga

SEQ ID NO: 12459 - DNA, 122 bp, Homo sapiens
  misc_feature (61)..(62): /note="This region represents a CpG dinucleotide"
  misc_feature (61)..(61): /note="Nucleotide may be methylated to form 5-methylcytosine"
taatgtcatatataagatggactcactgataaacagacttgaaagaaatgaggaagcaagcgttgtgtacatctggaggaagccgtttccaagcagagggggaacaaaagtaaaggcctgaa

SEQ ID NO: 12460 - DNA, 122 bp, Homo sapiens
  misc_feature (61)..(62): /note="This region represents a CpG dinucleotide"
  misc_feature (61)..(61): /note="Nucleotide may be methylated to form 5-methylcytosine"
tgacaggagctgccaggtacctagcagaggccaggagacacagcagggaggagatcccctcgctaaattcccaactggccaagatgcctgcattccacagccttcagcagagggccctagat

SEQ ID NO: 12461 - DNA, 122 bp, Homo sapiens
  misc_feature (61)..(62): /note="This region represents a CpG dinucleotide"
  misc_feature (61)..(61): /note="Nucleotide may be methylated to form 5-methylcytosine"
cccctggttctgaggcgttcagacttggactgagccacgttaccggctcctctggttctgcggcttgtaaacagcctgtcatgggactttgccttcgcaaccatgtgagtcaattcttccca

SEQ ID NO: 12462 - DNA, 122 bp, Homo sapiens
  misc_feature (61)..(62): /note="This region represents a CpG dinucleotide"
  misc_feature (61)..(61): /note="Nucleotide may be methylated to form 5-methylcytosine"
ggaggtgtggagggagaggcgcgggcaggaagggtggcgcttgggggccagcgccagttccgggtgggcgtgggctctgtggccactcacttggagtggctggcgggcgccaccagcccggg

SEQ ID NO: 12463 - DNA, 122 bp, Homo sapiens
  misc_feature (61)..(62): /note="This region represents a CpG dinucleotide"
  misc_feature (61)..(61): /note="Nucleotide may be methylated to form 5-methylcytosine"
ctgtattctatatggcaacactaaagacaggtagtgtcatcggtgctgaggtgggggcaccgtaggcctgtggggagccgaggaggtaacccaacccagcttggggccatcaggcttcctgg

SEQ ID NO: 12464 - DNA, 122 bp, Homo sapiens
  misc_feature (61)..(62): /note="This region represents a CpG dinucleotide"
  misc_feature (61)..(61): /note="Nucleotide may be methylated to form 5-methylcytosine"
aatttttaaaaatgaactgctgatacacacagtaacctggatgacgccctcaggtggctacgctgcatgaaaaccataatcctgggctacatactgtgtcattccatttgtataacattctt

SEQ ID NO: 12465 - DNA, 122 bp, Homo sapiens
  misc_feature (61)..(62): /note="This region represents a CpG dinucleotide"
  misc_feature (61)..(61): /note="Nucleotide may be methylated to form 5-methylcytosine"
ctatggtcaaggtgatggagtgacccagccagtcagtctgcaggatgtgtgattgcacaccgtccttaccaagcaaatagaggaagctcgagaaggtatttgcagagcctcagaaaaatgct

SEQ ID NO: 12466 - DNA, 122 bp, Homo sapiens
  misc_feature (61)..(62): /note="This region represents a CpG dinucleotide"
  misc_feature (61)..(61): /note="Nucleotide may be methylated to form 5-methylcytosine"
ccctatgttggtaatactgaaatgatgttaaatttccctgatttgttcttgaatttcctacgtccatttaaatacatggataatagtttgtttttttcgaaaagaatatacacaaggcacta

SEQ ID NO: 12467 - DNA, 122 bp, Homo sapiens
  misc_feature (61)..(62): /note="This region represents a CpG dinucleotide"
  misc_feature (61)..(61): /note="Nucleotide may be methylated to form 5-methylcytosine"
gcaagtttttgtacttctttgtgtttgaaattgatacaggagatagaaagaaattatttacgcagataatgagggcaaaagaatccttggtggaatgtcccttgtaacaaaaagcagcccaa

SEQ ID NO: 12468 - DNA, 122 bp, Homo sapiens
  misc_feature (61)..(62): /note="This region represents a CpG dinucleotide"
  misc_feature (61)..(61): /note="Nucleotide may be methylated to form 5-methylcytosine"
agcagcagtacagtggtatttcatctgttctaaaccacatccttttactgaatgttattccggaagcatttataaggcaggtgcccctttgaaagacattgtcctttaaagtagtttgaaac

SEQ ID NO: 12469 - DNA, 122 bp, Homo sapiens
  misc_feature (61)..(62): /note="This region represents a CpG dinucleotide"
  misc_feature (61)..(61): /note="Nucleotide may be methylated to form 5-methylcytosine"
cgaactcccgacctcaggtgatccgcccgccttggcctcccaaagtgctgggattacaggcgtaagccaccacacccagccaatcagggctctttgaattccttcactgatttatccccagt

SEQ ID NO: 12470 - DNA, 122 bp, Homo sapiens
  misc_feature (61)..(62): /note="This region represents a CpG dinucleotide"
  misc_feature (61)..(61): /note="Nucleotide may be methylated to form 5-methylcytosine"
accacgccaggcagccaggccagaactcaccacaccaggaagccaggccaggagtcaccacgccaggcagccagggcactgagcgcatgacctatgctgactcatttaatcctcctgaccac

SEQ ID NO: 12471 - DNA, 122 bp, Homo sapiens
  misc_feature (61)..(62): /note="This region represents a CpG dinucleotide"
  misc_feature (61)..(61): /note="Nucleotide may be methylated to form 5-methylcytosine"
atattcctcaagaatataaaatgcctcatcaacatgagacaacagcaggaagcacccattcgtagtaatcctctgtatggaggaggctgttacataaccacaaaggcacaaagctgcagttt

SEQ ID NO: 12472 - DNA, 122 bp, Homo sapiens
  misc_feature (61)..(62): /note="This region represents a CpG dinucleotide"
  misc_feature (61)..(61): /note="Nucleotide may be methylated to form 5-methylcytosine"
tggtgcagtgaggccctctctgtttcatactcaggcagatatcaagtcatttagagcagccgctctcatggaatatcaacctgaggcaccccacccttcctgggcagaggttctggtgcagt

SEQ ID NO: 12473 - DNA, 122 bp, Homo sapiens
  misc_feature (61)..(62): /note="This region represents a CpG dinucleotide"
  misc_feature (61)..(61): /note="Nucleotide may be methylated to form 5-methylcytosine"
aacacacaagatggccctgcacaacagttatctagccccaaatgtcaataatgccgagtacgatgtaacctactatagctgtcatttattgagtgctgttaggtgccaagtgcagtactaag

SEQ ID NO: 12474 - DNA, 122 bp, Homo sapiens
  misc_feature (61)..(62): /note="This region represents a CpG dinucleotide"
  misc_feature (61)..(61): /note="Nucleotide may be methylated to form 5-methylcytosine"
aatggctcagatctccgcggagatggagctggaaaagcggagccctcgctccacggctcgcggcagttccttgaagcccacccaggtggggagcccctggcgcagcccaactctctgcagtc

SEQ ID NO: 12475 - DNA, 122 bp, Homo sapiens
  misc_feature (61)..(62): /note="This region represents a CpG dinucleotide"
  misc_feature (61)..(61): /note="Nucleotide may be methylated to form 5-methylcytosine"
gggacggaaaatgtcttcctggtgcctgtcctagtcctaatgcctagtacatataagatacgttgatacttgttgaatgaataaatgtttactcagccttatctctctccagttgcccgcta

SEQ ID NO: 12476 - DNA, 122 bp, Homo sapiens
  misc_feature (61)..(62): /note="This region represents a CpG dinucleotide"
  misc_feature (61)..(61): /note="Nucleotide may be methylated to form 5-methylcytosine"
ttcactcacacttgacattgtcgcgtttttttcatttcagccacactgatgaatgtgtaacggcttctcatgttttaatttgcatttccctgatgactaatgatagtgactgttcctgcatc

SEQ ID NO: 12477 - DNA, 122 bp, Homo sapiens
  misc_feature (61)..(62): /note="This region represents a CpG dinucleotide"
  misc_feature (61)..(61): /note="Nucleotide may be methylated to form 5-methylcytosine"
ctcaaaaacgcggcataaatggaaactaggccctgaagccagagcctcaggactggctcccgggaatgtttgaagatcatcgcgtatcttggaattgccaggcttcctgctccacagattcc

SEQ ID NO: 12478 - DNA, 122 bp, Homo sapiens
  misc_feature (61)..(62): /note="This region represents a CpG dinucleotide"
  misc_feature (61)..(61): /note="Nucleotide may be methylated to form 5-methylcytosine"
tctctattacagatgagacaacaggctcagaaagtttaaagaactcattgaaagtcaccccgatggtaaatggtagatttggattcaacaatgtatgctggcatcagaccagataaacttac

SEQ ID NO: 12479 - DNA, 122 bp, Homo sapiens
  misc_feature (61)..(62): /note="This region represents a CpG dinucleotide"
  misc_feature (61)..(61): /note="Nucleotide may be methylated to form 5-methylcytosine"
agcaagaaagcaagggctggcactgggccgcaggtgacttctgctgcctgggggtgtgtccgcttgcctgtgtggcacaggacgaggtcccccaggctgccgagaggctcccaggtagggct

SEQ ID NO: 12480 - DNA, 122 bp, Homo sapiens
  misc_feature (61)..(62): /note="This region represents a CpG dinucleotide"
  misc_feature (61)..(61): /note="Nucleotide may be methylated to form 5-methylcytosine"
tatggtccccagaagtcctgatgggtcagcaagagctgtattaagcagagcaggcaacagcggcaaaaactagcagaacatcctcaagccaggactgcatgtgaggaagacagcgccagcat

SEQ ID NO: 12481 - DNA, 122 bp, Homo sapiens
  misc_feature (61)..(62): /note="This region represents a CpG dinucleotide"
  misc_feature (61)..(61): /note="Nucleotide may be methylated to form 5-methylcytosine"
acgcacgttatctcatttaagccctacaaaatactatgaggtcagtaccagcattgtttccgtttatagatgaggcaaatgagactcagagagcaaagcaacttgctcaagttctttttttg

SEQ ID NO: 12482 - DNA, 122 bp, Homo sapiens
  misc_feature (61)..(62): /note="This region represents a CpG dinucleotide"
  misc_feature (61)..(61): /note="Nucleotide may be methylated to form 5-methylcytosine"
ataaaataaaggaaacctattctgctactattctgtatttattaagtaaaagaaaaaatacggggaaatttacaattgcatccgtcgttagagagcatgaaatgttaaagataaccctgaga

SEQ ID NO: 12483 - DNA, 122 bp, Homo sapiens
  misc_feature (61)..(62): /note="This region represents a CpG dinucleotide"
  misc_feature (61)..(61): /note="Nucleotide may be methylated to form 5-methylcytosine"
ttgagggaagtacaaagcttaaccgtagacaggaacctggaaatgctgggtcagcctcttcgtctacccgtacatgacatacaaaattattccatgttacttcaatacttttacccagagcc

SEQ ID NO: 12484 - DNA, 122 bp, Homo sapiens
  misc_feature (61)..(62): /note="This region represents a CpG dinucleotide"
  misc_feature (61)..(61): /note="Nucleotide may be methylated to form 5-methylcytosine"
catatttcagcagaggtcctcagtagagccacatgcaggagatacatgcatttgtccactcgtcactcacttagtcatttgttcacttatatatccactctctcactcatgccttcagtcat

SEQ ID NO: 12485 - DNA, 122 bp, Homo sapiens
  misc_feature (61)..(62): /note="This region represents a CpG dinucleotide"
  misc_feature (61)..(61): /note="Nucleotide may be methylated to form 5-methylcytosine"
ttttcagctcacttcaagggtacctgaagcgaattggcaccaaagcagcagctgtattgccgcagttctagcttcaccttcacgatgtttcccttggtcaaaagcgcactaaatcgtctcca

SEQ ID NO: 12486 - DNA, 122 bp, Homo sapiens
  misc_feature (61)..(62): /note="This region represents a CpG dinucleotide"
  misc_feature (61)..(61): /note="Nucleotide may be methylated to form 5-methylcytosine"
atgtcggcatgggtagtaggctgaatcataatccccaaagactttggatcctaatcccttcgtatcagtgaatgttactttatatggaaaaaaaggtcatagcagatgtgattaaggatctt

SEQ ID NO: 12487 - DNA, 122 bp, Homo sapiens
  misc_feature (61)..(62): /note="This region represents a CpG dinucleotide"
  misc_feature (61)..(61): /note="Nucleotide may be methylated to form 5-methylcytosine"
aaatctgagaaagcaacacaaatttatggtcttctttaaatcaacatttgaaaacaccatcgcaaaattacaactgagacagtgagagatctaacctaaccaattccatcttgcttctaacc

SEQ ID NO: 12488 - DNA, 122 bp, Homo sapiens
  misc_feature (61)..(62): /note="This region represents a CpG dinucleotide"
  misc_feature (61)..(61): /note="Nucleotide may be methylated to form 5-methylcytosine"
taaaattggaataaaagctacccttaaatctgggtctgaactgcttccttgacaggcaagcgcctacgagtacaggttagtcattcaagagtttataaattagtagtctgagctgtgagcca

SEQ ID NO: 12489 - DNA, 122 bp, Homo sapiens
  misc_feature (61)..(62): /note="This region represents a CpG dinucleotide"
  misc_feature (61)..(61): /note="Nucleotide may be methylated to form 5-methylcytosine"
ttctttcatccagcaaacatctactacggcatcttctaagtgagggcatgccctagagggcgtcgtaggtgcctcagggatccagagttgctgagagcctcctagacctggtgaggttattt

SEQ ID NO: 12490 - DNA, 122 bp, Homo sapiens
  misc_feature (61)..(62): /note="This region represents a CpG dinucleotide"
  misc_feature (61)..(61): /note="Nucleotide may be methylated to form 5-methylcytosine"
accttaccccaaagagctctccaagcccctgacatttgggggattgtcagagctctgggccgccagagaaaggccctgtctcagaagccaaagtcatcaacagaaaaggaattgaatgagca

SEQ ID NO: 12491 - DNA, 122 bp, Homo sapiens
  misc_feature (61)..(62): /note="This region represents a CpG dinucleotide"
  misc_feature (61)..(61): /note="Nucleotide may be methylated to form 5-methylcytosine"
caactgagaaaacgcaggattagaaaatggggcattcattctgctagatactgattgccacgtaagaatatcagaagtataaatggacagaaagatggctcaggtcagcaaaaacacaaata

SEQ ID NO: 12492 - DNA, 122 bp, Homo sapiens
  misc_feature (61)..(62): /note="This region represents a CpG dinucleotide"
  misc_feature (61)..(61): /note="Nucleotide may be methylated to form 5-methylcytosine"
atcaccccatcactccagccaacaggcaaccaatgaccagatatgtgactagctagttaccgcttgtgaatcctccagctacaaaagtgagctcagccaagatcagctgagcctggcttatg

SEQ ID NO: 12493 - DNA, 122 bp, Homo sapiens
  misc_feature (61)..(62): /note="This region represents a CpG dinucleotide"
  misc_feature (61)..(61): /note="Nucleotide may be methylated to form 5-methylcytosine"
gcggggctctgcagtggagcctgagccgtgccggccgaggcgtggtgtgggggaggctgccggccctctcgcgcgcggggtgttcacgcctagagcgctggggctgggggcctaccacccgg

SEQ ID NO: 12494 - DNA, 122 bp, Homo sapiens
  misc_feature (61)..(62): /note="This region represents a CpG dinucleotide"
  misc_feature (61)..(61): /note="Nucleotide may be methylated to form 5-methylcytosine"
tgcaggaagggaaagttcagttgatggcaataacatctttgtgcccttattagtcatcagcgcccagataaggcagatagggcagacctatctccatgaattaatctttagaagtaggatgt

SEQ ID NO: 12495 - DNA, 122 bp, Homo sapiens
  misc_feature (61)..(62): /note="This region represents a CpG dinucleotide"
  misc_feature (61)..(61): /note="Nucleotide may be methylated to form 5-methylcytosine"
aatataagtaaaaataccagagcagaaaacacactgtaagataagcattgtttcatggaacgtctaagtcacacgtgcatgtgagtgtgtgtgctgagtcatgattaaaagtgtatttctca

SEQ ID NO: 12496 - DNA, 122 bp, Homo sapiens
  misc_feature (61)..(62): /note="This region represents a CpG dinucleotide"
  misc_feature (61)..(61): /note="Nucleotide may be methylated to form 5-methylcytosine"
tttttgtttttttgctcagacaataaaaagccttattccctttcaattcagggtttcactcgttgttcttgaaaattcccttcagtttagctctcaagatggccttgcttgctgagcatgag

SEQ ID NO: 12497 - DNA, 122 bp, Homo sapiens
  misc_feature (61)..(62): /note="This region represents a CpG dinucleotide"
  misc_feature (61)..(61): /note="Nucleotide may be methylated to form 5-methylcytosine"
caaatagagcaggattgtaatcacagctactattttttgggcatgttaggacttttcacacgttatgtttagtcttttccatcatcctgtggtagggcagatattattttcctcttcacttt

SEQ ID NO: 12498 - DNA, 122 bp, Homo sapiens
  misc_feature (61)..(62): /note="This region represents a CpG dinucleotide"
  misc_feature (61)..(61): /note="Nucleotide may be methylated to form 5-methylcytosine"
gagtcattccttatttaatgaattcaactttaaaaccagaacatgattcccagaagggagcgagcttcctgtgggaagtctgtttcccctgcagcctggctctactaagaattctgtttgct

SEQ ID NO: 12499 - DNA, 122 bp, Homo sapiens
  misc_feature (61)..(62): /note="This region represents a CpG dinucleotide"
  misc_feature (61)..(61): /note="Nucleotide may be methylated to form 5-methylcytosine"
gacattagtttctgcccttaaaaaacttctgttcagtaaatatcctgctagagactttaacggaataacaagtaaaactctatggctaaaaaagaggaagtcagttgagtatcgtaatctaa

SEQ ID NO: 12500 - DNA, 122 bp, Homo sapiens
  misc_feature (61)..(62): /note="This region represents a CpG dinucleotide"
  misc_feature (61)..(61): /note="Nucleotide may be methylated to form 5-methylcytosine"
catattcagctaaaatctgacaggtctaatgatctaatactccagttatttaatgaagaacgtgatgaggcttgcatgtttaccaaaccttggtgttttttagttatcggcagtaagaccat

SEQ ID NO: 12501 - DNA, 122 bp, Homo sapiens
  misc_feature (61)..(62): /note="This region represents a CpG dinucleotide"
  misc_feature (61)..(61): /note="Nucleotide may be methylated to form 5-methylcytosine"
ggcttccatccaagtgtttcttgactgcctgtcatgggccaagtctctgggtgcaggtaacggaaacctaattcagactgcctcaggcagaagcaggcactgactggaaagatatggaggtg

SEQ ID NO: 12502 - DNA, 122 bp, Homo sapiens
  misc_feature (61)..(62): /note="This region represents a CpG dinucleotide"
  misc_feature (61)..(61): /note="Nucleotide may be methylated to form 5-methylcytosine"
ttcattttgttccattggattctgacatgtttagtctttagctgtaagtactgtaaccaacgcagaagtggtattgcaaaagcagagacggtaatagagaaattttagtaacatcattatac

SEQ ID NO: 12503 - DNA, 122 bp, Homo sapiens
  misc_feature (61)..(62): /note="This region represents a CpG dinucleotide"
  misc_feature (61)..(61): /note="Nucleotide may be methylated to form 5-methylcytosine"
aaccctctgtaaacactcaatgtgttctcaccttgttatcattcccaatgatgtcgaatgcgtggttgccctctccagtataaaagtttgatgcagctttgcctggatgtacctgtctataa

SEQ ID NO: 12504 - DNA, 122 bp, Homo sapiens
  misc_feature (61)..(62): /note="This region represents a CpG dinucleotide"
  misc_feature (61)..(61): /note="Nucleotide may be methylated to form 5-methylcytosine"
tgggaggatatttttagtgcaccatcctgaggtgtggctggagcctgcggcctcctatgacgcatgacaatagttttggctccgtttgccagtgattcagacagctggttttggacttcagg

SEQ ID NO: 12505 - DNA, 122 bp, Homo sapiens
  misc_feature (61)..(62): /note="This region represents a CpG dinucleotide"
  misc_feature (61)..(61): /note="Nucleotide may be methylated to form 5-methylcytosine"
acaatgttctgatggttgtgttcttaacagctaattccagccactgagatatggaggccacgtttataattgtggctccttttcaggccactcaaatcctgttctacttcatttgtctcata

SEQ ID NO: 12506 - DNA, 122 bp, Homo sapiens
  misc_feature (61)..(62): /note="This region represents a CpG dinucleotide"
  misc_feature (61)..(61): /note="Nucleotide may be methylated to form 5-methylcytosine"
tccactcactcccctacgcttattgtcctgcagctgcaactcatgcctgccaatccccagcggggccatgaactcagatgcctttgcttcatgtgggacgtgccctcattccctttggcagg

SEQ ID NO: 12507 - DNA, 122 bp, Homo sapiens
  misc_feature (61)..(62): /note="This region represents a CpG dinucleotide"
  misc_feature (61)..(61): /note="Nucleotide may be methylated to form 5-methylcytosine"
gtcaacagtgcctggaggtgttcttgactttggcagagccttcttctctacctccatactcgtccccatcttaaacctaacaagttgagaaggacacttagactgatttgaaagtttgcagt

SEQ ID NO: 12508 - DNA, 122 bp, Homo sapiens
  misc_feature (61)..(62): /note="This region represents a CpG dinucleotide"
  misc_feature (61)..(61): /note="Nucleotide may be methylated to form 5-methylcytosine"
gctaggcagagacgccccaggccatgttagagctttgagtgaggcctggtaacagggaggcgctgtcacctactggccttgccaatccagctccaagatgctgagcctgaagctccccaggc

SEQ ID NO: 12509 - DNA, 122 bp, Homo sapiens
  misc_feature (61)..(62): /note="This region represents a CpG dinucleotide"
  misc_feature (61)..(61): /note="Nucleotide may be methylated to form 5-methylcytosine"
cagcagtcttttgcaaagcctttcaaatgccccacagtcctgagcagagttcatatggaacgtggccttgtccaggttgccttgaccgcagtgactttcctcatgctctttcctctgctcta

SEQ ID NO: 12510 - DNA, 122 bp, Homo sapiens
  misc_feature (61)..(62): /note="This region represents a CpG dinucleotide"
  misc_feature (61)..(61): /note="Nucleotide may be methylated to form 5-methylcytosine"
actttggagtactaattaagttttatacaatgagcaggttaggtatgacttgacatcatccgtaacagccaaaatgatgtatcctccacctacatgttccagtatttcatttgttagtatta

SEQ ID NO: 12511 - DNA, 122 bp, Homo sapiens
  misc_feature (61)..(62): /note="This region represents a CpG dinucleotide"
  misc_feature (61)..(61): /note="Nucleotide may be methylated to form 5-methylcytosine"
ccaaggggtggagctgggaacattcctcataaagcgagtcgtcaaggagttgcaggtaagcgacacgcagggagccccggtcacgcttggcttccgtgtggtcaggtcagcgaacctcgtgg

SEQ ID NO: 12512 - DNA, 122 bp, Homo sapiens
  misc_feature (61)..(62): /note="This region represents a CpG dinucleotide"
  misc_feature (61)..(61): /note="Nucleotide may be methylated to form 5-methylcytosine"
cattatgctaagtgaaagtaggcagtcacaaaaaaaacaaatattagtattccatatacacgaaaggttcagaataggcaaatatattaagaatgcatattggttgttgcttcgtgctactg

SEQ ID NO: 12513 - DNA, 122 bp, Homo sapiens
  misc_feature (61)..(62): /note="This region represents a CpG dinucleotide"
  misc_feature (61)..(61): /note="Nucleotide may be methylated to form 5-methylcytosine"
cccctatgcacagataacacaaacagctaacgagtattgatcttactatgggccaggcaacgtgacagttgctttatacatcaaatctcttgtaatccccactccaacccggtgaggtaggt

SEQ ID NO: 12514 - DNA, 122 bp, Homo sapiens
  misc_feature (61)..(62): /note="This region represents a CpG dinucleotide"
  misc_feature (61)..(61): /note="Nucleotide may be methylated to form 5-methylcytosine"
aacactaactcaggcttctagtggtctgatgagcttaaaaatcaattaataagccgggcgcggtggctcaaacctgtaatcccagcactttgggaggccgaggcgggcggatcacgaggtca

SEQ ID NO: 12515 - DNA, 122 bp, Homo sapiens
  misc_feature (61)..(62): /note="This region represents a CpG dinucleotide"
  misc_feature (61)..(61): /note="Nucleotide may be methylated to form 5-methylcytosine"
ggaggtggtagaggtgatgtattagtcagggttctccagagaaacagaagcagcaggatacgtgtggatgtgcgtctagagagatttattttaaggatctgactcacaattgtagaggctgg

SEQ ID NO: 12516 - DNA, 122 bp, Homo sapiens
  misc_feature (61)..(62): /note="This region represents a CpG dinucleotide"
  misc_feature (61)..(61): /note="Nucleotide may be methylated to form 5-methylcytosine"
gctgactattctgtaatcaacctaactaggcttaagatgtactgcattaaacttcttacacgctcctcacctttcgtattcctctgatatataaggaacacattctggtatagtcttttaga

SEQ ID NO: 12517 - DNA, 122 bp, Homo sapiens
  misc_feature (61)..(62): /note="This region represents a CpG dinucleotide"
  misc_feature (61)..(61): /note="Nucleotide may be methylated to form 5-methylcytosine"
gctgtcttcctagcttgcagacaagtgccttctcaatgtgtcctcacatggcctttcttccgtgcatgagtgaagagaaagctctctggcatcacccttttctcataagggcactaatccta

SEQ ID NO: 12518 - DNA, 122 bp, Homo sapiens
  misc_feature (61)..(62): /note="This region represents a CpG dinucleotide"
  misc_feature (61)..(61): /note="Nucleotide may be methylated to form 5-methylcytosine"
ctccagctgtgcgacagccaaggctacactgtttggctcacatacttccttattttgttccgcatgagaaaaagggcagaaggagccatgtggggtcactcaggagactgagggtgcaccag

SEQ ID NO: 12519 - DNA, 122 bp, Homo sapiens
  misc_feature (61)..(62): /note="This region represents a CpG dinucleotide"
  misc_feature (61)..(61): /note="Nucleotide may be methylated to form 5-methylcytosine"
tacatataactgaactcccgtaggattgggtgaagtctcttgagagcagctcactgtgggcgtgcggcaagagatcaacatttatctcagctgcttatatgtggtctaagtggatttggtag

SEQ ID NO: 12520 - DNA, 122 bp, Homo sapiens
  misc_feature (61)..(62): /note="This region represents a CpG dinucleotide"
  misc_feature (61)..(61): /note="Nucleotide may be methylated to form 5-methylcytosine"
tgcctcagcaattttctgacatttatgatagactggattctgcatttcaccagtcagctacgtgaggagagtctaccttcatcaccctccaacatctttgattccagcccatgtataaccag

SEQ ID NO: 12521 - DNA, 122 bp, Homo sapiens
  misc_feature (61)..(62): /note="This region represents a CpG dinucleotide"
  misc_feature (61)..(61): /note="Nucleotide may be methylated to form 5-methylcytosine"
gcctctgccactgctgtgctatgagtcaggatgcttgctgggctggtagcagctaacccacgtcatcagataatgtttactcacatgcctggagagttagccagaatagcttcaggatcagt

SEQ ID NO: 12522 - DNA, 122 bp, Homo sapiens
  misc_feature (61)..(62): /note="This region represents a CpG dinucleotide"
  misc_feature (61)..(61): /note="Nucleotide may be methylated to form 5-methylcytosine"
agagaagaaaccaactccgtgcctgagggcagctgttgagtgccaggccatggaagttcccgcatcagggagagccaggttaggtgggcaaacagcagcctcagcacctggtagtaagctaa

SEQ ID NO: 12523 - DNA, 122 bp, Homo sapiens
  misc_feature (61)..(62): /note="This region represents a CpG dinucleotide"
  misc_feature (61)..(61): /note="Nucleotide may be methylated to form 5-methylcytosine"
cctgtggtcacccttaacatctatccaaaagctgatgaaagcagcagcctgaaggcatcacgtggtacaagaggagcaggtaggcctgaaagagcaccccaccccaacttcccctttctttc

SEQ ID NO: 12524 - DNA, 122 bp, Homo sapiens
  misc_feature (61)..(62): /note="This region represents a CpG dinucleotide"
  misc_feature (61)..(61): /note="Nucleotide may be methylated to form 5-methylcytosine"
actgcctagaaaaagtggatcaagaagaggtgtattctcggtggtggttgggagggcgggcgcaataggactcaataaggggaaggagtaacccttacgaaagaaaaacataagggctcaaa

SEQ ID NO: 12525 - DNA, 122 bp, Homo sapiens
  misc_feature (61)..(62): /note="This region represents a CpG dinucleotide"
  misc_feature (61)..(61): /note="Nucleotide may be methylated to form 5-methylcytosine"
gaaaatgaaagtggcatttgtttacacagcagtggaaacacactaagcaaaccattctaccgataacacctgttagctggcattaaaaaaaaaaaaggtaaaagtattttcaacaaataaac

SEQ ID NO: 12526 - DNA, 122 bp, Homo sapiens
  misc_feature (61)..(62): /note="This region represents a CpG dinucleotide"
  misc_feature (61)..(61): /note="Nucleotide may be methylated to form 5-methylcytosine"
gtgcccagctctgttggcaataaaaccttgtttctggtttcactgcaagacgttatttaacgctagtggcaccagaggttccaacaagaacacatgagaggccttatccagttacgaaagag

SEQ ID NO: 12527 - DNA, 122 bp, Homo sapiens
  misc_feature (61)..(62): /note="This region represents a CpG dinucleotide"
  misc_feature (61)..(61): /note="Nucleotide may be methylated to form 5-methylcytosine"
gaatgctggcccagaggaatcaaagtctcagagtgaacctcctcttgtctccattttctccgccatctcacacccggcattagaaattacaattcatcaatcagcgtgatgaacattagcat

SEQ ID NO: 12528 - DNA, 122 bp, Homo sapiens
  misc_feature (61)..(62): /note="This region represents a CpG dinucleotide"
  misc_feature (61)..(61): /note="Nucleotide may be methylated to form 5-methylcytosine"
cagggaggaaactcaaatcacccagaggctaggcaaagctatatgtcacaatcccacctgcgggcaggcccaaggatgagtcacaatcccacacatgtcccaggtccagtctctcacctgag

SEQ ID NO: 12529 - DNA, 122 bp, Homo sapiens
  misc_feature (61)..(62): /note="This region represents a CpG dinucleotide"
  misc_feature (61)..(61): /note="Nucleotide may be methylated to form 5-methylcytosine"
ctgttcacttctttgtcttatcttgatcacttcctctattctctaagtttcattacatcacgtgactttaagtatttgtatatatttcttcctctgaaggcctgtggtgatcttttctcttt

SEQ ID NO: 12530 - DNA, 122 bp, Homo sapiens
  misc_feature (61)..(62): /note="This region represents a CpG dinucleotide"
  misc_feature (61)..(61): /note="Nucleotide may be methylated to form 5-methylcytosine"
ttcactttattcctgaaacccaggctggctgctctaagttgatctggtgccttggtcactcgtggcttctttcttctatgccagctctgtcttctctacacttcctctggaggagtaggcct

SEQ ID NO: 12531 - DNA, 122 bp, Homo sapiens
  misc_feature (61)..(62): /note="This region represents a CpG dinucleotide"
  misc_feature (61)..(61): /note="Nucleotide may be methylated to form 5-methylcytosine"
agagagcaaacccgcactgcttggaggaggaaatcctctaattgcctccacactcctgctcgcttccatctgcttgcatttaaggaaacccaactactgggctcctcgcagctgtagagaaa

SEQ ID NO: 12532 - DNA, 122 bp, Homo sapiens
  misc_feature (61)..(62): /note="This region represents a CpG dinucleotide"
  misc_feature (61)..(61): /note="Nucleotide may be methylated to form 5-methylcytosine"
tgtttgtgttagccttaccctgtccctgccccaccttggttccccttgtctatggagccccgccttgtgagccaggaagcagcgtctcatcaggacagaaggtaggatgaagacatggggta

SEQ ID NO: 12533 - DNA, 122 bp, Homo sapiens
  misc_feature (61)..(62): /note="This region represents a CpG dinucleotide"
  misc_feature (61)..(61): /note="Nucleotide may be methylated to form 5-methylcytosine"
catgtcaggaggcaaaggggaagcaagatgccttcctcacaaggcggccggaagaagtgccgagaaaggggaaagagcctcttacataaccatcagctgtggtgagaattcactcactatca

SEQ ID NO: 12534 - DNA, 122 bp, Homo sapiens
  misc_feature (61)..(62): /note="This region represents a CpG dinucleotide"
  misc_feature (61)..(61): /note="Nucleotide may be methylated to form 5-methylcytosine"
gagccttgctgagggcactgaagctccggggagtttatagctggaggctcgggcccgccccgaggggagagggagggggagagaattcctttgctcaaacacaagcctgggagttcagagac

SEQ ID NO: 12535 - DNA, 122 bp, Homo sapiens
  misc_feature (61)..(62): /note="This region represents a CpG dinucleotide"
  misc_feature (61)..(61): /note="Nucleotide may be methylated to form 5-methylcytosine"
caccatgttggtcaggctgatctcataacaatgccttcctaaacaatgcctaagcctgggcgtggtggttcacacctgtaatcccagcactttgggaggctcaggtgagtggatcacttgag

SEQ ID NO: 12536 - DNA, 122 bp, Homo sapiens
  misc_feature (61)..(62): /note="This region represents a CpG dinucleotide"
  misc_feature (61)..(61): /note="Nucleotide may be methylated to form 5-methylcytosine"
taaacactcaataaatggtccttgtggttgcactgaggagcaacatgatagtttatagaacgtgggctggaaagatgggcacgcaaaggttcaacatgcagctttgcacccaaaagctgtga

SEQ ID NO: 12537 - DNA, 122 bp, Homo sapiens
  misc_feature (61)..(62): /note="This region represents a CpG dinucleotide"
  misc_feature (61)..(61): /note="Nucleotide may be methylated to form 5-methylcytosine"
cacccaacaatgatgaaagcagtcagccttaggatgaagtcaacaatgaattcagtaggacggagatggaaaaaacccgagtcatggaaacatcactgaatcaacaagcctgaggcttacct

SEQ ID NO: 12538 - DNA, 122 bp, Homo sapiens
  misc_feature (61)..(62): /note="This region represents a CpG dinucleotide"
  misc_feature (61)..(61): /note="Nucleotide may be methylated to form 5-methylcytosine"
taggatctaagcagacatgataggagcagaggctttcattcctgcacttctgccatccaccgtaagataaacatgctccgttggcactggtcccaacatgagaaacaactggaggaaacctg

SEQ ID NO: 12539 - DNA, 122 bp, Homo sapiens
  misc_feature (61)..(62): /note="This region represents a CpG dinucleotide"
  misc_feature (61)..(61): /note="Nucleotide may be methylated to form 5-methylcytosine"
tgaaaaacgaccaaactgtcttccaaagtagctcttagagacaacctgtccacagaagaacgcagcaagccccctcccctaaatgccctgcagcttatttcttctgagatgctgcccctact

SEQ ID NO: 12540 - DNA, 122 bp, Homo sapiens
  misc_feature (61)..(62): /note="This region represents a CpG dinucleotide"
  misc_feature (61)..(61): /note="Nucleotide may be methylated to form 5-methylcytosine"
cctgtcagcaatcactgttctgatttttatctctttagatgtgttttgattgttcttgaacgttatataaatgaaatcctactgcatgtactcttctgtgtctgacttcttttacttaacag

SEQ ID NO: 12541 - DNA, 122 bp, Homo sapiens
  misc_feature (61)..(62): /note="This region represents a CpG dinucleotide"
  misc_feature (61)..(61): /note="Nucleotide may be methylated to form 5-methylcytosine"
ggtagaaactacggcaaactggacagtgcatgcccatcatgggaagcagcttctattccacgccaggtaacttcagccatgtgagaatgcgggcccaagttgttatcggatttcccgattgt

SEQ ID NO: 12542 - DNA, 122 bp, Homo sapiens
  misc_feature (61)..(62): /note="This region represents a CpG dinucleotide"
  misc_feature (61)..(61): /note="Nucleotide may be methylated to form 5-methylcytosine"
gaggatccccagctgatgagcagcagcgggccaccctgtcaccgagcgtgggtgcatgtccgatgtgacccagcaccctctcagaggagggagagcacacgttcacactcacacacactcgt

SEQ ID NO: 12543 - DNA, 122 bp, Homo sapiens
  misc_feature (61)..(62): /note="This region represents a CpG dinucleotide"
  misc_feature (61)..(61): /note="Nucleotide may be methylated to form 5-methylcytosine"
aaaaatgaaaagcatttgcaggatctggcccttgcccaacttttcagtcttgtaaagtgccgcccttcctcttgaactctatgctttagacatcttatgtcccttaagtttcttaaactcac

SEQ ID NO: 12544 - DNA, 122 bp, Homo sapiens
  misc_feature (61)..(62): /note="This region represents a CpG dinucleotide"
  misc_feature (61)..(61): /note="Nucleotide may be methylated to form 5-methylcytosine"
aaagaatgagcctggtcaacaggaaatgtacatcagtgtgcaaaagtgacaatattaatacgacagctaacatttgagcagtaattctgtgccaggcactatgctgagggccttacatgcat

SEQ ID NO: 12545 - DNA, 122 bp, Homo sapiens
  misc_feature (61)..(62): /note="This region represents a CpG dinucleotide"
  misc_feature (61)..(61): /note="Nucleotide may be methylated to form 5-methylcytosine"
tttgaagcacatattatggcttatgctgttgaaaactctccagtgttttagcataatgtccgagtcaagttagaacacaggtctctgctaattgtcatatcttagatgattgcctgataaag

SEQ ID NO: 12546 - DNA, 122 bp, Homo sapiens
  misc_feature (61)..(62): /note="This region represents a CpG dinucleotide"
  misc_feature (61)..(61): /note="Nucleotide may be methylated to form 5-methylcytosine"
aaaagtctaaaccctgggtgtgcatgttaattcgtatttctctatccacacctgggaacccgcctctcaaagcagtcacttccaagaaggaggaatgtttgtgctgtgtagggcatctgtgg

SEQ ID NO: 12547 - DNA, 122 bp, Homo sapiens
  misc_feature (61)..(62): /note="This region represents a CpG dinucleotide"
  misc_feature (61)..(61): /note="Nucleotide may be methylated to form 5-methylcytosine"
actacactacaacctgtgacatcagggcatcagcatttgtgactaagtttaccaccttctcgcagacagtttgaactttttccaactgtcctgataacgtgctttacagcaaaagggcccag

SEQ ID NO: 12548 - DNA, 122 bp, Homo sapiens
  misc_feature (61)..(62): /note="This region represents a CpG dinucleotide"
  misc_feature (61)..(61): /note="Nucleotide may be methylated to form 5-methylcytosine"
agcccattccaacaatcagttcaagacaaatataggtcctttgagaattataaattacaacgggggattctcaaaaggatactcagaatttaaaaacgtctatggttttccagcttctggaa

SEQ ID NO: 12549 - DNA, 122 bp, Homo sapiens
  misc_feature (61)..(62): /note="This region represents a CpG dinucleotide"
  misc_feature (61)..(61): /note="Nucleotide may be methylated to form 5-methylcytosine"
gaaagtttctggcacctaggaagtgttcagtaaatatttattgaataagtttatgtaaaacgtctcagactccttagagaaactggtcttttggggttggagaataaagttctttacctcat

SEQ ID NO: 12550 - DNA, 122 bp, Homo sapiens
  misc_feature (61)..(62): /note="This region represents a CpG dinucleotide"
  misc_feature (61)..(61): /note="Nucleotide may be methylated to form 5-methylcytosine"
tgcagaatggaggcataagccaagggctttgggtccttagtgttgggagtgagtggaccacgtaagggaaaggaaaaaaatctcgggacctccccaaattcttatgcaaaaggaaaggtgaa

SEQ ID NO: 12551 - DNA, 122 bp, Homo sapiens
  misc_feature (61)..(62): /note="This region represents a CpG dinucleotide"
  misc_feature (61)..(61): /note="Nucleotide may be methylated to form 5-methylcytosine"
acactttcacatgaggttattacaggactctaaatagcaaaggcaaacctgaatctaaaacgctttttaaaaaactaagtgatttccctttaatctactgcaccttaatttgccatctattt

SEQ ID NO: 12552 - DNA, 122 bp, Homo sapiens
  misc_feature (61)..(62): /note="This region represents a CpG dinucleotide"
  misc_feature (61)..(61): /note="Nucleotide may be methylated to form 5-methylcytosine"
actctacatttaattttttgatgatacctcatattgttaaggattacttcagagttagagcgagtgagtcagagtcagagtcacttcagagtcagagtgagggtacacttattccagtagtg

SEQ ID NO: 12553 - DNA, 122 bp, Homo sapiens
  misc_feature (61)..(62): /note="This region represents a CpG dinucleotide"
  misc_feature (61)..(61): /note="Nucleotide may be methylated to form 5-methylcytosine"
cacatgaaggaagctcagtgactcctggcaggtacttctgttataaagcggtttcaaagccgtagacaccttttattcagggctggtaagcttcactggtgtttttggtctcctgctttttt

SEQ ID NO: 12554 - DNA, 122 bp, Homo sapiens
  misc_feature (61)..(62): /note="This region represents a CpG dinucleotide"
  misc_feature (61)..(61): /note="Nucleotide may be methylated to form 5-methylcytosine"
acactcctctgtgaatcatgacagctcagctgggaaatgcagaactgtatcataagagggcgagatcatgggagtgagacaatgatgaggcctatgacattggaaggtggtgagttcatcat

SEQ ID NO: 12555 - DNA, 122 bp, Homo sapiens
  misc_feature (61)..(62): /note="This region represents a CpG dinucleotide"
  misc_feature (61)..(61): /note="Nucleotide may be methylated to form 5-methylcytosine"
tactagtccactcaggtagagccgagactcctgcaggtggaatcactgcataccaaaaagcgtgccttccgattagtggaagtttaatcaattgcgagtgctgtcacagcttaatcatccag

SEQ ID NO: 12556 - DNA, 122 bp, Homo sapiens
  misc_feature (61)..(62): /note="This region represents a CpG dinucleotide"
  misc_feature (61)..(61): /note="Nucleotide may be methylated to form 5-methylcytosine"
ctttactaagttgataatctgctggtttctcctgctgttatactataaatgttttatctacgttattagatgtcatttgatggccttcgtggttgtcatttaagtagctgcctatttcacag

SEQ ID NO: 12557 - DNA, 122 bp, Homo sapiens
  misc_feature (61)..(62): /note="This region represents a CpG dinucleotide"
  misc_feature (61)..(61): /note="Nucleotide may be methylated to form 5-methylcytosine"
agaacttataatagcttccttcttataccattttattttgtgcctcagtactttttattacgttgtttctttacctggctaactctattattttttaaataatggctttattaaggtatcat

SEQ ID NO: 12558 - DNA, 122 bp, Homo sapiens
  misc_feature (61)..(62): /note="This region represents a CpG dinucleotide"
  misc_feature (61)..(61): /note="Nucleotide may be methylated to form 5-methylcytosine"
tcattctttgtctttgggtccctggaaatcatgaggattccatccagacttcttatctggcgcacataaaaggaaatgcagtctgttgtagcaagatgaacacgggctttggaatcagatga

SEQ ID NO: 12559 - DNA, 122 bp, Homo sapiens
  misc_feature (61)..(62): /note="This region represents a CpG dinucleotide"
  misc_feature (61)..(61): /note="Nucleotide may be methylated to form 5-methylcytosine"
ggaagggagtccaggtggagctggagcgctcatgctcaaatacttgtggagacagctcgccgtcctcagcaagacgtggcaaacaagatgcagtgaatctttggtaaaactgaatttacaac

SEQ ID NO: 12560 - DNA, 122 bp, Homo sapiens
  misc_feature (61)..(62): /note="This region represents a CpG dinucleotide"
  misc_feature (61)..(61): /note="Nucleotide may be methylated to form 5-methylcytosine"
gcatatcttcatttcaggaagttcaatcagggtaaatggagatgaagaagctacattatacggaatattatataagtaaagattattcagccagaaaatggtagcagacatagcagagtaca

SEQ ID NO: 12561 - DNA, 122 bp, Homo sapiens
  misc_feature (61)..(62): /note="This region represents a CpG dinucleotide"
  misc_feature (61)..(61): /note="Nucleotide may be methylated to form 5-methylcytosine"
gaaggagagtggaggaggaagagccagccaagagcccccgggagctgagctgtgagtcaacgccaagtcctgggcggactccagcccagcaatggaacatcatccgctaaaataagcacccc

SEQ ID NO: 12562 - DNA, 122 bp, Homo sapiens
  misc_feature (61)..(62): /note="This region represents a CpG dinucleotide"
  misc_feature (61)..(61): /note="Nucleotide may be methylated to form 5-methylcytosine"
aaatattataatgaataattctactataattctactatgatcaggtcatttttgtttcttcggttggaaaggcagggcaggatatgttgtaatgctggtgtttatttcctatgaggctgagt

SEQ ID NO: 12563 - DNA, 122 bp, Homo sapiens
  misc_feature (61)..(62): /note="This region represents a CpG dinucleotide"
  misc_feature (61)..(61): /note="Nucleotide may be methylated to form 5-methylcytosine"
ttcagagaaagctcaatgacctattaataacagaattaacatttgcaagtattttatttacgactgaaagtaactaggtgtgggtgcaatgtctcacacccataatcccagcatgttagagg

SEQ ID NO: 12564 - DNA, 122 bp, Homo sapiens
  misc_feature (61)..(62): /note="This region represents a CpG dinucleotide"
  misc_feature (61)..(61): /note="Nucleotide may be methylated to form 5-methylcytosine"
tgtgcccagtcctttgagtttgacacatgctaggcaggaaaaaggtatgaaaagagtggacgtagaggtgaagggaagatgttaaatcttaagtatttacaagatagtgccttataaatttt

SEQ ID NO: 12565 - DNA, 122 bp, Homo sapiens
  misc_feature (61)..(62): /note="This region represents a CpG dinucleotide"
  misc_feature (61)..(61): /note="Nucleotide may be methylated to form 5-methylcytosine"
gtctgcaacctacaggtaattacttcctatgcagggaggggacttacatttcctcatctgcggaacaaaagaattgagctatatctgtggttttcaatgcggtttttaaaaatgagcctctt

SEQ ID NO: 12566 - DNA, 122 bp, Homo sapiens
  misc_feature (61)..(62): /note="This region represents a CpG dinucleotide"
  misc_feature (61)..(61): /note="Nucleotide may be methylated to form 5-methylcytosine"
ttctatttaaaaaaaaaaaaaaaaaactcccacaatctttgtgtgacttgcatttgagagcggccaaaggacctacttgcaaagcagtgcagaggctgacatttactgataatctgccatgc

SEQ ID NO: 12567 - DNA, 122 bp, Homo sapiens
  misc_feature (61)..(62): /note="This region represents a CpG dinucleotide"
  misc_feature (61)..(61): /note="Nucleotide may be methylated to form 5-methylcytosine"
gtgctaggaaggatcaggcgccatgggaagtgtggtgcggccgtttcccctacttctctccgcctcgtgcttacgactgagctatcaaaacaaagctatgacagttggagcttcactgttct

SEQ ID NO: 12568 - DNA, 122 bp, Homo sapiens
  misc_feature (61)..(62): /note="This region represents a CpG dinucleotide"
  misc_feature (61)..(61): /note="Nucleotide may be methylated to form 5-methylcytosine"
actggtaccaatatggaaatttctattagaatgctccaaccctaaactcacacacatgcacgcatatttacttgtacaatatcctagaatgggacagacatccaaaaagggaaatgataact

SEQ ID NO: 12569 - DNA, 122 bp, Homo sapiens
  misc_feature (61)..(62): /note="This region represents a CpG dinucleotide"
  misc_feature (61)..(61): /note="Nucleotide may be methylated to form 5-methylcytosine"
tagagttagccaggcatagctctgggagcccatgctatttattggtaatagcaagtagaacgaattaatccgacacaggatttagtagagacaggatttcaccgtgttagccagaaaggtct

SEQ ID NO: 12570 - DNA, 122 bp, Homo sapiens
  misc_feature (61)..(62): /note="This region represents a CpG dinucleotide"
  misc_feature (61)..(61): /note="Nucleotide may be methylated to form 5-methylcytosine"
tcagaaatggacatgtgacccaatcaaagccagagatgcagaaactcttgctgggactttcggagaaaagactcactctcaactcctcaaagttgggtggatgtgaggccagagttgctgtt

SEQ ID NO: 12571 - DNA, 122 bp, Homo sapiens
  misc_feature (61)..(62): /note="This region represents a CpG dinucleotide"
  misc_feature (61)..(61): /note="Nucleotide may be methylated to form 5-methylcytosine"
gcaattgctatcagatgctgaatgtctgtggtcacatactcagcttcctgtttataaatgcgctctgttttcagtgagtcagcagtttcttgttctacagagaggtaaaactggtggtgtca

SEQ ID NO: 12572 - DNA, 122 bp, Homo sapiens
  misc_feature (61)..(62): /note="This region represents a CpG dinucleotide"
  misc_feature (61)..(61): /note="Nucleotide may be methylated to form 5-methylcytosine"
ggggttacagcagaggggtggcacatctccttggggtaataaagtgttctaaagtggttacggtggtggcagatgcacaactctgagaacagactctaaaccactgagttgtttaccttagg

SEQ ID NO: 12573 - DNA, 122 bp, Homo sapiens
  misc_feature (61)..(62): /note="This region represents a CpG dinucleotide"
  misc_feature (61)..(61): /note="Nucleotide may be methylated to form 5-methylcytosine"
ttcccacagagaggaaacttattttggcatttgaaaacataaatgggcaaaggacacaggcggctcacataaaaggaagcatggttagtaaacagactgtgaggaaacacagtcaacctggc

SEQ ID NO: 12574 - DNA, 122 bp, Homo sapiens
  misc_feature (61)..(62): /note="This region represents a CpG dinucleotide"
  misc_feature (61)..(61): /note="Nucleotide may be methylated to form 5-methylcytosine"
acagggtgatcttctgttctagggagaaagtgtctcatttgcagaaaggaaaggcacctgcggtatttgtgaaatgccatgacaagtctctgaataagaagtcaggctggtgagcattctgg

SEQ ID NO: 12575 - DNA, 122 bp, Homo sapiens
  misc_feature (61)..(62): /note="This region represents a CpG dinucleotide"
  misc_feature (61)..(61): /note="Nucleotide may be methylated to form 5-methylcytosine"
ccgctttcttctcccgggagaacttgaggagcctcactgagaagtgcgtcttggtcttggcgctggccatcccgctgcctcctgccggggcgtttttccgatggatgcggagcgtcacttgc

SEQ ID NO: 12576 - DNA, 122 bp, Homo sapiens
  misc_feature (61)..(62): /note="This region represents a CpG dinucleotide"
  misc_feature (61)..(61): /note="Nucleotide may be methylated to form 5-methylcytosine"
aaccaggttatggcattgcattggatcccaaccaggatatgacattgcatttactcatcacgcctccttaggttcctcttggctgtgacggtttctcagactatccttgttttttaggacct

SEQ ID NO: 12577 - DNA, 122 bp, Homo sapiens
  misc_feature (61)..(62): /note="This region represents a CpG dinucleotide"
  misc_feature (61)..(61): /note="Nucleotide may be methylated to form 5-methylcytosine"
tttagagtcattttagaatcaccaatgatgagttcctaagaggctacattatcaaaaatacgaccttcactgaagtgtggagtgaaatagaaacacttccttcttgctacacacttccccaa

SEQ ID NO: 12578 - DNA, 122 bp, Homo sapiens
  misc_feature (61)..(62): /note="This region represents a CpG dinucleotide"
  misc_feature (61)..(61): /note="Nucleotide may be methylated to form 5-methylcytosine"
gggtcatttgcatgagaacagattcctttgtgtaaagttggcctgcctgttctctgtccacgtttatagtccttcaagtcttcgtgttgggttgctaggcagatatgaccctggcttgcaaa

SEQ ID NO: 12579 - DNA, 122 bp, Homo sapiens
  misc_feature (61)..(62): /note="This region represents a CpG dinucleotide"
  misc_feature (61)..(61): /note="Nucleotide may be methylated to form 5-methylcytosine"
tccttactgtgactgtgtccacagtatatataaccaggctgggtctgtcatgagactctccgcgggcttataatgagggttgctggaatgtagctgggttgcatctttgtccccaccccatc

SEQ ID NO: 12580 - DNA, 122 bp, Homo sapiens
  misc_feature (61)..(62): /note="This region represents a CpG dinucleotide"
  misc_feature (61)..(61): /note="Nucleotide may be methylated to form 5-methylcytosine"
ttataaagggatggaacaggaaggtttctagctggtcaggctacccaaagaagaaagaaacgtgtttacccagcatttgccccatctcgaactgtgtgctgctggctggacaagaggcagga

SEQ ID NO: 12581 - DNA, 122 bp, Homo sapiens
  misc_feature (61)..(62): /note="This region represents a CpG dinucleotide"
  misc_feature (61)..(61): /note="Nucleotide may be methylated to form 5-methylcytosine"
aacacaccctcaaactttgccactttcagcctgtggtttctagccacaagcacttaaacacgcagttcccaaaggcaactgtaaattagtattcattcattcaaagaatgtcgatggaaggt

SEQ ID NO: 12582 - DNA, 122 bp, Homo sapiens
  misc_feature (61)..(62): /note="This region represents a CpG dinucleotide"
  misc_feature (61)..(61): /note="Nucleotide may be methylated to form 5-methylcytosine"
aattgaagcttatgttgcactgaggaagatttgtgtgatataacaggaagaacttccctgcgttagggtggtaagatattggagtaataataataatggccagcacttacagaatactctct

SEQ ID NO: 12583 - DNA, 122 bp, Homo sapiens
  misc_feature (61)..(62): /note="This region represents a CpG dinucleotide"
  misc_feature (61)..(61): /note="Nucleotide may be methylated to form 5-methylcytosine"
ggaaactgtggatttccagaagaacacagaaacatttccgtgtaataaaaatagagtaatcgccaggtacctgacacatctgcacctgccacctaggtgatgatgtatggctgtgagtcaga

SEQ ID NO: 12584 - DNA, 122 bp, Homo sapiens
  misc_feature (61)..(62): /note="This region represents a CpG dinucleotide"
  misc_feature (61)..(61): /note="Nucleotide may be methylated to form 5-methylcytosine"
gtgactcagaaaaactgaaggcatatgcactctggaaacagatcataactaagccaatcacggaaacctcatccgcttatgagtgatttgttcagacacccagttttaagctagtcagtgca

SEQ ID NO: 12585 - DNA, 122 bp, Homo sapiens
  misc_feature (61)..(62): /note="This region represents a CpG dinucleotide"
  misc_feature (61)..(61): /note="Nucleotide may be methylated to form 5-methylcytosine"
aaaacgagctcatggtcattaatttgtgaagtgcaaaaatactaatttttctcgcgttgtcgttttttctgggcttgccgaggcccctccccctcctgcctcgcttcccatccccctttcct

SEQ ID NO: 12586 - DNA, 122 bp, Homo sapiens
  misc_feature (61)..(62): /note="This region represents a CpG dinucleotide"
  misc_feature (61)..(61): /note="Nucleotide may be methylated to form 5-methylcytosine"
agtagaggcggtgcttcgacggctgatgatcttgcggagaggagagaggagcattagttacggttttaagtcccggctgaactggcaggggttacatgacctcagactcaggggtaagtgcg

SEQ ID NO: 12587 - DNA, 122 bp, Homo sapiens
  misc_feature (61)..(62): /note="This region represents a CpG dinucleotide"
  misc_feature (61)..(61): /note="Nucleotide may be methylated to form 5-methylcytosine"
gcgtgagccaccacgctcagcctgctgggtggctttttctttttttctgacatagggtctcgctctgttgcccaggctggagtacagatctccatttactgccgccttgacttgctaggttc

SEQ ID NO: 12588 - DNA, 122 bp, Homo sapiens
  misc_feature (61)..(62): /note="This region represents a CpG dinucleotide"
  misc_feature (61)..(61): /note="Nucleotide may be methylated to form 5-methylcytosine"
cctggagctgaggtcacagaggaaagccagggccagccagccagaagaggaacaaggaagcggcagcactattcctggcaggtttaaggaaggtggctttcattgaccgggtgcctctggaa

SEQ ID NO: 12589 - DNA, 122 bp, Homo sapiens
  misc_feature (61)..(62): /note="This region represents a CpG dinucleotide"
  misc_feature (61)..(61): /note="Nucleotide may be methylated to form 5-methylcytosine"
cttaaaccatgaggctgcatagctctggttgatgactgaaggccaaattgcatgcagtaccggggacaggattggtaccgtcacctgtaagcttgggcctggtgggagtggacagacctgcc

SEQ ID NO: 12590 - DNA, 122 bp, Homo sapiens
  misc_feature (61)..(62): /note="This region represents a CpG dinucleotide"
  misc_feature (61)..(61): /note="Nucleotide may be methylated to form 5-methylcytosine"
gtaacagaaaacacagacacttcaaaacggcagttatcagttttcctaagtactagtctgcgagattttccaagtgcaaattgcccctggagcctctgcatgacagattcttatctgaagtg

SEQ ID NO: 12591 - DNA, 122 bp, Homo sapiens
  misc_feature (61)..(62): /note="This region represents a CpG dinucleotide"
  misc_feature (61)..(61): /note="Nucleotide may be methylated to form 5-methylcytosine"
aataaaatgggaataataggccctgtctcatagacttatattgagcaaggaatgcgtctacgaatgtaagatgcttggtgcagttcatgtaagatcgtagtcaataaatgttatttattatc

SEQ ID NO: 12592 - DNA, 122 bp, Homo sapiens
  misc_feature (61)..(62): /note="This region represents a CpG dinucleotide"
  misc_feature (61)..(61): /note="Nucleotide may be methylated to form 5-methylcytosine"
gttcaagcagatgagtcaagtgtggattttcagggtgggctgaagtgaggagctgtggcacgggtcggaaagccagccaggaagccgttctgatagttcacctcattggagctggactaagt

SEQ ID NO: 12593 - DNA, 122 bp, Homo sapiens
  misc_feature (61)..(62): /note="This region represents a CpG dinucleotide"
  misc_feature (61)..(61): /note="Nucleotide may be methylated to form 5-methylcytosine"
cacttactaatacaatggtcacaatcctgtctctgggcctcagttaccaaacctgtgaaacgagagggttggttggggccatctctaagaccatttccagtgagtcaatccatgatgtactg

SEQ ID NO: 12594 - DNA, 122 bp, Homo sapiens
  misc_feature (61)..(62): /note="This region represents a CpG dinucleotide"
  misc_feature (61)..(61): /note="Nucleotide may be methylated to form 5-methylcytosine"
cgagcaccgtgctgtagcttaacacagaaaatcccaatgttaggacagaacactactagccgtagtacagagggccacttcataataataaaacatatttagcaggaagagagaatacttgc

SEQ ID NO: 12595 - DNA, 122 bp, Homo sapiens
  misc_feature (61)..(62): /note="This region represents a CpG dinucleotide"
  misc_feature (61)..(61): /note="Nucleotide may be methylated to form 5-methylcytosine"
cctcgtgatccgcccgctgggatccaaagtgctgggattacaggcgtgagccaccgcgcccggcctcatgtaatcgatttaaaacattaatggccgggtgtggtggctcaagcctgttatcc

SEQ ID NO: 12596 - DNA, 122 bp, Homo sapiens
  misc_feature (61)..(62): /note="This region represents a CpG dinucleotide"
  misc_feature (61)..(61): /note="Nucleotide may be methylated to form 5-methylcytosine"
ccttgtcactttgggtgaattattgaacctttgtaagctttagtttcctcatctgtaaaacgcagataatagtacttacctcatagagttgttgagaggattaagtgagtaaatgtaagtaa

SEQ ID NO: 12597 - DNA, 122 bp, Homo sapiens
  misc_feature (61)..(62): /note="This region represents a CpG dinucleotide"
  misc_feature (61)..(61): /note="Nucleotide may be methylated to form 5-methylcytosine"
ctcttgcttagattttgcaaagctctcttaggtagtttccttgctttcactcttggttcccgtgtagactatttgtcatagcaactagtgatccttctagcatatcagagcatgccactctt

SEQ ID NO: 12598 - DNA, 122 bp, Homo sapiens
  misc_feature (61)..(62): /note="This region represents a CpG dinucleotide"
  misc_feature (61)..(61): /note="Nucleotide may be methylated to form 5-methylcytosine"
tggggtatcaggtggctctgccagaaactcccttggcacacagagcactgggtcggccctcgggtgtggctgtttgggcaggacagccctctgtatgtagccttgagcaggtaggggggcca

SEQ ID NO: 12599 - DNA, 122 bp, Homo sapiens
  misc_feature (61)..(62): /note="This region represents a CpG dinucleotide"
  misc_feature (61)..(61): /note="Nucleotide may be methylated to form 5-methylcytosine"
aattcattcagcctctgttagcaatggtgcaatcaaatgactccaggaattctgaaataacgtattgacctgcagggaccagaaattgctatcaggcactgggaacctctctcaggcaatgg

SEQ ID NO: 12600 - DNA, 122 bp, Homo sapiens
  misc_feature (61)..(62): /note="This region represents a CpG dinucleotide"
  misc_feature (61)..(61): /note="Nucleotide may be methylated to form 5-methylcytosine"
agataagcttttgtatcttttcagtatcattgagggagagctaagggggactccagggggcggacagggcttacaaagtcgaatgtgatcattaagagagccagctctggaagcaaacacca

SEQ ID NO: 12601 - DNA, 122 bp, Homo sapiens
  misc_feature (61)..(62): /note="This region represents a CpG dinucleotide"
  misc_feature (61)..(61): /note="Nucleotide may be methylated to form 5-methylcytosine"
actaccttctcttcatgccttccttcaccctggtgatttttcctccttctttgtgtcccccgcaaatcagatagtaataggtgattcctggctcagcaagaaaccggagctccacctaggga

SEQ ID NO: 12602 - DNA, 122 bp, Homo sapiens
  misc_feature (61)..(62): /note="This region represents a CpG dinucleotide"
  misc_feature (61)..(61): /note="Nucleotide may be methylated to form 5-methylcytosine"
tagcagcggtcacccaaagatgcaggggtgcttattcgggacacaggcaaaggtcaggaccggaggacatgggctggtgtcacagcccaggaggaaatgggagggtttaatgagccagggca

SEQ ID NO: 12603 - DNA, 122 bp, Homo sapiens
  misc_feature (61)..(62): /note="This region represents a CpG dinucleotide"
  misc_feature (61)..(61): /note="Nucleotide may be methylated to form 5-methylcytosine"
tgactctcatcagtggtttttcctttagatttcgaatgaagcaagtgaacattgttgggccgagcccctacagtccgtcttcccgggtcatccagaccctgcaggccccacccgacgtggct

SEQ ID NO: 12604 - DNA, 122 bp, Homo sapiens
  misc_feature (61)..(62): /note="This region represents a CpG dinucleotide"
  misc_feature (61)..(61): /note="Nucleotide may be methylated to form 5-methylcytosine"
tatttccaaacacatgtctataagcacctgggagtcccaacaagtttgttttgggctgggcgcagtggctcacgcctgtaatcccagcactttgggaggtcaaggagggtggatcacatgag

SEQ ID NO: 12605 - DNA, 122 bp, Homo sapiens
  misc_feature (61)..(62): /note="This region represents a CpG dinucleotide"
  misc_feature (61)..(61): /note="Nucleotide may be methylated to form 5-methylcytosine"
cttgaaagctccaggagccccaaggacggcgaagggcagcctggagttggggggcgtcagcgagggcgcgggcaggggagagaggcgcccctggaagtggagccggcctggacagaggcagg

SEQ ID NO: 12606 - DNA, 122 bp, Homo sapiens
  misc_feature (61)..(62): /note="This region represents a CpG dinucleotide"
  misc_feature (61)..(61): /note="Nucleotide may be methylated to form 5-methylcytosine"
tttctaatcatctacaaaattgccagcctctctgaagtggtccggctgatacttacagctcgtggttttttgtttaacttcagatcaatcctgtgacagaaaagataaaagatatttccatt

SEQ ID NO: 12607 - DNA, 122 bp, Homo sapiens
  misc_feature (61)..(62): /note="This region represents a CpG dinucleotide"
  misc_feature (61)..(61): /note="Nucleotide may be methylated to form 5-methylcytosine"
attgttaaagcttaccagcacaccattgctctgtagacctgccaccttctcccaagcaaacgtttctgtgctgaggccttgtaagaacaatgtcctctgccatagagggcagaacccagaag

SEQ ID NO: 12608 - DNA, 122 bp, Homo sapiens
  misc_feature (61)..(62): /note="This region represents a CpG dinucleotide"
  misc_feature (61)..(61): /note="Nucleotide may be methylated to form 5-methylcytosine"
ccacagtgtgtggaggtcctgcatcagagccaacagtgagaatgcaagcatgtgctacagcggagtccctttgaggaacctcctcactgcccagcaagcaaagaaaacaagcaagtttctgg

SEQ ID NO: 12609 - DNA, 122 bp, Homo sapiens
  misc_feature (61)..(62): /note="This region represents a CpG dinucleotide"
  misc_feature (61)..(61): /note="Nucleotide may be methylated to form 5-methylcytosine"
aacaatgagtgagcagaaatgaagacagacaggccagcaaaaggaagaggaagaaattcacgggcaaagtgcactctgagagaagaatttaatctacagaatgatctgtacccccacggctc

SEQ ID NO: 12610 - DNA, 122 bp, Homo sapiens
  misc_feature (61)..(62): /note="This region represents a CpG dinucleotide"
  misc_feature (61)..(61): /note="Nucleotide may be methylated to form 5-methylcytosine"
tgactctgagaactagactcgttaggcccctttttcctatctgtgaaacaaatagcaagacgtcacatgaacaaacactgattgccgagtggttcactcattcacagcttgcagagctgctg

SEQ ID NO: 12611 - DNA, 122 bp, Homo sapiens
  misc_feature (61)..(62): /note="This region represents a CpG dinucleotide"
  misc_feature (61)..(61): /note="Nucleotide may be methylated to form 5-methylcytosine"
tcactgcaatactgcactaaccagtgagtgtaagcctgcagcacagccagggactgagcacgtacatcaatgaggtcaggtttcaatactgatggcacatcagtttcaatgttgcacaattt

SEQ ID NO: 12612 - DNA, 122 bp, Homo sapiens
  misc_feature (61)..(62): /note="This region represents a CpG dinucleotide"
  misc_feature (61)..(61): /note="Nucleotide may be methylated to form 5-methylcytosine"
gaactcagtatgttccaaaaaatattctatctcccatattaccttgcccaattaatagtacgcatagccaccaagctgccttgtacattgcctctactagtgaactcaaaccaactgggctt

SEQ ID NO: 12613 - DNA, 122 bp, Homo sapiens
  misc_feature (61)..(62): /note="This region represents a CpG dinucleotide"
  misc_feature (61)..(61): /note="Nucleotide may be methylated to form 5-methylcytosine"
cggctagagcttcagcacaggctgggtctgctgtgccgggtctgtatggggacagctgcacgcctcttccgcttgtgtgagaacaaaggccggaacctggattctgatccaaaccccctggc

SEQ ID NO: 12614 - DNA, 122 bp, Homo sapiens
  misc_feature (61)..(62): /note="This region represents a CpG dinucleotide"
  misc_feature (61)..(61): /note="Nucleotide may be methylated to form 5-methylcytosine"
aataacaggtgagacaacagaggtaagtaactataggatttattgctcatgctgaattgacgagtgtcagtaggagaagcaattagtcagcagttgcagatactctctagagcagtgcttct

SEQ ID NO: 12615 - DNA, 122 bp, Homo sapiens
  misc_feature (61)..(62): /note="This region represents a CpG dinucleotide"
  misc_feature (61)..(61): /note="Nucleotide may be methylated to form 5-methylcytosine"
ttacataggaggagtaagttctagtgttctattgcacagtagggggactacagttaataacgtattgtatatttcaacatagaagagaggattttgaatgttctcaccacaaaaaaacaatg

SEQ ID NO: 12616 - DNA, 122 bp, Homo sapiens
  misc_feature (61)..(62): /note="This region represents a CpG dinucleotide"
  misc_feature (61)..(61): /note="Nucleotide may be methylated to form 5-methylcytosine"
actgggcagccattcatcagtccccggggttacgcaattaatgcagcatcataacagaaacgaagaccaggcatgcccacaccagattctgactaccagagtttaaggttgtaaccgaagtt

SEQ ID NO: 12617 - DNA, 122 bp, Homo sapiens
  misc_feature (61)..(62): /note="This region represents a CpG dinucleotide"
  misc_feature (61)..(61): /note="Nucleotide may be methylated to form 5-methylcytosine"
gatgtggtgagccagtatgtgccagctgtgcgttattctaacagtgtcagttatggtagacgtaaacatgtacatttgcatttgaagctattctggccttgcagatgtgctagaaagctcag

SEQ ID NO: 12618 - DNA, 122 bp, Homo sapiens
  misc_feature (61)..(62): /note="This region represents a CpG dinucleotide"
  misc_feature (61)..(61): /note="Nucleotide may be methylated to form 5-methylcytosine"
agatcactgcttgaccattaactacttggataaccttgagcaagtcacttaatctctccacgcctacttgtacaaactagttaacctcaaggttctgttgaagtcctagtttctcaccattc

SEQ ID NO: 12619 - DNA, 122 bp, Homo sapiens
  misc_feature (61)..(62): /note="This region represents a CpG dinucleotide"
  misc_feature (61)..(61): /note="Nucleotide may be methylated to form 5-methylcytosine"
gctgactcttggagttgtaaatcttatcgtccttctgataacacacttgtaataagttagcgtcctattcaaagtgaattgtaaaactgcctcatttaatatggcatctgtgtcattaaaac

SEQ ID NO: 12620 - DNA, 122 bp, Homo sapiens
  misc_feature (61)..(62): /note="This region represents a CpG dinucleotide"
  misc_feature (61)..(61): /note="Nucleotide may be methylated to form 5-methylcytosine"
atctcaagtgatctgtctgcctcggcctcccaaaatgctgggattagaggtatgagccaccgtgcccggcctcatgatgaactttctttatgaaagcaacatgtatatctctgtgctaggag

SEQ ID NO: 12621 - DNA, 122 bp, Homo sapiens
  misc_feature (61)..(62): /note="This region represents a CpG dinucleotide"
  misc_feature (61)..(61): /note="Nucleotide may be methylated to form 5-methylcytosine"
aggagatgcaataaggtagaggtagctgaaaatgcctggcaagcccccagttgcatttttcgtgggatacctacaagtatcccatgcaaaattctgcccctcggggcctcataaaacctgct

SEQ ID NO: 12622 - DNA, 122 bp, Homo sapiens
  misc_feature (61)..(62): /note="This region represents a CpG dinucleotide"
  misc_feature (61)..(61): /note="Nucleotide may be methylated to form 5-methylcytosine"
gggtgaactgtggctcagctgactgaaattcaggcaggaaccaagacagagacactgagacgggacattcagccaggatttattatgcccttacacacagggtcggctctgagctcagctct

SEQ ID NO: 12623 - DNA, 122 bp, Homo sapiens
  misc_feature (61)..(62): /note="This region represents a CpG dinucleotide"
  misc_feature (61)..(61): /note="Nucleotide may be methylated to form 5-methylcytosine"
gtggggagaggccagcccgaccctcggacggcgggactcgcgggctactttaggtgggcgcggacctggggctctagcactgactaagtcactgcacctgcgcaagagtctccgccactctt

SEQ ID NO: 12624 - DNA, 122 bp, Homo sapiens
  misc_feature (61)..(62): /note="This region represents a CpG dinucleotide"
  misc_feature (61)..(61): /note="Nucleotide may be methylated to form 5-methylcytosine"
gtaaacctgccagaaccagtccatagtgggtggtcttttatcaggggaaagttactgaatcggtcccttgtccaatcaaacctgcagttatgacttgtggaacaggagggtcttgttagtca

SEQ ID NO: 12625 - DNA, 122 bp, Homo sapiens
  misc_feature (61)..(62): /note="This region represents a CpG dinucleotide"
  misc_feature (61)..(61): /note="Nucleotide may be methylated to form 5-methylcytosine"
accccattctctgaaaatccccagggagtggaagggttctcatactaaagaaaacagtcacgattccatgccagactttattctcaaggagtgataaacatatgatagctatgggaacattt

SEQ ID NO: 12626 - DNA, 122 bp, Homo sapiens
  misc_feature (61)..(62): /note="This region represents a CpG dinucleotide"
  misc_feature (61)..(61): /note="Nucleotide may be methylated to form 5-methylcytosine"
agggacttccttcctcatcttatttccttctctgggagcctctgggaggaagtacagcttcgggcgtttctcaacgtgtgacatagtcccattggcagaacatgacatgattttcgggatgt

SEQ ID NO: 12627 - DNA, 122 bp, Homo sapiens
  misc_feature (61)..(62): /note="This region represents a CpG dinucleotide"
  misc_feature (61)..(61): /note="Nucleotide may be methylated to form 5-methylcytosine"
caggtcatccacttttgactgtcatccatggaagagctcttattaaaagcctcagactttcgggacctatgattctttggcacaaccttttggaaaattcttaagcagggatgaagcaaact

SEQ ID NO: 12628 - DNA, 122 bp, Homo sapiens
  misc_feature (61)..(62): /note="This region represents a CpG dinucleotide"
  misc_feature (61)..(61): /note="Nucleotide may be methylated to form 5-methylcytosine"
ctccaagggcagtggtgcattccttagcacaagtataaatttactgttgctaagagttctcggaacaggataatacaagaaggaaccactgcaagtgaaatccagccaccagtaatgccgag

SEQ ID NO: 12629 - DNA, 122 bp, Homo sapiens
  misc_feature (61)..(62): /note="This region represents a CpG dinucleotide"
  misc_feature (61)..(61): /note="Nucleotide may be methylated to form 5-methylcytosine"
ccctgcgtagaaggcatttgcgcatttcacttttgttgtctttgacggccatttctaaaacgggctggctgtgtattcttggggggattttaggcacttaagttactcttttaaaagatctc

SEQ ID NO: 12630 - DNA, 122 bp, Homo sapiens
  misc_feature (61)..(62): /note="This region represents a CpG dinucleotide"
  misc_feature (61)..(61): /note="Nucleotide may be methylated to form 5-methylcytosine"
ggcctttaagcaagtggtgtgctcttgacagcaaattgtgcacatcccttctcaactctgcgttaagtgacatcatgttggtagctggaaatcaactgtagcaggagcatttacatagtgga

SEQ ID NO: 12631 - DNA, 122 bp, Homo sapiens
  misc_feature (61)..(62): /note="This region represents a CpG dinucleotide"
  misc_feature (61)..(61): /note="Nucleotide may be methylated to form 5-methylcytosine"
aaagactggtttgccaagcggtttgaggaactgcaaaaggagacgtttaccacagaagagcgaaaacatctgtcgaaactaatgctggaatctcaggtaaaaaggagcatctaggccgggca

SEQ ID NO: 12632 - DNA, 122 bp, Homo sapiens
  misc_feature (61)..(62): /note="This region represents a CpG dinucleotide"
  misc_feature (61)..(61): /note="Nucleotide may be methylated to form 5-methylcytosine"
ctctccaacccaagccaagcgcttgactctcagccattcctcaggccctggctggatgagcgaaggtccttctgccaggaggagccagctccccttgaggtctgactcatgcagtgcaggcc

SEQ ID NO: 12633 - DNA, 122 bp, Homo sapiens
  misc_feature (61)..(62): /note="This region represents a CpG dinucleotide"
  misc_feature (61)..(61): /note="Nucleotide may be methylated to form 5-methylcytosine"
gcccaaagtcacacagccaacaggcagggaagctaggaggaagctcagaactgattccagcgccacatcataaccacaatgcggcctcccgagtgtagccacgtcataaccacaatgcgggg

SEQ ID NO: 12634 - DNA, 122 bp, Homo sapiens
  misc_feature (61)..(62): /note="This region represents a CpG dinucleotide"
  misc_feature (61)..(61): /note="Nucleotide may be methylated to form 5-methylcytosine"
attagctgtacatatgaaaacacagcttgacagtacttaaacatctgtgcaatgggcctacgtagaaggtatgatggagctttataaacatcgagctaattatgcccttactgaattgcagc

SEQ ID NO: 12635 - DNA, 122 bp, Homo sapiens
  misc_feature (61)..(62): /note="This region represents a CpG dinucleotide"
  misc_feature (61)..(61): /note="Nucleotide may be methylated to form 5-methylcytosine"
tgagtcagaggacatgaaaatcctcactgtgcatccttcagagatctgccagaacgacttcgtggccagcagtctcttatctaactactccgcagctagtagtcctcttaagcaaggatgcc

SEQ ID NO: 12636 - DNA, 122 bp, Homo sapiens
  misc_feature (61)..(62): /note="This region represents a CpG dinucleotide"
  misc_feature (61)..(61): /note="Nucleotide may be methylated to form 5-methylcytosine"
gaaattccagtcaaatgagacctctgtctccttgggcctctgaatcagtcccagggaaggcggctgattggccttgtttgagtcacgcactctccctctgatggacatctgttattgccacg

SEQ ID NO: 12637 - DNA, 122 bp, Homo sapiens
  misc_feature (61)..(62): /note="This region represents a CpG dinucleotide"
  misc_feature (61)..(61): /note="Nucleotide may be methylated to form 5-methylcytosine"
tctagctctcccactgattaattctaactgggccacaccccacctcctcgccagggaatccggatttgacagaagaatatactcaaggggtgacttttcagtgctgtcctttaggtgtggtg

SEQ ID NO: 12638 - DNA, 122 bp, Homo sapiens
  misc_feature (61)..(62): /note="This region represents a CpG dinucleotide"
  misc_feature (61)..(61): /note="Nucleotide may be methylated to form 5-methylcytosine"
acatggtggacatttgcctttgattgtttgcttgcccggaatctgacctgtgctctcctacgttgtgagaatcctcactgtgtgcgtcttactgggaggcagggctctgtcatacacagtga

SEQ ID NO: 12639 - DNA, 122 bp, Homo sapiens
  misc_feature (61)..(62): /note="This region represents a CpG dinucleotide"
  misc_feature (61)..(61): /note="Nucleotide may be methylated to form 5-methylcytosine"
tgagtgaaagttcccagctcgtggaggagagaagagcagttctgtgggtttggccttagacgacaaaggctagggttcactgccccgtgcagacacagtccacaggcactgtcactctgaca

SEQ ID NO: 12640 - DNA, 122 bp, Homo sapiens
  misc_feature (61)..(62): /note="This region represents a CpG dinucleotide"
  misc_feature (61)..(61): /note="Nucleotide may be methylated to form 5-methylcytosine"
ggctgcaccatatagcctaggtgtgcagtagactattctgtcatagtttgtgtaagtgcacgctgtgatggtcacacaatgatgaaatcacataatgatgcatttctcagaatgtgttcctg

SEQ ID NO: 12641 - DNA, 122 bp, Homo sapiens
  misc_feature (61)..(62): /note="This region represents a CpG dinucleotide"
  misc_feature (61)..(61): /note="Nucleotide may be methylated to form 5-methylcytosine"
acttttaatacagcatctcaaccaccacctctgggttaggtccttcataatctgtagaaccgaaatcttttaatgtggcattcaggaccctccaaggtggtcccaccccacccaccactctc

SEQ ID NO: 12642 - DNA, 122 bp, Homo sapiens
  misc_feature (61)..(62): /note="This region represents a CpG dinucleotide"
  misc_feature (61)..(61): /note="Nucleotide may be methylated to form 5-methylcytosine"
gaggaccagaatattctgtattattgtttcataaagaactggatcagtgatagatttttacgttgcacatgaataactcccagtcagggtgctgatctatcactctccattgtttctataag

SEQ ID NO: 12643 - DNA, 122 bp, Homo sapiens
  misc_feature (61)..(62): /note="This region represents a CpG dinucleotide"
  misc_feature (61)..(61): /note="Nucleotide may be methylated to form 5-methylcytosine"
ttatttatttatttaattcctcttctccctcaaagcacaatctgctgtatgttaaaggggcggggaagctgctgactttgcagtagcgcatacttactcacgcaattttccattctggctga

SEQ ID NO: 12644 - DNA, 122 bp, Homo sapiens
  misc_feature (61)..(62): /note="This region represents a CpG dinucleotide"
  misc_feature (61)..(61): /note="Nucleotide may be methylated to form 5-methylcytosine"
tcatttgtaaggttttaggtgagccactcttacatcatccaggtttgccttagctggttacgtaagaggccacatggtgaacataatccaagctttaaatacttcaaactgtaagaataaat

SEQ ID NO: 12645 - DNA, 122 bp, Homo sapiens
  misc_feature (61)..(62): /note="This region represents a CpG dinucleotide"
  misc_feature (61)..(61): /note="Nucleotide may be methylated to form 5-methylcytosine"
aaaatataattattgtctgagttgtataaatgaagaaggcagggctaagtaactggcccccggttacagagtgagtgaatggtggagctgaatttaacataagtgatcactccaaagctctc

SEQ ID NO: 12646 - DNA, 122 bp, Homo sapiens
  misc_feature (61)..(62): /note="This region represents a CpG dinucleotide"
  misc_feature (61)..(61): /note="Nucleotide may be methylated to form 5-methylcytosine"
agttaacaacctggacagacaggcccatcatgtgtgttatgacctatctggtttcctactcgcatggttagaaggctcattttattgctttgaactctggaattaatcctgcttaaaggaga

SEQ ID NO: 12647 - DNA, 122 bp, Homo sapiens
  misc_feature (61)..(62): /note="This region represents a CpG dinucleotide"
  misc_feature (61)..(61): /note="Nucleotide may be methylated to form 5-methylcytosine"
cataatagatattcagtaaatattaaacagatgtatgaatcagacagtcctggtcgtctacgtatctttatctactgagagttttgtgggtttttttgtttatttttttgagacagaatctc

SEQ ID NO: 12648 - DNA, 122 bp, Homo sapiens
  misc_feature (61)..(62): /note="This region represents a CpG dinucleotide"
  misc_feature (61)..(61): /note="Nucleotide may be methylated to form 5-methylcytosine"
cactgtagttcctgctacagacaaaactgactctactctaattacctctgagatcaccagcgattgtgatcaagcagagaatatgggcagaccacaactcagcagaaaaacacctaagtttt

SEQ ID NO: 12649 - DNA, 122 bp, Homo sapiens
  misc_feature (61)..(62): /note="This region represents a CpG dinucleotide"
  misc_feature (61)..(61): /note="Nucleotide may be methylated to form 5-methylcytosine"
gtctccgcaggttttaaatcagacgccgctcaggctgtgcccaggctgctgagccaaaagcgggatcagaaccacaaggaggaagaaattactgatggggatgaaagaccgaaataactttt

SEQ ID NO: 12650 - DNA, 122 bp, Homo sapiens
  misc_feature (61)..(62): /note="This region represents a CpG dinucleotide"
  misc_feature (61)..(61): /note="Nucleotide may be methylated to form 5-methylcytosine"
tcagacagtcactgcacagataactatgcaaccacaatgacagctttgaagcggccgtggcgatagggcaaccccatccagcctgggcctttaggggagtgtcaaggaagagctctctaaaa

SEQ ID NO: 12651 - DNA, 122 bp, Homo sapiens
  misc_feature (61)..(62): /note="This region represents a CpG dinucleotide"
  misc_feature (61)..(61): /note="Nucleotide may be methylated to form 5-methylcytosine"
ttagaagaaagcagctacgtgaggggaaagagagagagacagagagcaagagcaatcttgcgcttgtatctgtgcaactgtagataagatcaagaagacagagccggacaatgtgtacaaaa

SEQ ID NO: 12652 - DNA, 122 bp, Homo sapiens
  misc_feature (61)..(62): /note="This region represents a CpG dinucleotide"
  misc_feature (61)..(61): /note="Nucleotide may be methylated to form 5-methylcytosine"
gcctgaagacatgataatgccaaatggccacatctgtttcatagacattcatctgtgccacgcaacaacataccccaggctttacaaacaagaccccatcaaagtcttgtataagccaggca

SEQ ID NO: 12653 - DNA, 122 bp, Homo sapiens
  misc_feature (61)..(62): /note="This region represents a CpG dinucleotide"
  misc_feature (61)..(61): /note="Nucleotide may be methylated to form 5-methylcytosine"
atagacgtgagccactgcactccgtcagtcttgtgccctgcccagtctccggagcccagccgttagttggtcttaatcaacatggactgagaggaaggaaggcttgtgaaatgtagtgacac

SEQ ID NO: 12654 - DNA, 122 bp, Homo sapiens
  misc_feature (61)..(62): /note="This region represents a CpG dinucleotide"
  misc_feature (61)..(61): /note="Nucleotide may be methylated to form 5-methylcytosine"
gctttagtacttatagtgctcatgctactgtcagctactcacaatagactgtgagggcctcgtggacctacatggcctagtgcaaagtaattgcgtaatctgtattacaaaggcagtatgag

SEQ ID NO: 12655 - DNA, 122 bp, Homo sapiens
  misc_feature (61)..(62): /note="This region represents a CpG dinucleotide"
  misc_feature (61)..(61): /note="Nucleotide may be methylated to form 5-methylcytosine"
tcatccagcctgattagcacagtatcatcgagctactgaatccatgtgatgttttgtaaacgaagattgcttcagactctgtcatgatggagggcataaaagaacacaacccgggacaacac

SEQ ID NO: 12656 - DNA, 122 bp, Homo sapiens
  misc_feature (61)..(62): /note="This region represents a CpG dinucleotide"
  misc_feature (61)..(61): /note="Nucleotide may be methylated to form 5-methylcytosine"
ttctggataacacggcagccatacatctgtagtgccaatgacaggacgtggcctcgaatccgttctgccaaagccagcttctgttcaagactgccaaactagacataatgtgtgggtaaaca

SEQ ID NO: 12657 - DNA, 122 bp, Homo sapiens
  misc_feature (61)..(62): /note="This region represents a CpG dinucleotide"
  misc_feature (61)..(61): /note="Nucleotide may be methylated to form 5-methylcytosine"
aattaataatgtctcacttaaaaagcaatgtcaactaacaggagaaaacatgaatgactacgagtcaatgctggacacaggaaatgacctagatgtcaccagagacagctcagagaccttga

SEQ ID NO: 12658 - DNA, 122 bp, Homo sapiens
  misc_feature (61)..(62): /note="This region represents a CpG dinucleotide"
  misc_feature (61)..(61): /note="Nucleotide may be methylated to form 5-methylcytosine"
gctcacagagccatgcccctcgggggacttcttgaccttggtggtggaggccttggcagacgctcaggtgtttggttccatatttgcttccagataagactgtttagtagacatgcaactgc

SEQ ID NO: 12659 - DNA, 122 bp, Homo sapiens
  misc_feature (61)..(62): /note="This region represents a CpG dinucleotide"
  misc_feature (61)..(61): /note="Nucleotide may be methylated to form 5-methylcytosine"
acgtgtatgtataaatccttcatagtcataggacttatgctcctgaaaaaaccataggcccgtcaccttagcttttggatatgagtcccagtttttctgctttactaatgacatgactctga

SEQ ID NO: 12660 - DNA, 122 bp, Homo sapiens
  misc_feature (61)..(62): /note="This region represents a CpG dinucleotide"
  misc_feature (61)..(61): /note="Nucleotide may be methylated to form 5-methylcytosine"
tgaggccagtttcctgaaccaagattcagagctagccagtgaacctagcagatgggccagcgttcaatttccactgaagtctggcgttctcaattcctgtaaccgcccaaggggttcacctt

SEQ ID NO: 12661 - DNA, 122 bp, Homo sapiens
  misc_feature (61)..(62): /note="This region represents a CpG dinucleotide"
  misc_feature (61)..(61): /note="Nucleotide may be methylated to form 5-methylcytosine"
cattttttagcccatgcaggattgcctctcagtactgctgcagatgctgcagctgggatgcgtcatttgggtcccaattggggtctgtttcagggaactggccctgcgcatatgcctgggca

SEQ ID NO: 12662 - DNA, 122 bp, Homo sapiens
  misc_feature (61)..(62): /note="This region represents a CpG dinucleotide"
  misc_feature (61)..(61): /note="Nucleotide may be methylated to form 5-methylcytosine"
tttctatttctaactcaatgccaggcactgagcactgtgctcaacctagtaatttggagacggaggtggatatgcatataacagaacaggatgctctccggacaaacgttctgaaggaaaag

SEQ ID NO: 12663 - DNA, 122 bp, Homo sapiens
  misc_feature (61)..(62): /note="This region represents a CpG dinucleotide"
  misc_feature (61)..(61): /note="Nucleotide may be methylated to form 5-methylcytosine"
ctttcagtatggaaaataatcagcaagccttttttgtaccataagtaaaatggattgtgacgcacttagagcaagtgtagacagactacagcctgcaggcccaatctggccactgcctggtt

SEQ ID NO: 12664 - DNA, 122 bp, Homo sapiens
  misc_feature (61)..(62): /note="This region represents a CpG dinucleotide"
  misc_feature (61)..(61): /note="Nucleotide may be methylated to form 5-methylcytosine"
tctgtactgatgtgtcacttattaaatacttttgtaccatgagtaaaacttcaggtgtttcgcaagaaccaccattctcaatgagttgtattctttctttaatgtagccactgccataaggt

SEQ ID NO: 12665 - DNA, 122 bp, Homo sapiens
  misc_feature (61)..(62): /note="This region represents a CpG dinucleotide"
  misc_feature (61)..(61): /note="Nucleotide may be methylated to form 5-methylcytosine"
accaatcgtctgtggcaaatggagaagtatcgatgcccttcccccttctgattctatttacggctaggtttttaaaagcagcaataaaacaaatgtcgactctttgggggtttactgggtga

SEQ ID NO: 12666 - DNA, 122 bp, Homo sapiens
  misc_feature (61)..(62): /note="This region represents a CpG dinucleotide"
  misc_feature (61)..(61): /note="Nucleotide may be methylated to form 5-methylcytosine"
tctttcatttaggtattctgtctgtctcctttgatgtcgcacagcagagttgagtagtagcgacagacaccatctggcccaccaagtctaaaatatttaataactggccctgcactgagact

SEQ ID NO: 12667 - DNA, 122 bp, Homo sapiens
  misc_feature (61)..(62): /note="This region represents a CpG dinucleotide"
  misc_feature (61)..(61): /note="Nucleotide may be methylated to form 5-methylcytosine"
ggaaacgtctggcgtgtaggcctgaagccactgcagccccgtgaccttgctcagggaggccggaggcttaggatgaagccaatactgaggaaagcagaatcgcaacgttcaaagaaactgag

SEQ ID NO: 12668 - DNA, 122 bp, Homo sapiens
  misc_feature (61)..(62): /note="This region represents a CpG dinucleotide"
  misc_feature (61)..(61): /note="Nucleotide may be methylated to form 5-methylcytosine"
gggctaacaatctgacaagtgacaggcttctgaaaggcttgcttcactctctccctcaggcggagaaggagaatggccatgtgatccctgggacatagaaacagatgtctgaggaaggagga

SEQ ID NO: 12669 - DNA, 122 bp, Homo sapiens
  misc_feature (61)..(62): /note="This region represents a CpG dinucleotide"
  misc_feature (61)..(61): /note="Nucleotide may be methylated to form 5-methylcytosine"
ttcttttgccaccacaggtattaaagcaccacatggtgacaagtgaatcacaaacacacgcgtacaggcacacccaagcacacagtgcctagaaacagctttttgttgtaaagtgtccaccc

SEQ ID NO: 12670 - DNA, 122 bp, Homo sapiens
  misc_feature (61)..(62): /note="This region represents a CpG dinucleotide"
  misc_feature (61)..(61): /note="Nucleotide may be methylated to form 5-methylcytosine"
ttgttctaggacaacacagaaacatttgcgaggattttatggagctcatgtctgaactcacggcctgttctgtggatgactagaaccagctgtaaatgaaaaatgacaagcaagagatggag

SEQ ID NO: 12671 - DNA, 122 bp, Homo sapiens
  misc_feature (61)..(62): /note="This region represents a CpG dinucleotide"
  misc_feature (61)..(61): /note="Nucleotide may be methylated to form 5-methylcytosine"
gaagcccatcccgcgtcatacactcaatgtaaacaaaagcaaagaaaacattgaagagctcggggtagtcttaccggaaaactgagaagaaaaacaacaaattgatagacaggtgcctgcct

SEQ ID NO: 12672 - DNA, 122 bp, Homo sapiens
  misc_feature (61)..(62): /note="This region represents a CpG dinucleotide"
  misc_feature (61)..(61): /note="Nucleotide may be methylated to form 5-methylcytosine"
agttttctcccccgacatctgttgagtctgcatgtgggcaatgtttcttgctagcttcttcgtgtattcactctctctggttccctttcatcataaaaccctgctgttgcccaagttttggc

SEQ ID NO: 12673 - DNA, 122 bp, Homo sapiens
  misc_feature (61)..(62): /note="This region represents a CpG dinucleotide"
  misc_feature (61)..(61): /note="Nucleotide may be methylated to form 5-methylcytosine"
gcacctgcatgactggccctcctcccctaggcaaagccaaccggacccagagccacaccgcgtgtgtcaacagcaagcaagtacagagcatgaaaacagctgctattcgaccctctctgtgt

SEQ ID NO: 12674 - DNA, 122 bp, Homo sapiens
  misc_feature (61)..(62): /note="This region represents a CpG dinucleotide"
  misc_feature (61)..(61): /note="Nucleotide may be methylated to form 5-methylcytosine"
tgcaaagctttacttaactaagtaacactgtgtgaataaagttttcctgggacacagccacgcccattctctggcatccagtctgcatgttgttatgacagaggctgcattacctggccctt

SEQ ID NO: 12675 - DNA, 122 bp, Homo sapiens
  misc_feature (61)..(62): /note="This region represents a CpG dinucleotide"
  misc_feature (61)..(61): /note="Nucleotide may be methylated to form 5-methylcytosine"
tcctgcatctactccgaagtcaagagcattacaatacaatttacagcgcctttaacaactcgcaagtaaagcattaaaattcgctttaattgagaaaatattgatttttaagtctagaaaaa

SEQ ID NO: 12676 - DNA, 122 bp, Homo sapiens
  misc_feature (61)..(62): /note="This region represents a CpG dinucleotide"
  misc_feature (61)..(61): /note="Nucleotide may be methylated to form 5-methylcytosine"
tcctttttatctcctaatctgatttcctcctctttacataaagatctcttggtggccaggcgtggtggctcacgcctgtaatcctagcactttgggaagccgaggcgggtggatcacttgag

SEQ ID NO: 12677 - DNA, 122 bp, Homo sapiens
  misc_feature (61)..(62): /note="This region represents a CpG dinucleotide"
  misc_feature (61)..(61): /note="Nucleotide may be methylated to form 5-methylcytosine"
ctctttttcacttctgctcctcttgtcatgtgtgggtttggtgagccagtatctttaatgcgacttttttcagcactggagttttacaaagcctgggcccagtggtgccggaaacactaaga

SEQ ID NO: 12678 - DNA, 122 bp, Homo sapiens
  misc_feature (61)..(62): /note="This region represents a CpG dinucleotide"
  misc_feature (61)..(61): /note="Nucleotide may be methylated to form 5-methylcytosine"
actttataaatgcgtgttcttaacttatgcttcctcccctgcagctccacttctcagaatcgccccttgtgaatcaccaggaactgacctcacagagctcatcccagggccctgacaagccc

SEQ ID NO: 12679 - DNA, 122 bp, Homo sapiens
  misc_feature (61)..(62): /note="This region represents a CpG dinucleotide"
  misc_feature (61)..(61): /note="Nucleotide may be methylated to form 5-methylcytosine"
atgttaattaactggaccttaacctctttttacctctgttctagtgttttgttcccacaacgttggaaaaggaaaacttttaagaactatttctgacagtggtgatgaaaagtattttcaat

SEQ ID NO: 12680 - DNA, 122 bp, Homo sapiens
  misc_feature (61)..(62): /note="This region represents a CpG dinucleotide"
  misc_feature (61)..(61): /note="Nucleotide may be methylated to form 5-methylcytosine"
ctggttaagggaaattaattgaggtaaattacggagagaaagcattgctccgccagacagcgtcaggccatggccagagcacagcagaaaagatttctacagttctataaaaccacaagacg

SEQ ID NO: 12681 - DNA, 122 bp, Homo sapiens
  misc_feature (61)..(62): /note="This region represents a CpG dinucleotide"
  misc_feature (61)..(61): /note="Nucleotide may be methylated to form 5-methylcytosine"
catgacccttgtaaaagtgttgttaaagagagaaaaacaaaggaaaaagccctaaggaggcggacttcatgattaggaccacccaaggagagtctctaacaaaagaaaattgagttccataa

SEQ ID NO: 12682 - DNA, 122 bp, Homo sapiens
  misc_feature (61)..(62): /note="This region represents a CpG dinucleotide"
  misc_feature (61)..(61): /note="Nucleotide may be methylated to form 5-methylcytosine"
aagagcccatgatgagctggatgtttttgttctgttttacaacagcatgcctgacccaggcgaggggccccagctcaggctagtttcccttttctcctctccacactgtttttgctgctgtc

SEQ ID NO: 12683 - DNA, 122 bp, Homo sapiens
  misc_feature (61)..(62): /note="This region represents a CpG dinucleotide"
  misc_feature (61)..(61): /note="Nucleotide may be methylated to form 5-methylcytosine"
aagtgccccgtaaatgccagtgattgttatttctattttctacctttgcatcctccctttcgtccccctcatccttgaaatgagaaggtggattaggtcatcacagctcggttccctgctcc

SEQ ID NO: 12684 - DNA, 122 bp, Homo sapiens
  misc_feature (61)..(62): /note="This region represents a CpG dinucleotide"
  misc_feature (61)..(61): /note="Nucleotide may be methylated to form 5-methylcytosine"
aagatatcctttttggtgtctgtcctgtgagatgaacaataatttagtcatgtcacttaacgatgtggacattttgtgagaaatgcattgttaggtgatttcatcatcatgtggacatcata

SEQ ID NO: 12685 - DNA, 122 bp, Homo sapiens
  misc_feature (61)..(62): /note="This region represents a CpG dinucleotide"
  misc_feature (61)..(61): /note="Nucleotide may be methylated to form 5-methylcytosine"
cttgatgagacaattcaccctcatctgctttctctagtcccctgtacttcttagtctctccgctcaccccgactgcaacgtctggaaatccctccaaagccagcagccccggagggctcggg

SEQ ID NO: 12686 - DNA, 122 bp, Homo sapiens
  misc_feature (61)..(62): /note="This region represents a CpG dinucleotide"
  misc_feature (61)..(61): /note="Nucleotide may be methylated to form 5-methylcytosine"
gccctgggcgagcactgagggaagcttggcctcagacatagccagctgccctctggacctcgcagccctgctgtgcccagctcagctgctgtgtcagtgcaaagccagggtgacatcagctg

SEQ ID NO: 12687 - DNA, 122 bp, Homo sapiens
  misc_feature (61)..(62): /note="This region represents a CpG dinucleotide"
  misc_feature (61)..(61): /note="Nucleotide may be methylated to form 5-methylcytosine"
tatcatacagtggatttctacagagaaataggaagttacggataaacgcaacagcctgaacgaatagcagctactgttaacttaggcacaaagaagaggacgctgtatgattccattttgat

SEQ ID NO: 12688 - DNA, 122 bp, Homo sapiens
  misc_feature (61)..(62): /note="This region represents a CpG dinucleotide"
  misc_feature (61)..(61): /note="Nucleotide may be methylated to form 5-methylcytosine"
gtgatagcccagtgggggtggccctagcaacaggaaattaacacagaattcattggagggcgataatgattgttcataaccattgggttgataagttaatatcattaattactcaacaaatt

SEQ ID NO: 12689 - DNA, 122 bp, Homo sapiens
  misc_feature (61)..(62): /note="This region represents a CpG dinucleotide"
  misc_feature (61)..(61): /note="Nucleotide may be methylated to form 5-methylcytosine"
gagagagcagcaagtccaaaggccctgggtgagcccgctgggtgtagctgtaggaagtaccgcccgccgagtgtcctaagccacagagtgtatttcctcacagtttggtgctggaagtctag

SEQ ID NO: 12690 - DNA, 122 bp, Homo sapiens
  misc_feature (61)..(62): /note="This region represents a CpG dinucleotide"
  misc_feature (61)..(61): /note="Nucleotide may be methylated to form 5-methylcytosine"
atgatgactctctaggctaggatttcagcttcattgcatgcacatggtgcactcacagggcgtgacctctctctgtctcagtaacctcatctgaggaccgggataatcataccgcttcaaag

SEQ ID NO: 12691 - DNA, 122 bp, Homo sapiens
  misc_feature (61)..(62): /note="This region represents a CpG dinucleotide"
  misc_feature (61)..(61): /note="Nucleotide may be methylated to form 5-methylcytosine"
aatttttgccctttaaacatgtaaagctttatttactgtgggcctgtactgtgttggtggcgatttaaagatggaagggtggtgttcctgcccttagggattctcagcccatatagaagctg

SEQ ID NO: 12692 - DNA, 122 bp, Homo sapiens
  misc_feature (61)..(62): /note="This region represents a CpG dinucleotide"
  misc_feature (61)..(61): /note="Nucleotide may be methylated to form 5-methylcytosine"
gcagatcttggcaagaagtgctagaatttacagggtttgatgcagagtccagagtgaggacgggaagctatgactaaaactctgcccaaggcactaagaaaggcttgactaagaaggaattc

SEQ ID NO: 12693 - DNA, 122 bp, Homo sapiens
  misc_feature (61)..(62): /note="This region represents a CpG dinucleotide"
  misc_feature (61)..(61): /note="Nucleotide may be methylated to form 5-methylcytosine"
tgcacctgtcactgccattgcaccccaccctgccccgctctgcccatctttcctgcttaacgtcatccagtctgtggcactgcacagctccacctgccccaggcacccagttcaccatcttt

SEQ ID NO: 12694 - DNA, 122 bp, Homo sapiens
  misc_feature (61)..(62): /note="This region represents a CpG dinucleotide"
  misc_feature (61)..(61): /note="Nucleotide may be methylated to form 5-methylcytosine"
aaaacaataaaggtcatatatgacaaacccacagctaacatattagtactaattttataccgaatggggaaatgttgaaagcctttcctctaagatctggaacaagataaggatgctcactt

SEQ ID NO: 12695 - DNA, 122 bp, Homo sapiens
  misc_feature (61)..(62): /note="This region represents a CpG dinucleotide"
  misc_feature (61)..(61): /note="Nucleotide may be methylated to form 5-methylcytosine"
tgtagggttatacgcaatagcaagatagtcctgtgtttcctgtaattccggcccttcagccggacctaccctgacacaaggtgacctcttgtatgtgctgcctagtctgccggagttatcta

SEQ ID NO: 12696 - DNA, 122 bp, Homo sapiens
  misc_feature (61)..(62): /note="This region represents a CpG dinucleotide"
  misc_feature (61)..(61): /note="Nucleotide may be methylated to form 5-methylcytosine"
tgggcttgatcttagagaaacatgcaagctgctacaacttagcggagaatttccatgccacgtcaatttacagccagccccctaccagagttctgtcgctcagggcaccagcggtgctttgt

SEQ ID NO: 12697 - DNA, 122 bp, Homo sapiens
  misc_feature (61)..(62): /note="This region represents a CpG dinucleotide"
  misc_feature (61)..(61): /note="Nucleotide may be methylated to form 5-methylcytosine"
aatgagacagtaagcctaagtgttgtgaagattgacagaacctgtgtgaggaacttagaacggggcccgcatctactgggtgtacaccatcagcatttcatcactgcagctaatatctaccc

SEQ ID NO: 12698 - DNA, 122 bp, Homo sapiens
  misc_feature (61)..(62): /note="This region represents a CpG dinucleotide"
  misc_feature (61)..(61): /note="Nucleotide may be methylated to form 5-methylcytosine"
ggggagccagaagcatggagaccactgggtagataaggtttcaccggcagacagctgtggcgctttcctctcctcaggatcagggatggggaggggaggagagcaagtctttcctgaaaccc

SEQ ID NO: 12699 - DNA, 122 bp, Homo sapiens
  misc_feature (61)..(62): /note="This region represents a CpG dinucleotide"
  misc_feature (61)..(61): /note="Nucleotide may be methylated to form 5-methylcytosine"
tttgcttttatgttatttttcgtgatctcttcccctctaaagcatattgcatgcttacctcgtgttatattctgcctttaattactggatactctagggcagggattgtcccgtcctcattc

SEQ ID NO: 12700 - DNA, 122 bp, Homo sapiens
  misc_feature (61)..(62): /note="This region represents a CpG dinucleotide"
  misc_feature (61)..(61): /note="Nucleotide may be methylated to form 5-methylcytosine"
cagaaactctttttaggtttgcctttaaaatttaaatccagtctaggactgggtcatttccgaatcagattttgggtaaataactgacaactggcttattttcatccacgacgaaaatggaa

SEQ ID NO: 12701 - DNA, 122 bp, Homo sapiens
  misc_feature (61)..(62): /note="This region represents a CpG dinucleotide"
  misc_feature (61)..(61): /note="Nucleotide may be methylated to form 5-methylcytosine"
actccccgctgccgcagtcctgttgacattattccttgtcagaatggctcatttccagttcgttccatctaccctccctttggtagacctccatgacccacctggatccagtccccagtcac

SEQ ID NO: 12702 - DNA, 122 bp, Homo sapiens
  misc_feature (61)..(62): /note="This region represents a CpG dinucleotide"
  misc_feature (61)..(61): /note="Nucleotide may be methylated to form 5-methylcytosine"
agttaacgtagcagaggaatggacctgctggctgccacacgggaagttctcagaggcgtccgtggcgaagcctctgtgtcctggagctatcatggttacttccttgctgcttacttcttaaa

SEQ ID NO: 12703 - DNA, 122 bp, Homo sapiens
  misc_feature (61)..(62): /note="This region represents a CpG dinucleotide"
  misc_feature (61)..(61): /note="Nucleotide may be methylated to form 5-methylcytosine"
tgctattttaattcctgccatttcgggtttagagagtccacatgaaaacttctgtccttacgtttgaccctgaggacagctgagccttcttggttcctaatgctccagtgagaattactctt

SEQ ID NO: 12704 - DNA, 122 bp, Homo sapiens
  misc_feature (61)..(62): /note="This region represents a CpG dinucleotide"
  misc_feature (61)..(61): /note="Nucleotide may be methylated to form 5-methylcytosine"
ttagtagagacggagtaatcttctgtttgaggaaatgatcaccattttacaccttcgctgcgtgtgctggtctgtaatctgctattggcggaaatgatcaccgttttacaccttcactgcgt

SEQ ID NO: 12705 - DNA, 122 bp, Homo sapiens
  misc_feature (61)..(62): /note="This region represents a CpG dinucleotide"
  misc_feature (61)..(61): /note="Nucleotide may be methylated to form 5-methylcytosine"
aaacaggagtgggatataaaaacaaaagcttatttaatgaaggctgaccttcatgaggcacgaaagtgttcttctggcaactacaaataagcctgtgcctgaatatgctcagcattcccctc

SEQ ID NO: 12706 - DNA, 122 bp, Homo sapiens
  misc_feature (61)..(62): /note="This region represents a CpG dinucleotide"
  misc_feature (61)..(61): /note="Nucleotide may be methylated to form 5-methylcytosine"
gaggaaaccaggagtgtgcactcagcagccagcattaaagagaagcatgcaaatcaccctcggcttcctttgcttttaaatatgagttattattgtgaaagcagtaattaaatcttagaact

SEQ ID NO: 12707 - DNA, 122 bp, Homo sapiens
  misc_feature (61)..(62): /note="This region represents a CpG dinucleotide"
  misc_feature (61)..(61): /note="Nucleotide may be methylated to form 5-methylcytosine"
acgaggtcaaggaaaccatcataaataaattttaggcatggatggggtgagacagaaggacgagaaggaagccttcctcatgtcacatgcatgtctagagccactctttctgtccaagctct

SEQ ID NO: 12708 - DNA, 122 bp, Homo sapiens
  misc_feature (61)..(62): /note="This region represents a CpG dinucleotide"
  misc_feature (61)..(61): /note="Nucleotide may be methylated to form 5-methylcytosine"
aaaaagaaagtaaaatctccatgtcctgatatggaacaatcttctgtacatacagttaagcgacaaaagcaaggtatagaacagtgcatatggtgtgctatcttttgtgtaaaagggtatgc

SEQ ID NO: 12709 - DNA, 122 bp, Homo sapiens
  misc_feature (61)..(62): /note="This region represents a CpG dinucleotide"
  misc_feature (61)..(61): /note="Nucleotide may be methylated to form 5-methylcytosine"
atgcgtggcctggacaagcagttggagtccagacggaagctggagtcggcatactcaatgcgtacattggtggggccacgagtggttttcactgacagcgtgaacaggtagctggggtgcgt

SEQ ID NO: 12710 - DNA, 122 bp, Homo sapiens
  misc_feature (61)..(62): /note="This region represents a CpG dinucleotide"
  misc_feature (61)..(61): /note="Nucleotide may be methylated to form 5-methylcytosine"
caaaatgtgggaagtgatgaggggtgcttgtgggaatgtctgggggtgggtggaccccatcgtgatgtgagtggcctacagggaacacccaacaaaatgagttttaaaaaggcttgtccagg

SEQ ID NO: 12711 - DNA, 122 bp, Homo sapiens
  misc_feature (61)..(62): /note="This region represents a CpG dinucleotide"
  misc_feature (61)..(61): /note="Nucleotide may be methylated to form 5-methylcytosine"
gctggagcacctgttgtaagatgtgctgccggaggttctcctgggcaatccccattcgctcgagctttttgtcagtaagtctcagcagggctcgccctgcagggttttaagaaataaaagga

SEQ ID NO: 12712 - DNA, 122 bp, Homo sapiens
  misc_feature (61)..(62): /note="This region represents a CpG dinucleotide"
  misc_feature (61)..(61): /note="Nucleotide may be methylated to form 5-methylcytosine"
taggctgtgtaactgggctcagtagagagttgtctgataagataagtctgtagccagaagcgatgcttgtttataggtgattcagcacagaggcagtttattgggactccaattgacagcat

SEQ ID NO: 12713 - DNA, 122 bp, Homo sapiens
  misc_feature (61)..(62): /note="This region represents a CpG dinucleotide"
  misc_feature (61)..(61): /note="Nucleotide may be methylated to form 5-methylcytosine"
gtgttactacttaacactctatagagaaacagccacataactctggcatgagctgggtcacggggtgttgtcacacacccactcgcctatacttttcttgatgtgaatatttcttggatgaa

SEQ ID NO: 12714 - DNA, 122 bp, Homo sapiens
  misc_feature (61)..(62): /note="This region represents a CpG dinucleotide"
  misc_feature (61)..(61): /note="Nucleotide may be methylated to form 5-methylcytosine"
cccagcacacactgatggggcacgttttcccagctgccctgttggttttcctcagtgaatcgctgctgagtcagttagcaggtccccaaagtagaaactttgtcagatcccaaagaatgtca

SEQ ID NO: 12715 - DNA, 122 bp, Homo sapiens
  misc_feature (61)..(62): /note="This region represents a CpG dinucleotide"
  misc_feature (61)..(61): /note="Nucleotide may be methylated to form 5-methylcytosine"
ttttgtcaagattgcctccacattttcacagtgttccttctatctcatttgtcataaaggcgatatctgccttgtttatgctgaaagtaatcctgaagattggacagaagtgcttgtataag

SEQ ID NO: 12716 - DNA, 122 bp, Homo sapiens
  misc_feature (61)..(62): /note="This region represents a CpG dinucleotide"
  misc_feature (61)..(61): /note="Nucleotide may be methylated to form 5-methylcytosine"
aatgacgtttcagtcaatgacagaccacatatatcactgtggtcccataagataataaaacgtagctgaaaaattcctatcctctagtgacgctgtagccatcataatgttgtaatgcaatg

SEQ ID NO: 12717 - DNA, 122 bp, Homo sapiens
  misc_feature (61)..(62): /note="This region represents a CpG dinucleotide"
  misc_feature (61)..(61): /note="Nucleotide may be methylated to form 5-methylcytosine"
tttaatcatggtgactgttgttaaggccatttaacagatgaggaaaatcaggctgacagacggcagagtcgtctgaggcagaacacagaatctgtgttcttcaccactgttacaattctccc

SEQ ID NO: 12718 - DNA, 122 bp, Homo sapiens
  misc_feature (61)..(62): /note="This region represents a CpG dinucleotide"
  misc_feature (61)..(61): /note="Nucleotide may be methylated to form 5-methylcytosine"
cagggatgcgggcgtgggagcctgaggtcccagctactcaggaagcagcggcgggaggatcgctcagcctgggggtccaggacagcctgcgcgacaatgtaacattccctcccgcagtctct

SEQ ID NO: 12719 - DNA, 122 bp, Homo sapiens
  misc_feature (61)..(62): /note="This region represents a CpG dinucleotide"
  misc_feature (61)..(61): /note="Nucleotide may be methylated to form 5-methylcytosine"
tttttgtgtgtgaattatgcaaaagtagcttccagcctagtccaagtcaaaaaaattatacgttcagaatcaatggagtctgaattagctacatttgagtgctcagggacctcaaaggacac

SEQ ID NO: 12720 - DNA, 122 bp, Homo sapiens
  misc_feature (61)..(62): /note="This region represents a CpG dinucleotide"
  misc_feature (61)..(61): /note="Nucleotide may be methylated to form 5-methylcytosine"
accccaaggggtaggaacatgttgagatccagccagatggtgaagaagtcctctgtcttgcggtagcacatccagttcaccacatctggtttgtccagcttggcttctagctgattccccag

SEQ ID NO: 12721 - DNA, 122 bp, Homo sapiens
  misc_feature (61)..(62): /note="This region represents a CpG dinucleotide"
  misc_feature (61)..(61): /note="Nucleotide may be methylated to form 5-methylcytosine"
acacaagcccgggcagaaaaatgaaaatgctctatagatgctcccgaaatgtggtccctacgtgttgccatgaccagagaactttctggaaacagcacccaaggcattgggtagcttttctt

SEQ ID NO: 12722 - DNA, 122 bp, Homo sapiens
  misc_feature (61)..(62): /note="This region represents a CpG dinucleotide"
  misc_feature (61)..(61): /note="Nucleotide may be methylated to form 5-methylcytosine"
ttttaggttattttcttggaaggttgggaaaagatgtttgttttaacaggtcatgtactacgttgttgttttcatttctgttataagtaaaactaaaagcacagaatggtgggaaaggggct

SEQ ID NO: 12723 - DNA, 122 bp, Homo sapiens
  misc_feature (61)..(62): /note="This region represents a CpG dinucleotide"
  misc_feature (61)..(61): /note="Nucleotide may be methylated to form 5-methylcytosine"
aagactttttaaacacttgattccatcaatgcattatttattaatcattataaatatacccgtactcaaattatttcagtacaaacaataatgaaagtatgacagtgctatcaacaagagga

SEQ ID NO: 12724 - DNA, 122 bp, Homo sapiens
  misc_feature (61)..(62): /note="This region represents a CpG dinucleotide"
  misc_feature (61)..(61): /note="Nucleotide may be methylated to form 5-methylcytosine"
acagccatgcctgtgcccaggactggggcttttccactgatatcctcaggtgagaagcagcgtgtagagcgagccagctccactccctgtaagtgaagcacaaagcagagtgatctacttat

SEQ ID NO: 12725 - DNA, 122 bp, Homo sapiens
  misc_feature (61)..(62): /note="This region represents a CpG dinucleotide"
  misc_feature (61)..(61): /note="Nucleotide may be methylated to form 5-methylcytosine"
gctattgaacaaagccttgaatgtgtttcagatattagcttatttaattcctcacagcaacgctgtgatggatagctgctcagagattgagtgacaggtggttagtgacagaatggaggttg

SEQ ID NO: 12726 - DNA, 122 bp, Homo sapiens
  misc_feature (61)..(62): /note="This region represents a CpG dinucleotide"
  misc_feature (61)..(61): /note="Nucleotide may be methylated to form 5-methylcytosine"
ctgctctgacttcattttgctaattctctcaatgaaatgcaataatgtgaaggaaaaactcgtctttggggcagggccttcaacatatggtcagcctggactccttcaaaccacacagatta

SEQ ID NO: 12727 - DNA, 122 bp, Homo sapiens
  misc_feature (61)..(62): /note="This region represents a CpG dinucleotide"
  misc_feature (61)..(61): /note="Nucleotide may be methylated to form 5-methylcytosine"
agcgctccctgggcacccgctcgcactcaagtgcaggcagcgtggtgacaatgccaactgcgccccctatctctgacaggctccagaggggcagtgggaatacagtagctacatgtggctat

SEQ ID NO: 12728 - DNA, 122 bp, Homo sapiens
  misc_feature (61)..(62): /note="This region represents a CpG dinucleotide"
  misc_feature (61)..(61): /note="Nucleotide may be methylated to form 5-methylcytosine"
gtaatgccagagtcactttccatcaacccgcccactcagctgaattgcgccagccttttgcgcaaagcatcacactcctgttgtaagattgattgggtgttgagccaccgccacaaagacaa

SEQ ID NO: 12729 - DNA, 122 bp, Homo sapiens
  misc_feature (61)..(62): /note="This region represents a CpG dinucleotide"
  misc_feature (61)..(61): /note="Nucleotide may be methylated to form 5-methylcytosine"
gcagaggtgtcagcagagggtgagagaaagttcaccctgacagattaactgggcagcaaacgggcttgcaaaatgtggcctttgctcaaaccaaaggtagaatgtgagagtggagtagtaca

SEQ ID NO: 12730 - DNA, 122 bp, Homo sapiens
  misc_feature (61)..(62): /note="This region represents a CpG dinucleotide"
  misc_feature (61)..(61): /note="Nucleotide may be methylated to form 5-methylcytosine"
acgttgagaatgaccactctggatagattcagagggtgaggagcaagtctgtggggcagacggccatgatgctggtgaatcattgcaatatcctggcaagaaataacaaaggcctgaactta

SEQ ID NO: 12731 - DNA, 122 bp, Homo sapiens
  misc_feature (61)..(62): /note="This region represents a CpG dinucleotide"
  misc_feature (61)..(61): /note="Nucleotide may be methylated to form 5-methylcytosine"
ataaaagaagacaataaattggcaaatatgtaggaaagagacatcctcaaaagttactagcgggagtgtaaattggtaaaatctctatgcagggcaatttggcaatatccttcaaaatgact

SEQ ID NO: 12732 - DNA, 122 bp, Homo sapiens
  misc_feature (61)..(62): /note="This region represents a CpG dinucleotide"
  misc_feature (61)..(61): /note="Nucleotide may be methylated to form 5-methylcytosine"
ccagtctagattcctgtccaatcaatggtgtgattcttgggcgacaacaacctgaagtcacgccagggggttccctggacaaagggcagaggccccccgactccctctcctggagaggatgc

SEQ ID NO: 12733 - DNA, 122 bp, Homo sapiens
  misc_feature (61)..(62): /note="This region represents a CpG dinucleotide"
  misc_feature (61)..(61): /note="Nucleotide may be methylated to form 5-methylcytosine"
cagctctcatatatgtatccttgtgctgtgaaatctaagtaaatgactctgtgtgtggtacgagggatataaaacagcacatttatctttcagtaaatacactggagttaggaagacagagt

SEQ ID NO: 12734 - DNA, 122 bp, Homo sapiens
  misc_feature (61)..(62): /note="This region represents a CpG dinucleotide"
  misc_feature (61)..(61): /note="Nucleotide may be methylated to form 5-methylcytosine"
ttcctctattgtgacccttcaaaaatcctacctgttttcaaagacatcatcctcattgttcgtaacccccaccaccaacaacaaaaaagccagattgaggcacccgctgacaaagcaactct

SEQ ID NO: 12735 - DNA, 122 bp, Homo sapiens
  misc_feature (61)..(62): /note="This region represents a CpG dinucleotide"
  misc_feature (61)..(61): /note="Nucleotide may be methylated to form 5-methylcytosine"
tatgggaaatgagtcaaggttgagagtataagacagctggtaatcaggagtagaccaggccgggggagccactgtgagcagcatgaaatcgtggcatccatagcactggaaggtaaaagttg

SEQ ID NO: 12736 - DNA, 122 bp, Homo sapiens
  misc_feature (61)..(62): /note="This region represents a CpG dinucleotide"
  misc_feature (61)..(61): /note="Nucleotide may be methylated to form 5-methylcytosine"
ggagagtcatctgccacagtagaacagacttttctgtcaccctcctcaacagcagatggccgctctgcactcatccgtgtcatacatcattgctgagtgagacaccaccaaccactgtgcaa

SEQ ID NO: 12737 - DNA, 122 bp, Homo sapiens
  misc_feature (61)..(62): /note="This region represents a CpG dinucleotide"
  misc_feature (61)..(61): /note="Nucleotide may be methylated to form 5-methylcytosine"
ccccatagccagcatatgtttcttgtctcctacgcactttagcactggctctggggaatgcgtgtatttctgaacgtccctaaacacagctctgactgaagcacttataatttaccctccat

SEQ ID NO: 12738 - DNA, 122 bp, Homo sapiens
  misc_feature (61)..(62): /note="This region represents a CpG dinucleotide"
  misc_feature (61)..(61): /note="Nucleotide may be methylated to form 5-methylcytosine"
tcatcatacgtgaaaatcattccctgcagctcttcccagatgtcatgtgttaagcaggttcgatatataatgaaactaggaaggcactactgtcctttgctgacaccttcccttcttggttt

SEQ ID NO: 12739 - DNA, 122 bp, Homo sapiens
  misc_feature (61)..(62): /note="This region represents a CpG dinucleotide"
  misc_feature (61)..(61): /note="Nucleotide may be methylated to form 5-methylcytosine"
aggaaaaattttaactaatgcagttagatttgaactatgcaaatctccatcaatttctcacgtctcctttttttcctccttctctttctcttttgttttctgctcaccaacctgcttgtcat

SEQ ID NO: 12740 - DNA, 122 bp, Homo sapiens
  misc_feature (61)..(62): /note="This region represents a CpG dinucleotide"
  misc_feature (61)..(61): /note="Nucleotide may be methylated to form 5-methylcytosine"
tcagttcaggaagcagaggcagggtgctttccccatgcatctgaatctgtgaatggagaccgctccccagctcatggttggcatgggaacaggaccggtgcatgctggagaggtcctatggc

SEQ ID NO: 12741 - DNA, 122 bp, Homo sapiens
  misc_feature (61)..(62): /note="This region represents a CpG dinucleotide"
  misc_feature (61)..(61): /note="Nucleotide may be methylated to form 5-methylcytosine"
tggacttcatagtgtctaccactggccccgcggggctctgcagcttccacttgagtggctcgatacaccctgcgtcagccatgctgaaccaaggtgttcaagctctctgcactctctggccc

SEQ ID NO: 12742 - DNA, 122 bp, Homo sapiens
  misc_feature (61)..(62): /note="This region represents a CpG dinucleotide"
  misc_feature (61)..(61): /note="Nucleotide may be methylated to form 5-methylcytosine"
tacttgcttgtttttctcttgttaatctgtcttttcttgtgagtctgtcccaactacaaacgtatgagggttgaggaagagttacttttttctcccattcatagtctatacagcggcggttg

SEQ ID NO: 12743 - DNA, 122 bp, Homo sapiens
  misc_feature (61)..(62): /note="This region represents a CpG dinucleotide"
  misc_feature (61)..(61): /note="Nucleotide may be methylated to form 5-methylcytosine"
tcaggaaggtgttttgagatttgtagagtctgtgaacagataagaatcgaattctcacttcgtcactctagaaactgctgaccttagagagacttttctgtggccaggcttatgtctgagga

SEQ ID NO: 12744 - DNA, 122 bp, Homo sapiens
  misc_feature (61)..(62): /note="This region represents a CpG dinucleotide"
  misc_feature (61)..(61): /note="Nucleotide may be methylated to form 5-methylcytosine"
ctaaataatcacactcttacctcacaagttatttctaaacatcacttgaacattttgtgccgtttcttcaggatcttaaggtgcatactgtcctatgtgatcggatctgaaaggtaataaaa

SEQ ID NO: 12745 - DNA, 122 bp, Homo sapiens
  misc_feature (61)..(62): /note="This region represents a CpG dinucleotide"
  misc_feature (61)..(61): /note="Nucleotide may be methylated to form 5-methylcytosine"
caccccttgatcatactgaagaacagctgctgttggtgttctcgtgaatgtctttagctccgcttcctctgggaaggaaataagacagttatctcttcatgaagcattttttttttttggtg

SEQ ID NO: 12746 - DNA, 122 bp, Homo sapiens
  misc_feature (61)..(62): /note="This region represents a CpG dinucleotide"
  misc_feature (61)..(61): /note="Nucleotide may be methylated to form 5-methylcytosine"
gtacattatacctcataaagtactgctagcatctaaaagatacacatacagaaaaatacacggaacggacatgctcagtttaatgaattatttagccagcgcctgtgaaacaccacccacaa

SEQ ID NO: 12747 - DNA, 122 bp, Homo sapiens
  misc_feature (61)..(62): /note="This region represents a CpG dinucleotide"
  misc_feature (61)..(61): /note="Nucleotide may be methylated to form 5-methylcytosine"
ggcctgatatggtttggctgtgtgtccctactcaaatgccatcttgaattgtaatcccctcgtattgagggagggaagtgactggattatgagggtggtttcccccatgctggtcttgtgat

SEQ ID NO: 12748 - DNA, 122 bp, Homo sapiens
  misc_feature (61)..(62): /note="This region represents a CpG dinucleotide"
  misc_feature (61)..(61): /note="Nucleotide may be methylated to form 5-methylcytosine"
ggaaatacagctgaggccaaaactcattctgaacagcaaatgaaaacagatacttttggccgggcatggtggctcatgcgtgtaatctcagcactttgggaggctgaggcaggcagattacc

SEQ ID NO: 12749 - DNA, 122 bp, Homo sapiens
  misc_feature (61)..(62): /note="This region represents a CpG dinucleotide"
  misc_feature (61)..(61): /note="Nucleotide may be methylated to form 5-methylcytosine"
cttatactcatttcttatatacctcatatcatgcccataaaacctgagggcataaactctcgctgttccatggttctctgcatatatctctgcatgcagaggccttcagctgaagtttactg

SEQ ID NO: 12750 - DNA, 122 bp, Homo sapiens
  misc_feature (61)..(62): /note="This region represents a CpG dinucleotide"
  misc_feature (61)..(61): /note="Nucleotide may be methylated to form 5-methylcytosine"
ttatctgcagtgtggtcctgcagaagccatgtgccctgcagccctgtctgttccgtagctcgcttcctgccagggcggggaggagcctgctgtcatcccttttgtgtttgcccagggaggag

SEQ ID NO: 12751 - DNA, 122 bp, Homo sapiens
  misc_feature (61)..(62): /note="This region represents a CpG dinucleotide"
  misc_feature (61)..(61): /note="Nucleotide may be methylated to form 5-methylcytosine"
gaaggagttcagcctagtgggtacagtggcccaaaagaggtttggacctagtgctcacagcgcagaggaggaaagttgcaatttcaggtgagaaaacagcaaagacttcttgggagaggtgg

SEQ ID NO: 12752 - DNA, 122 bp, Homo sapiens
  misc_feature (61)..(62): /note="This region represents a CpG dinucleotide"
  misc_feature (61)..(61): /note="Nucleotide may be methylated to form 5-methylcytosine"
agtagaggtggggcctgatgctgtgattgacagcctggttaatcggctaaactcagtaggcgtgtcccatgcaccacaaggaattggggaggaacaattcccaaaggaaggaggttgctgtt

SEQ ID NO: 12753 - DNA, 122 bp, Homo sapiens
  misc_feature (61)..(62): /note="This region represents a CpG dinucleotide"
  misc_feature (61)..(61): /note="Nucleotide may be methylated to form 5-methylcytosine"
tagattatgtgtgcttcactccaaaacctaatgagccatttgtaaaagtgatggcttttgcggtgcccagggagagaatttgtatgtttgtatccttcaacacacatttattacagttatta

SEQ ID NO: 12754 - DNA, 122 bp, Homo sapiens
  misc_feature (61)..(62): /note="This region represents a CpG dinucleotide"
  misc_feature (61)..(61): /note="Nucleotide may be methylated to form 5-methylcytosine"
gctttggcaccgaaacccttcccaagtttctgactttctgtattctgcaactgatgagaacgcaatggtcacatcaggtggagttctcagtcaggtcctcagagtgagccaggtatgagggt

SEQ ID NO: 12755 - DNA, 122 bp, Homo sapiens
  misc_feature (61)..(62): /note="This region represents a CpG dinucleotide"
  misc_feature (61)..(61): /note="Nucleotide may be methylated to form 5-methylcytosine"
gggagcagggatgagcaacagaggtcatgatttggcaacagcaatggctgaaagtttaatcgtttgttcatgagagttttattctggttttagttttttattttgttttgctggctgaggca

SEQ ID NO: 12756 - DNA, 122 bp, Homo sapiens
  misc_feature (61)..(62): /note="This region represents a CpG dinucleotide"
  misc_feature (61)..(61): /note="Nucleotide may be methylated to form 5-methylcytosine"
atagccgcaacctagttggcagaggaagctcaccccgaggaagtctctcgccacggtaagcgctatttacactgcaaagtataggcaaaggaaacgtttgagatttggaaactttcttatct

SEQ ID NO: 12757 - DNA, 122 bp, Homo sapiens
  misc_feature (61)..(62): /note="This region represents a CpG dinucleotide"
  misc_feature (61)..(61): /note="Nucleotide may be methylated to form 5-methylcytosine"
cagaaaatccttttaccactgactctttatggcatcaataaaacggtgataaaagtcacacgtgcctcaagggtggtgctggagattaaaggatgtaggatgcataaaccctgccatcctat

SEQ ID NO: 12758 - DNA, 122 bp, Homo sapiens
  misc_feature (61)..(62): /note="This region represents a CpG dinucleotide"
  misc_feature (61)..(61): /note="Nucleotide may be methylated to form 5-methylcytosine"
agggctcgcagtctaggctgaaggccacagttagaaaccagaatcctgagtggttccctccgctgcagggactctgtcatggctctgtgcccaatgcagcacctttgcctggcacagggtgg

SEQ ID NO: 12759 - DNA, 122 bp, Homo sapiens
  misc_feature (61)..(62): /note="This region represents a CpG dinucleotide"
  misc_feature (61)..(61): /note="Nucleotide may be methylated to form 5-methylcytosine"
aggttaagcaacttgcccagcatcacacagctagtaaatggtgagcctaagatgccttcacgggtctgggagtccaccgtctatgctcttaaccatcaagctgacctgttttacctgctgtg

SEQ ID NO: 12760 - DNA, 122 bp, Homo sapiens
  misc_feature (61)..(62): /note="This region represents a CpG dinucleotide"
  misc_feature (61)..(61): /note="Nucleotide may be methylated to form 5-methylcytosine"
ggagccaggcttatgtgtgaccaagcttcttagcagagcatttgggcaaggcctttacaccgcatgggagtctggagttttcagtaacttgccacacaggaaggccacacagctggtaggca

SEQ ID NO: 12761 - DNA, 122 bp, Homo sapiens
  misc_feature (61)..(62): /note="This region represents a CpG dinucleotide"
  misc_feature (61)..(61): /note="Nucleotide may be methylated to form 5-methylcytosine"
gccgtagtacactccttgggtaacccttaggtaacccatgctcttactttaagtgcacaacgtcagaataggtttgccatgtgcaccattaagctctgagaatcttatctgctatttcaaat

SEQ ID NO: 12762 - DNA, 122 bp, Homo sapiens
  misc_feature (61)..(62): /note="This region represents a CpG dinucleotide"
  misc_feature (61)..(61): /note="Nucleotide may be methylated to form 5-methylcytosine"
gagagaatctggtaaagaccaggttcacctggctgggatcatcactttcgcaagagccttcgccagtcttttgctttatctaggagccagctgacctcatcttattttcctataacttggct

SEQ ID NO: 12763 - DNA, 122 bp, Homo sapiens
  misc_feature (61)..(62): /note="This region represents a CpG dinucleotide"
  misc_feature (61)..(61): /note="Nucleotide may be methylated to form 5-methylcytosine"
tacagttccttaaacttccagtgggcagactaccaaaccagggttgatcatacctgggaccgtaggtcagtaacatcccttacttgtaaccatttctccctagagtccagactagtggacat

SEQ ID NO: 12764 - DNA, 122 bp, Homo sapiens
  misc_feature (61)..(62): /note="This region represents a CpG dinucleotide"
  misc_feature (61)..(61): /note="Nucleotide may be methylated to form 5-methylcytosine"
tgctttctggtttctctggcacatagctgacatcacagggcttactccttgtgatttaggcggcagctgcaggaacagccttctggaaagataaaaccagcatcatttgtctcacctctcct

SEQ ID NO: 12765 - DNA, 122 bp, Homo sapiens
  misc_feature (61)..(62): /note="This region represents a CpG dinucleotide"
  misc_feature (61)..(61): /note="Nucleotide may be methylated to form 5-methylcytosine"
aaaaaaaaaaaagcagcagcagcaaaagtgcacagacccagcgtgcacgcgtctccgccacgcctcactcccgtctgcgcctggatccaccgccacccgcttgtataaaaagtgggccccac

SEQ ID NO: 12766 - DNA, 122 bp, Homo sapiens
  misc_feature (61)..(62): /note="This region represents a CpG dinucleotide"
  misc_feature (61)..(61): /note="Nucleotide may be methylated to form 5-methylcytosine"
aacaagttaaagcattaatcttgtgctgtccaagttatgctaattaaatatatacatctacgagactaagttcctaaaggaactaacaattctgtaatgaaaaaaattcactctaatgttct

SEQ ID NO: 12767 - DNA, 122 bp, Homo sapiens
  misc_feature (61)..(62): /note="This region represents a CpG dinucleotide"
  misc_feature (61)..(61): /note="Nucleotide may be methylated to form 5-methylcytosine"
cagaaacaaaaggaggtgtgacaactgtgtcagaagtctgagtgacgcaaggccatgagccgaggaatgcagacaccctctagaaactggaaaaggcaaggaaataaattctctcctggagc

SEQ ID NO: 12768 - DNA, 122 bp, Homo sapiens
  misc_feature (61)..(62): /note="This region represents a CpG dinucleotide"
  misc_feature (61)..(61): /note="Nucleotide may be methylated to form 5-methylcytosine"
tgtcatgatagaacactgctatagggacaccctatagaggtcaaagcccttaagttctctcgctcccatgcctggcctggaaggctgaggcaagctgccaagacagccactgcagggtgata

SEQ ID NO: 12769 - DNA, 122 bp, Homo sapiens
  misc_feature (61)..(62): /note="This region represents a CpG dinucleotide"
  misc_feature (61)..(61): /note="Nucleotide may be methylated to form 5-methylcytosine"
gtaggtgctagctatgtgaaaatgagtgggcagagatcagggcaggaggaagagcacaggcgaagactgaggcaggaaacaccatggctgtttgggagagatccagttactgctggtattac

SEQ ID NO: 12770 - DNA, 122 bp, Homo sapiens
  misc_feature (61)..(62): /note="This region represents a CpG dinucleotide"
  misc_feature (61)..(61): /note="Nucleotide may be methylated to form 5-methylcytosine"
cgaaaatcaacccccatgctcacagaaggtcctggagaaacctcagcgctggcggggtaacgtgctgtctgctgaaaccgaggagcgtgatgaacctgttctacatctcagccactgaacca

SEQ ID NO: 12771 - DNA, 122 bp, Homo sapiens
  misc_feature (61)..(62): /note="This region represents a CpG dinucleotide"
  misc_feature (61)..(61): /note="Nucleotide may be methylated to form 5-methylcytosine"
tcaggactctagttaggcaggagtgagggctggcgggtgacatttctctctgaatgataccgttagttattgacaggctagtccaaaccctttcctttgtttggaaacagatgccgtgagaa

SEQ ID NO: 12772 - DNA, 122 bp, Homo sapiens
  misc_feature (61)..(62): /note="This region represents a CpG dinucleotide"
  misc_feature (61)..(61): /note="Nucleotide may be methylated to form 5-methylcytosine"
agagagtggtaggactggaattcaaatcctgatttgcctgataacaaaacttactttccccgctttaccctgtagactcatgtttggctctgtccagtggttgtcattggacatatcccaca

SEQ ID NO: 12773 - DNA, 122 bp, Homo sapiens
  misc_feature (61)..(62): /note="This region represents a CpG dinucleotide"
  misc_feature (61)..(61): /note="Nucleotide may be methylated to form 5-methylcytosine"
ctgaagaaagagctctttgaatttttcatagaaaagactggtgcccaaaaggccagggctcgagaatgaggctgcctcaagcacagtgcttggcaggacaccagggctgaaaggtacagcaa

SEQ ID NO: 12774 - DNA, 122 bp, Homo sapiens
  misc_feature (61)..(62): /note="This region represents a CpG dinucleotide"
  misc_feature (61)..(61): /note="Nucleotide may be methylated to form 5-methylcytosine"
atgcactatcctagttagcagggaaccagaacaacagcttcagaacaggctgtgctgcaacgcaacctgttggttgagttggcaaacattgatcttgggaaatggctcccagacttccattc

SEQ ID NO: 12775 - DNA, 122 bp, Homo sapiens
  misc_feature (61)..(62): /note="This region represents a CpG dinucleotide"
  misc_feature (61)..(61): /note="Nucleotide may be methylated to form 5-methylcytosine"
ttcctcccatctgagagctcgccagaggactgtgggtggcagcgggtgcggcagatccggcgtgtgggcgccgactgctcctgcctcactgccacggtgccctcggttaccacacagcctgc

SEQ ID NO: 12776 - DNA, 122 bp, Homo sapiens
  misc_feature (61)..(62): /note="This region represents a CpG dinucleotide"
  misc_feature (61)..(61): /note="Nucleotide may be methylated to form 5-methylcytosine"
cctcccctcaaggcaggaactcccaggatctctatgcacagattccgggtcctccagagtcggtccctggcaggaaatgtcaatagagtccagcccattaaccacagacaagcaatttaacg

SEQ ID NO: 12777 - DNA, 122 bp, Homo sapiens
  misc_feature (61)..(62): /note="This region represents a CpG dinucleotide"
  misc_feature (61)..(61): /note="Nucleotide may be methylated to form 5-methylcytosine"
ggtcctgcccgcgaagccaggactttgtcacgagctttgcccggacgcagcagccggaagcggttgggaggattgattcttgatattgatgccacccagagaggacaaaggtggaaagacac

SEQ ID NO: 12778 - DNA, 122 bp, Homo sapiens
  misc_feature (61)..(62): /note="This region represents a CpG dinucleotide"
  misc_feature (61)..(61): /note="Nucleotide may be methylated to form 5-methylcytosine"
aggaagttggggaagagcaggaaacatcacttgtgcactttcatcagacactggtgtagccgttttgtagatatgaatgcatttaatcttcagaaggatcagaagcagggtgttttgcacat

SEQ ID NO: 12779 - DNA, 122 bp, Homo sapiens
  misc_feature (61)..(62): /note="This region represents a CpG dinucleotide"
  misc_feature (61)..(61): /note="Nucleotide may be methylated to form 5-methylcytosine"
acttgtcactgttttgtgtgtccatttatattaccatcttccggctacattgggcagcaccgtttcttattgctctctgtagccttaatgctggcactcattacataacagttagataaact

SEQ ID NO: 12780 - DNA, 122 bp, Homo sapiens
  misc_feature (61)..(62): /note="This region represents a CpG dinucleotide"
  misc_feature (61)..(61): /note="Nucleotide may be methylated to form 5-methylcytosine"
taaagagacaattgacagcacacacgagcacatttttggattatgtagtttgattaagcacgaaagtgtgaccagagatgatcagttctacacatgggtgaaacagaaagtgaaataggtca

SEQ ID NO: 12781 - DNA, 122 bp, Homo sapiens
  misc_feature (61)..(62): /note="This region represents a CpG dinucleotide"
  misc_feature (61)..(61): /note="Nucleotide may be methylated to form 5-methylcytosine"
cactaacattaggcttatgtccaacttccttcctgcacatcctctcatttatggggtggacgtgattacctcagggtttttggtagggacgatactcagatgaccttggatgcttgttctgt

SEQ ID NO: 12782 - DNA, 122 bp, Homo sapiens
  misc_feature (61)..(62): /note="This region represents a CpG dinucleotide"
  misc_feature (61)..(61): /note="Nucleotide may be methylated to form 5-methylcytosine"
ctgtctcttcctccatgccctcaaagagaaaaaggaacctaataataacacaaaataaagcgaaagcatacttgcttgactggtttaaatgtgccatctggccgggcattttggaggccgag

SEQ ID NO: 12783 - DNA, 122 bp, Homo sapiens
  misc_feature (61)..(62): /note="This region represents a CpG dinucleotide"
  misc_feature (61)..(61): /note="Nucleotide may be methylated to form 5-methylcytosine"
tttctgtcagcctggaaagttgatgactaaggcctttctagtcactcctgttcttggtttcgtgaaaagaatggtgcctgtattttcatcctcgagacagcaggatagcgtagacattgtgt

SEQ ID NO: 12784 - DNA, 122 bp, Homo sapiens
  misc_feature (61)..(62): /note="This region represents a CpG dinucleotide"
  misc_feature (61)..(61): /note="Nucleotide may be methylated to form 5-methylcytosine"
cctttacctcctggagtggtctatgctaatctagcgccagcccagacccctcctgcatatcgatgggcggcagggaccgccgctgaaacaggcagagccctggctcaccggggaaggggtgg

SEQ ID NO: 12785 - DNA, 122 bp, Homo sapiens
  misc_feature (61)..(62): /note="This region represents a CpG dinucleotide"
  misc_feature (61)..(61): /note="Nucleotide may be methylated to form 5-methylcytosine"
aaacatatcttacgacacacagcaacttaagaaacatatccactaaaattcctagatgtccgtcattgtataattgttgatagaatgctttgttttttcttttttgtttgtattgttttctg

SEQ ID NO: 12786 - DNA, 122 bp, Homo sapiens
  misc_feature (61)..(62): /note="This region represents a CpG dinucleotide"
  misc_feature (61)..(61): /note="Nucleotide may be methylated to form 5-methylcytosine"
gtccgcctgagccaggggaggccaggcggcccgggtgtctggagccgggggtctgctgtccgagaatgagaattttcttcccccagaacgtggagactgttcgatcaccaggagcacaaagt

SEQ ID NO: 12787 - DNA, 122 bp, Homo sapiens
  misc_feature (61)..(62): /note="This region represents a CpG dinucleotide"
  misc_feature (61)..(61): /note="Nucleotide may be methylated to form 5-methylcytosine"
atgcctgggcagtccaggacttgacttcttactcctagtgctccaaaataatccaatgaccgcaatctaagggactgtgcagatgaagcagggacttactcctgcctcttcctggtagcttt

SEQ ID NO: 12788 - DNA, 122 bp, Homo sapiens
  misc_feature (61)..(62): /note="This region represents a CpG dinucleotide"
  misc_feature (61)..(61): /note="Nucleotide may be methylated to form 5-methylcytosine"
tcaagggcccaggctggccctggcttgaggtctgcacacacaacgggcctctcgaagcagcggacagacacttgttggctgccaacttgggcccagactgtggtcacaaacacacccctctg

SEQ ID NO: 12789 - DNA, 122 bp, Homo sapiens
  misc_feature (61)..(62): /note="This region represents a CpG dinucleotide"
  misc_feature (61)..(61): /note="Nucleotide may be methylated to form 5-methylcytosine"
tggtgtttgcttgtttctccatcttctttgtgtttcccgtaaatggtagttaaccctgcacgttttattagatttaggttcaattatttttttttgcaggaatccttcatcagtagtgctgt

SEQ ID NO: 12790 - DNA, 122 bp, Homo sapiens
  misc_feature (61)..(62): /note="This region represents a CpG dinucleotide"
  misc_feature (61)..(61): /note="Nucleotide may be methylated to form 5-methylcytosine"
ttgatgtagaggctataaccaaggagacaatcatgggagggtttttgctgtatttgtttacggaagaacatgcagtgccaagtattcaaatgaaacttacataggctgacaataagtaaagg

SEQ ID NO: 12791 - DNA, 122 bp, Homo sapiens
  misc_feature (61)..(62): /note="This region represents a CpG dinucleotide"
  misc_feature (61)..(61): /note="Nucleotide may be methylated to form 5-methylcytosine"
ctggacaagggataggtgtcccgtggccccagcccacactacctgtggtggtgatgaaggcgtaggacttggaggtctgccccgcccgcaccccgtggacctccacgtggtaggtggtgccg

SEQ ID NO: 12792 - DNA, 122 bp, Homo sapiens
  misc_feature (61)..(62): /note="This region represents a CpG dinucleotide"
  misc_feature (61)..(61): /note="Nucleotide may be methylated to form 5-methylcytosine"
acttgggggaaatgtggcgagagggcaggactcggcagcccatgggcatgccacaagatgcgcccaggcgctctggggtgaactctgctgtgacttcaggccagaggtgtctgcccccgcag

SEQ ID NO: 12793 - DNA, 122 bp, Homo sapiens
  misc_feature (61)..(62): /note="This region represents a CpG dinucleotide"
  misc_feature (61)..(61): /note="Nucleotide may be methylated to form 5-methylcytosine"
aatgttactgactgggttttcatactaggatccaaccatcttcccatgacacataggtcccgctggtttttaaaacatgccaaggaagtacacggttgaaaatgctgctgatgtctgcaagt

SEQ ID NO: 12794 - DNA, 122 bp, Homo sapiens
  misc_feature (61)..(62): /note="This region represents a CpG dinucleotide"
  misc_feature (61)..(61): /note="Nucleotide may be methylated to form 5-methylcytosine"
tgtggcctttcaactgatctgttttcagccctccattgcttgatgtttcctgaggttctgcggcatgaattgacttgcttctttattggcttctctccctgccagcagtttggtttcagctt

SEQ ID NO: 12795 - DNA, 122 bp, Homo sapiens
  misc_feature (61)..(62): /note="This region represents a CpG dinucleotide"
  misc_feature (61)..(61): /note="Nucleotide may be methylated to form 5-methylcytosine"
aaaaaaaaaaaaaaacagattctgttggtacagtgtatttatacaaatgaccctaccttacgtggaaaacctgaatgtctgagggtaagatatgtttgccctagctccacttgtgattacag

SEQ ID NO: 12796 - DNA, 122 bp, Homo sapiens
  misc_feature (61)..(62): /note="This region represents a CpG dinucleotide"
  misc_feature (61)..(61): /note="Nucleotide may be methylated to form 5-methylcytosine"
gtgacatctaaagtctcagggcaatttgattaagtttccatcctaatttcacacctgaaacggaaatgggtcagagtgactcatattcagctcctgtgttaaagctcctggggctatcagtg

SEQ ID NO: 12797 - DNA, 122 bp, Homo sapiens
  misc_feature (61)..(62): /note="This region represents a CpG dinucleotide"
  misc_feature (61)..(61): /note="Nucleotide may be methylated to form 5-methylcytosine"
gattcatctcagtggtgctgttttcttcacctacactgaactacacttacagcgtgaatgcgtatctttattgaaagatcgaaatgtattatataatagttggaaagtgttttttttcatgg

SEQ ID NO: 12798 - DNA, 122 bp, Homo sapiens
  misc_feature (61)..(62): /note="This region represents a CpG dinucleotide"
  misc_feature (61)..(61): /note="Nucleotide may be methylated to form 5-methylcytosine"
tcacggtggaagtggctggtctggaagcggaagtcgtcgccgtggctgaggaacgtctgccgcgacacctgccgcgcggccgcgaagttctccacggcgcccgcgccctcggtcgcgaagct

SEQ ID NO: 12799 - DNA, 122 bp, Homo sapiens
  misc_feature (61)..(62): /note="This region represents a CpG dinucleotide"
  misc_feature (61)..(61): /note="Nucleotide may be methylated to form 5-methylcytosine"
atttcttcatcttttaaatgaaaataatgatacatatctaaatcatactgcctagcacaccgctaatgctcaaccaaaatctttccttctctacttattaagtcattgtgggcgtatgggaa

SEQ ID NO: 12800 - DNA, 122 bp, Homo sapiens
  misc_feature (61)..(62): /note="This region represents a CpG dinucleotide"
  misc_feature (61)..(61): /note="Nucleotide may be methylated to form 5-methylcytosine"
tgtcaattcccttcctccatttacacctcttcctgcagaagtatgtttgtggtttttacccgtcacgggactgtttactttggagaaacgtcttctgtggactttgtatggggtttgtagtt

SEQ ID NO: 12801 - DNA, 122 bp, Homo sapiens
  misc_feature (61)..(62): /note="This region represents a CpG dinucleotide"
  misc_feature (61)..(61): /note="Nucleotide may be methylated to form 5-methylcytosine"
gaagatagggatggggaccccgaacttgaaccactctacgacatagggtgggggctgtcccgtcactgggtggatcacgtcgcatcgcaggaccacgctctccccagctcttgccgtcacaa

SEQ ID NO: 12802 - DNA, 122 bp, Homo sapiens
  misc_feature (61)..(62): /note="This region represents a CpG dinucleotide"
  misc_feature (61)..(61): /note="Nucleotide may be methylated to form 5-methylcytosine"
taaatgcctctctctccagttctacttcctttcactcccctcttttcatctcttcgctcacgtttcaaggaaaatatcttgtctgacccgtgaagtgatctaggaactcagtctcatgatct

SEQ ID NO: 12803 - DNA, 122 bp, Homo sapiens
  misc_feature (61)..(62): /note="This region represents a CpG dinucleotide"
  misc_feature (61)..(61): /note="Nucleotide may be methylated to form 5-methylcytosine"
gagggaccaggtatcctttatttgtcaaggtgtccactgtacattgcacagagcctgccacgtgggaggtgctcattaacacatgtggaatgcatgagtgcaagaaagatggtgaatatgac

SEQ ID NO: 12804 - DNA, 122 bp, Homo sapiens
  misc_feature (61)..(62): /note="This region represents a CpG dinucleotide"
  misc_feature (61)..(61): /note="Nucleotide may be methylated to form 5-methylcytosine"
taatagcaacgtgatctttccagttgctcaggccagaagtaataataagggtgaatgtgacggtgatagagatagtgaagaaacaaattaagccgatgagtaagtatgttataaacaaaggg

SEQ ID NO: 12805 - DNA, 122 bp, Homo sapiens
  misc_feature (61)..(62): /note="This region represents a CpG dinucleotide"
  misc_feature (61)..(61): /note="Nucleotide may be methylated to form 5-methylcytosine"
agccttcacttcctctggtcgaggtctagaatctgagacctaaatgaatttggttgacaccgtctctgtggctggtggaattttggggaaggtgggcagggccaagtggatatcgctgccgc

SEQ ID NO: 12806 - DNA, 122 bp, Homo sapiens
  misc_feature (61)..(62): /note="This region represents a CpG dinucleotide"
  misc_feature (61)..(61): /note="Nucleotide may be methylated to form 5-methylcytosine"
gaaataaacctgggagaatgatagatcagggatgactgactcacctataacacacattttcggtacatggattatgcactttgactatgacaaagacatgctgaaagtgagaccggatgctt

SEQ ID NO: 12807 - DNA, 122 bp, Homo sapiens
  misc_feature (61)..(62): /note="This region represents a CpG dinucleotide"
  misc_feature (61)..(61): /note="Nucleotide may be methylated to form 5-methylcytosine"
cattagtcccacagtcatatccctatctctcctttaatccttagactctccctgccacaccggtctttccagggatggagactgttgctacatttcctcaatgcatttgtctttgacggtgc

SEQ ID NO: 12808 - DNA, 122 bp, Homo sapiens
  misc_feature (61)..(62): /note="This region represents a CpG dinucleotide"
  misc_feature (61)..(61): /note="Nucleotide may be methylated to form 5-methylcytosine"
tatagggcagcctttcaaacctcacccccgtccagcttgtttccactttgataggaagcacggcaggtaagaatgaatcctacgaaggcgacaactgcaatccaagtcctggtgttgctact

SEQ ID NO: 12809 - DNA, 122 bp, Homo sapiens
  misc_feature (61)..(62): /note="This region represents a CpG dinucleotide"
  misc_feature (61)..(61): /note="Nucleotide may be methylated to form 5-methylcytosine"
tcaatgttatttctatttacaatgaaagctgctgctgtgctacacttttacacaagagggcgtgattgaaactgatataagacaggctatgctgatagtactactgcattttcatataaact

SEQ ID NO: 12810 - DNA, 122 bp, Homo sapiens
  misc_feature (61)..(62): /note="This region represents a CpG dinucleotide"
  misc_feature (61)..(61): /note="Nucleotide may be methylated to form 5-methylcytosine"
ccatatcctgttttatcagcagtatctttacgatctatatcttgtgaaaccaatcctgcccgccttctgtctcatcctgtgactaagaatgcctaatctgctgggaatgcagcccagcaggt

SEQ ID NO: 12811 - DNA, 122 bp, Homo sapiens
  misc_feature (61)..(62): /note="This region represents a CpG dinucleotide"
  misc_feature (61)..(61): /note="Nucleotide may be methylated to form 5-methylcytosine"
tctggggtcggtcctaaaataaaaggtgagttcctgaatgatgggactaaagaggagagacggaacaataatgtaaggttttcagagggagtagtcacaaaagctttcagaggaagtactgg

SEQ ID NO: 12812 - DNA, 122 bp, Homo sapiens
  misc_feature (61)..(62): /note="This region represents a CpG dinucleotide"
  misc_feature (61)..(61): /note="Nucleotide may be methylated to form 5-methylcytosine"
tccatttttgtaaacgtgcctacttgctaaaatttatttgtaaccccaaaatcaaacacacgtagcaccttcgtggtcattcacagacacaggcagagcagcgaaggctttttgtagtattt

SEQ ID NO: 12813 - DNA, 122 bp, Homo sapiens
  misc_feature (61)..(62): /note="This region represents a CpG dinucleotide"
  misc_feature (61)..(61): /note="Nucleotide may be methylated to form 5-methylcytosine"
cagctgtgattctcagtgtaaaatctttcagtttctaggtaaacaaagaatagtttctttcggggcatctaagggctgattgctgtttcctttgactgtgtattagacagagtgttttgggc

SEQ ID NO: 12814 - DNA, 122 bp, Homo sapiens
  misc_feature (61)..(62): /note="This region represents a CpG dinucleotide"
  misc_feature (61)..(61): /note="Nucleotide may be methylated to form 5-methylcytosine"
agtaaacaggatggcccggcccctgtctagaatctaaaagctgcaggctgatacagaggacgggcgtggtaggagctggtttgagactcgaccttcctttttggtgcagcttgctggttgtg

SEQ ID NO: 12815 - DNA, 122 bp, Homo sapiens
  misc_feature (61)..(62): /note="This region represents a CpG dinucleotide"
  misc_feature (61)..(61): /note="Nucleotide may be methylated to form 5-methylcytosine"
aacccactgaattgtacactttaagtgggtgaattgcacagtaagtaagtggataaattgcgtagtgagtcataccttaaaaagctgtctttcaaaaagatatgtgcagttttacttgacaa

SEQ ID NO: 12816 - DNA, 122 bp, Homo sapiens
  misc_feature (61)..(62): /note="This region represents a CpG dinucleotide"
  misc_feature (61)..(61): /note="Nucleotide may be methylated to form 5-methylcytosine"
tacatgtgactgtatgaatggcatgttacggggcaatgtgaatgtgcactgggtttgtaccggcctctaacctgggtttcgtatgtgccatcaaagtcatccaggaggcgagtcaggccaaa

SEQ ID NO: 12817 - DNA, 122 bp, Homo sapiens
  misc_feature (61)..(62): /note="This region represents a CpG dinucleotide"
  misc_feature (61)..(61): /note="Nucleotide may be methylated to form 5-methylcytosine"
cctaagaacagaggtcaatagaaggaaaaacaaaaccacaagcagttctccaaagaccaacgagactgataaattctagacagactgatccagagagagaggacagatcaccaatacccaga

SEQ ID NO: 12818 - DNA, 122 bp, Homo sapiens
  misc_feature (61)..(62): /note="This region represents a CpG dinucleotide"
  misc_feature (61)..(61): /note="Nucleotide may be methylated to form 5-methylcytosine"
tagctatgttagcagcttgaaggcacaacgtaaaaggaatgagctttcacaaggtgcttacgttagctgggtagtattggtcaaaggtactctgaagagtgaatgcagaaatcagttggctg

SEQ ID NO: 12819 - DNA, 122 bp, Homo sapiens
  misc_feature (61)..(62): /note="This region represents a CpG dinucleotide"
  misc_feature (61)..(61): /note="Nucleotide may be methylated to form 5-methylcytosine"
cccgttccatatgtgtcttgggcctagttcatctccaagggcactgatctggtccttgaacgtcagctttttatgtaaactgtttgaggaccaaggtgtgtgtggacctgctgttcattccc

SEQ ID NO: 12820 - DNA, 122 bp, Homo sapiens
  misc_feature (61)..(62): /note="This region represents a CpG dinucleotide"
  misc_feature (61)..(61): /note="Nucleotide may be methylated to form 5-methylcytosine"
cttaggcagctacaatattaaacaactgctgcttattgtctttgtcaaattccctgctggcggagctgtttgcacaaagtgagctctgattcatgtcaaataaatacaagccctgagaacgg

SEQ ID NO: 12821 - DNA, 122 bp, Homo sapiens
  misc_feature (61)..(62): /note="This region represents a CpG dinucleotide"
  misc_feature (61)..(61): /note="Nucleotide may be methylated to form 5-methylcytosine"
ttgcctccaggattttggacagattgacctttctgcctggaatgctcttccccattagcccgtgtttctccttcaggtctcagggatcttaaagatcacttcctctagggagtctctctgat

SEQ ID NO: 12822 - DNA, 122 bp, Homo sapiens
  misc_feature (61)..(62): /note="This region represents a CpG dinucleotide"
  misc_feature (61)..(61): /note="Nucleotide may be methylated to form 5-methylcytosine"
agcctgccccggccagccaagtcaagttctatgagcgtgaccggcgggcggggtggacctcgccctgtgagcagcagcattgaccccagtctcctcagcaccaagcagggaggccttacgcc

SEQ ID NO: 12823 - DNA, 122 bp, Homo sapiens
  misc_feature (61)..(62): /note="This region represents a CpG dinucleotide"
  misc_feature (61)..(61): /note="Nucleotide may be methylated to form 5-methylcytosine"
gtggcactccctctggcctctggaatggtaaatctgcaccattgctagcttggctgtttgcgtttgggggctgactagaatccactgtcatacactacttgttcagttcaatatttcttgtg

SEQ ID NO: 12824 - DNA, 122 bp, Homo sapiens
  misc_feature (61)..(62): /note="This region represents a CpG dinucleotide"
  misc_feature (61)..(61): /note="Nucleotide may be methylated to form 5-methylcytosine"
aaccttcacaggggccttgaccttctatgactctaccccacggaaatcagcagaagcagacggagatggcccctgaagcactttggtgtgtaatgtcatttaatcctcagaatgaccccatg

SEQ ID NO: 12825 - DNA, 122 bp, Homo sapiens
  misc_feature (61)..(62): /note="This region represents a CpG dinucleotide"
  misc_feature (61)..(61): /note="Nucleotide may be methylated to form 5-methylcytosine"
cctggccgccaagctgggcgagaggccggggccccccttccatcacgaggttcctgccctcggctcggcctagtttccctagccaggagaagtcctgttttcaacgttctagaaatatcccc

SEQ ID NO: 12826 - DNA, 122 bp, Homo sapiens
  misc_feature (61)..(62): /note="This region represents a CpG dinucleotide"
  misc_feature (61)..(61): /note="Nucleotide may be methylated to form 5-methylcytosine"
ccccgcttcaaatcacactcatcttaccagggctaccagccacagcgtcctgcagccccacgcttgacaaaagaaacctagaggaaaggtgtcattaccaatctttacccccgaaagccacc

SEQ ID NO: 12827 - DNA, 122 bp, Homo sapiens
  misc_feature (61)..(62): /note="This region represents a CpG dinucleotide"
  misc_feature (61)..(61): /note="Nucleotide may be methylated to form 5-methylcytosine"
gctttttctttcttcttttcttccaccccatggaaatgtctacattcttttgctatgtttcgtctgttgtgcaatttcattttgctaatgaggcatctgagctgtggccgaccggttgattg

SEQ ID NO: 12828 - DNA, 122 bp, Homo sapiens
  misc_feature (61)..(62): /note="This region represents a CpG dinucleotide"
  misc_feature (61)..(61): /note="Nucleotide may be methylated to form 5-methylcytosine"
atttccgccacctcggcagcatgagtcaaaatggatcatcctccccgcctcaccgcttaacgaactgaggtgtgtgttggagctgaatgtttacaacacaaaaccaccaaccatcttgtttc

SEQ ID NO: 12829 - DNA, 122 bp, Homo sapiens
  misc_feature (61)..(62): /note="This region represents a CpG dinucleotide"
  misc_feature (61)..(61): /note="Nucleotide may be methylated to form 5-methylcytosine"
aagatcaagttgcagcaggtttgatgtctggtgagggtgacactcttcacttcaagatggcgtcttgtcactgcatcctcacatggtgagggacagaaggacaaaaagggatgaatgctgtg

SEQ ID NO: 12830 - DNA, 122 bp, Homo sapiens
  misc_feature (61)..(62): /note="This region represents a CpG dinucleotide"
  misc_feature (61)..(61): /note="Nucleotide may be methylated to form 5-methylcytosine"
gcttttattttatgtatttaatctgtttatctcaacttttagataaagtggcaatcaatccgacaaagtaagtattgggacttaattagtcaggaagaatgggatgccctgaggctgttgta

SEQ ID NO: 12831 - DNA, 122 bp, Homo sapiens
  misc_feature (61)..(62): /note="This region represents a CpG dinucleotide"
  misc_feature (61)..(61): /note="Nucleotide may be methylated to form 5-methylcytosine"
aggggatgcctctactgagcaaggggtaagcaccttacacagaatgtgtccacaaccaaacgtggcaggcgaacttcccctcagctggcttggccaggcacaaacccagactgcccaaccca

SEQ ID NO: 12832 - DNA, 122 bp, Homo sapiens
  misc_feature (61)..(62): /note="This region represents a CpG dinucleotide"
  misc_feature (61)..(61): /note="Nucleotide may be methylated to form 5-methylcytosine"
gggccactattgtatccgccttacgtaaccacatggagtgatggaaatgggtgagcagcccggaatgtaggcggtggcctggcccatgcatctccagagaccatgaagactgctcaagccct

SEQ ID NO: 12833 - DNA, 122 bp, Homo sapiens
  misc_feature (61)..(62): /note="This region represents a CpG dinucleotide"
  misc_feature (61)..(61): /note="Nucleotide may be methylated to form 5-methylcytosine"
acatccctatgtgaaaaatgacaaagcactttttcctcttacagtaagcctaggacaatgcgtagcaaagcttgtggttgtcaccactgatatttttatcccttcaaactttcaaaggtggc

SEQ ID NO: 12834 - DNA, 122 bp, Homo sapiens
  misc_feature (61)..(62): /note="This region represents a CpG dinucleotide"
  misc_feature (61)..(61): /note="Nucleotide may be methylated to form 5-methylcytosine"
attttctcttactgttgacatatgtttgagatccctgacttcctaacactgagatctgctcgttaaagacagtttttagaaataggtcttctgtgtctttcaacttgagagtggcaagaaac

SEQ ID NO: 12835 - DNA, 122 bp, Homo sapiens
  misc_feature (61)..(62): /note="This region represents a CpG dinucleotide"
  misc_feature (61)..(61): /note="Nucleotide may be methylated to form 5-methylcytosine"
cattaaaaccttgaaggaagcaatggatgtcatcgccccaagtcttcgtttactaggtcccgatctccattctatttattcaagactaccacagctccttcaaaaaatcagaaacatcaacc

SEQ ID NO: 12836 - DNA, 122 bp, Homo sapiens
  misc_feature (61)..(62): /note="This region represents a CpG dinucleotide"
  misc_feature (61)..(61): /note="Nucleotide may be methylated to form 5-methylcytosine"
aagtggaaacaacccaagtgcccatcaacagcacaaacatttataccattgaatgccttacggcaaggtaacaggatcaagtacagctacatggaacacatagatgagggaaataaaacaca

SEQ ID NO: 12837 - DNA, 122 bp, Homo sapiens
  misc_feature (61)..(62): /note="This region represents a CpG dinucleotide"
  misc_feature (61)..(61): /note="Nucleotide may be methylated to form 5-methylcytosine"
ttgccctaaagattctgatctgcatgtactggatcagatatcttctgatcctagtgaccacgagctctttgggagggatcagttaccatagtgagtcaagtagattcatttgctttatttta

SEQ ID NO: 12838 - DNA, 122 bp, Homo sapiens
  misc_feature (61)..(62): /note="This region represents a CpG dinucleotide"
  misc_feature (61)..(61): /note="Nucleotide may be methylated to form 5-methylcytosine"
ttttttctccagcttactctattgtaagaaaacagtatgtaatatataacatataaaatacgtgttgattgactgcttatgttattgtggtaaggcttctggtcaacagtaggctattagta

SEQ ID NO: 12839 - DNA, 122 bp, Homo sapiens
  misc_feature (61)..(62): /note="This region represents a CpG dinucleotide"
  misc_feature (61)..(61): /note="Nucleotide may be methylated to form 5-methylcytosine"
tgagaattcgaagtcttgtgtcctggaaagttttgataagcaaatacggctgagctcccgcgctctcttcattggctgcttgttcaccgccagattttgacacaaataatcagattgaaaat

SEQ ID NO: 12840 - DNA, 122 bp, Homo sapiens
  misc_feature (61)..(62): /note="This region represents a CpG dinucleotide"
  misc_feature (61)..(61): /note="Nucleotide may be methylated to form 5-methylcytosine"
agagctgcataccatcttactccaacctcctctcttcactacttccctacattaaagcagcggtccactaaagccctgtgcactgggtctgcctgcttttaagcctggcccacgctgggtgt

SEQ ID NO: 12841 - DNA, 122 bp, Homo sapiens
  misc_feature (61)..(62): /note="This region represents a CpG dinucleotide"
  misc_feature (61)..(61): /note="Nucleotide may be methylated to form 5-methylcytosine"
agaacacaagaatcgaaaaagcctgtgagatactggtgctcgtgatcgtaagctccaggtcggggggttttcagatgaacacaaaaagggggctgctcccgtcccaagatgagtgataaatg

SEQ ID NO: 12842 - DNA, 122 bp, Homo sapiens
  misc_feature (61)..(62): /note="This region represents a CpG dinucleotide"
  misc_feature (61)..(61): /note="Nucleotide may be methylated to form 5-methylcytosine"
aaataccagggtaaacacaatttgtgtgtgttgctcaaacgttgcataattctacaccctcgttatagagagattaagctcatttgaaggttgaggtcagtccctggtctgctaattaccca

SEQ ID NO: 12843 - DNA, 122 bp, Homo sapiens
  misc_feature (61)..(62): /note="This region represents a CpG dinucleotide"
  misc_feature (61)..(61): /note="Nucleotide may be methylated to form 5-methylcytosine"
cgtcacttgatcaatagttcagtttcagtgtggctaatagtgttaaaaactggccgggcgcggtggctcacgcctgtaatcccaacactttgggaggccgaggcgggcggatcacctcaggt

SEQ ID NO: 12844 - DNA, 122 bp, Homo sapiens
  misc_feature (61)..(62): /note="This region represents a CpG dinucleotide"
  misc_feature (61)..(61): /note="Nucleotide may be methylated to form 5-methylcytosine"
tgggattagaggtgtgagccaccacacccagcccaggtgggacacatttattcttcaacacgcctgctgggggcagtacagcatggtgatttagaacaagagttcatccacaactacagccc

SEQ ID NO: 12845 - DNA, 122 bp, Homo sapiens
  misc_feature (61)..(62): /note="This region represents a CpG dinucleotide"
  misc_feature (61)..(61): /note="Nucleotide may be methylated to form 5-methylcytosine"
gaacatgacaatactgagcacctctaatgttgtgtcaggcgctgtgtaaagcactggcaacgcaagggacagaaaaaaaacaagggtttctctccacattcttggagctcatatctgtggaa

SEQ ID NO: 12846 - DNA, 122 bp, Homo sapiens
  misc_feature (61)..(62): /note="This region represents a CpG dinucleotide"
  misc_feature (61)..(61): /note="Nucleotide may be methylated to form 5-methylcytosine"
tcacacccttctaaaggtactgattctttgtcctcagtttcccttaagcctgtcactagccggtaactggaaaaaataataactttacagcagttgatgtacgaatgatctaaaggtatcag

SEQ ID NO: 12847 - DNA, 122 bp, Homo sapiens
  misc_feature (61)..(62): /note="This region represents a CpG dinucleotide"
  misc_feature (61)..(61): /note="Nucleotide may be methylated to form 5-methylcytosine"
accccataagtcctggattaaaacaagctctttgctcataacattggtctctcaacatagcgtgacataatcagacatataattatgcacttcccagtagagatacgcatgtaaaagctaca

SEQ ID NO: 12848 - DNA, 122 bp, Homo sapiens
  misc_feature (61)..(62): /note="This region represents a CpG dinucleotide"
  misc_feature (61)..(61): /note="Nucleotide may be methylated to form 5-methylcytosine"
cctatttttcagagacaactgtcaccttaaacagattttaaacgtactcattgtttccagcgcagccaccacactttatcattctcgtgattgattatctgtcgctgtcatctgcattcatg

SEQ ID NO: 12849 - DNA, 122 bp, Homo sapiens
  misc_feature (61)..(62): /note="This region represents a CpG dinucleotide"
  misc_feature (61)..(61): /note="Nucleotide may be methylated to form 5-methylcytosine"
atcaggtaaatcagccctggataaaatagcaggaacctgttccgccgaaaccaaatgagtcgtcaggtaaatcagcccttgataaaataacagcacttgttgaccagaagccatgggaccag

SEQ ID NO: 12850 - DNA, 122 bp, Homo sapiens
  misc_feature (61)..(62): /note="This region represents a CpG dinucleotide"
  misc_feature (61)..(61): /note="Nucleotide may be methylated to form 5-methylcytosine"
aggcgttggcctctgcaataacaggggcttccgtttgccacgcgccagccccacactagacgctttacacaagagagttcagtggctgcttttagaagtctttgtgtgtcagtctcagtctc

SEQ ID NO: 12851 - DNA, 122 bp, Homo sapiens
  misc_feature (61)..(62): /note="This region represents a CpG dinucleotide"
  misc_feature (61)..(61): /note="Nucleotide may be methylated to form 5-methylcytosine"
cttcctgtgatcctttatcattttcaattttagaatcatgacagcctttcactgccttcacgcagttactcaaatattttgcctttttaactgaattgtcatcactggaggacaggtccaga

SEQ ID NO: 12852 - DNA, 122 bp, Homo sapiens
  misc_feature (61)..(62): /note="This region represents a CpG dinucleotide"
  misc_feature (61)..(61): /note="Nucleotide may be methylated to form 5-methylcytosine"
cccctccccacccagaccctggcctcctgccgagacactctgaacttctgcttcaaggagcggctccaagccgtggacctcatgaaccagcctctggacaaggttctggagcaggccagacg

SEQ ID NO: 12853 - DNA, 122 bp, Homo sapiens
  misc_feature (61)..(62): /note="This region represents a CpG dinucleotide"
  misc_feature (61)..(61): /note="Nucleotide may be methylated to form 5-methylcytosine"
caagataatatccaccccacaaagttatcatagaacttaaaagagaaaataaatataaaacgaaacatgagcactgtgactgatgcagagtaataaatgattctggccactactccacctgc

SEQ ID NO: 12854 - DNA, 122 bp, Homo sapiens
  misc_feature (61)..(62): /note="This region represents a CpG dinucleotide"
  misc_feature (61)..(61): /note="Nucleotide may be methylated to form 5-methylcytosine"
gcctgtttgctagtctgtttctcttataccttgcctcatccctttgaggcttaatctgtgcgttgcacactcttctatctcaaagcctagtgcaacagtgatatttgttgaatgaatgatct

SEQ ID NO: 12855 - DNA, 122 bp, Homo sapiens
  misc_feature (61)..(62): /note="This region represents a CpG dinucleotide"
  misc_feature (61)..(61): /note="Nucleotide may be methylated to form 5-methylcytosine"
aattggaggttagcccaggagggttatcagcttcgcccaggaaagaattcaagggtgagccggtggtgtcaggtggaaaccttttattgaagagcactgctccttgaggagcaggactaact

SEQ ID NO: 12856 - DNA, 122 bp, Homo sapiens
  misc_feature (61)..(62): /note="This region represents a CpG dinucleotide"
  misc_feature (61)..(61): /note="Nucleotide may be methylated to form 5-methylcytosine"
ggtgattaccaggggctggggaagagggaaataggaaggtgtttaatgagtataaaacaacgcattacagttttgcagaatgaaaaggctctggagatctgttgcacaatggtgtgatacac

SEQ ID NO: 12857 - DNA, 122 bp, Homo sapiens
  misc_feature (61)..(62): /note="This region represents a CpG dinucleotide"
  misc_feature (61)..(61): /note="Nucleotide may be methylated to form 5-methylcytosine"
ttaccttgataaacgctaacaatgcttttgctttgaggcagagcacacatacctctaaagcgcatcctctcagctgatgagcaacaggaaataactctttttttcctttttagagccgtcat

SEQ ID NO: 12858 - DNA, 122 bp, Homo sapiens
  misc_feature (61)..(62): /note="This region represents a CpG dinucleotide"
  misc_feature (61)..(61): /note="Nucleotide may be methylated to form 5-methylcytosine"
gtgctataatttaataggtgggtgtgtttgttagggactctgaggctttgaggtttgagacgtggctacaggaagcctgtatgcaagcaaggtcaccaaagccacagctgtgactactgggc

SEQ ID NO: 12859 - DNA, 122 bp, Homo sapiens
  misc_feature (61)..(62): /note="This region represents a CpG dinucleotide"
  misc_feature (61)..(61): /note="Nucleotide may be methylated to form 5-methylcytosine"
ggataatccacttgtggctcccatttcaagatctttaaagtagtcatgtctcttaagtcccgtttgctgtagaaggaaacacttaacaaatgccagggattagggtgtggatgttcttgggg

SEQ ID NO: 12860 - DNA, 122 bp, Homo sapiens
  misc_feature (61)..(62): /note="This region represents a CpG dinucleotide"
  misc_feature (61)..(61): /note="Nucleotide may be methylated to form 5-methylcytosine"
ccctcataagctgagtcagcagatctaaattgatagccagacagcagaggctgaggacagcgcctccctcaaagccaaacaacaggggttcctggactgggccattctttagaggccccact

SEQ ID NO: 12861 - DNA, 122 bp, Homo sapiens
  misc_feature (61)..(62): /note="This region represents a CpG dinucleotide"
  misc_feature (61)..(61): /note="Nucleotide may be methylated to form 5-methylcytosine"
aaggatctggaaaaggcagtttcctgagcccatgttattcccccagccatccaggccctgcgctctgtgctcaatgccttctctgtggtgaaccggaaaaacatgtttgtttaccaggagcg

SEQ ID NO: 12862 - DNA, 122 bp, Homo sapiens
  misc_feature (61)..(62): /note="This region represents a CpG dinucleotide"
  misc_feature (61)..(61): /note="Nucleotide may be methylated to form 5-methylcytosine"
agaaaatggggtaagttagttgcattttatccatcacagaaaaagtgatcatgcctgagacggcctttactgaaataacagtcaatgaggctgaaaaagaaaacaaaaaacacaaataaaga

SEQ ID NO: 12863 - DNA, 122 bp, Homo sapiens
  misc_feature (61)..(62): /note="This region represents a CpG dinucleotide"
  misc_feature (61)..(61): /note="Nucleotide may be methylated to form 5-methylcytosine"
tctccagcaaaggaagccactagcaaagatgttcctgtgttttctcaagtaaacaacctgcggtgaagtggttatgtctgtgtagatctgataacaactagtaaatttcttttcctgcattc

SEQ ID NO: 12864 - DNA, 122 bp, Homo sapiens
  misc_feature (61)..(62): /note="This region represents a CpG dinucleotide"
  misc_feature (61)..(61): /note="Nucleotide may be methylated to form 5-methylcytosine"
taaggcactgtacgtaaagctgtgtgggacacaaggaactatcgaatcttgttgtggcagcggagaatctgaccgtggagcacacatagggtgaagccacagacaccatcaacgcggctgct

SEQ ID NO: 12865 - DNA, 122 bp, Homo sapiens
  misc_feature (61)..(62): /note="This region represents a CpG dinucleotide"
  misc_feature (61)..(61): /note="Nucleotide may be methylated to form 5-methylcytosine"
agacatttctaaggacgactttaaaagaccaggcaaaggagagcagagcccagccgttgccgcttgagagagataagcagaagtgtgggtgtgcttcatgtcacatggcaggaggcttcccc

SEQ ID NO: 12866 - DNA, 122 bp, Homo sapiens
  misc_feature (61)..(62): /note="This region represents a CpG dinucleotide"
  misc_feature (61)..(61): /note="Nucleotide may be methylated to form 5-methylcytosine"
catttctcgacagctggctggatctcatctcgttttaacagggctgggaaatcttatcagcggcaccaggaaagcttagagagttaaaaaataagctctgtgaagccttgactaactgaaaa

SEQ ID NO: 12867 - DNA, 122 bp, Homo sapiens
  misc_feature (61)..(62): /note="This region represents a CpG dinucleotide"
  misc_feature (61)..(61): /note="Nucleotide may be methylated to form 5-methylcytosine"
tgagtcacatatggacaggaatagccacatgttgtctattaatttggattttgctttccacggtcagttatgcctgctatgacatggtatgaaatggggatcagccattcaaagaatccaaa

SEQ ID NO: 12868 - DNA, 122 bp, Homo sapiens
  misc_feature (61)..(62): /note="This region represents a CpG dinucleotide"
  misc_feature (61)..(61): /note="Nucleotide may be methylated to form 5-methylcytosine"
agcctcccattgcttcactacacggggcgtagcctgttgtcctacttttagtgctaagaccgatcagtgtgttaaggttttagtgctaagattgatcagtggtttcaggtggagctgccgac

SEQ ID NO: 12869 - DNA, 122 bp, Homo sapiens
  misc_feature (61)..(62): /note="This region represents a CpG dinucleotide"
  misc_feature (61)..(61): /note="Nucleotide may be methylated to form 5-methylcytosine"
ccacgtgttctgtgccagtgcggccgcacctgtgattaaggcctacagcccggagctgatcgtccacccagttctgtgagtcgctctgcgccggcttctcgtaggttctctttccctcctgc

SEQ ID NO: 12870 - DNA, 122 bp, Homo sapiens
  misc_feature (61)..(62): /note="This region represents a CpG dinucleotide"
  misc_feature (61)..(61): /note="Nucleotide may be methylated to form 5-methylcytosine"
ggggtcagagctggagtttacctcctgctcaagacactggctgctgggtcagaggagattcggacacatcacctggtttaaccccaggactctatgtgaccttcatcccagccctgactcag

SEQ ID NO: 12871 - DNA, 122 bp, Homo sapiens
  misc_feature (61)..(62): /note="This region represents a CpG dinucleotide"
  misc_feature (61)..(61): /note="Nucleotide may be methylated to form 5-methylcytosine"
aaagtttagttgcactaatacagcatagaaacactgagaaagagaaacaagatgaaacaacgcacatctaaagtggaagtaagcttactacattccttaaggctttattagaactggaagga

SEQ ID NO: 12872 - DNA, 122 bp, Homo sapiens
  misc_feature (61)..(62): /note="This region represents a CpG dinucleotide"
  misc_feature (61)..(61): /note="Nucleotide may be methylated to form 5-methylcytosine"
agtattgtaaatctatcccacacacaaaaaaacatacactagagtttcttcatagctcaacgtcaatgatactttctggaaaataatcacccatcagggctccctcccccaagcatgctgta

SEQ ID NO: 12873 - DNA, 122 bp, Homo sapiens
  misc_feature (61)..(62): /note="This region represents a CpG dinucleotide"
  misc_feature (61)..(61): /note="Nucleotide may be methylated to form 5-methylcytosine"
gctagacacaaaagggcacactctatgtaattgcacttacatgacatccaagaacagacacgctaaactatggtaatagaaaccactggaggaagtaagaaagttgtgactggaaaggagaa

SEQ ID NO: 12874 - DNA, 122 bp, Homo sapiens
  misc_feature (61)..(62): /note="This region represents a CpG dinucleotide"
  misc_feature (61)..(61): /note="Nucleotide may be methylated to form 5-methylcytosine"
atataacacacatcttcaaactacaacctggctgtaccctaaaactttgtctgggtaggccgtgtggcacccagaatatatgtttgccatagaaagagtgttgtaaatgttggagaggttcc

SEQ ID NO: 12875 - DNA, 122 bp, Homo sapiens
  misc_feature (61)..(62): /note="This region represents a CpG dinucleotide"
  misc_feature (61)..(61): /note="Nucleotide may be methylated to form 5-methylcytosine"
tcacctgttatgacagaattcttaactctccttttatgagctctgtagtattctctttcacgggttttcctatgcttttaattgttttctcttatccttgtctgcatttcctttttactttt

SEQ ID NO: 12876 - DNA, 122 bp, Homo sapiens
  misc_feature (61)..(62): /note="This region represents a CpG dinucleotide"
  misc_feature (61)..(61): /note="Nucleotide may be methylated to form 5-methylcytosine"
agtattaggaaccattctgtttacagcaattaactggacccaaagccctgtcagcagttccggttgtgtggcccttctttgtgtctgttctttaatattcaaaacttgttcaaatagtgtga

SEQ ID NO: 12877 - DNA, 122 bp, Homo sapiens
  misc_feature (61)..(62): /note="This region represents a CpG dinucleotide"
  misc_feature (61)..(61): /note="Nucleotide may be methylated to form 5-methylcytosine"
aaagtcattctggtcagttcagtctgggcctgacacatgcccaggtcacagagatgaaggcgcaggggcctagcataccacgttaccctgcccttcacttaacacctttgtcaatagaattt

SEQ ID NO: 12878 - DNA, 122 bp, Homo sapiens
  misc_feature (61)..(62): /note="This region represents a CpG dinucleotide"
  misc_feature (61)..(61): /note="Nucleotide may be methylated to form 5-methylcytosine"
gggcccttgcagagtgaacagggctggggcttgtgtcctattgttgcaggtcagggaaagcgggatggttgtagcaccgactggcttcccagcaacagcttgtccactaagctgatttcctg

SEQ ID NO: 12879 - DNA, 122 bp, Homo sapiens
  misc_feature (61)..(62): /note="This region represents a CpG dinucleotide"
  misc_feature (61)..(61): /note="Nucleotide may be methylated to form 5-methylcytosine"
tggttttagtagtagcaaaaacccaggccccactgaatgtcaacacaaggaaactggtcacgtaaatataaacagcagacgtcccagacgagctgggtgtggttccaggacatgggtcctgc

SEQ ID NO: 12880 - DNA, 122 bp, Homo sapiens
  misc_feature (61)..(62): /note="This region represents a CpG dinucleotide"
  misc_feature (61)..(61): /note="Nucleotide may be methylated to form 5-methylcytosine"
attagaaataatgtgtgccaactagatggcacatagttggcattcagtgaaagcagccatcgcttggttgagctaggagggaaaataatgacttgcaataattttggaacagcaactgaaga

SEQ ID NO: 12881 - DNA, 122 bp, Homo sapiens
  misc_feature (61)..(62): /note="This region represents a CpG dinucleotide"
  misc_feature (61)..(61): /note="Nucleotide may be methylated to form 5-methylcytosine"
gcattcctgcaggggatgactgtgaatggcttcatcaacacagtcatcacctccctggagcgccgctatgacctgcacagctaccagagcgggctcatcgccagctcctacgacattgccgc

SEQ ID NO: 12882 - DNA, 122 bp, Homo sapiens
  misc_feature (61)..(62): /note="This region represents a CpG dinucleotide"
  misc_feature (61)..(61): /note="Nucleotide may be methylated to form 5-methylcytosine"
agctttggggagactttaaaggctttagggatccccaaagatcctacctctctcaccatccgtcaactctgctatgccctccctgagccacaccccctaagaggtacccacttctggatggg

SEQ ID NO: 12883 - DNA, 122 bp, Homo sapiens
  misc_feature (61)..(62): /note="This region represents a CpG dinucleotide"
  misc_feature (61)..(61): /note="Nucleotide may be methylated to form 5-methylcytosine"
aatccaaaagacaatggaatgaccatggaatgaaaactgtcaacccacaagcctatacctcgtggaaatatcatcacccatagacatcacacagtgataaaggggccaattctccaaggaga

SEQ ID NO: 12884 - DNA, 122 bp, Homo sapiens
  misc_feature (61)..(62): /note="This region represents a CpG dinucleotide"
  misc_feature (61)..(61): /note="Nucleotide may be methylated to form 5-methylcytosine"
gtaaagattactgacagtgactcttagatttcatctgcaaaggctcttcatactccaggacgtaatttgtttaggcctggagacaaaaactcatttaaaacaacaagatggtctcctgctat

SEQ ID NO: 12885 - DNA, 122 bp, Homo sapiens
  misc_feature (61)..(62): /note="This region represents a CpG dinucleotide"
  misc_feature (61)..(61): /note="Nucleotide may be methylated to form 5-methylcytosine"
tcagtgaagtctcttccagcaatgaaagactgatcaaatggctttcactctgtgaccctccgtttccttattttcaaaggattttaattgtactggccacatagtgctcttgtgtggatttg

SEQ ID NO: 12886 - DNA, 122 bp, Homo sapiens
  misc_feature (61)..(62): /note="This region represents a CpG dinucleotide"
  misc_feature (61)..(61): /note="Nucleotide may be methylated to form 5-methylcytosine"
cacgactcagaggcccagatccatggttcccctctttaaaccttcaccccagcctctgtccgcccctaaggcagcccctgaaggcactgactgttaccagctgccaaggaagttccagccca

SEQ ID NO: 12887 - DNA, 122 bp, Homo sapiens
  misc_feature (61)..(62): /note="This region represents a CpG dinucleotide"
  misc_feature (61)..(61): /note="Nucleotide may be methylated to form 5-methylcytosine"
gtcttttcagccctgtgcactgtaacaccctgccacaccatattgcaacatcctgtggaacggcagcatattctgagaacctcaggccagaatctggtttgctgctgtcagagcttggctat

SEQ ID NO: 12888 - DNA, 122 bp, Homo sapiens
  misc_feature (61)..(62): /note="This region represents a CpG dinucleotide"
  misc_feature (61)..(61): /note="Nucleotide may be methylated to form 5-methylcytosine"
ctttggaaactacaaatgattacagcccatgtgacaggaagcacgcggccttcggctctccggatcgtgtgcaaatgtgcagggggagcccccgcgggtgacgtcagtgtggatgaagtcac

SEQ ID NO: 12889 - DNA, 122 bp, Homo sapiens
  misc_feature (61)..(62): /note="This region represents a CpG dinucleotide"
  misc_feature (61)..(61): /note="Nucleotide may be methylated to form 5-methylcytosine"
cattgtcccttctagagtgcaaggtccatccaagagcccctagagagggggatggagacacgctgcttactcaggaacccttcacaatctggaactggaaagagatttctagcccccacgag

SEQ ID NO: 12890 - DNA, 122 bp, Homo sapiens
  misc_feature (61)..(62): /note="This region represents a CpG dinucleotide"
  misc_feature (61)..(61): /note="Nucleotide may be methylated to form 5-methylcytosine"
aaaccacagtctcaccacaacggggcattccaggagcttgtctgtgtcagcatagatgttcgcctctgcacaaggtgttgtgaattactgtacttgcccttcttctctatctaggtcatttt

SEQ ID NO: 12891 - DNA, 122 bp, Homo sapiens
  misc_feature (61)..(62): /note="This region represents a CpG dinucleotide"
  misc_feature (61)..(61): /note="Nucleotide may be methylated to form 5-methylcytosine"
agcatttcacccccgcctgttggcatttcactctccagaaggacttggtgtcacttcagacgtagagagtttgttttgctgggctctgccagaatagttataaatcacacgtttctagtact

SEQ ID NO: 12892 - DNA, 122 bp, Homo sapiens
  misc_feature (61)..(62): /note="This region represents a CpG dinucleotide"
  misc_feature (61)..(61): /note="Nucleotide may be methylated to form 5-methylcytosine"
ctggcagggtcccagggctgctggcaggggttgtggtcctgttgagcagaggagcgacgccgctgccctggcccccgctgtccctatgatcctgcactctggggtgggagctacatatcatc

SEQ ID NO: 12893 - DNA, 122 bp, Homo sapiens
  misc_feature (61)..(62): /note="This region represents a CpG dinucleotide"
  misc_feature (61)..(61): /note="Nucleotide may be methylated to form 5-methylcytosine"
ttttcagttattatttctttaaacaggattttgtgcctttctccatctcttcttccttggcgtatctataatgcaaatatttgtgcagttaatgatgtgtcgtaagtctcatagactttatt

SEQ ID NO: 12894 - DNA, 122 bp, Homo sapiens
  misc_feature (61)..(62): /note="This region represents a CpG dinucleotide"
  misc_feature (61)..(61): /note="Nucleotide may be methylated to form 5-methylcytosine"
gcactctgccagaatcatgtgaatttcagaggaaaatactcgttcacacatctcaaggaacgcacaggctcgtgagggagcattcttgccaatgcacatggtaaatgcccaatcgatgttcg

SEQ ID NO: 12895 - DNA, 122 bp, Homo sapiens
  misc_feature (61)..(62): /note="This region represents a CpG dinucleotide"
  misc_feature (61)..(61): /note="Nucleotide may be methylated to form 5-methylcytosine"
ctttgaagccaaatagacttggcttcaaatctaggcttaagtacctactgcctctatcaacgtgagaaagatacttaaatcctccgacctcctgttgcctgccaattgataaaattaaacct

SEQ ID NO: 12896 - DNA, 122 bp, Homo sapiens
  misc_feature (61)..(62): /note="This region represents a CpG dinucleotide"
  misc_feature (61)..(61): /note="Nucleotide may be methylated to form 5-methylcytosine"
ctaccccatgcccatcacttggagtgcaatgtgattaaacctggcttttccttctctctccgctgccagcagtcagctctttcaatggctatgcatatttataggaaaggcctcacaattct

SEQ ID NO: 12897 - DNA, 122 bp, Homo sapiens
  misc_feature (61)..(62): /note="This region represents a CpG dinucleotide"
  misc_feature (61)..(61): /note="Nucleotide may be methylated to form 5-methylcytosine"
ctggtctctcagcacatgtttggcaggttagggaggtcacccagtcccttctcacccagccgtggtctcttacaagaaaaaggagacacaaggtatctaggcaagcttgcacattctgacta

SEQ ID NO: 12898 - DNA, 122 bp, Homo sapiens
  misc_feature (61)..(62): /note="This region represents a CpG dinucleotide"
  misc_feature (61)..(61): /note="Nucleotide may be methylated to form 5-methylcytosine"
gctcgtggctgctgcattgaacagttcagccactaaaatcaaagaactagcccaggatggcgaattggtccatccagtctaccaaccctgattgttggtgttggtgcttggaggcatgctgt

SEQ ID NO: 12899 - DNA, 122 bp, Homo sapiens
  misc_feature (61)..(62): /note="This region represents a CpG dinucleotide"
  misc_feature (61)..(61): /note="Nucleotide may be methylated to form 5-methylcytosine"
cagagtcttgtgagttgaaaagctgtctgtccctttatcctgccttgactgaggatgtgacgcctggaatggtgatgcctggtgccgtgatgcagtcaccatataatcttgaggtgacaggc

SEQ ID NO: 12900 - DNA, 122 bp, Homo sapiens
  misc_feature (61)..(62): /note="This region represents a CpG dinucleotide"
  misc_feature (61)..(61): /note="Nucleotide may be methylated to form 5-methylcytosine"
gccaccatgctggccaggccttagcttttaatgctgagattttgccacttggaggctgtgcgactctagacaagtgattagcttttaatgctgagcttagcttttaatagacaagtgaatag

SEQ ID NO: 12901 - DNA, 122 bp, Homo sapiens
  misc_feature (61)..(62): /note="This region represents a CpG dinucleotide"
  misc_feature (61)..(61): /note="Nucleotide may be methylated to form 5-methylcytosine"
tgtggctaagcactgtagccactccctgggctgcattccatgagggtcagtgcccttgaccgagtcatgtctccagtgctctgtccagaggaggagcttcacaacactgcctgggagctcaa

SEQ ID NO: 12902 - DNA, 122 bp, Homo sapiens
  misc_feature (61)..(62): /note="This region represents a CpG dinucleotide"
  misc_feature (61)..(61): /note="Nucleotide may be methylated to form 5-methylcytosine"
tgggggcagcaaagagctgctctgtgaggcctagggcccacaggtgagtgtgcgattcatcgtataaagtcaatggagtgagtctgtgctttgctgggaaagcaggagtcataggttcaaaa

SEQ ID NO: 12903 - DNA, 122 bp, Homo sapiens
  misc_feature (61)..(62): /note="This region represents a CpG dinucleotide"
  misc_feature (61)..(61): /note="Nucleotide may be methylated to form 5-methylcytosine"
gaatgttatttagaaagccagggatagagatcctggtctgggtgtatgtgtgagtcaggacgtccccatgcctctggatccggttgatgtgccttactgcccagcatccattcactcttctc

SEQ ID NO: 12904 - DNA, 122 bp, Homo sapiens
  misc_feature (61)..(62): /note="This region represents a CpG dinucleotide"
  misc_feature (61)..(61): /note="Nucleotide may be methylated to form 5-methylcytosine"
ttgacctagggattttatagctctgtacataaggaaacaggaaaaaaaaaattgggggagcggggaggttaatccagatcagcaattttgtattatctttgaggaacaggtgggtaaataag

SEQ ID NO: 12905 - DNA, 122 bp, Homo sapiens
  misc_feature (61)..(62): /note="This region represents a CpG dinucleotide"
  misc_feature (61)..(61): /note="Nucleotide may be methylated to form 5-methylcytosine"
gtagggaatgaaaactaaacagctctttacatgaagttccatgtcctattgcatttatctcgtgggttaaaatcattcattgatcgctaatcacctgtggttgtttacacacaacaggttcc

SEQ ID NO: 12906 - DNA, 122 bp, Homo sapiens
  misc_feature (61)..(62): /note="This region represents a CpG dinucleotide"
  misc_feature (61)..(61): /note="Nucleotide may be methylated to form 5-methylcytosine"
ctgagtcatcttgaggggaaaacacagaatcttataaaaaggataaactgcttttaagaacgtggatgtctgattttggatttgcaaagcaatgccaattacaagtgatctatttgtttgga

SEQ ID NO: 12907 - DNA, 122 bp, Homo sapiens
  misc_feature (61)..(62): /note="This region represents a CpG dinucleotide"
  misc_feature (61)..(61): /note="Nucleotide may be methylated to form 5-methylcytosine"
gaggcccctgatgaggcataccgggtccttccctgatgtcctgtgaggacacaaaggaagcgaagctgtgactcacgccttgcatcaggccaaggccctaccatgttcagaaatccagctga

SEQ ID NO: 12908 - DNA, 122 bp, Homo sapiens
  misc_feature (61)..(62): /note="This region represents a CpG dinucleotide"
  misc_feature (61)..(61): /note="Nucleotide may be methylated to form 5-methylcytosine"
aaagaacaaagaccttcttttatcctatctcaatacctgtactgtgtgtgtgtgtgcgtgcgtgtatgtgcgcacatgggcgcaaatgcctaccattagtctcttacagtcaccagcccctc

SEQ ID NO: 12909 - DNA, 122 bp, Homo sapiens
  misc_feature (61)..(62): /note="This region represents a CpG dinucleotide"
  misc_feature (61)..(61): /note="Nucleotide may be methylated to form 5-methylcytosine"
gaggcaggtcacttcccccttctgtatcctcaaaaccttttgttccttcttttattagagcgtttatgttccgatattttatttgactgcttaaataataaataacaaatacataataaaat

SEQ ID NO: 12910 - DNA, 122 bp, Homo sapiens
  misc_feature (61)..(62): /note="This region represents a CpG dinucleotide"
  misc_feature (61)..(61): /note="Nucleotide may be methylated to form 5-methylcytosine"
tggcctcagagatgaccgttctggagagggtggggggatggcatttgcccctcccagcctcgcctccacctgcccgctttctctgcaaatgtgtttgtgtgtgtgcatgtggacgaaggggg

SEQ ID NO: 12911 - DNA, 122 bp, Homo sapiens
  misc_feature (61)..(62): /note="This region represents a CpG dinucleotide"
  misc_feature (61)..(61): /note="Nucleotide may be methylated to form 5-methylcytosine"
ttgaagtggtgatgttgatgcttctgaggagatagtattttctcccagccccgacaactgcgcttgcagagatcaagcctgacccagagatagtgtctcacagctttttggctgtattcatt

SEQ ID NO: 12912 - DNA, 122 bp, Homo sapiens
  misc_feature (61)..(62): /note="This region represents a CpG dinucleotide"
  misc_feature (61)..(61): /note="Nucleotide may be methylated to form 5-methylcytosine"
ggcgtgaaccacctcaccaggcctggtgtatagattctaaagtcagtttagccacagccacgtggaaccaaccttcagctgcctccccatccagtcaaatgatgcaatcccaacagaacact

SEQ ID NO: 12913 - DNA, 122 bp, Homo sapiens
  misc_feature (61)..(62): /note="This region represents a CpG dinucleotide"
  misc_feature (61)..(61): /note="Nucleotide may be methylated to form 5-methylcytosine"
tgctgtgccttgatgtgcacgtaggccacatttatgattgactttacacaaacatctcagcgcagtaaagagcagtattggccgggcgcggtggctcacgcctgtaatcccagcactttggg

SEQ ID NO: 12914 - DNA, 122 bp, Homo sapiens
  misc_feature (61)..(62): /note="This region represents a CpG dinucleotide"
  misc_feature (61)..(61): /note="Nucleotide may be methylated to form 5-methylcytosine"
ataggtgtgtctcattacaatgagcagcatatctaataacaaggcatccaggtaatagagcggctggaggttgtaaggctgcccaggtaatagccaaattactttttaaaggtactcaaaac

SEQ ID NO: 12915 - DNA, 122 bp, Homo sapiens
  misc_feature (61)..(62): /note="This region represents a CpG dinucleotide"
  misc_feature (61)..(61): /note="Nucleotide may be methylated to form 5-methylcytosine"
cacaccccacctctaagttgttctgatgtgaccgtttttatactctgccttatctgtaagcgttagttgagggtttgtctccacctcactgcactgtaaaatccttgaggacaaggggctga

SEQ ID NO: 12916 - DNA, 122 bp, Homo sapiens
  misc_feature (61)..(62): /note="This region represents a CpG dinucleotide"
  misc_feature (61)..(61): /note="Nucleotide may be methylated to form 5-methylcytosine"
gaagtcacatcctggtcaaaaaactgtccatttctcaaaaacagagaaaaacctgagatacgaggcagcaactagcgacacttacaggaagggaaagaacaatgacaacacccgcccagccc

SEQ ID NO: 12917 - DNA, 122 bp, Homo sapiens
  misc_feature (61)..(62): /note="This region represents a CpG dinucleotide"
  misc_feature (61)..(61): /note="Nucleotide may be methylated to form 5-methylcytosine"
tgctgggagagcacatcacataactgctcacatcacagggcacttttacagcttagaaagcgcctggctcaccctctgggtgctcccaaatgccacccgggagaccataggccgaggatgag

SEQ ID NO: 12918 - DNA, 122 bp, Homo sapiens
  misc_feature (61)..(62): /note="This region represents a CpG dinucleotide"
  misc_feature (61)..(61): /note="Nucleotide may be methylated to form 5-methylcytosine"
atacagccgggctgatgggggacctgaggctggggagcttcccagcattggggaggccaccgcagcattggcactggcaggccggaggccctcacgaggccttgcaggggcctctgggcgga

SEQ ID NO: 12919 - DNA, 122 bp, Homo sapiens
  misc_feature (61)..(62): /note="This region represents a CpG dinucleotide"
  misc_feature (61)..(61): /note="Nucleotide may be methylated to form 5-methylcytosine"
gttccacaaagtctttagggtgactcatgactctgccatcctcagggtccaaaattattgcgtgagctccagccatcacatcttctttccagccaggaaaaaggaaggaacagagaaggatg

SEQ ID NO: 12920 - DNA, 122 bp, Homo sapiens
  misc_feature (61)..(62): /note="This region represents a CpG dinucleotide"
  misc_feature (61)..(61): /note="Nucleotide may be methylated to form 5-methylcytosine"
tttgcctgctgaaatgacactatagcatgagaggtcagcctcttaggacagcctttctcacgttcctctcatttttattcttgctgagcgggaccatatgaatgacaggcttgtttgcgagg

SEQ ID NO: 12921 - DNA, 122 bp, Homo sapiens
  misc_feature (61)..(62): /note="This region represents a CpG dinucleotide"
  misc_feature (61)..(61): /note="Nucleotide may be methylated to form 5-methylcytosine"
cctgcacagggccccttggctccctccctcccgctgctcagagctcactcagggcggaaacgcagagcggacagatgcagcctaatgcagtctcacagtatctacttgtcagccagaaccca

SEQ ID NO: 12922 - DNA, 122 bp, Homo sapiens
  misc_feature (61)..(62): /note="This region represents a CpG dinucleotide"
  misc_feature (61)..(61): /note="Nucleotide may be methylated to form 5-methylcytosine"
gtggtgcaacacatttttctttgcagcaaaatcgctttttctttttttcaaggaattttacgtttaaaaccacaaaacagaagggaggtttgtaagtggagcttttctggttgatgaagagg

SEQ ID NO: 12923 - DNA, 122 bp, Homo sapiens
  misc_feature (61)..(62): /note="This region represents a CpG dinucleotide"
  misc_feature (61)..(61): /note="Nucleotide may be methylated to form 5-methylcytosine"
gggtcttagaagtaaggtattctataagaaacaagtccctacttcctgatacaaccatcccgtgggagagaaagcagagaaagcaaactgtgctctgttgaatagaactgggagcagaggag

SEQ ID NO: 12924 - DNA, 122 bp, Homo sapiens
  misc_feature (61)..(62): /note="This region represents a CpG dinucleotide"
  misc_feature (61)..(61): /note="Nucleotide may be methylated to form 5-methylcytosine"
gctgggagtcgggttctgtgccactcaatgccagcaaagcacaagccgtccctgcgccttcgggagctttcattctaggctggtggcagattactcacaaaactcagatgcacacaaaaatg

SEQ ID NO: 12925 - DNA, 122 bp, Homo sapiens
  misc_feature (61)..(62): /note="This region represents a CpG dinucleotide"
  misc_feature (61)..(61): /note="Nucleotide may be methylated to form 5-methylcytosine"
atccatccttgtttcctcagcagaagtggtgtttctgttaaagccagttattttcttccccgaaaggtcacctgaaaagtgtatttgaagggccagatcataagcctgacatgccaacacaa

SEQ ID NO: 12926 - DNA, 122 bp, Homo sapiens
  misc_feature (61)..(62): /note="This region represents a CpG dinucleotide"
  misc_feature (61)..(61): /note="Nucleotide may be methylated to form 5-methylcytosine"
ctccaaccttattgaatctctccccttctttttgttatctggtcatttgatctataatttcgattccttttcctgaaattccctcctttttccttttcccctaaaccatcattctagtcctc

SEQ ID NO: 12927 - DNA, 122 bp, Homo sapiens
  misc_feature (61)..(62): /note="This region represents a CpG dinucleotide"
  misc_feature (61)..(61): /note="Nucleotide may be methylated to form 5-methylcytosine"
gtttctagagtactactatgcttccatgctaattcaacccacgtatgttgacgacacatgcggatcctaaaatgccatgattcatctgaggctgccacagttgtgcagcttagggatgtacc

SEQ ID NO: 12928 - DNA, 122 bp, Homo sapiens
  misc_feature (61)..(62): /note="This region represents a CpG dinucleotide"
  misc_feature (61)..(61): /note="Nucleotide may be methylated to form 5-methylcytosine"
accaaagcagcagcaggaagtccagtccttccccagggcagcctagcagcagaggaggctcgggccagcagagggaggaggcgcagacagtgagagaacacttcccctccagcagagcagtc

SEQ ID NO: 12929 - DNA, 122 bp, Homo sapiens
  misc_feature (61)..(62): /note="This region represents a CpG dinucleotide"
  misc_feature (61)..(61): /note="Nucleotide may be methylated to form 5-methylcytosine"
ccctctggcccctgaggatctggggccagaaagacactggcttagcatgggaggagtccccggcctgtaccagcctgacaaggggctgcagtggcccccgggtctcaaattaaagccagggt

SEQ ID NO: 12930 - DNA, 122 bp, Homo sapiens
  misc_feature (61)..(62): /note="This region represents a CpG dinucleotide"
  misc_feature (61)..(61): /note="Nucleotide may be methylated to form 5-methylcytosine"
gctcaggagggacatgtggcagtggacagggagtgcagcccccagatcctctgtcagcgccgggagatgccccgcccagtcatgctgggacagcctgagaagggacgagaggggcggctgag

SEQ ID NO: 12931 - DNA, 122 bp, Homo sapiens
  misc_feature (61)..(62): /note="This region represents a CpG dinucleotide"
  misc_feature (61)..(61): /note="Nucleotide may be methylated to form 5-methylcytosine"
ctattgttcctgaaaaaccagatactccaggaggcggatagatgactagggaatggacagcgcaatgaatgttgattgggcatgcacagtacacaggcactgcactgatttctttccatgag

SEQ ID NO: 12932 - DNA, 122 bp, Homo sapiens
  misc_feature (61)..(62): /note="This region represents a CpG dinucleotide"
  misc_feature (61)..(61): /note="Nucleotide may be methylated to form 5-methylcytosine"
tcgtttcatgcccaggaagatgataatgaaggacttcttaccatcctgacgactgaaactcgagactccttccccttgctggatgtgttttgctttggaggtaaataaataaaagcaagtgc

SEQ ID NO: 12933 - DNA, 122 bp, Homo sapiens
  misc_feature (61)..(62): /note="This region represents a CpG dinucleotide"
  misc_feature (61)..(61): /note="Nucleotide may be methylated to form 5-methylcytosine"
cagagtagtagtacttaatgtccaggtgctaagcttttctccactgccttggttcacagacggctgtcatcagttacgactacctcacttccctgaagagtgtcccttatggctcagaggag

SEQ ID NO: 12934 - DNA, 122 bp, Homo sapiens
  misc_feature (61)..(62): /note="This region represents a CpG dinucleotide"
  misc_feature (61)..(61): /note="Nucleotide may be methylated to form 5-methylcytosine"
ttaaggatccttggctgcactattcacacggcggggatcaggttgcagtgctttctggggcgtcactgcccgcggcgggggggttggttgggggtccaatccgtggctgcatggcccacggc

SEQ ID NO: 12935 - DNA, 122 bp, Homo sapiens
  misc_feature (61)..(62): /note="This region represents a CpG dinucleotide"
  misc_feature (61)..(61): /note="Nucleotide may be methylated to form 5-methylcytosine"
tgaagaaaaattctcctttccatcccatgtcctgcttggggaaaatcttggcccaaaagacgcatgacagaaggatcgatgaaagtgaaacttgaaaacaactatccaaacacacattaact

SEQ ID NO: 12936 - DNA, 122 bp, Homo sapiens
  misc_feature (61)..(62): /note="This region represents a CpG dinucleotide"
  misc_feature (61)..(61): /note="Nucleotide may be methylated to form 5-methylcytosine"
tagagagttgttaatgacacttacgccttttgagcttttctccgtccatgcaagtagtaccgtgtttgtttgtttggagatggagtctcattctgtcgcgaggctggagtgcagtggcgcag

SEQ ID NO: 12937 - DNA, 122 bp, Homo sapiens
  misc_feature (61)..(62): /note="This region represents a CpG dinucleotide"
  misc_feature (61)..(61): /note="Nucleotide may be methylated to form 5-methylcytosine"
agatgagactgttctgggaacctgctttgctgcttgagtagctgatcgagtcattctcaacgacgtgggcattacaggctgcacaactgtgggaaaaaaaaataactacatcaaatgtccct

SEQ ID NO: 12938 - DNA, 122 bp, Homo sapiens
  misc_feature (61)..(62): /note="This region represents a CpG dinucleotide"
  misc_feature (61)..(61): /note="Nucleotide may be methylated to form 5-methylcytosine"
agacatttggctgtctcattaatattaagtaaacacctgaaaacacctttctggtagcctcgaaaatcagtgaacacatacacatcatattctaaaaccaatttgttgatgataaaacatat

SEQ ID NO: 12939 - DNA, 122 bp, Homo sapiens
  misc_feature (61)..(62): /note="This region represents a CpG dinucleotide"
  misc_feature (61)..(61): /note="Nucleotide may be methylated to form 5-methylcytosine"
ggtggagccccacccctggaacttcctcttttggggttcttcctttctctctcagctctccgtctctctttctctctcagcctctttctttctccctgtctcccccactgtcagcacctctt

SEQ ID NO: 12940 - DNA, 122 bp, Homo sapiens
  misc_feature (61)..(62): /note="This region represents a CpG dinucleotide"
  misc_feature (61)..(61): /note="Nucleotide may be methylated to form 5-methylcytosine"
gcttcaggtgacaggcctcttgcctgggtgatgagcttcccaggcccatgctatggtgtgcgctttttcacaggaagaggatcgagagcaagggtcccattctggtggtcctcagcccgcat

SEQ ID NO: 12941 - DNA, 122 bp, Homo sapiens
  misc_feature (61)..(62): /note="This region represents a CpG dinucleotide"
  misc_feature (61)..(61): /note="Nucleotide may be methylated to form 5-methylcytosine"
tccaaattctgaaattcgaaatattaataatagctagctgcgatttggcctgcatcgccccggcgctgctctatgggcgacggggcagcctcccgggctgcgagtttcctgaacgtcacccg

SEQ ID NO: 12942 - DNA, 122 bp, Homo sapiens
  misc_feature (61)..(62): /note="This region represents a CpG dinucleotide"
  misc_feature (61)..(61): /note="Nucleotide may be methylated to form 5-methylcytosine"
tgatcttgcagaactgcagtgagggctgtgagtgtggggtgtctcaactgcacctggacacgcagaaggcactctgtgaacactgactttcattggcccaggcctctgaatccatgacagtt

SEQ ID NO: 12943 - DNA, 122 bp, Homo sapiens
  misc_feature (61)..(62): /note="This region represents a CpG dinucleotide"
  misc_feature (61)..(61): /note="Nucleotide may be methylated to form 5-methylcytosine"
acaaactggaagcccgggagccctgcactggctccctcacccccgctgatgtggctttcacggtgtcctaagcacttttgaatgggaagctgacattgcaaaactggaagatttcactttca

SEQ ID NO: 12944 - DNA, 122 bp, Homo sapiens
  misc_feature (61)..(62): /note="This region represents a CpG dinucleotide"
  misc_feature (61)..(61): /note="Nucleotide may be methylated to form 5-methylcytosine"
tccaagtaataagagtggctaatcccaggaatgtgtcaccagaggttattttgtaatagtcgtgtgttaaattccttatttgtctatataacttctcaaatccttctgcctctacagttata

SEQ ID NO: 12945 - DNA, 122 bp, Homo sapiens
  misc_feature (61)..(62): /note="This region represents a CpG dinucleotide"
  misc_feature (61)..(61): /note="Nucleotide may be methylated to form 5-methylcytosine"
aatccactcagacatgccccactttcctctggctctttcctccctggctaatgatatcttcgtgtcgtgactgatgacagtagggaaacactggtttgctcatcaactcctgaaatacaaga

SEQ ID NO: 12946 - DNA, 122 bp, Homo sapiens
  misc_feature (61)..(62): /note="This region represents a CpG dinucleotide"
  misc_feature (61)..(61): /note="Nucleotide may be methylated to form 5-methylcytosine"
gtgagaactgctcgagggttttggctctcagaaaagccaagctccattcttcttgacttacgccaaaggccccagtccccacccataggtaaatcaaagccttaaatcatctatttaagaga

SEQ ID NO: 12947 - DNA, 122 bp, Homo sapiens
  misc_feature (61)..(62): /note="This region represents a CpG dinucleotide"
  misc_feature (61)..(61): /note="Nucleotide may be methylated to form 5-methylcytosine"
catgaagacctggttctggttcatagattaactaactagccagttcactaatcccactcacgagggcagaatcctcatgacctaagtacctcccaaaagcccagcctcctaactacatcaca

SEQ ID NO: 12948 - DNA, 122 bp, Homo sapiens
  misc_feature (61)..(62): /note="This region represents a CpG dinucleotide"
  misc_feature (61)..(61): /note="Nucleotide may be methylated to form 5-methylcytosine"
aagagtttccttcttatcagaaggtcaggactacaatgtgcctgcctgggaggcagatagcggatggcagtgggcagagcctggggccccaccccctgtcctggaccagggtcactcaaggc

SEQ ID NO: 12949 - DNA, 122 bp, Homo sapiens
  misc_feature (61)..(62): /note="This region represents a CpG dinucleotide"
  misc_feature (61)..(61): /note="Nucleotide may be methylated to form 5-methylcytosine"
ttacttgctaactcctctacctagggcaagttacttaaacatcgcaagtctcagtttcttcgctgagaaagtggggagagtaacagtgcctactttgtaggattactgtgaagattaaacta

SEQ ID NO: 12950 - DNA, 122 bp, Homo sapiens
  misc_feature (61)..(62): /note="This region represents a CpG dinucleotide"
  misc_feature (61)..(61): /note="Nucleotide may be methylated to form 5-methylcytosine"
tagttataatggtataataacaatagctaatatttattaggcactctgtgtcatgaagtacgcaaagtgtttacatgaattaagccatttaaactcttaatgactcagtgaggcaggttctg

SEQ ID NO: 12951 - DNA, 122 bp, Homo sapiens
  misc_feature (61)..(62): /note="This region represents a CpG dinucleotide"
  misc_feature (61)..(61): /note="Nucleotide may be methylated to form 5-methylcytosine"
tgaaacggaatactgtggccagcaggcagggtgcagtgagctgaaccaagcactagctggcggtccacaagtttgttgccccagggtttccatccacgatgccacaccctgtgactctcaaa

SEQ ID NO: 12952 - DNA, 122 bp, Homo sapiens
  misc_feature (61)..(62): /note="This region represents a CpG dinucleotide"
  misc_feature (61)..(61): /note="Nucleotide may be methylated to form 5-methylcytosine"
aaaagtcagcatcaaacaccctaacttcagagtaaatggtaaaatatctctaataaaatacgacactttgacatgtagtgataaatgtgtcaaggctatgggccttcacctggtttgaggtt

SEQ ID NO: 12953 - DNA, 122 bp, Homo sapiens
  misc_feature (61)..(62): /note="This region represents a CpG dinucleotide"
  misc_feature (61)..(61): /note="Nucleotide may be methylated to form 5-methylcytosine"
ctccttcagtttgccccaagtcacaggggaagagaggtagaccagtccaacatttacctacgagagtaccagaggcccagagatggagcctcactcgtctaatagggtcacacagcaaagtc

SEQ ID NO: 12954 - DNA, 122 bp, Homo sapiens
  misc_feature (61)..(62): /note="This region represents a CpG dinucleotide"
  misc_feature (61)..(61): /note="Nucleotide may be methylated to form 5-methylcytosine"
tgggttacagaaagaatataatgcaggcagtgaggtgaccagggcatgagtcaaatcctgcgcccaaccctggcttgggtatcagagtaggattcagctgcctccagtgaaaaagagactcc

SEQ ID NO: 12955 - DNA, 122 bp, Homo sapiens
  misc_feature (61)..(62): /note="This region represents a CpG dinucleotide"
  misc_feature (61)..(61): /note="Nucleotide may be methylated to form 5-methylcytosine"
atcttcctactcagtaaaccttatcatccttcagtggtggtcacatggcagtccgaaacacgtcagtgtttgtgtctgttttctcagtaacttctctctttgtttcccactaactgttactt

SEQ ID NO: 12956 - DNA, 122 bp, Homo sapiens
  misc_feature (61)..(62): /note="This region represents a CpG dinucleotide"
  misc_feature (61)..(61): /note="Nucleotide may be methylated to form 5-methylcytosine"
accactgatgaatcagtgccactcacatcctgggtaattctagggacactagttggacaacgctgacatctgaagaggtggcagggcggaacatggatccctttaaggctactttattgtcg

SEQ ID NO: 12957 - DNA, 122 bp, Homo sapiens
  misc_feature (61)..(62): /note="This region represents a CpG dinucleotide"
  misc_feature (61)..(61): /note="Nucleotide may be methylated to form 5-methylcytosine"
aaatcgaaaggcttaaatcagaggtatttcccagtcaatagattccttctcattgtttcacgtttaccgtcatttcctcatgattacttaaggcctattcagggcaacattttaatcccagg

SEQ ID NO: 12958 - DNA, 122 bp, Homo sapiens
  misc_feature (61)..(62): /note="This region represents a CpG dinucleotide"
  misc_feature (61)..(61): /note="Nucleotide may be methylated to form 5-methylcytosine"
ggcttcgtccaccgaggtcccctcacccacgctgaggcgtcggaagctgcggacactgctcgcttcagggctttgctcagctgcagctggtgacctccagagagggagtctctgatgtcccg

SEQ ID NO: 12959 - DNA, 122 bp, Homo sapiens
  misc_feature (61)..(62): /note="This region represents a CpG dinucleotide"
  misc_feature (61)..(61): /note="Nucleotide may be methylated to form 5-methylcytosine"
ggaaaaaattagaggcctgcctctgaggcctaacacactcaacataacagaagactataacgagggttatgggagttacaagccagaaaccacagatgaaaaccaatatatatcgtaacacc

SEQ ID NO: 12960 - DNA, 122 bp, Homo sapiens
  misc_feature (61)..(62): /note="This region represents a CpG dinucleotide"
  misc_feature (61)..(61): /note="Nucleotide may be methylated to form 5-methylcytosine"
tcaagttatggaggctgcgtagtcaagtcattctttttatgactctgaacctaaaatactcgcctttgaaaagatcacagtgattgattgtgagtagtagacttgtcccatcaagatgaaat

SEQ ID NO: 12961 - DNA, 122 bp, Homo sapiens
  misc_feature (61)..(62): /note="This region represents a CpG dinucleotide"
  misc_feature (61)..(61): /note="Nucleotide may be methylated to form 5-methylcytosine"
cttttgctcttgcaacgttctctacagtcctgttaatttccaggccagctcttcccccaccggccccgcaagccttcagggtgcctcccgctccgtggcccaccccgctgcctgcctccttc

SEQ ID NO: 12962 - DNA, 122 bp, Homo sapiens
  misc_feature (61)..(62): /note="This region represents a CpG dinucleotide"
  misc_feature (61)..(61): /note="Nucleotide may be methylated to form 5-methylcytosine"
atcttgtaaagtacattttgtacctcaattctagaaatcaccttaaattacaatatcttgcgtcattagcaattaatgatatgatatctgtacagattctacaaatatatatacaagcacac

SEQ ID NO: 12963 - DNA, 122 bp, Homo sapiens
  misc_feature (61)..(62): /note="This region represents a CpG dinucleotide"
  misc_feature (61)..(61): /note="Nucleotide may be methylated to form 5-methylcytosine"
ctagagcatggaggctttttcactgaaatctgtttgctcttctcagagcgtagcccaaggcgtgcaaatgtaaacacctgtaatgtaatgagaagtgagttggagatgagaaatgtgtcact

SEQ ID NO: 12964 - DNA, 122 bp, Homo sapiens
  misc_feature (61)..(62): /note="This region represents a CpG dinucleotide"
  misc_feature (61)..(61): /note="Nucleotide may be methylated to form 5-methylcytosine"
tgactggtccccagatgccatacaacacttaaatgcagcccagtaatggttcctgaccaccgcacctccactccaagaacacatagctgatgcagctgccgagctatttcctagcctaatta

SEQ ID NO: 12965 - DNA, 122 bp, Homo sapiens
  misc_feature (61)..(62): /note="This region represents a CpG dinucleotide"
  misc_feature (61)..(61): /note="Nucleotide may be methylated to form 5-methylcytosine"
atacctgccttgttccagaaagagatttaaggcaacataatgtgtctgtatttgaatgttcgtgaacccagctgggtccaatctgggaagagagactgcatagtcagttgttgtggtaatac

SEQ ID NO: 12966 - DNA, 122 bp, Homo sapiens
  misc_feature (61)..(62): /note="This region represents a CpG dinucleotide"
  misc_feature (61)..(61): /note="Nucleotide may be methylated to form 5-methylcytosine"
gacacagcactttccctaataggggattagttgtgaaaacaagcaatgaaagaatgtttacgttttgacccagttggaatcatagtcctcactcagtaccagagttgatccttactgtccat

SEQ ID NO: 12967 - DNA, 122 bp, Homo sapiens
  misc_feature (61)..(62): /note="This region represents a CpG dinucleotide"
  misc_feature (61)..(61): /note="Nucleotide may be methylated to form 5-methylcytosine"
gagcccactcacatccgctccctggcctcactcactctggaaacgtgtaattacaagtgacgagggctgcagcatgtctttgcattcagagccagtgaagcacagataaccccggagtgaca

SEQ ID NO: 12968 - DNA, 122 bp, Homo sapiens
  misc_feature (61)..(62): /note="This region represents a CpG dinucleotide"
  misc_feature (61)..(61): /note="Nucleotide may be methylated to form 5-methylcytosine"
tttacatctggggtccagagggcttgctgactggcctgtcctggacctggcagagttacccgtcccgccacaggacgtgctggacaggaggcagcctcctgcaggaccaggtagcaggagca

SEQ ID NO: 12969 - DNA, 122 bp, Homo sapiens
  misc_feature (61)..(62): /note="This region represents a CpG dinucleotide"
  misc_feature (61)..(61): /note="Nucleotide may be methylated to form 5-methylcytosine"
gttttattaaccattgctctgcctctaattaagagtgttggttttcgaagagtttgaaggcggggattcttaaatttcagatttcatgaaaaatgtttgggggccagctattctaccttctg

SEQ ID NO: 12970 - DNA, 122 bp, Homo sapiens
  misc_feature (61)..(62): /note="This region represents a CpG dinucleotide"
  misc_feature (61)..(61): /note="Nucleotide may be methylated to form 5-methylcytosine"
aaaaacttttaaattaaccgtagttattaagtcatttcacacacaaacttttattacagacgcccagagctgagctgcaacccaacaagataggagagcagcagagtctcccgctaagtttg

SEQ ID NO: 12971 - DNA, 122 bp, Homo sapiens
  misc_feature (61)..(62): /note="This region represents a CpG dinucleotide"
  misc_feature (61)..(61): /note="Nucleotide may be methylated to form 5-methylcytosine"
ttgtattttaattatatatacacatttaaaatgcagtagtcacttttgtcactgtttaaacgtttggtgtttgtgtcaccgtgccccatgcttgccctccagtgctctccattggttctcca

SEQ ID NO: 12972 - DNA, 122 bp, Homo sapiens
  misc_feature (61)..(62): /note="This region represents a CpG dinucleotide"
  misc_feature (61)..(61): /note="Nucleotide may be methylated to form 5-methylcytosine"
tggtataagcaaaaggctgaaccagaaaaagtgctgactcccctttgttctgttttctcccgtggaacggtgttccagtcgagggtcagcatagacattttggggcatcattttcacagctg

SEQ ID NO: 12973 - DNA, 122 bp, Homo sapiens
  misc_feature (61)..(62): /note="This region represents a CpG dinucleotide"
  misc_feature (61)..(61): /note="Nucleotide may be methylated to form 5-methylcytosine"
tcttggcaccagagctgtgttctatgttgagccactttatcctagagagaaccataggcccggtaggacaccaagatcccagaagtggacaatccatccattaccagaggaccttgggccac

SEQ ID NO: 12974 - DNA, 122 bp, Homo sapiens
  misc_feature (61)..(62): /note="This region represents a CpG dinucleotide"
  misc_feature (61)..(61): /note="Nucleotide may be methylated to form 5-methylcytosine"
ggcaccttccctcactacctacctgggccttcccctgcatttggtgggtgcactcctgagcggcttgctgagtcagaactagttggaagatgactaggacttccaacaaggttgctgacaag

SEQ ID NO: 12975 - DNA, 122 bp, Homo sapiens
  misc_feature (61)..(62): /note="This region represents a CpG dinucleotide"
  misc_feature (61)..(61): /note="Nucleotide may be methylated to form 5-methylcytosine"
gcctctggggactctatgccgagaagtttaccttccaacccagccaagagatgaatcagacgcaaagtgactttatgagaaacacctctggctagagggttaactcagggctttgtattaat

SEQ ID NO: 12976 - DNA, 122 bp, Homo sapiens
  misc_feature (61)..(62): /note="This region represents a CpG dinucleotide"
  misc_feature (61)..(61): /note="Nucleotide may be methylated to form 5-methylcytosine"
ttgtcctgtacagcctgtctgtagatgcttcacatgactaagcaacagtctgtgtttgctcgtgcagctgtggacagcttagtgaccaacttacatttgttttttcctccttatgtaccata

SEQ ID NO: 12977 - DNA, 122 bp, Homo sapiens
  misc_feature (61)..(62): /note="This region represents a CpG dinucleotide"
  misc_feature (61)..(61): /note="Nucleotide may be methylated to form 5-methylcytosine"
tagacgaaaagggaagtaaacaggggaagaaaattctcacagcagaaggcacaggtttctcgagaaaaccaacagagactaagcagggtaaatgaaaagcccctaactgcctccctaagtat

SEQ ID NO: 12978 - DNA, 122 bp, Homo sapiens
  misc_feature (61)..(62): /note="This region represents a CpG dinucleotide"
  misc_feature (61)..(61): /note="Nucleotide may be methylated to form 5-methylcytosine"
acattagccatgtggcagtgccaagactggaattcaggcatgatgaactcccttctactgcgctatgacaaactgtctttcctgtgctggtaaggcatagctattatatatgctacagacac

SEQ ID NO: 12979 - DNA, 122 bp, Homo sapiens
  misc_feature (61)..(62): /note="This region represents a CpG dinucleotide"
  misc_feature (61)..(61): /note="Nucleotide may be methylated to form 5-methylcytosine"
gaaaatcagctcaaagtatttttcttcagataagtgagcatgcttgtcatagcttacttacgcctgttaaatctttatatgaaatattttacagagaaatatgtaaatattttgactgcttg

SEQ ID NO: 12980 - DNA, 122 bp, Homo sapiens
  misc_feature (61)..(62): /note="This region represents a CpG dinucleotide"
  misc_feature (61)..(61): /note="Nucleotide may be methylated to form 5-methylcytosine"
cacgtgactgcggagagtgtggatgtgaggccagtgaaagttatctacctggagaagtgacgagtatgttgtttggatgagtcaaagcttatgtgcctcacttagtgtgcgttgccttgcag

SEQ ID NO: 12981 - DNA, 122 bp, Homo sapiens
  misc_feature (61)..(62): /note="This region represents a CpG dinucleotide"
  misc_feature (61)..(61): /note="Nucleotide may be methylated to form 5-methylcytosine"
aaaaaaaaaaaaaaaaatcagaaaatgttatttattgatcttcgtggtggatctgcttggcgtgtttcctatcaggcatttgggcaccctgggctgccaggatcctctttagaaccccacct

SEQ ID NO: 12982 - DNA, 122 bp, Homo sapiens
  misc_feature (61)..(62): /note="This region represents a CpG dinucleotide"
  misc_feature (61)..(61): /note="Nucleotide may be methylated to form 5-methylcytosine"
actagccatagttttacttcccataaaaagcttatgtgtcggcccgggcatggtgactcacgtctgtaatcccagcactttgggaggctgaggcgggtggatcacctgaggtcaggagttcg

SEQ ID NO: 12983 - DNA, 122 bp, Homo sapiens
  misc_feature (61)..(62): /note="This region represents a CpG dinucleotide"
  misc_feature (61)..(61): /note="Nucleotide may be methylated to form 5-methylcytosine"
tagggcacattcaaatgcatcttacagaataattttctctgctgtgtcagccaggcaagccgtttaaccatgactcataccatctatttgtgtaatacttaatcagataataagccttgtat

SEQ ID NO: 12984 - DNA, 122 bp, Homo sapiens
  misc_feature (61)..(62): /note="This region represents a CpG dinucleotide"
  misc_feature (61)..(61): /note="Nucleotide may be methylated to form 5-methylcytosine"
tctgttctgaggaagaagctatggaaagaattcctttggcaactctcagagaataggatacgtgtcactaggaagattttctagccaagatcttggtgcctgtgatgactcatgtttagatc

SEQ ID NO: 12985 - DNA, 122 bp, Homo sapiens
  misc_feature (61)..(62): /note="This region represents a CpG dinucleotide"
  misc_feature (61)..(61): /note="Nucleotide may be methylated to form 5-methylcytosine"
ccatacggctgcctttctggttgccaggccagcaggtacaaggggtatgtcctctgtgaccgtgagcccaggccagcctctcactctcacttcagggcaggcagacaactccaagcaagcca

SEQ ID NO: 12986 - DNA, 122 bp, Homo sapiens
  misc_feature (61)..(62): /note="This region represents a CpG dinucleotide"
  misc_feature (61)..(61): /note="Nucleotide may be methylated to form 5-methylcytosine"
ccttgcccatgccttgttcctctggcccttgagaccagcctacctttgtgataatagttacgttcctggaggtgaaggcgaggggtgtagagaggaattctgtgtccttacttttctgcaag

SEQ ID NO: 12987 - DNA, 122 bp, Homo sapiens
  misc_feature (61)..(62): /note="This region represents a CpG dinucleotide"
  misc_feature (61)..(61): /note="Nucleotide may be methylated to form 5-methylcytosine"
gataaaccctgctgagtaagtgactgagtcagaagtggagaaagattgaacaaagactctcgttcttaccctgctgttgtgaaagagaattgcggctggcactttatttcttgggcttcaga

SEQ ID NO: 12988 - DNA, 122 bp, Homo sapiens
  misc_feature (61)..(62): /note="This region represents a CpG dinucleotide"
  misc_feature (61)..(61): /note="Nucleotide may be methylated to form 5-methylcytosine"
ccaggccaataagtagcatttgcaggtatgagtcagcttcagtggtaacagtggggtttacgcttgacctttgtttgccagggaaagctcagatattctgatgactggcagaggcaccagcc

SEQ ID NO: 12989 - DNA, 122 bp, Homo sapiens
  misc_feature (61)..(62): /note="This region represents a CpG dinucleotide"
  misc_feature (61)..(61): /note="Nucleotide may be methylated to form 5-methylcytosine"
tctgccaaaagtttatgtactcttcattaatgcctgtgaaccaaagtcctactgaatctgcgtaggttagaatgagacagctttgttattagttacaaagcaaccgaggcctacctgtctgt

SEQ ID NO: 12990 - DNA, 122 bp, Homo sapiens
  misc_feature (61)..(62): /note="This region represents a CpG dinucleotide"
  misc_feature (61)..(61): /note="Nucleotide may be methylated to form 5-methylcytosine"
tggttctgtctcccttccttttcctgtcttactaataaacctttgatcattagagttctgcgtatctgaaaaaatcatgataccgagcgaaaagagttacacagagtaagagatgatttcat

SEQ ID NO: 12991 - DNA, 122 bp, Homo sapiens
  misc_feature (61)..(62): /note="This region represents a CpG dinucleotide"
  misc_feature (61)..(61): /note="Nucleotide may be methylated to form 5-methylcytosine"
gtggagctcagatattttaaaggatgagttacagtgtacttaagttctctagcacagttgcggttaaagagctatttgaaacagtaagaatgaaatccctgggtaaataggcttcagggagg

SEQ ID NO: 12992 - DNA, 122 bp, Homo sapiens
  misc_feature (61)..(62): /note="This region represents a CpG dinucleotide"
  misc_feature (61)..(61): /note="Nucleotide may be methylated to form 5-methylcytosine"
tgggaagggcagtatattagccagctaccactctagtaagaattagtttctgtaattaatcgttgttaagacatggagtatggaagccttagagattgagtcctaggccaggaaggtttggt

SEQ ID NO: 12993 - DNA, 122 bp, Homo sapiens
  misc_feature (61)..(62): /note="This region represents a CpG dinucleotide"
  misc_feature (61)..(61): /note="Nucleotide may be methylated to form 5-methylcytosine"
tttcctttgattggcttatttcacttaatataatgtcctcaagcttcatcaatgttttagcgtgtgtcagaatttccttcctttttaatggtgaataatatttccttgtatgaatataccat

SEQ ID NO: 12994 - DNA, 122 bp, Homo sapiens
  misc_feature (61)..(62): /note="This region represents a CpG dinucleotide"
  misc_feature (61)..(61): /note="Nucleotide may be methylated to form 5-methylcytosine"
ttctgggcgtatgagagtattatacctctctactaccttagagttaggcagagttgtgggcggaaggaacatgagtcacttttgggctgaagcaagactcttcagtgttctcttatgtggtg

SEQ ID NO: 12995 - DNA, 122 bp, Homo sapiens
  misc_feature (61)..(62): /note="This region represents a CpG dinucleotide"
  misc_feature (61)..(61): /note="Nucleotide may be methylated to form 5-methylcytosine"
gccaatttgatttctgaaaccattgctgttaggaagcaactgggttgccacctgctgattcgtgggtcctttcgactgcaccattggcttctcacctcctacaatcgctcaagcattgcaca

SEQ ID NO: 12996 - DNA, 122 bp, Homo sapiens
  misc_feature (61)..(62): /note="This region represents a CpG dinucleotide"
  misc_feature (61)..(61): /note="Nucleotide may be methylated to form 5-methylcytosine"
atcaaactactttccgtatcagtttttccacatcaaagtttagacaagattggacatgttcgtggtggtatggctgtagtcaggtactggtggctgtaccagtttacatcccaccagcaatg

SEQ ID NO: 12997 - DNA, 122 bp, Homo sapiens
  misc_feature (61)..(62): /note="This region represents a CpG dinucleotide"
  misc_feature (61)..(61): /note="Nucleotide may be methylated to form 5-methylcytosine"
acatgtgtattattatattgtatgtgtgtgcacatgtgatacatgagatacactcacaaccgcataggtaatcatactccaaagaacacacacgtatgccaccccaggtgtacccttcaatg

SEQ ID NO: 12998 - DNA, 122 bp, Homo sapiens
  misc_feature (61)..(62): /note="This region represents a CpG dinucleotide"
  misc_feature (61)..(61): /note="Nucleotide may be methylated to form 5-methylcytosine"
gctggctttaaaataggaagttatcctggattatcctataatcacaagaacccttaaaagcggaagagggaattggagaaccagagaaactgcagcatgggaagggcttggcttggtattgc

SEQ ID NO: 12999 - DNA, 122 bp, Homo sapiens
  misc_feature (61)..(62): /note="This region represents a CpG dinucleotide"
  misc_feature (61)..(61): /note="Nucleotide may be methylated to form 5-methylcytosine"
catgttgcggaacggaaattttgtacccatgaaacaataactttctatttctctctcctccgtgtccctggcaaatacttttctacttcctgtttctatggatttgactattctgggtacta

SEQ ID NO: 13000 - DNA, 122 bp, Homo sapiens
  misc_feature (61)..(62): /note="This region represents a CpG dinucleotide"
  misc_feature (61)..(61): /note="Nucleotide may be methylated to form 5-methylcytosine"
aaaggctggagcgcagacagggcaaatgaactcatgtgagcccttctgcaatcactgttacggctttgtatttattcatcttgcaccgcacttaaatgtgcaataaaaagcaaaaagtgtgc

SEQ ID NO: 13001 - DNA, 122 bp, Homo sapiens
  misc_feature (61)..(62): /note="This region represents a CpG dinucleotide"
  misc_feature (61)..(61): /note="Nucleotide may be methylated to form 5-methylcytosine"
agaactaaaatttcactacagaggacattttactccaaactgttgaagacagtgctttctcgttcacagaagaggcttttctagcggcacgaaagaatttggaagcggcagtgttacggtaa

SEQ ID NO: 13002 - DNA, 122 bp, Homo sapiens
  misc_feature (61)..(62): /note="This region represents a CpG dinucleotide"
  misc_feature (61)..(61): /note="Nucleotide may be methylated to form 5-methylcytosine"
ttgacgcggcctctcatgtcctgcccaagtggcctctgccagcatatgtcaatgaccatgcgccctgccgcccgtcagtgcgctgcctccgtgcacagcagacgtcaagggaggaacagggc

SEQ ID NO: 13003 - DNA, 122 bp, Homo sapiens
  misc_feature (61)..(62): /note="This region represents a CpG dinucleotide"
  misc_feature (61)..(61): /note="Nucleotide may be methylated to form 5-methylcytosine"
cagtttatccacgagactccattctaaagcatgagtcacacttagtatgcataggtccttcggtttcttgaatcagcttagttttctgctctcatttcacaagaatcactctcttccctcag

SEQ ID NO: 13004 - DNA, 122 bp, Homo sapiens
  misc_feature (61)..(62): /note="This region represents a CpG dinucleotide"
  misc_feature (61)..(61): /note="Nucleotide may be methylated to form 5-methylcytosine"
ggcactgtgctagcccactctggctcatttaatcctctcctaagaagagaggagacacagcgtccccatttgacagatgcagaaagaggttccacaggtgtgccttgattctgtcctaaaac

SEQ ID NO: 13005 - DNA, 122 bp, Homo sapiens
  misc_feature (61)..(62): /note="This region represents a CpG dinucleotide"
  misc_feature (61)..(61): /note="Nucleotide may be methylated to form 5-methylcytosine"
ttctagcacccttccctggttcctcaaactgaacttcctcttttctgggttttcacagcacgtcaggctcacctgttcttcacactgtcccctaactgctggttagagttgtcttcccagtt

SEQ ID NO: 13006 - DNA, 122 bp, Homo sapiens
  misc_feature (61)..(62): /note="This region represents a CpG dinucleotide"
  misc_feature (61)..(61): /note="Nucleotide may be methylated to form 5-methylcytosine"
cccgcggggccgcacataatttcaggcaccggcaggtgagtgggaggcggggccccagcccggcctcgcccactgcctctctcctgccaaaggggcggggcaacgaggcagcgcgcccggaa

SEQ ID NO: 13007 - DNA, 122 bp, Homo sapiens
  misc_feature (61)..(62): /note="This region represents a CpG dinucleotide"
  misc_feature (61)..(61): /note="Nucleotide may be methylated to form 5-methylcytosine"
aaacagcatgtagcaaatacatccacggatgtcctcctggtttaattggttctgtggcctcggtttctgtcttcctgatggcacctctgtgacaggagctcagaccccggcatcagaccggc

SEQ ID NO: 13008 - DNA, 122 bp, Homo sapiens
  misc_feature (61)..(62): /note="This region represents a CpG dinucleotide"
  misc_feature (61)..(61): /note="Nucleotide may be methylated to form 5-methylcytosine"
agtccttcttggatgagaacaggttctgctgcctcttcaaaatcacaggatatcctttcccggcctacagtcagcctgacaatataagcaatgctataaatattatagcacatactgagaaa

SEQ ID NO: 13009 - DNA, 122 bp, Homo sapiens
  misc_feature (61)..(62): /note="This region represents a CpG dinucleotide"
  misc_feature (61)..(61): /note="Nucleotide may be methylated to form 5-methylcytosine"
tatcgttgttatcttagtaaataatgactaatgtggtttttggttgttatcagttggttacggattggagttaacatttcatcagatctgagcaataacctatgtggtaaagtcctagtgtg

SEQ ID NO: 13010 - DNA, 122 bp, Homo sapiens
  misc_feature (61)..(62): /note="This region represents a CpG dinucleotide"
  misc_feature (61)..(61): /note="Nucleotide may be methylated to form 5-methylcytosine"
ctcaggtgatccacctgccttggcctcccaaagtgctgggattacaggcgtgagccactgcgtgcagcaaataaatgctctttgaatagatggttgggcttgcatgagatggtgagagaagt

SEQ ID NO: 13011 - DNA, 122 bp, Homo sapiens
  misc_feature (61)..(62): /note="This region represents a CpG dinucleotide"
  misc_feature (61)..(61): /note="Nucleotide may be methylated to form 5-methylcytosine"
ttctgggctacacacatgccccacccattcccacgatccctttggtcacacagaagaggacggaaccattgttttatcttggtaaagtcagccctgaacagaagacctggcacaaactcagc

SEQ ID NO: 13012 - DNA, 122 bp, Homo sapiens
  misc_feature (61)..(62): /note="This region represents a CpG dinucleotide"
  misc_feature (61)..(61): /note="Nucleotide may be methylated to form 5-methylcytosine"
gagaggccctgtgctttcccaggactgctgttaagccacattgcttaaacagtgtccccacgactgcaggctcagccaacccaggcaagctcttgagcccatgtaaggcctgcctctctctc

SEQ ID NO: 13013 - DNA, 122 bp, Homo sapiens
  misc_feature (61)..(62): /note="This region represents a CpG dinucleotide"
  misc_feature (61)..(61): /note="Nucleotide may be methylated to form 5-methylcytosine"
gtcgtcatattcctcccggtcccgagtgtcagagcagactactgaccgagacactactttcggcatggtttccaggagcaacctgaaaaactctacgcaaagaagagggtcgcgccgaaatg

SEQ ID NO: 13014 - DNA, 122 bp, Homo sapiens
  misc_feature (61)..(62): /note="This region represents a CpG dinucleotide"
  misc_feature (61)..(61): /note="Nucleotide may be methylated to form 5-methylcytosine"
ctgagtcaggagctgttctcctgggtaatttcagagaatccacctcattgctcacatgcacgtcattgcctttggattgtagcatgctggagggtttaaccagggagttgacaatgagtgtc

SEQ ID NO: 13015 - DNA, 122 bp, Homo sapiens
  misc_feature (61)..(62): /note="This region represents a CpG dinucleotide"
  misc_feature (61)..(61): /note="Nucleotide may be methylated to form 5-methylcytosine"
catcccatcactagtgtcagcatcactgtcacatgtgtcagcattaccacctcgtccacccgtgtctgctttggagactctagaaatacaaaggtgcagctaacccggccctctcactccaa

SEQ ID NO: 13016 - DNA, 122 bp, Homo sapiens
  misc_feature (61)..(62): /note="This region represents a CpG dinucleotide"
  misc_feature (61)..(61): /note="Nucleotide may be methylated to form 5-methylcytosine"
aatcattaggtcaacagtggtagttttcagtatttctcaaacacaataacgccttgtcatcgattgagaatactgaattttaatgccattgttttgtcaataaaaagtgcttatgtacactt

SEQ ID NO: 13017 - DNA, 122 bp, Homo sapiens
  misc_feature (61)..(62): /note="This region represents a CpG dinucleotide"
  misc_feature (61)..(61): /note="Nucleotide may be methylated to form 5-methylcytosine"
cagccacatttcaagtgctcaattgccacatgtggctggtggctgccatagtgaacaacacggctatagagcttagccacctgacaggaaacataaaggataatgagtaacatgttaaacat

SEQ ID NO: 13018 - DNA, 122 bp, Homo sapiens
  misc_feature (61)..(62): /note="This region represents a CpG dinucleotide"
  misc_feature (61)..(61): /note="Nucleotide may be methylated to form 5-methylcytosine"
aaaggagactgaattagagggccagatgatgaaattctgtctcaagttgtgcagccctgacgcactcacagggaatgactggtgctaggtaagagcacaagaaacatcacactagccttgag

SEQ ID NO: 13019 - DNA, 122 bp, Homo sapiens
  misc_feature (61)..(62): /note="This region represents a CpG dinucleotide"
  misc_feature (61)..(61): /note="Nucleotide may be methylated to form 5-methylcytosine"
tcccttatgccaagccagcgcagtacctggcatgtgagtaggcaatagtacctacatgcccgctaaaggaggaaaggaccaaacggacagacaagctctgaacaccaagcagctgtctgtca

SEQ ID NO: 13020 - DNA, 122 bp, Homo sapiens
  misc_feature (61)..(62): /note="This region represents a CpG dinucleotide"
  misc_feature (61)..(61): /note="Nucleotide may be methylated to form 5-methylcytosine"
tgttctttctggtcaagctgcatttgattaaaggaaaccgaaatctacttagggttcaggcgattagaataagaggaagagctggcctttctacagcaatgctagcaggaaaatagaaaatg

SEQ ID NO: 13021 - DNA, 122 bp, Homo sapiens
  misc_feature (61)..(62): /note="This region represents a CpG dinucleotide"
  misc_feature (61)..(61): /note="Nucleotide may be methylated to form 5-methylcytosine"
ggggagggagcaaccctgactgtgggtcgatagacgaaaatttctccctgtcctcttgctcgtaaaatgtttgtggccaacatattgcacaacattcccagagaggccacaaaaggcagtgc

SEQ ID NO: 13022 - DNA, 122 bp, Homo sapiens
  misc_feature (61)..(62): /note="This region represents a CpG dinucleotide"
  misc_feature (61)..(61): /note="Nucleotide may be methylated to form 5-methylcytosine"
gaagaagcagcaggagaatcagggcaagcttcccaggagaagcaaaatctctcaaacgcacgttgtcagtcatcaggcggttcagataagactttgaaaacttatcagcacacgtcttccat

SEQ ID NO: 13023 - DNA, 122 bp, Homo sapiens
  misc_feature (61)..(62): /note="This region represents a CpG dinucleotide"
  misc_feature (61)..(61): /note="Nucleotide may be methylated to form 5-methylcytosine"
aaagtaattttcccacaaagtggccacactttgcatttcctacattccttttccctgctccgaccccttccgcccggcctcagagctgacagctggggctggccagagccaagcaagaggca

SEQ ID NO: 13024 - DNA, 122 bp, Homo sapiens
  misc_feature (61)..(62): /note="This region represents a CpG dinucleotide"
  misc_feature (61)..(61): /note="Nucleotide may be methylated to form 5-methylcytosine"
atgatgcagatctgagtcaggctctttgtctggccatctccgtgtcagagatccttcaagcgaatcagctacaaggggtaagtaaaggaaacccagtttgttaggggactgttcattttaaa

SEQ ID NO: 13025 - DNA, 122 bp, Homo sapiens
  misc_feature (61)..(62): /note="This region represents a CpG dinucleotide"
  misc_feature (61)..(61): /note="Nucleotide may be methylated to form 5-methylcytosine"
ttagatgaccgattcttcggcactgatgtgcttttgataatatatgatgagatctggccacggctctgaggagtgtggctggcattaccacatcccaagctaaaagaaaaggaattcaaagt

SEQ ID NO: 13026 - DNA, 122 bp, Homo sapiens
  misc_feature (61)..(62): /note="This region represents a CpG dinucleotide"
  misc_feature (61)..(61): /note="Nucleotide may be methylated to form 5-methylcytosine"
tagccaccttatacaacaggtactacagtattatctctagtacagatgatgaaatacaggcgcagaagttaaggaatctgaccaagctcacactgccagtgacttgtggagccagaactgtg

SEQ ID NO: 13027 - DNA, 122 bp, Homo sapiens
  misc_feature (61)..(62): /note="This region represents a CpG dinucleotide"
  misc_feature (61)..(61): /note="Nucleotide may be methylated to form 5-methylcytosine"
tctgagattaaactgtgtgaagattagaggcgtgtaggtcaggagcaggaggaagcccaacgctggactgtaccagatcatctaaaactggcaattccaggcacagaaaaccagttcttcag

SEQ ID NO: 13028 - DNA, 122 bp, Homo sapiens
  misc_feature (61)..(62): /note="This region represents a CpG dinucleotide"
  misc_feature (61)..(61): /note="Nucleotide may be methylated to form 5-methylcytosine"
gtgcgatttttgcgccaatccctttgctctttcaaataagcattaccgtacccattttagcggtgaggcaactgaagcccagagaggttaaataacttgcccaaagcctcacagcaaagttg

SEQ ID NO: 13029 - DNA, 122 bp, Homo sapiens
  misc_feature (61)..(62): /note="This region represents a CpG dinucleotide"
  misc_feature (61)..(61): /note="Nucleotide may be methylated to form 5-methylcytosine"
agcccgggagtttaagacaagcctgggaaacctggcgaaatcctgtctctacaaaaattacgaaaattagccaggcatggtggtgactgtcccagctacttgggacccaaatgtcccagata

SEQ ID NO: 13030 - DNA, 122 bp, Homo sapiens
  misc_feature (61)..(62): /note="This region represents a CpG dinucleotide"
  misc_feature (61)..(61): /note="Nucleotide may be methylated to form 5-methylcytosine"
cctgcagatatttgaaaggctgccatgaggaagaggaactaggcttttcccttgtggtttcggaaggcagtgctgaagctaacaacgtgaggctggcgtttccctaagactcacatggactg

SEQ ID NO: 13031 - DNA, 122 bp, Homo sapiens
  misc_feature (61)..(62): /note="This region represents a CpG dinucleotide"
  misc_feature (61)..(61): /note="Nucleotide may be methylated to form 5-methylcytosine"
ggagcagtaagccacagattggctggactggagaggctgacaatgagtgtgggtacaggacggaccggtaggattactaaaagcccccagcatgggaggagaccggcccttcctgctgtgaa

SEQ ID NO: 13032 - DNA, 122 bp, Homo sapiens
  misc_feature (61)..(62): /note="This region represents a CpG dinucleotide"
  misc_feature (61)..(61): /note="Nucleotide may be methylated to form 5-methylcytosine"
ataattatttgactacattttactattatctgtgctctgaagattacttgcttctacttacgtctggtatggtggaaataccatataataatgtgtgactaagcatctcttcccaactccat

SEQ ID NO: 13033 - DNA, 122 bp, Homo sapiens
  misc_feature (61)..(62): /note="This region represents a CpG dinucleotide"
  misc_feature (61)..(61): /note="Nucleotide may be methylated to form 5-methylcytosine"
acctaccatttctaatactagcaatacatatatgatcctcccacgatatattttcttcttcgtgaaaaaaaagcaaggtgctgaactgtaaaaatattaatatattggcatttgtcttattt

SEQ ID NO: 13034 - DNA, 122 bp, Homo sapiens
  misc_feature (61)..(62): /note="This region represents a CpG dinucleotide"
  misc_feature (61)..(61): /note="Nucleotide may be methylated to form 5-methylcytosine"
gggtggtggcctgccacgcgctcttcttgttcttcttggacttggtgctcagaggcttctcgcggttgcagaagtccgtgtgtgcagacaggagctcctgctgcttggccgtgtcgggcagc

SEQ ID NO: 13035 - DNA, 122 bp, Homo sapiens
  misc_feature (61)..(62): /note="This region represents a CpG dinucleotide"
  misc_feature (61)..(61): /note="Nucleotide may be methylated to form 5-methylcytosine"
gggccaggcccaccttgagggccgggagctgggccggaggccagggcggccagggtagtgcgctgggcgaggcaggggaggagtaggggagagtgggcgtgggggccctgggggcccgggga

SEQ ID NO: 13036 - DNA, 122 bp, Homo sapiens
  misc_feature (61)..(62): /note="This region represents a CpG dinucleotide"
  misc_feature (61)..(61): /note="Nucleotide may be methylated to form 5-methylcytosine"
caaccaccaaattaatcattccaccgcttgctttcagattcataacattatgagataccacgtagatagagaaaaaagtctaaatgggtctagttatagtatttattattgaattttaaagt

SEQ ID NO: 13037 - DNA, 122 bp, Homo sapiens
  misc_feature (61)..(62): /note="This region represents a CpG dinucleotide"
  misc_feature (61)..(61): /note="Nucleotide may be methylated to form 5-methylcytosine"
ccatgataattcaggaggtggctccactccagatgtctctggccatcttgctgtttggtgcgcctatcccgctctcaggccacactcgccctgcctagtctccaggcctcttcctcaggctg

SEQ ID NO: 13038 - DNA, 122 bp, Homo sapiens
  misc_feature (61)..(62): /note="This region represents a CpG dinucleotide"
  misc_feature (61)..(61): /note="Nucleotide may be methylated to form 5-methylcytosine"
ctcagttaccccctcttcatcctggttgatttccagctttcaataaagcttttcacctgacgcaggataatagcgagtgcatgtgtgctggtttgtttactgtgagtctctcagaggaaatc

SEQ ID NO: 13039 - DNA, 122 bp, Homo sapiens
  misc_feature (61)..(62): /note="This region represents a CpG dinucleotide"
  misc_feature (61)..(61): /note="Nucleotide may be methylated to form 5-methylcytosine"
aagtccacatttgctcctgcaaagcaaagagtatgtgaaattacagggcatattctcactcgaaaagtgtgccttacttctgaaccctgattttctgatttcttgacttgagcaaagatgtg

SEQ ID NO: 13040 - DNA, 122 bp, Homo sapiens
  misc_feature (61)..(62): /note="This region represents a CpG dinucleotide"
  misc_feature (61)..(61): /note="Nucleotide may be methylated to form 5-methylcytosine"
ccagggtcttcctgaatcgtcatacaccatgctggctgccaaggcataaggtgacctaagcgaagctttcacacaggccatgtgcacagtcataaaatctcgagagaatgtggcaacagaga

SEQ ID NO: 13041 - DNA, 122 bp, Homo sapiens
  misc_feature (61)..(62): /note="This region represents a CpG dinucleotide"
  misc_feature (61)..(61): /note="Nucleotide may be methylated to form 5-methylcytosine"
cagaaacaggccagctggtacgacttgtatcaaccctccctcctccaggtgccgcagactcgccctttaaccacccgttgaagtcaaatgagccgtcttcagcagagattttcaggcaaata

SEQ ID NO: 13042 - DNA, 122 bp, Homo sapiens
  misc_feature (61)..(62): /note="This region represents a CpG dinucleotide"
  misc_feature (61)..(61): /note="Nucleotide may be methylated to form 5-methylcytosine"
tctcttattttattcaatgccaagatttcccaagatgaaggagatggtggatcctcagcacgaatatggtaatgtggctggtgccactacaaaccctgtaaacagtgtaactgtggaggctg

SEQ ID NO: 13043 - DNA, 122 bp, Homo sapiens
  misc_feature (61)..(62): /note="This region represents a CpG dinucleotide"
  misc_feature (61)..(61): /note="Nucleotide may be methylated to form 5-methylcytosine"
ttgactaatgaggctatgccctgccctctaggaaatactctactgttaggcaacacagaacgtacttgagctattggggaaattgtgcattatattttgctttgccatgtcaacatcaaaga

SEQ ID NO: 13044 - DNA, 122 bp, Homo sapiens
  misc_feature (61)..(62): /note="This region represents a CpG dinucleotide"
  misc_feature (61)..(61): /note="Nucleotide may be methylated to form 5-methylcytosine"
ggaatactgtgtctacctattccagtttcgttttctcatcccaggagctcgggacctcaccgtctctcaccagaactacaactgtcccctaactttgatcctattttccccagattttggca

SEQ ID NO: 13045 - DNA, 122 bp, Homo sapiens
  misc_feature (61)..(62): /note="This region represents a CpG dinucleotide"
  misc_feature (61)..(61): /note="Nucleotide may be methylated to form 5-methylcytosine"
actcccagtagaaacaccattgtggatacttaggtgactcagtagctatggaagataagacggatcagagaccaggatcaagggagataaatattttcaaagagctttgagttattcaagaa

SEQ ID NO: 13046 - DNA, 122 bp, Homo sapiens
  misc_feature (61)..(62): /note="This region represents a CpG dinucleotide"
  misc_feature (61)..(61): /note="Nucleotide may be methylated to form 5-methylcytosine"
tgaaactggacatgagtggagaggaaaactatgagaagggaacagaactaaggaagagaacgattgaaaagtgaaggaagatgctttaaaagctttatttactttgctgtttgagacttata

SEQ ID NO: 13047 - DNA, 122 bp, Homo sapiens
  misc_feature (61)..(62): /note="This region represents a CpG dinucleotide"
  misc_feature (61)..(61): /note="Nucleotide may be methylated to form 5-methylcytosine"
taatgaaaccagatgggtaagtcatttcctgagcaacaggtatcaggagaaaagaaagagcgaatcgaggacaagtattttagtggcacatatgctgcgcctcttagtcactctggataatg

SEQ ID NO: 13048 - DNA, 122 bp, Homo sapiens
  misc_feature (61)..(62): /note="This region represents a CpG dinucleotide"
  misc_feature (61)..(61): /note="Nucleotide may be methylated to form 5-methylcytosine"
taaatgtcttctggaggtgactttgaagtggttagaccacctctggaagcgaagcttccacgtttgttcagtgagttaaaggacatagaaaacctgagaaggaagttctaggccagtctggt

SEQ ID NO: 13049 - DNA, 122 bp, Homo sapiens
  misc_feature (61)..(62): /note="This region represents a CpG dinucleotide"
  misc_feature (61)..(61): /note="Nucleotide may be methylated to form 5-methylcytosine"
aggggcacactcaaggcggggtaggcagctcacagacagcctttcttactgctgcctgggcgcctggaggctgggaggaaaatctatacgcagccatggaaggatgcaaggaggcgggtgga

SEQ ID NO: 13050 - DNA, 122 bp, Homo sapiens
  misc_feature (61)..(62): /note="This region represents a CpG dinucleotide"
  misc_feature (61)..(61): /note="Nucleotide may be methylated to form 5-methylcytosine"
tgtgttgtaagtactatatttctacaggtaaggaaatagagtctcaggaaaggtaggtgacgtggccaaggtcataaagctgggaagtgacaggaccatgatttgtgtccaggaagtctgac

SEQ ID NO: 13051 - DNA, 122 bp, Homo sapiens
  misc_feature (61)..(62): /note="This region represents a CpG dinucleotide"
  misc_feature (61)..(61): /note="Nucleotide may be methylated to form 5-methylcytosine"
ccttctcccgtctttttctactctaaggtgctcttccaagctactttcctcctcagctatcgttcccctggatttccagtaagagagggtgaaatcatgcctgcttatcttctttctctttt

SEQ ID NO: 13052 - DNA, 122 bp, Homo sapiens
  misc_feature (61)..(62): /note="This region represents a CpG dinucleotide"
  misc_feature (61)..(61): /note="Nucleotide may be methylated to form 5-methylcytosine"
tgctcagtgcgatgggaaactcgggctgggtctctgtggccaatgactcctgagcctcgccggcacgttttattcccggctgtccttccagtccggaagcctgaagtggacaccgaggaact

SEQ ID NO: 13053 - DNA, 122 bp, Homo sapiens
  misc_feature (61)..(62): /note="This region represents a CpG dinucleotide"
  misc_feature (61)..(61): /note="Nucleotide may be methylated to form 5-methylcytosine"
accttctcagctgtccagtatctgcagagcagcagtacatgctggagtggttcgaaatcacggtggttatgttgatgtaatgcctgtggacaaaagaaagacctacattgcttcttttcaga

SEQ ID NO: 13054 - DNA, 122 bp, Homo sapiens
  misc_feature (61)..(62): /note="This region represents a CpG dinucleotide"
  misc_feature (61)..(61): /note="Nucleotide may be methylated to form 5-methylcytosine"
aattatctaggaggtgacctgtagctcaactgagtcatgcttcctcctctctcagtcccccgaggcaggctctggacacctgctcatctcatggctgctcagccagaaaaatgtcctcctac

SEQ ID NO: 13055 - DNA, 122 bp, Homo sapiens
  misc_feature (61)..(62): /note="This region represents a CpG dinucleotide"
  misc_feature (61)..(61): /note="Nucleotide may be methylated to form 5-methylcytosine"
ggactggtcctgtcctctgtcccatctccttgcctcttgctctcccttattctgctaggacggttctgcccataactggtgcctgggtcttgttcagacctgacctgcagtgtcacttcctc

SEQ ID NO: 13056 - DNA, 122 bp, Homo sapiens
  misc_feature (61)..(62): /note="This region represents a CpG dinucleotide"
  misc_feature (61)..(61): /note="Nucleotide may be methylated to form 5-methylcytosine"
gcattacgtgtagaggttgacagattcaagacaacactaaacatgttagcagtcaccacacgcaggctgtccagcagaatgacagcgcttcccagatcctagaaagcatccagagtcactgc

SEQ ID NO: 13057 - DNA, 122 bp, Homo sapiens
  misc_feature (61)..(62): /note="This region represents a CpG dinucleotide"
  misc_feature (61)..(61): /note="Nucleotide may be methylated to form 5-methylcytosine"
ttccctggagccgtgtcctgggagagggactaagcctgtgttggggaggtccctgtgcagcgtctctcagctgagcaaagggcattgcaggggggcctcctgtgccaaagctgtggagtgac

SEQ ID NO: 13058 - DNA, 122 bp, Homo sapiens
  misc_feature (61)..(62): /note="This region represents a CpG dinucleotide"
  misc_feature (61)..(61): /note="Nucleotide may be methylated to form 5-methylcytosine"
tagcactttctaggccacagcaggatttacagttttactctgagatggggaatcactggacgcttctgagcagaggagtaactaacatgaaatgattggcactttaaaggctcactctggct

SEQ ID NO: 13059 - DNA, 122 bp, Homo sapiens
  misc_feature (61)..(62): /note="This region represents a CpG dinucleotide"
  misc_feature (61)..(61): /note="Nucleotide may be methylated to form 5-methylcytosine"
ggggaaattagtgaggaaactatttttagactgtttacttctcctctgcccttacaatggcgctgcttatgaaatttgaggacagacctattgagagactaatggagtcatctgccatagag

SEQ ID NO: 13060 - DNA, 122 bp, Homo sapiens
  misc_feature (61)..(62): /note="This region represents a CpG dinucleotide"
  misc_feature (61)..(61): /note="Nucleotide may be methylated to form 5-methylcytosine"
cctgagcgacccggcctaggcagccgggcggcggcgggctctgtccacggtgctggagcgcgtacctgattcaccacgtccatgtccgccagcagcagcatcagcaatgcagggggcgggag

SEQ ID NO: 13061 - DNA, 122 bp, Homo sapiens
  misc_feature (61)..(62): /note="This region represents a CpG dinucleotide"
  misc_feature (61)..(61): /note="Nucleotide may be methylated to form 5-methylcytosine"
tttcagcaaacctctctctttccctcagcctttgctctgcctgcttcctgggcttggggccgcagaggccagcgaggctcccttcattccctccaccaaagcgaggtcttccctgcccccac

SEQ ID NO: 13062 - DNA, 122 bp, Homo sapiens
  misc_feature (61)..(62): /note="This region represents a CpG dinucleotide"
  misc_feature (61)..(61): /note="Nucleotide may be methylated to form 5-methylcytosine"
cccatgccccgctcacactccctctgttccggttttccctatgactaacagcttggcattcgtgtggtacagttgttacaatggaggagtcaatattgcattagtattggcacaagtattac

SEQ ID NO: 13063 - DNA, 122 bp, Homo sapiens
  misc_feature (61)..(62): /note="This region represents a CpG dinucleotide"
  misc_feature (61)..(61): /note="Nucleotide may be methylated to form 5-methylcytosine"
gggattataggtatgagccacccagaagctcttttgctatcatgggaccagcatgactggcgctaacagccgatcctctctcaggttttacaggtgtgactgtaccgtcgtaggacgggaat

SEQ ID NO: 13064 - DNA, 122 bp, Homo sapiens
  misc_feature (61)..(62): /note="This region represents a CpG dinucleotide"
  misc_feature (61)..(61): /note="Nucleotide may be methylated to form 5-methylcytosine"
actgttctcgactctaataagattgtgatcctctggatttggtgtccactctgaacgcggcgtgggtgtttaacaactgtgacgggacagatgtcattaatgtgaaaatgctcgcagccttc

SEQ ID NO: 13065 - DNA, 122 bp, Homo sapiens
  misc_feature (61)..(62): /note="This region represents a CpG dinucleotide"
  misc_feature (61)..(61): /note="Nucleotide may be methylated to form 5-methylcytosine"
ccagaagaggaaggcagatgacagacggaaaaggtaggggacaaggaagtgagcgaaccacgagacaagtgggtgtcatgaactgggaaatcagaagaccagggttggattccaagctctgc

SEQ ID NO: 13066 - DNA, 122 bp, Homo sapiens
  misc_feature (61)..(62): /note="This region represents a CpG dinucleotide"
  misc_feature (61)..(61): /note="Nucleotide may be methylated to form 5-methylcytosine"
caatcaggatttatcacagaagcggaatcactgtgagtgatatggagtaaggaggtattacgaggattatactttaatctatacagaagctggtggaagaggccatgtatctggaactgatt

SEQ ID NO: 13067 - DNA, 122 bp, Homo sapiens
  misc_feature (61)..(62): /note="This region represents a CpG dinucleotide"
  misc_feature (61)..(61): /note="Nucleotide may be methylated to form 5-methylcytosine"
tgaagagagtggctaggaattatcccctctgatacactcacccacatacaaaatgacctacgttcaaggtgacggtgacattttgagacaaaagactgaaaacaaattaaatgcacaatggt

SEQ ID NO: 13068 - DNA, 122 bp, Homo sapiens
  misc_feature (61)..(62): /note="This region represents a CpG dinucleotide"
  misc_feature (61)..(61): /note="Nucleotide may be methylated to form 5-methylcytosine"
gagtggcagagcagggaggcaggagcagccccacctcacagcctgtgctccttccggatgcggagacttgctctccacagggccattggtgctgcatgtctcgccccctaccccaaagccaa

SEQ ID NO: 13069 - DNA, 122 bp, Homo sapiens
  misc_feature (61)..(62): /note="This region represents a CpG dinucleotide"
  misc_feature (61)..(61): /note="Nucleotide may be methylated to form 5-methylcytosine"
catttgactgggttttgatgagaagcgaggctagaatgagcctgcctctagggtagggcacgtggccacatctgcttacggctgtttatgaataactgataatacatgaccagaatgaagtc

SEQ ID NO: 13070 - DNA, 122 bp, Homo sapiens
  misc_feature (61)..(62): /note="This region represents a CpG dinucleotide"
  misc_feature (61)..(61): /note="Nucleotide may be methylated to form 5-methylcytosine"
gcactaatgcttccagagtgcaaatcccacttggtcatgtaataggaacaccagtgctgacgcagcaggcagacaggagcccaggctgcaccggggcaggaggtaggcgcagacattcagcc

SEQ ID NO: 13071 - DNA, 122 bp, Homo sapiens
  misc_feature (61)..(62): /note="This region represents a CpG dinucleotide"
  misc_feature (61)..(61): /note="Nucleotide may be methylated to form 5-methylcytosine"
aaaagcaattaaaatttgcattagttttacacaggtacctctggagaagtatgtataacacgataacaaaggaagacagaaaagtagaggatgaaaggtaaaatgaaaatgcctgagtgatt

SEQ ID NO: 13072 - DNA, 122 bp, Homo sapiens
  misc_feature (61)..(62): /note="This region represents a CpG dinucleotide"
  misc_feature (61)..(61): /note="Nucleotide may be methylated to form 5-methylcytosine"
catttatttatagagtaaaaggcttagaaaagatctaatggaattgtctttaaatcaagccgatggaacaaagatgtgggcaacatttatggcataaatccaaacctcagcttccccttttt

SEQ ID NO: 13073 - DNA, 122 bp, Homo sapiens
  misc_feature (61)..(62): /note="This region represents a CpG dinucleotide"
  misc_feature (61)..(61): /note="Nucleotide may be methylated to form 5-methylcytosine"
ccttgtaaatttcccaattatgatgacttttagaggctttctccaggttgaagagctttacggccttagtatttgagtctggaatacaatatgttttcttgaaaattattgtgtgaaattcc

SEQ ID NO: 13074 - DNA, 122 bp, Homo sapiens
  misc_feature (61)..(62): /note="This region represents a CpG dinucleotide"
  misc_feature (61)..(61): /note="Nucleotide may be methylated to form 5-methylcytosine"
ctcaagcaatccgctcacgtcaacctccccaaatgctgggattacaggcgtgagccaccgcgccaggcctgagtaatcctaatcacaggattttaaaaagaaacttcctgcgccacccatta

SEQ ID NO: 13075 - DNA, 122 bp, Homo sapiens
  misc_feature (61)..(62): /note="This region represents a CpG dinucleotide"
  misc_feature (61)..(61): /note="Nucleotide may be methylated to form 5-methylcytosine"
gaaaacacaaggcaagttatagctccgtagctgggggttacaattcaagcccttctggaccgcttaatcaaaaagatctatttccttttatctagaccaaccttatcaacacatgcaacttt

SEQ ID NO: 13076 - DNA, 122 bp, Homo sapiens
  misc_feature (61)..(62): /note="This region represents a CpG dinucleotide"
  misc_feature (61)..(61): /note="Nucleotide may be methylated to form 5-methylcytosine"
ctttattattctacaagcaacaatatgctcaaagcttcatattctcaaagcttccaaacacgagtaaaatggctagaacatgactttttaggtcctgcaggaactgttcagatagaggagag

SEQ ID NO: 13077 - DNA, 122 bp, Homo sapiens
  misc_feature (61)..(62): /note="This region represents a CpG dinucleotide"
  misc_feature (61)..(61): /note="Nucleotide may be methylated to form 5-methylcytosine"
aagagtaacaggactctgaatggatgaaactaatggtctccatgcaatatggagtgaaaccgtccttgatcctgctgctcagaaacatgcagctgctccctcttgaaagacaattcactccc

SEQ ID NO: 13078 - DNA, 122 bp, Homo sapiens
  misc_feature (61)..(62): /note="This region represents a CpG dinucleotide"
  misc_feature (61)..(61): /note="Nucleotide may be methylated to form 5-methylcytosine"
ttcgcctctgctgacctttggtgacctgaacactgacatgtggcaggcccaaaagtcactcgttttctttttgagctagcagcaggattactcaatggccgatttggaaatgacatttcaat

SEQ ID NO: 13079 - DNA, 122 bp, Homo sapiens
  misc_feature (61)..(62): /note="This region represents a CpG dinucleotide"
  misc_feature (61)..(61): /note="Nucleotide may be methylated to form 5-methylcytosine"
agcccttgagtcagtctgctgagtttgcacccagaactggttaatgctggctcccatgggcggggagtggagactgctgactgctgactatgaggagggaggacaaagtgcagatgctcagc

SEQ ID NO: 13080 - DNA, 122 bp, Homo sapiens
  misc_feature (61)..(62): /note="This region represents a CpG dinucleotide"
  misc_feature (61)..(61): /note="Nucleotide may be methylated to form 5-methylcytosine"
aaaaacaggtgttacaattttataggttcataaattttgtaatggccacattgttgatcgcggaagtgagattttgtttgattagacatactgttatcttgtagacaacatttgtatttgag

SEQ ID NO: 13081 - DNA, 122 bp, Homo sapiens
  misc_feature (61)..(62): /note="This region represents a CpG dinucleotide"
  misc_feature (61)..(61): /note="Nucleotide may be methylated to form 5-methylcytosine"
atcagttaagtatagctgtgtggtgagttgcatgctcaaaaatgctttaccaaaagggggcgcccatgatcaaactaatttggctactactgctggagtggcagaattgggggtccaattca

SEQ ID NO: 13082 - DNA, 122 bp, Homo sapiens
  misc_feature (61)..(62): /note="This region represents a CpG dinucleotide"
  misc_feature (61)..(61): /note="Nucleotide may be methylated to form 5-methylcytosine"
cttagggtcaaagccagcgaagctgggatcaaaaaagagatacaaccctcaggcaagaaacgaagcaggagctggaactgaacaagaagcacctgggtaatcagagcacctggagaggaaga

SEQ ID NO: 13083 - DNA, 122 bp, Homo sapiens
  misc_feature (61)..(62): /note="This region represents a CpG dinucleotide"
  misc_feature (61)..(61): /note="Nucleotide may be methylated to form 5-methylcytosine"
gtgaatagccttctagctagaacttcttgtgcagctgaattatgattctcagttgccatacgccatacacttaaaggaagttaacatacttcctttctttaatattgctctttgttctttgg

SEQ ID NO: 13084 - DNA, 122 bp, Homo sapiens
  misc_feature (61)..(62): /note="This region represents a CpG dinucleotide"
  misc_feature (61)..(61): /note="Nucleotide may be methylated to form 5-methylcytosine"
ttgctaatctttccctgaatttttaacaaaatcatcctagattagaagaataattctggtcgtctgaaaatgacaaaaatgttgagactttgggctagatagtcctgttaaagacacaacat

SEQ ID NO: 13085 - DNA, 122 bp, Homo sapiens
  misc_feature (61)..(62): /note="This region represents a CpG dinucleotide"
  misc_feature (61)..(61): /note="Nucleotide may be methylated to form 5-methylcytosine"
cctcacttcacagacattcctaccatgtgaagtcacacacacaagctcgggtcaaggctacgtgtccagtcacttatgtatgcatcagaagggggagatagacacacactcaaacacacaga

SEQ ID NO: 13086 - DNA, 122 bp, Homo sapiens
  misc_feature (61)..(62): /note="This region represents a CpG dinucleotide"
  misc_feature (61)..(61): /note="Nucleotide may be methylated to form 5-methylcytosine"
tctcattgttcagttcccacctatgagtgagaacatgaggtgtttggttttttgtccttgcgatagtctgctgagaaatctgctggccattgctttggtgatgtacccaggagtgagtcaca

SEQ ID NO: 13087 - DNA, 122 bp, Homo sapiens
  misc_feature (61)..(62): /note="This region represents a CpG dinucleotide"
  misc_feature (61)..(61): /note="Nucleotide may be methylated to form 5-methylcytosine"
tcgggttagctaaatctgagattttaaaatcaactcttactcaaaacgccatgacggtgccgtttacacaatactcgccttgagagcccagcaagtgtaacatactatttcatattataagt

SEQ ID NO: 13088 - DNA, 122 bp, Homo sapiens
  misc_feature (61)..(62): /note="This region represents a CpG dinucleotide"
  misc_feature (61)..(61): /note="Nucleotide may be methylated to form 5-methylcytosine"
aaatacaaaaagattgtttatgtgtgtgtacacatatgtgtcaagactaaaaattaagcacggggtaaagtctttggcaaaggacaaatagtcggcaagttcacagattagaatttagaatt

SEQ ID NO: 13089 - DNA, 122 bp, Homo sapiens
  misc_feature (61)..(62): /note="This region represents a CpG dinucleotide"
  misc_feature (61)..(61): /note="Nucleotide may be methylated to form 5-methylcytosine"
cagctagttctgctcccacaagccattaagttattcatgatttctcagtgtagcaagggacgcatggatgaaggaaatccacagaggacatttgtttaactcaggaaatactcgttgactga

SEQ ID NO: 13090 - DNA, 122 bp, Homo sapiens
  misc_feature (61)..(62): /note="This region represents a CpG dinucleotide"
  misc_feature (61)..(61): /note="Nucleotide may be methylated to form 5-methylcytosine"
tttttggtgtcttgcaggagaggcagcttccccccttgggtccaacaaacccgcgtgtgacgctggccccaccgtggaatggcctggcccccccagccccaccacccccaccccggctgcag

SEQ ID NO: 13091 - DNA, 122 bp, Homo sapiens
  misc_feature (61)..(62): /note="This region represents a CpG dinucleotide"
  misc_feature (61)..(61): /note="Nucleotide may be methylated to form 5-methylcytosine"
gcggggccaaaggtttcctcaaagaccctgggggccgggcggggctgtgccaggcacccgcgtcgcgctccagctccagccctttaatgctctttgccattcaagccactcactttcatttt

SEQ ID NO: 13092 - DNA, 122 bp, Homo sapiens
  misc_feature (61)..(62): /note="This region represents a CpG dinucleotide"
  misc_feature (61)..(61): /note="Nucleotide may be methylated to form 5-methylcytosine"
ttatgacagtgactaataaaaacatagtgcctgctgtcatggaccttatactctaatgctcgtttatagtaaatgctaagggaacagagagatgccttggcctgcatatgtgaacatgttcc

SEQ ID NO: 13093 - DNA, 122 bp, Homo sapiens
  misc_feature (61)..(62): /note="This region represents a CpG dinucleotide"
  misc_feature (61)..(61): /note="Nucleotide may be methylated to form 5-methylcytosine"
agactggctatctccaggccagcagggaggaccccgctgtgtggtcacggctcacactgccgggccctgtgaacacacccgttcccgacagggcctggatccagggcagagtgcaaagctgg

SEQ ID NO: 13094 - DNA, 122 bp, Homo sapiens
  misc_feature (61)..(62): /note="This region represents a CpG dinucleotide"
  misc_feature (61)..(61): /note="Nucleotide may be methylated to form 5-methylcytosine"
agggcagctggggccctgaggcagctatttttagctcttgacacctgggtattttgcagccgcaggatgtccggtttggagtctctttctgggaatcccacatgcggctgttgtaaacagcc

SEQ ID NO: 13095 - DNA, 122 bp, Homo sapiens
  misc_feature (61)..(62): /note="This region represents a CpG dinucleotide"
  misc_feature (61)..(61): /note="Nucleotide may be methylated to form 5-methylcytosine"
tatttttaacttatagtcaaagaggctcaaggaagatgatcaacaacttaaatattgcagcgatattaaggaaaacaaggctaggaaaatgtctgaatatacagacattgggtcttttgaat

SEQ ID NO: 13096 - DNA, 122 bp, Homo sapiens
  misc_feature (61)..(62): /note="This region represents a CpG dinucleotide"
  misc_feature (61)..(61): /note="Nucleotide may be methylated to form 5-methylcytosine"
aagcctgaccatcactcacagagggtagtcatggttcagaacacgagatgtggagtcaggcggccctaggttccggtccagggattactgagtcaaagagtatttgcatatttaccattgag

SEQ ID NO: 13097 - DNA, 122 bp, Homo sapiens
  misc_feature (61)..(62): /note="This region represents a CpG dinucleotide"
  misc_feature (61)..(61): /note="Nucleotide may be methylated to form 5-methylcytosine"
actcacaaaggtatacatatagaaaagcaacatgacagaaataaccaatgtcccagataacgtcagggagtggagctgcctgcaacttgaaacattcagctcaaactgtaaaggagaaataa

SEQ ID NO: 13098 - DNA, 122 bp, Homo sapiens
  misc_feature (61)..(62): /note="This region represents a CpG dinucleotide"
  misc_feature (61)..(61): /note="Nucleotide may be methylated to form 5-methylcytosine"
agtcactgaataactccagtgttttggttacacagctagagagaagacgggtttgaagagcggtgctaagattccagacaggccagcagcaacagtcaagcagccagtaggtagctgccctt

SEQ ID NO: 13099 - DNA, 122 bp, Homo sapiens
  misc_feature (61)..(62): /note="This region represents a CpG dinucleotide"
  misc_feature (61)..(61): /note="Nucleotide may be methylated to form 5-methylcytosine"
ggccctcatgcctacagttagaggaagggacagaacttgcatgcacaccaggccacctaacgatgacacacaagatgagcattgtcaaccccatgttatggctgagggactcagcctcagag

SEQ ID NO: 13100 - DNA, 122 bp, Homo sapiens
  misc_feature (61)..(62): /note="This region represents a CpG dinucleotide"
  misc_feature (61)..(61): /note="Nucleotide may be methylated to form 5-methylcytosine"
gtggagataatgcagaggaaaaaggaatgtgaactggtattctgtgtaggctctgggccacgtttgatggtatacaagtatatccctgtcaaaaagaaaaagcaagggaccagaaacactgc

SEQ ID NO: 13101 - DNA, 122 bp, Homo sapiens
  misc_feature (61)..(62): /note="This region represents a CpG dinucleotide"
  misc_feature (61)..(61): /note="Nucleotide may be methylated to form 5-methylcytosine"
gcgggtgaggcggggccttcaatagacaggctcagggccacggggaggctgagcaggtttcgggcctgcgtgcgagagcctgctcttcaagtcatggggaaatcctttctgaaggaagaacc

SEQ ID NO: 13102 - DNA, 122 bp, Homo sapiens
  misc_feature (61)..(62): /note="This region represents a CpG dinucleotide"
  misc_feature (61)..(61): /note="Nucleotide may be methylated to form 5-methylcytosine"
ttaaagtgcaaaaagctagaagcctggacaaacagagtttctaaagagtgctgaaagtcccgtaagttaataataaataataatgaagtaggtgatgatcttgaaattatatacctgccagg

SEQ ID NO: 13103 - DNA, 122 bp, Homo sapiens
  misc_feature (61)..(62): /note="This region represents a CpG dinucleotide"
  misc_feature (61)..(61): /note="Nucleotide may be methylated to form 5-methylcytosine"
ttcttcctactatcaccccagggagcctagtccaagggagatcagggacccaagactaggcgacacgcagcgaagacactcagaaagagatgggagacgggaggggaaggctcaaggcagtc

SEQ ID NO: 13104 - DNA, 122 bp, Homo sapiens
  misc_feature (61)..(62): /note="This region represents a CpG dinucleotide"
  misc_feature (61)..(61): /note="Nucleotide may be methylated to form 5-methylcytosine"
cagtctgattgttgaaagtatgctaaataccaagtaaatgctacagtcataaagtgttgtcgcaggtggagaggagtcagaaagtgttaatgactatgctaaagcttttcttgctaaagtca

SEQ ID NO: 13105 - DNA, 122 bp, Homo sapiens
  misc_feature (61)..(62): /note="This region represents a CpG dinucleotide"
  misc_feature (61)..(61): /note="Nucleotide may be methylated to form 5-methylcytosine"
ctggtaaacatcctacaatgcacaggacagctccccaaaacaaagaattatctgtcaattcgtgctaaggttacaaaatcctgatttcggctggggtggtggctcactctattgcactccag

SEQ ID NO: 13106 - DNA, 122 bp, Homo sapiens
  misc_feature (61)..(62): /note="This region represents a CpG dinucleotide"
  misc_feature (61)..(61): /note="Nucleotide may be methylated to form 5-methylcytosine"
aaaaaaagaccaaaacaaacaaacaaacaaacaaaaaacagtcccatggctgaaacgtgccgtgacatattcggtgcacacactgtttacacccacaggtagacacgtgagttgctttctgt

SEQ ID NO: 13107 - DNA, 122 bp, Homo sapiens
  misc_feature (61)..(62): /note="This region represents a CpG dinucleotide"
  misc_feature (61)..(61): /note="Nucleotide may be methylated to form 5-methylcytosine"
gaaccattcacccttgcatctggctgtgcaccttactcacacgtccctttcatatgtctgcgttggctgttgaagagctcctactgcaagtatgcaagtgtggggagaaaagaaagaaaatg

SEQ ID NO: 13108 - DNA, 122 bp, Homo sapiens
  misc_feature (61)..(62): /note="This region represents a CpG dinucleotide"
  misc_feature (61)..(61): /note="Nucleotide may be methylated to form 5-methylcytosine"
ctcgcgcacacgcagtcaggtgtggatgtacacccgcgcacacccaggcacatgtacacccgcgcgctcacacaccccatccagctacagcagaattctggccaggctgttgaccgcacacc

SEQ ID NO: 13109 - DNA, 122 bp, Homo sapiens
  misc_feature (61)..(62): /note="This region represents a CpG dinucleotide"
  misc_feature (61)..(61): /note="Nucleotide may be methylated to form 5-methylcytosine"
ttcccagcttctgagttcttacatggtaattctgcacattccaaacagtctttcaaataccgtctcgtctaagaatgagtgcactttcctaaaaagacaaatatcaagcacttaaaacacac

SEQ ID NO: 13110 - DNA, 122 bp, Homo sapiens
  misc_feature (61)..(62): /note="This region represents a CpG dinucleotide"
  misc_feature (61)..(61): /note="Nucleotide may be methylated to form 5-methylcytosine"
agtcattatacttacctcacagggtttcaaagttcaaatcaggcaatacgtccaccaaagcgttatgtaaactacaaagcaatgtatgcacgagaagaactgttattcttctcactgaggct

SEQ ID NO: 13111 - DNA, 122 bp, Homo sapiens
  misc_feature (61)..(62): /note="This region represents a CpG dinucleotide"
  misc_feature (61)..(61): /note="Nucleotide may be methylated to form 5-methylcytosine"
aacatggatgaaccttgaggacattatgctgagtcaaacaagccatttctaggccaggcacgctggctcacacctgtaatcccagcactttgggaggccgaggcgggcagatcacttgaggt

SEQ ID NO: 13112 - DNA, 122 bp, Homo sapiens
  misc_feature (61)..(62): /note="This region represents a CpG dinucleotide"
  misc_feature (61)..(61): /note="Nucleotide may be methylated to form 5-methylcytosine"
aaacacagaggcacagccaagatgtttgttttagaagtgggagacattgatcttatgacacgtttctattacaatgactctatttctgttacactcagggcaggctctatgtaaaattatgc

SEQ ID NO: 13113 - DNA, 122 bp, Homo sapiens
  misc_feature (61)..(62): /note="This region represents a CpG dinucleotide"
  misc_feature (61)..(61): /note="Nucleotide may be methylated to form 5-methylcytosine"
gttctctcactgaataaccatatcggtcttcatcaaatgactcattcttgtggttcttcccgtttgtgaaatatagtgcttcagcttgctctgtttttcctagtggcagacatggagctgaa

SEQ ID NO: 13114 - DNA, 122 bp, Homo sapiens
  misc_feature (61)..(62): /note="This region represents a CpG dinucleotide"
  misc_feature (61)..(61): /note="Nucleotide may be methylated to form 5-methylcytosine"
ttactccatgaccaccatccactggggaggaagtgctgaataaacagggggctttctcgccggtcatcacccggtgaagaggaagtgctaactagttattgtgcttactccccatcgtcacc

SEQ ID NO: 13115 - DNA, 122 bp, Homo sapiens
  misc_feature (61)..(62): /note="This region represents a CpG dinucleotide"
  misc_feature (61)..(61): /note="Nucleotide may be methylated to form 5-methylcytosine"
cggggcctctgcacactcaccctcggtgtgctggagtcctcggcggtgctcctggctgggcgtgggggctttgctaccagtctgccctgggtcacgtctagaaacctcagctggaggcgcgg

SEQ ID NO: 13116 - DNA, 122 bp, Homo sapiens
  misc_feature (61)..(62): /note="This region represents a CpG dinucleotide"
  misc_feature (61)..(61): /note="Nucleotide may be methylated to form 5-methylcytosine"
gcttctgtgctgcgccagaatcatcgagtctcagttctcgctgccttcccggccagtaggcgtctcccccagctggggagggtcccccaaaccctgtgcttctaggaccgcggggccggcaa

SEQ ID NO: 13117 - DNA, 122 bp, Homo sapiens
  misc_feature (61)..(62): /note="This region represents a CpG dinucleotide"
  misc_feature (61)..(61): /note="Nucleotide may be methylated to form 5-methylcytosine"
cttgctcctgacaatatactactgttacagcaattctgtagccagtaagctggctggcaacgtgtaaagtggattatatctacaccatggcccagccttccttccccatgaggaagaggctt

SEQ ID NO: 13118 - DNA, 122 bp, Homo sapiens
  misc_feature (61)..(62): /note="This region represents a CpG dinucleotide"
  misc_feature (61)..(61): /note="Nucleotide may be methylated to form 5-methylcytosine"
gatgaacagcctccgctgaagtcccagccctaccaggtgctggaagagtgacaacggcctcgtcggccaactttctatctcctccactgcaaacgcctgccctcacagggctcttgtgaaaa

SEQ ID NO: 13119 - DNA, 122 bp, Homo sapiens
  misc_feature (61)..(62): /note="This region represents a CpG dinucleotide"
  misc_feature (61)..(61): /note="Nucleotide may be methylated to form 5-methylcytosine"
tagggagtcctgtcccccgtttacagaggtccagaggagctgagtgactgcccaaggtggcgcagtggatccacttgaagagccaggatgcatgtccaagtctgtctgcctgaaacagctca

SEQ ID NO: 13120 - DNA, 122 bp, Homo sapiens
  misc_feature (61)..(62): /note="This region represents a CpG dinucleotide"
  misc_feature (61)..(61): /note="Nucleotide may be methylated to form 5-methylcytosine"
gttaagtacttcaaacaatgaccaccacagggtgttattcatccttagttgatttacacacgtaaatgcatatcatattttctacattggcacaactaacgttgtccacaagtaacatgaat

SEQ ID NO: 13121 - DNA, 122 bp, Homo sapiens
  misc_feature (61)..(62): /note="This region represents a CpG dinucleotide"
  misc_feature (61)..(61): /note="Nucleotide may be methylated to form 5-methylcytosine"
tcaagccctgagtcattctgcagacaagcagtgagcacctcctgctccaggcaccttgtgcgggtgagactttcagatgtgatcaatggctgcagaaatctctgagtcaggaagggaaaact

SEQ ID NO: 13122 - DNA, 122 bp, Homo sapiens
  misc_feature (61)..(62): /note="This region represents a CpG dinucleotide"
  misc_feature (61)..(61): /note="Nucleotide may be methylated to form 5-methylcytosine"
ccaaagggtgcctgcttccctctacctacccggctggtgaaccaggcttcagcatccttccggttctgctcggccatgacctcatattggcttcgcatgtcactcaggatcttggcgagatc

SEQ ID NO: 13123 - DNA, 122 bp, Homo sapiens
  misc_feature (61)..(62): /note="This region represents a CpG dinucleotide"
  misc_feature (61)..(61): /note="Nucleotide may be methylated to form 5-methylcytosine"
caagccaagttcctatgcccatccacccatataaaacttccttgttcagaaagtcatctgcgcaactggcaaaggcaccagctcagagttttctatttttattcctgtgtgtaatcaatggg

SEQ ID NO: 13124 - DNA, 122 bp, Homo sapiens
  misc_feature (61)..(62): /note="This region represents a CpG dinucleotide"
  misc_feature (61)..(61): /note="Nucleotide may be methylated to form 5-methylcytosine"
cataggttgatcgttttagctttgggacaaggtattactctcgtcagtggtagcaaaacacgggtcatcaattttttttttcaccctaagtgaaaaaaaggacaaagattttggcaaagtca

SEQ ID NO: 13125 - DNA, 122 bp, Homo sapiens
  misc_feature (61)..(62): /note="This region represents a CpG dinucleotide"
  misc_feature (61)..(61): /note="Nucleotide may be methylated to form 5-methylcytosine"
tttttctgaggtctttaacaagctttgaggaactaggtaagccacccaccccattccaaacggcctaatggcctaatgtgtactgaattcccactcatggggcaagtggccttctaatccag

SEQ ID NO: 13126 - DNA, 122 bp, Homo sapiens
  misc_feature (61)..(62): /note="This region represents a CpG dinucleotide"
  misc_feature (61)..(61): /note="Nucleotide may be methylated to form 5-methylcytosine"
gtgagtccggcagcgtctaggaacggcatgtccgtggcagggaacagacagagtgagccgcgcctggccagccatgtggcagcagacacagcccaacccaggccgactggcgaaaaaggagg

SEQ ID NO: 13127 - DNA, 122 bp, Homo sapiens
  misc_feature (61)..(62): /note="This region represents a CpG dinucleotide"
  misc_feature (61)..(61): /note="Nucleotide may be methylated to form 5-methylcytosine"
agcacagccctgtcttcccttcaggcatcaggtgtgtccagtctggaggtgtggcttttacgtggagcagatccccagttaggtcagtgtccacccacagctcctctgtgaagatgagaggc

SEQ ID NO: 13128 - DNA, 122 bp, Homo sapiens
  misc_feature (61)..(62): /note="This region represents a CpG dinucleotide"
  misc_feature (61)..(61): /note="Nucleotide may be methylated to form 5-methylcytosine"
tatcacctgcactggatcggaaatggtcaacagttttgaacaaacataaagtaggccgaccgaagttcaaacatttaattcttttgtctagctcacgttttcatatgggttttaaattttta

SEQ ID NO: 13129 - DNA, 122 bp, Homo sapiens
  misc_feature (61)..(62): /note="This region represents a CpG dinucleotide"
  misc_feature (61)..(61): /note="Nucleotide may be methylated to form 5-methylcytosine"
tggatgacatgcggttaaagccaacccaaaagatctgagtcaaagaatgttcttctttgacgttgctcttgacttctcagagtttgtataactaaatccttcatgaaaaacagtgactctgc

SEQ ID NO: 13130 - DNA, 122 bp, Homo sapiens
  misc_feature (61)..(62): /note="This region represents a CpG dinucleotide"
  misc_feature (61)..(61): /note="Nucleotide may be methylated to form 5-methylcytosine"
agcttggtttgggcacaaagccaagtaagcttggacttcccaagctcccgtctgcgcccacgttccagacagagaccacagagaaatggccttgcacatccattcaggagagcggggcccgg

SEQ ID NO: 13131 - DNA, 122 bp, Homo sapiens
  misc_feature (61)..(62): /note="This region represents a CpG dinucleotide"
  misc_feature (61)..(61): /note="Nucleotide may be methylated to form 5-methylcytosine"
tccaagatgcaccccaagagcaggacctgcactggtggatgctgagcattctagaaacatcgttaacaggacacagggcagagctggtccctgcagcctcagccctgcagaagaggattcac

SEQ ID NO: 13132 - DNA, 122 bp, Homo sapiens
  misc_feature (61)..(62): /note="This region represents a CpG dinucleotide"
  misc_feature (61)..(61): /note="Nucleotide may be methylated to form 5-methylcytosine"
tgctctgaagggtatttgcctatgagggaattaactgtacactatttaatccaccagttccggttcattagaaaaatgcagttctcgccggacatggtggctcacacctgtaatcccagcaa

SEQ ID NO: 13133 - DNA, 122 bp, Homo sapiens
  misc_feature (61)..(62): /note="This region represents a CpG dinucleotide"
  misc_feature (61)..(61): /note="Nucleotide may be methylated to form 5-methylcytosine"
tgggtatgtgacaccctggattccatgcaggtttggcagtaaccagggagaattagaacccgaagctagatttcgaaatagagctctggactgaagcattcttgcacaaccatcccacagat

SEQ ID NO: 13134 - DNA, 122 bp, Homo sapiens
  misc_feature (61)..(62): /note="This region represents a CpG dinucleotide"
  misc_feature (61)..(61): /note="Nucleotide may be methylated to form 5-methylcytosine"
ggtattggaatgaatacatatttcatagtgatcattgcacacctatcatggggcagctagcgctgggtcagcctgcctagttgggcaaatgccactgtggccaagcctggcacacagtcagt

SEQ ID NO: 13135 - DNA, 122 bp, Homo sapiens
  misc_feature (61)..(62): /note="This region represents a CpG dinucleotide"
  misc_feature (61)..(61): /note="Nucleotide may be methylated to form 5-methylcytosine"
gtgtgtttgctgtgaggctacaattaggcactggatctggttatccggactaggaagtgacgaaagaaccttcaggcatatcagtaaagataaagatcagagtgtatcttctaatatgtcag

SEQ ID NO: 13136 - DNA, 122 bp, Homo sapiens
  misc_feature (61)..(62): /note="This region represents a CpG dinucleotide"
  misc_feature (61)..(61): /note="Nucleotide may be methylated to form 5-methylcytosine"
tatatttagctggggacgaagaaggaacaaggaaggaacaggcagatggcatagcacgaacgccgggtggaaagtggaactgctcgctcctgtcgtgtgtgtctcttctccatcaaaaaaga

SEQ ID NO: 13137 - DNA, 122 bp, Homo sapiens
  misc_feature (61)..(62): /note="This region represents a CpG dinucleotide"
  misc_feature (61)..(61): /note="Nucleotide may be methylated to form 5-methylcytosine"
gaggaagttgacagttcaacttcaaacatgggtgacgcaggccccacactgcctgctccccgtcccacccctccctgagcacgccaccccgccctctccctctctgagagcgagatacccgg

SEQ ID NO: 13138 - DNA, 122 bp, Homo sapiens
  misc_feature (61)..(62): /note="This region represents a CpG dinucleotide"
  misc_feature (61)..(61): /note="Nucleotide may be methylated to form 5-methylcytosine"
gctgtggggcctcggaaaggggctgggccagcgccggggccaggctcgagaaaggctgcgcgaagtgtgcactgggacgtggagtagaaggcaggcgggagggcgggcagggtgcaaggatg

SEQ ID NO: 13139 - DNA, 122 bp, Homo sapiens
  misc_feature (61)..(62): /note="This region represents a CpG dinucleotide"
  misc_feature (61)..(61): /note="Nucleotide may be methylated to form 5-methylcytosine"
tgggtcacactttaatgacaacaatatagttattctagatcagagacttggaagggactacggcttgagacatatgagtgtgtctcaaggaactggaccagttttagcataagattttccaa

SEQ ID NO: 13140 - DNA, 122 bp, Homo sapiens
  misc_feature (61)..(62): /note="This region represents a CpG dinucleotide"
  misc_feature (61)..(61): /note="Nucleotide may be methylated to form 5-methylcytosine"
agccgttccttcatgggatttgctgctcccttcaccaacaagcgaaaggcttactcggagcgtagaatcatggggtaagcattctctgccttgcatccttgcacctcccttttccctccaaa

SEQ ID NO: 13141 - DNA, 122 bp, Homo sapiens
  misc_feature (61)..(62): /note="This region represents a CpG dinucleotide"
  misc_feature (61)..(61): /note="Nucleotide may be methylated to form 5-methylcytosine"
aactgagccttttgtgtcaatctcccatcctctcctgccttgtgaagtttctggggtggccgagttggaaccaacttcaaaccctcttatgtctctgattcactttccaaaccctccctctc

SEQ ID NO: 13142 - DNA, 122 bp, Homo sapiens
  misc_feature (61)..(62): /note="This region represents a CpG dinucleotide"
  misc_feature (61)..(61): /note="Nucleotide may be methylated to form 5-methylcytosine"
agcacagctttatacaacaaacacagtaaagactgatttgcctccaccctcctctgaaagcgagcaaatagatttgactgaggaacagaaggatgactcagaatggttaagcagcgatgtga

SEQ ID NO: 13143 - DNA, 122 bp, Homo sapiens
  misc_feature (61)..(62): /note="This region represents a CpG dinucleotide"
  misc_feature (61)..(61): /note="Nucleotide may be methylated to form 5-methylcytosine"
ccactatgatgaaagatgttgatggtggaggaggctgtgcccgtgtgaaggcaggggttacgtgggaaatctctgtactttatgttcagtgttacgtgaagataaaagtgctctaaaaaaat

SEQ ID NO: 13144 - DNA, 122 bp, Homo sapiens
  misc_feature (61)..(62): /note="This region represents a CpG dinucleotide"
  misc_feature (61)..(61): /note="Nucleotide may be methylated to form 5-methylcytosine"
aagggctggatggtaacagatcacagccaaagaaataacctgaaccaaggcagagacatccgggatggagagaagtggcagaaggcttatgagatatggaagttgaatggacaggatgtgtg

SEQ ID NO: 13145 - DNA, 122 bp, Homo sapiens
  misc_feature (61)..(62): /note="This region represents a CpG dinucleotide"
  misc_feature (61)..(61): /note="Nucleotide may be methylated to form 5-methylcytosine"
aaggctttatgcttcctatttcacaaagcagacatgtggttttcttttttgagctcattgcgtgaactaagcttaagctcttcttctacaaagataatggagatgatatttcctgtgctgtc

SEQ ID NO: 13146 - DNA, 122 bp, Homo sapiens
  misc_feature (61)..(62): /note="This region represents a CpG dinucleotide"
  misc_feature (61)..(61): /note="Nucleotide may be methylated to form 5-methylcytosine"
ttaccttcatctccattttcagccattgccaagagcagcagactcctgagggtgagtcaacgggcaagccagctgagccagcactgtccctcccttacgccatccttccaccccatgtcctg

SEQ ID NO: 13147 - DNA, 122 bp, Homo sapiens
  misc_feature (61)..(62): /note="This region represents a CpG dinucleotide"
  misc_feature (61)..(61): /note="Nucleotide may be methylated to form 5-methylcytosine"
cttgaaggtacaattggtcttgcaaacttgcagggagtcatttggaagtgttgacttaggcgcctgtaagacatctggtaataatgaagatggagcttttaatgctttgggattttatgaat

SEQ ID NO: 13148 - DNA, 122 bp, Homo sapiens
  misc_feature (61)..(62): /note="This region represents a CpG dinucleotide"
  misc_feature (61)..(61): /note="Nucleotide may be methylated to form 5-methylcytosine"
aagcctcatcaataaataaaggggtgagcaatagacagtcatatgcaatgatacatatgacgcaatgagggagcaatgatacatatgatgcaatgacagaacaatgatgaagttagaaaata

SEQ ID NO: 13149 - DNA, 122 bp, Homo sapiens
  misc_feature (61)..(62): /note="This region represents a CpG dinucleotide"
  misc_feature (61)..(61): /note="Nucleotide may be methylated to form 5-methylcytosine"
taggtagaacatcattgccctggactcagcagttctgagcactccagtttgctttggctacgtgccaatgcatgctctggttatgcctaggtggaatttgtagaaaataatcagaacagccc

SEQ ID NO: 13150 - DNA, 122 bp, Homo sapiens
  misc_feature (61)..(62): /note="This region represents a CpG dinucleotide"
  misc_feature (61)..(61): /note="Nucleotide may be methylated to form 5-methylcytosine"
cacctgttatttgcatggtgctctgtgttccctggtttacaaagcattttcagatatcatcgcaactgatccttaccacacctgtgaagggggaactcacgtccccattttatagacgagga

SEQ ID NO: 13151 - DNA, 122 bp, Homo sapiens
  misc_feature (61)..(62): /note="This region represents a CpG dinucleotide"
  misc_feature (61)..(61): /note="Nucleotide may be methylated to form 5-methylcytosine"
tttagacctcctcctgcagacactggtctttggaaacaaatgctttcggccagaggatgacgtaagaacaaatatccaagggagacccaaaccaagtccacaggaaagaaaaccatcaccag

SEQ ID NO: 13152 - DNA, 122 bp, Homo sapiens
  misc_feature (61)..(62): /note="This region represents a CpG dinucleotide"
  misc_feature (61)..(61): /note="Nucleotide may be methylated to form 5-methylcytosine"
ggcagggctctgttctttcctatattttcccttccttcacacactaatctctttggattacgcaaacccccaagttgttgggcaattgtgtaccagagagtagagggagatgagaggcctta

SEQ ID NO: 13153 - DNA, 122 bp, Homo sapiens
  misc_feature (61)..(62): /note="This region represents a CpG dinucleotide"
  misc_feature (61)..(61): /note="Nucleotide may be methylated to form 5-methylcytosine"
cccgcctcagcctcccaaaatgatgggattacaggcatgagccactgcgcccagcctaaccgagtcattattaaaaattaaattataggctgggcaaggtggctcacgcccgtaatcccagt

SEQ ID NO: 13154 - DNA, 122 bp, Homo sapiens
  misc_feature (61)..(62): /note="This region represents a CpG dinucleotide"
  misc_feature (61)..(61): /note="Nucleotide may be methylated to form 5-methylcytosine"
ccagggggctggtgaggggctgcagcagcctcagcagacgatgcagtcggcagaggagagcgggacagaggcggcagctttgacctgctttacctgtccaaaagcaacaaggaagagatgcc

SEQ ID NO: 13155 - DNA, 122 bp, Homo sapiens
  misc_feature (61)..(62): /note="This region represents a CpG dinucleotide"
  misc_feature (61)..(61): /note="Nucleotide may be methylated to form 5-methylcytosine"
aagctcccactcgggtgtgtttaggcttccggtgaggtctgctatgaactttaaacaacacgaagtccaaactagggagagtaacttaacagaagctgtgaaagaactggccatccatcaga

SEQ ID NO: 13156 - DNA, 122 bp, Homo sapiens
  misc_feature (61)..(62): /note="This region represents a CpG dinucleotide"
  misc_feature (61)..(61): /note="Nucleotide may be methylated to form 5-methylcytosine"
aaccactgttgctgctgacggggctgagcacgacaccactgatggcattggggcaggttgcgttccctggaccaggatgtttctgtctgcagcagaatttctctgctgagtcaccaccacat

SEQ ID NO: 13157 - DNA, 122 bp, Homo sapiens
  misc_feature (61)..(62): /note="This region represents a CpG dinucleotide"
  misc_feature (61)..(61): /note="Nucleotide may be methylated to form 5-methylcytosine"
gaacacaaaactcagctgaagccatgactcctgactcaccgtgaaatcataaattcatatcgttttaagcagataagtttgtggtaatttgtcatgcagcaaaagaaaatgaattcagcata

SEQ ID NO: 13158 - DNA, 122 bp, Homo sapiens
  misc_feature (61)..(62): /note="This region represents a CpG dinucleotide"
  misc_feature (61)..(61): /note="Nucleotide may be methylated to form 5-methylcytosine"
ccctgctcacatgcaccccagctcccatgcatcccgggctcacacacaacttgactcacacgtctcaggttcatgcatccgtcccctggtgcgtctccgggccgccctccaccgggctgtgc

SEQ ID NO: 13159 - DNA, 122 bp, Homo sapiens
  misc_feature (61)..(62): /note="This region represents a CpG dinucleotide"
  misc_feature (61)..(61): /note="Nucleotide may be methylated to form 5-methylcytosine"
ggggcagccagaagactccacttttggggagtggggttatagtttcccaaggtccttttccgtgccatcgtcatatccagaatgtaatttttgaagctatcaatacccgctgcctccaatac

SEQ ID NO: 13160 - DNA, 122 bp, Homo sapiens
  misc_feature (61)..(62): /note="This region represents a CpG dinucleotide"
  misc_feature (61)..(61): /note="Nucleotide may be methylated to form 5-methylcytosine"
cagctctgccccacccatgcaagggtggggagctctttggattacatgatctctaggattcgtgggtactttctccagaacaggggcagttctcaagaggcgtgtggccacttaggcaggta

SEQ ID NO: 13161 - DNA, 122 bp, Homo sapiens
  misc_feature (61)..(62): /note="This region represents a CpG dinucleotide"
  misc_feature (61)..(61): /note="Nucleotide may be methylated to form 5-methylcytosine"
atctcactgaggacacatacctgcattcagtcagttcttgtgctatttttatacctgttacggaggctttcctttccacctgtgaaaacagaacctctctgctccaagcttcttcagtcttt

SEQ ID NO: 13162 - DNA, 122 bp, Homo sapiens
  misc_feature (61)..(62): /note="This region represents a CpG dinucleotide"
  misc_feature (61)..(61): /note="Nucleotide may be methylated to form 5-methylcytosine"
tagatgcggcttatctcagcacagcttcctctgtcctccagaacccctagtggcagcatacggttgctgatgacactttagactcaggataaattcttactggatttgagaaacttaattct

SEQ ID NO: 13163 - DNA, 122 bp, Homo sapiens
  misc_feature (61)..(62): /note="This region represents a CpG dinucleotide"
  misc_feature (61)..(61): /note="Nucleotide may be methylated to form 5-methylcytosine"
cacctcctttgtgaagttttcccaggtagtgctaaccacacccttcttctgtgacctcaccgtgacaggtacagatggctaccggtgccctggcactgccttgggaatgagtgtgttttaat

SEQ ID NO: 13164 - DNA, 122 bp, Homo sapiens
  misc_feature (61)..(62): /note="This region represents a CpG dinucleotide"
  misc_feature (61)..(61): /note="Nucleotide may be methylated to form 5-methylcytosine"
tctgcagttcaaagtgtagtcagcaaaaaaagcatacacgctatcgcactgggaggaaatcggtgtctttgaaatcaaataccctgccattggcatatccaggcttgaaactcagctgcagc

SEQ ID NO: 13165 - DNA, 122 bp, Homo sapiens
  misc_feature (61)..(62): /note="This region represents a CpG dinucleotide"
  misc_feature (61)..(61): /note="Nucleotide may be methylated to form 5-methylcytosine"
attgaggtctctacttcctttgagcttactgttagtggaggatagagataataataaacgcgtttcaatgagagagcatcccatggtgagatgaccattgctatgaagcatataacacaggg

SEQ ID NO: 13166 - DNA, 122 bp, Homo sapiens
  misc_feature (61)..(62): /note="This region represents a CpG dinucleotide"
  misc_feature (61)..(61): /note="Nucleotide may be methylated to form 5-methylcytosine"
acaaaggtgggggggcccctggaaccctctgtgggctggcagtgtgcttcctgcacccagcgccagcccgccctggggaggggctgaacccgccctgctcgtgataaggcacaagcaagggc

SEQ ID NO: 13167 - DNA, 122 bp, Homo sapiens
  misc_feature (61)..(62): /note="This region represents a CpG dinucleotide"
  misc_feature (61)..(61): /note="Nucleotide may be methylated to form 5-methylcytosine"
gtccaaggggagaggtaaggagtcggaagtccagttcagggacgaggattccaggatgagcgtgaatgggaaggggctgggcccagcctgggggttctctccctagtttccacagacagatc

SEQ ID NO: 13168 - DNA, 122 bp, Homo sapiens
  misc_feature (61)..(62): /note="This region represents a CpG dinucleotide"
  misc_feature (61)..(61): /note="Nucleotide may be methylated to form 5-methylcytosine"
aaggcaacaataattacaaggtacatatatcatcttcagataaatcttagcaggtatgcacgttaaggtccatttcacagatgaaggaagtttgcagaagtcatggagctgatggaaggcgg

SEQ ID NO: 13169 - DNA, 122 bp, Homo sapiens
  misc_feature (61)..(62): /note="This region represents a CpG dinucleotide"
  misc_feature (61)..(61): /note="Nucleotide may be methylated to form 5-methylcytosine"
ggtggggtagagtctaagttgtttccggtctgagccttcaagttgctgggctgtccttggcgtggcgagtcccaggagaaccagtgagacaagactggtggttctcaaagactcatatgtcc

SEQ ID NO: 13170 - DNA, 122 bp, Homo sapiens
  misc_feature (61)..(62): /note="This region represents a CpG dinucleotide"
  misc_feature (61)..(61): /note="Nucleotide may be methylated to form 5-methylcytosine"
agaaaggctggttgcaggcagaaccagatggttgcagtccacacggggaagcaaattggccgtgacatttcagccatgtgaggtttatttaggattagctaagaattctcagccttgactcc

SEQ ID NO: 13171 - DNA, 122 bp, Homo sapiens
  misc_feature (61)..(62): /note="This region represents a CpG dinucleotide"
  misc_feature (61)..(61): /note="Nucleotide may be methylated to form 5-methylcytosine"
gatgaacctgttcacctacgagaagggctactgcttcgtgtactacctgtcccagctctgcggagacccacagcgctttgatgactttctccgagtgagcagccccctgcccgggacggccc

SEQ ID NO: 13172 - DNA, 122 bp, Homo sapiens
  misc_feature (61)..(62): /note="This region represents a CpG dinucleotide"
  misc_feature (61)..(61): /note="Nucleotide may be methylated to form 5-methylcytosine"
gcgctcctgctctggggcggaagcctgtgctcggtgtgtcctgagcgccccctgcagccccgccccgcccctgcagggaggttcctgtctgagctcacagagtatattcctaccagtgtctc

SEQ ID NO: 13173 - DNA, 122 bp, Homo sapiens
  misc_feature (61)..(62): /note="This region represents a CpG dinucleotide"
  misc_feature (61)..(61): /note="Nucleotide may be methylated to form 5-methylcytosine"
ggctgcttcagcaggagtttgagcaggtgacctttccagttcagctatgctgtatgcctgcgtcagagattcagggttctccaaggcctctttgaatatctggaggctggaaacaggtttga

SEQ ID NO: 13174 - DNA, 122 bp, Homo sapiens
  misc_feature (61)..(62): /note="This region represents a CpG dinucleotide"
  misc_feature (61)..(61): /note="Nucleotide may be methylated to form 5-methylcytosine"
cccccatgtggtcttcttgcctagctgggcctcctgtgccccagagcgagaatctgagaacgcaggaattgggttgggactgtgggaaatttgcatgtgccatggtaaccagcaaggggatc

SEQ ID NO: 13175 - DNA, 122 bp, Homo sapiens
  misc_feature (61)..(62): /note="This region represents a CpG dinucleotide"
  misc_feature (61)..(61): /note="Nucleotide may be methylated to form 5-methylcytosine"
ttctgacttcattaactgcttttaaacaaaacatctgcgttcacaaatatttcacttaatcgcctgaaaatttcagctcatgtgaaaagatatttacagatctttggcatatgggggataaa

SEQ ID NO: 13176 - DNA, 122 bp, Homo sapiens
  misc_feature (61)..(62): /note="This region represents a CpG dinucleotide"
  misc_feature (61)..(61): /note="Nucleotide may be methylated to form 5-methylcytosine"
gaacctgacaagagatggtaagggctctgggagacaggcggggcagtgagagatgggaggcgcatttctgttggagagagtgtctatttcctggactcctgttacgatggtgggtcaagttc

SEQ ID NO: 13177 - DNA, 122 bp, Homo sapiens
  misc_feature (61)..(62): /note="This region represents a CpG dinucleotide"
  misc_feature (61)..(61): /note="Nucleotide may be methylated to form 5-methylcytosine"
ggcctcaagcagtcctcccatgttggcctcacagagtgctgagattgcaggtgtgagccacggctctcagccctaaatccactttagttggttaggaattggtggcaatgcaggagtgactc

SEQ ID NO: 13178 - DNA, 122 bp, Homo sapiens
  misc_feature (61)..(62): /note="This region represents a CpG dinucleotide"
  misc_feature (61)..(61): /note="Nucleotide may be methylated to form 5-methylcytosine"
aagaatagatcttttttttttttaacttggggtttttgaggagggattttagaggagtggcggggaagctactcagtcgagataaactccttaaaagcatgggcaaaattcccttttctgtg

SEQ ID NO: 13179 - DNA, 122 bp, Homo sapiens
  misc_feature (61)..(62): /note="This region represents a CpG dinucleotide"
  misc_feature (61)..(61): /note="Nucleotide may be methylated to form 5-methylcytosine"
ggaatgttaatatggttagctgtagtcagacaatattgacattgttgctaagatattttacgagacatgtcattgagactgctgtttggaaaactgagcagtgaatttttttttttttggtg

SEQ ID NO: 13180 - DNA, 122 bp, Homo sapiens
  misc_feature (61)..(62): /note="This region represents a CpG dinucleotide"
  misc_feature (61)..(61): /note="Nucleotide may be methylated to form 5-methylcytosine"
ttagctgtgtgatcttgggcaagttatttaactcctctgagccttgctttactcaccctacggtgaagacaggaagagtaattactaaataatgttggttgagtattaaatgagacaatgca

SEQ ID NO: 13181 - DNA, 122 bp, Homo sapiens
  misc_feature (61)..(62): /note="This region represents a CpG dinucleotide"
  misc_feature (61)..(61): /note="Nucleotide may be methylated to form 5-methylcytosine"
aaaattccaccaaatttccaggatgcaaaagcacgactcgcagctcccaagagcctaacccgtggatttaaacggtaaacatcacaagttagggtctcagggactgagaggagcgcaacaat

SEQ ID NO: 13182 - DNA, 122 bp, Homo sapiens
  misc_feature (61)..(62): /note="This region represents a CpG dinucleotide"
  misc_feature (61)..(61): /note="Nucleotide may be methylated to form 5-methylcytosine"
agttctgagttctatcaccattgattcagatggctgattcattcttgatctacatataaacggaatcttacagcatatactctttttgtctggcttctctgcttaacataatgttctgaaga

SEQ ID NO: 13183 - DNA, 122 bp, Homo sapiens
  misc_feature (61)..(62): /note="This region represents a CpG dinucleotide"
  misc_feature (61)..(61): /note="Nucleotide may be methylated to form 5-methylcytosine"
ctatgtgcagagtgtggacagggcgcctgggtcacaagcaacagaaactggctctggtcacgtgaagccaagggagcggaacagcgtttccgggtcaggcaggcactgggggcgaagggcag

SEQ ID NO: 13184 - DNA, 122 bp, Homo sapiens
  misc_feature (61)..(62): /note="This region represents a CpG dinucleotide"
  misc_feature (61)..(61): /note="Nucleotide may be methylated to form 5-methylcytosine"
tctgctgaaattgacttcctctattgaaccctgagcaaaataaacttccctagcaggtttcgtgtaattgctgtacattttcgaggcaacgtcctatatgaccgacatttaccaaaatggat

SEQ ID NO: 13185 - DNA, 122 bp, Homo sapiens
  misc_feature (61)..(62): /note="This region represents a CpG dinucleotide"
  misc_feature (61)..(61): /note="Nucleotide may be methylated to form 5-methylcytosine"
gccctattcacctcggcaatgagatcactcagacctggggggaggcgcgttctgggagagcgtggtgacttccacagcaggggctcttgcatcagttctggttacccacgggagactgcatg

SEQ ID NO: 13186 - DNA, 122 bp, Homo sapiens
  misc_feature (61)..(62): /note="This region represents a CpG dinucleotide"
  misc_feature (61)..(61): /note="Nucleotide may be methylated to form 5-methylcytosine"
gttctaaccttaaatgttgtaagagggatggaggagaatctttcaagttgaacaaactgccgcttgtctgtctagcgttaggagacatttgtccactgtctcatcccattgtcttcaaattg

SEQ ID NO: 13187 - DNA, 122 bp, Homo sapiens
  misc_feature (61)..(62): /note="This region represents a CpG dinucleotide"
  misc_feature (61)..(61): /note="Nucleotide may be methylated to form 5-methylcytosine"
ttttgagaaaccaatataagtctcacatattaccagtttcttcacatggtatttatcctgcgcccctgtataatactttgttttcctaaagttacataaaaacaaggtcttctttcccttta

SEQ ID NO: 13188 - DNA, 122 bp, Homo sapiens
  misc_feature (61)..(62): /note="This region represents a CpG dinucleotide"
  misc_feature (61)..(61): /note="Nucleotide may be methylated to form 5-methylcytosine"
cccatcattgatgtcatcagtctggataattttgcctaccttgcagcatctgctgaccttcgtggaggtgagttctgctcccgggggtggggctgtagacatgaaaggaggtaggtgaggct

SEQ ID NO: 13189 - DNA, 122 bp, Homo sapiens
  misc_feature (61)..(62): /note="This region represents a CpG dinucleotide"
  misc_feature (61)..(61): /note="Nucleotide may be methylated to form 5-methylcytosine"
agatttgggagaacaatgggaaaaatgctactatgtggagaattccacaaacattagaaacgtaagatggtattaaggaaaggctaagtaatttagccatgtggttcctcataaccctttag

SEQ ID NO: 13190 - DNA, 122 bp, Homo sapiens
  misc_feature (61)..(62): /note="This region represents a CpG dinucleotide"
  misc_feature (61)..(61): /note="Nucleotide may be methylated to form 5-methylcytosine"
gacacttcgaaggcgttgtctcaaactgctagtcaatgaggctttgggaggcttcacccccgggtgatttaatgagtcacagtggatcaattagctgattctttggctctacttgaaaaagc

SEQ ID NO: 13191 - DNA, 122 bp, Homo sapiens
  misc_feature (61)..(62): /note="This region represents a CpG dinucleotide"
  misc_feature (61)..(61): /note="Nucleotide may be methylated to form 5-methylcytosine"
aacaaaaggggtgggggttcccagcaggaaggctcacacctgcaggaggccacacgtgagcgtgtgtacatgtgcgtgtgtgcttgtgcagggcgctcccagcctccaggtgatctgctgcc

SEQ ID NO: 13192 - DNA, 122 bp, Homo sapiens
  misc_feature (61)..(62): /note="This region represents a CpG dinucleotide"
  misc_feature (61)..(61): /note="Nucleotide may be methylated to form 5-methylcytosine"
atagtatgttgcaaatacatatgttgaaaatgcattaaggaatttataggttgtgaaatccgtattgagcgattagcacaattatggagagtcccttgcaggtaactgcatcacaatatgaa

SEQ ID NO: 13193 - DNA, 122 bp, Homo sapiens
  misc_feature (61)..(62): /note="This region represents a CpG dinucleotide"
  misc_feature (61)..(61): /note="Nucleotide may be methylated to form 5-methylcytosine"
agatgacttaatctcttacttaaacaggaatctttctcaatggactttcaggagtgtcttcgttgacctctattatactttctcaattttagctttaactctgctgtaccatagatttccat

SEQ ID NO: 13194 - DNA, 122 bp, Homo sapiens
  misc_feature (61)..(62): /note="This region represents a CpG dinucleotide"
  misc_feature (61)..(61): /note="Nucleotide may be methylated to form 5-methylcytosine"
acacggaaaggaagctatttcataactatcagtcatgtgaaatttggcaggcccctagcccgttagtggccacagtcacatgattgattaccggttggggacccacagttagcttattgcag

SEQ ID NO: 13195 - DNA, 122 bp, Homo sapiens
  misc_feature (61)..(62): /note="This region represents a CpG dinucleotide"
  misc_feature (61)..(61): /note="Nucleotide may be methylated to form 5-methylcytosine"
ccactgtcagcagtagggcctaaagcttggtcagaaggcaaaatgaaactgttagcaaagcgaagcctgggaattccagatcctgggtccttatgtgcccattataactgagaacagccttt

SEQ ID NO: 13196 - DNA, 122 bp, Homo sapiens
  misc_feature (61)..(62): /note="This region represents a CpG dinucleotide"
  misc_feature (61)..(61): /note="Nucleotide may be methylated to form 5-methylcytosine"
gaatgagttagacagatgggatttgtaactcaccaactgctgaatgactctctcgaccaacgttgaaaacgtaatgtcctcagtttctctgttgtcgaacacatatttaatcagcttggcga

SEQ ID NO: 13197 - DNA, 122 bp, Homo sapiens
  misc_feature (61)..(62): /note="This region represents a CpG dinucleotide"
  misc_feature (61)..(61): /note="Nucleotide may be methylated to form 5-methylcytosine"
gcaacatctgcccttccattcttactcatatgtgtctctcacatgtcaaccaaatgcaatcgtggttcaagtaaaccaactgtaaaaatatttacagtatgaggcaagagggggaaatttga

SEQ ID NO: 13198 - DNA, 122 bp, Homo sapiens
  misc_feature (61)..(62): /note="This region represents a CpG dinucleotide"
  misc_feature (61)..(61): /note="Nucleotide may be methylated to form 5-methylcytosine"
atactttggttagctttggggttctgagtgcctggatggctttttccattcattctcaggcggctcgcttctacattgtgagccagggcctggggatggatttttttttttttttttgagat

SEQ ID NO: 13199 - DNA, 122 bp, Homo sapiens
  misc_feature (61)..(62): /note="This region represents a CpG dinucleotide"
  misc_feature (61)..(61): /note="Nucleotide may be methylated to form 5-methylcytosine"
atctgggtttcagtttctcatttgttcttttttaaaaatgatgccaaattaatgggtcaccgaagcctggttgaattagagaaagccctccctccaaatgctcctgtcaaaaaaagaaacac

SEQ ID NO: 13200 - DNA, 122 bp, Homo sapiens
  misc_feature (61)..(62): /note="This region represents a CpG dinucleotide"
  misc_feature (61)..(61): /note="Nucleotide may be methylated to form 5-methylcytosine"
ccattcctactctccagcaataagttaatagtgcatggaagtgaccacgaaccacatgaacgtctcccattaaatgcaaaccaaagtacccccagctgcatttctgtttagctggatcccaa

SEQ ID NO: 13201 - DNA, 122 bp, Homo sapiens
  misc_feature (61)..(62): /note="This region represents a CpG dinucleotide"
  misc_feature (61)..(61): /note="Nucleotide may be methylated to form 5-methylcytosine"
tataaatatattccaatgtttccatgagttttcctatataaatattagctcaagattgtacgacatatatttatgttgtggctttatccagagtaagaaatgcagctcttgcaggaattgag

SEQ ID NO: 13202 - DNA, 122 bp, Homo sapiens
  misc_feature (61)..(62): /note="This region represents a CpG dinucleotide"
  misc_feature (61)..(61): /note="Nucleotide may be methylated to form 5-methylcytosine"
ctgggggagggaaggcaggatgcggtgcgggagttaatggacctggccttggcgaaggcgcgtcctgggttggatcgaaaccctctcatccgccctgtggccggagggaccagaccattagt

SEQ ID NO: 13203 - DNA, 122 bp, Homo sapiens
  misc_feature (61)..(62): /note="This region represents a CpG dinucleotide"
  misc_feature (61)..(61): /note="Nucleotide may be methylated to form 5-methylcytosine"
tggaagcttggctctaactctgtgcaagaccattccatgttagcgcttgaggcaggcaggcgcctgtcatctcattggcacaaagggccttggatcaagagagagcagaattagaaaacacc

SEQ ID NO: 13204 - DNA, 122 bp, Homo sapiens
  misc_feature (61)..(62): /note="This region represents a CpG dinucleotide"
  misc_feature (61)..(61): /note="Nucleotide may be methylated to form 5-methylcytosine"
cctcagctctgtctccttgagcttggggctgggttgggttttataagcatagggtaatgacgcatgatcggattagattttgcgatgaggtgatgctgggatgctcatctgactggaccctg

SEQ ID NO: 13205 - DNA, 122 bp, Homo sapiens
  misc_feature (61)..(62): /note="This region represents a CpG dinucleotide"
  misc_feature (61)..(61): /note="Nucleotide may be methylated to form 5-methylcytosine"
agaagttccaggaatcaagttttgaacgcattaatggacttgggaaatgatttgtcagcacgtggaaatgaggacttaggtttcttgtgtaacagcttggctaacaaagcaagtttgtgcct

SEQ ID NO: 13206 - DNA, 122 bp, Homo sapiens
  misc_feature (61)..(62): /note="This region represents a CpG dinucleotide"
  misc_feature (61)..(61): /note="Nucleotide may be methylated to form 5-methylcytosine"
caccatttgcaggtggaagattccagcattctctgcggtgtcctctgctcacttcttcctcgtattgtcccttctcctctcccactctgtttgtcctcaggaaggtatgggggcggaagggg

SEQ ID NO: 13207 - DNA, 122 bp, Homo sapiens
  misc_feature (61)..(62): /note="This region represents a CpG dinucleotide"
  misc_feature (61)..(61): /note="Nucleotide may be methylated to form 5-methylcytosine"
tccattctactgacaattcttgatctgttgaccatcagaagtcatagacttgaaacagaacggtttataattcctgtttggcactccttgtcaatgtggataaactgacttgtgcctttgaa

SEQ ID NO: 13208 - DNA, 122 bp, Homo sapiens
  misc_feature (61)..(62): /note="This region represents a CpG dinucleotide"
  misc_feature (61)..(61): /note="Nucleotide may be methylated to form 5-methylcytosine"
aggtgactgcccaggaattctgaccaagtcttgctcatcttcatcggagtctctgagcatcgcagctgccaggcagccaagcattgtgtcgcaactctgcagaagtgccacacacacagtga

SEQ ID NO: 13209 - DNA, 122 bp, Homo sapiens
  misc_feature (61)..(62): /note="This region represents a CpG dinucleotide"
  misc_feature (61)..(61): /note="Nucleotide may be methylated to form 5-methylcytosine"
gggatacatccctaactctagacagcaggttgttaaacacggggcctggtatccactaggcgtcccataaatgctgccacttttgtggttccgaggaggcggctcactccgttcgggcttgg

SEQ ID NO: 13210 - DNA, 122 bp, Homo sapiens
  misc_feature (61)..(62): /note="This region represents a CpG dinucleotide"
  misc_feature (61)..(61): /note="Nucleotide may be methylated to form 5-methylcytosine"
actcacctgcagctgctgcatgacaggggccccaggcagtagacgggacactgtgaacatcgcccaattgccaattttcataatttggaagacctagaaatgggaaaacagactacaataag

SEQ ID NO: 13211 - DNA, 122 bp, Homo sapiens
  misc_feature (61)..(62): /note="This region represents a CpG dinucleotide"
  misc_feature (61)..(61): /note="Nucleotide may be methylated to form 5-methylcytosine"
tcagaatggtggtgcctctgctagtggagctacctctcctcccccacaccacagactccacgaagacccaactgcagcaacggttctttccattcaggcagaaatcagagggtctgagggtg

SEQ ID NO: 13212 - DNA, 122 bp, Homo sapiens
  misc_feature (61)..(62): /note="This region represents a CpG dinucleotide"
  misc_feature (61)..(61): /note="Nucleotide may be methylated to form 5-methylcytosine"
gatgaagataaagtgaaatacaagctttcctaagaaaatcctgtatcacaggtcaaaacacgcataaggcatgcaagtactgagacgaagcagagtagacacacccaatacctgaaaaatgt

SEQ ID NO: 13213 - DNA, 122 bp, Homo sapiens
  misc_feature (61)..(62): /note="This region represents a CpG dinucleotide"
  misc_feature (61)..(61): /note="Nucleotide may be methylated to form 5-methylcytosine"
ttccttcatgccatctccagaagccttccctgcagcaagcaatgccaggcagagcttagacgctaagcaggttatgtgattagtgccgctgttcagtcagcagacaaattaatctccttaag

SEQ ID NO: 13214 - DNA, 122 bp, Homo sapiens
  misc_feature (61)..(62): /note="This region represents a CpG dinucleotide"
  misc_feature (61)..(61): /note="Nucleotide may be methylated to form 5-methylcytosine"
gtacctgttttaagaaaaaaacaaggaagtgaaaccaaaggcaggcagcccagcgccaggcgccagacccaaaaccggacccaaaaccaggcctgggcctgcctggcctaaacctagtagtt

SEQ ID NO: 13215 - DNA, 122 bp, Homo sapiens
  misc_feature (61)..(62): /note="This region represents a CpG dinucleotide"
  misc_feature (61)..(61): /note="Nucleotide may be methylated to form 5-methylcytosine"
cctttcccccaagcttctctattccagcccaagagacacatagggaagtttggcaagggtcggtgcgggagccatcaagggtggatgtgggcagattgtgctgtcatctccaaatgaagtaa

SEQ ID NO: 13216 - DNA, 122 bp, Homo sapiens
  misc_feature (61)..(62): /note="This region represents a CpG dinucleotide"
  misc_feature (61)..(61): /note="Nucleotide may be methylated to form 5-methylcytosine"
aatcagttcccttcctctgggaactttctctgtcaccctgcctgagggcagaacctcccgcgtggctcttccagattgccatttccatgattatgtgcattattttttaatttttattatat

SEQ ID NO: 13217 - DNA, 122 bp, Homo sapiens
  misc_feature (61)..(62): /note="This region represents a CpG dinucleotide"
  misc_feature (61)..(61): /note="Nucleotide may be methylated to form 5-methylcytosine"
tgcacaggccccaagtccctgaaacttttccttttttatttattctctaaccaaaaatgacgtctatattacagagcttataagctgtggctcctctagccaatacagcttggtagaagcat

SEQ ID NO: 13218 - DNA, 122 bp, Homo sapiens
  misc_feature (61)..(62): /note="This region represents a CpG dinucleotide"
  misc_feature (61)..(61): /note="Nucleotide may be methylated to form 5-methylcytosine"
agaccacagtcaggagggacccccaggtgagctgcacttcctgagagaaactcagccagacggcaaggctgcccaccccaccctccacattcactgccccacatcggtggagagaagtggtt

SEQ ID NO: 13219 - DNA, 122 bp, Homo sapiens
  misc_feature (61)..(62): /note="This region represents a CpG dinucleotide"
  misc_feature (61)..(61): /note="Nucleotide may be methylated to form 5-methylcytosine"
atctaaaaattaaatgagctgataaagaacgccgtcagcacagagcagacgctgggtgttcgcgctcttgagcgtgcgctctgcggggcgcgggctggtggcgggcgggggtcgccggctcc

SEQ ID NO: 13220 - DNA, 122 bp, Homo sapiens
  misc_feature (61)..(62): /note="This region represents a CpG dinucleotide"
  misc_feature (61)..(61): /note="Nucleotide may be methylated to form 5-methylcytosine"
ctgaggaaaggaagtgctctttctctcctgataggacaaggatgacccagcagatgggcacgtgggcaggcagagctctcaactaccttttctcttagcatgggtgacagtgtgtatgacca

SEQ ID NO: 13221 - DNA, 122 bp, Homo sapiens
  misc_feature (61)..(62): /note="This region represents a CpG dinucleotide"
  misc_feature (61)..(61): /note="Nucleotide may be methylated to form 5-methylcytosine"
agatgaggaaatggaggaacaggggttaagcagtttgcctgaggttgcacagctggtgagcggcaggccacagcaggctccagagtccacccacttaaccaactaggccacactatctgctc

SEQ ID NO: 13222 - DNA, 122 bp, Homo sapiens
  misc_feature (61)..(62): /note="This region represents a CpG dinucleotide"
  misc_feature (61)..(61): /note="Nucleotide may be methylated to form 5-methylcytosine"
ccaaaggatctgatcgcccgtcactaaggctactaatcaaatttccatccaatatgctcacgcaggatttcctgatcaaacacttaagcctgcccctctgcacccccattagctaacatgtt

SEQ ID NO: 13223 - DNA, 122 bp, Homo sapiens
  misc_feature (61)..(62): /note="This region represents a CpG dinucleotide"
  misc_feature (61)..(61): /note="Nucleotide may be methylated to form 5-methylcytosine"
agctctgcatccgactggagactttacacctgcttcctacgaagagggagctcttgccagcgagcccatgcttacccataatctacgaagagatcttttcatctcctctccgtgaacacttg

SEQ ID NO: 13224 - DNA, 122 bp, Homo sapiens
  misc_feature (61)..(62): /note="This region represents a CpG dinucleotide"
  misc_feature (61)..(61): /note="Nucleotide may be methylated to form 5-methylcytosine"
aatgcttatcacaaagtaaagcacctcctgagtcagcctattcaggcagatttgctgccacgtttattaaattcctgagggttttattcctcaagttattactctcaagtgtatgagcaaga

SEQ ID NO: 13225 - DNA, 122 bp, Homo sapiens
  misc_feature (61)..(62): /note="This region represents a CpG dinucleotide"
  misc_feature (61)..(61): /note="Nucleotide may be methylated to form 5-methylcytosine"
ggaatgcaccaattcgctccagtcatttagctaagtcttagtcattttcaagacctagagcgtatcttaacttcctgatccctttagccagaaatgactgaagccctaagcacatatggtcc

SEQ ID NO: 13226 - DNA, 122 bp, Homo sapiens
  misc_feature (61)..(62): /note="This region represents a CpG dinucleotide"
  misc_feature (61)..(61): /note="Nucleotide may be methylated to form 5-methylcytosine"
gggaaaaagtactgtgactttctgtggatatcttccagcgatctcatcatgacttcttggcgttttctaatgaggtgatgtagtaggtttcaggtgataaaataacaagagcactgggtgga

SEQ ID NO: 13227 - DNA, 122 bp, Homo sapiens
  misc_feature (61)..(62): /note="This region represents a CpG dinucleotide"
  misc_feature (61)..(61): /note="Nucleotide may be methylated to form 5-methylcytosine"
tgcaaagccctttaatgtttttcccaatacttcctgtgacctgcacatgcctgtaagagccgcaaaaagccttacagagacaactgggggattgaggttcttgccacacttccaattaaagc

SEQ ID NO: 13228 - DNA, 122 bp, Homo sapiens
  misc_feature (61)..(62): /note="This region represents a CpG dinucleotide"
  misc_feature (61)..(61): /note="Nucleotide may be methylated to form 5-methylcytosine"
tgtcctccttaaatgcagcaccaactctgtaaacacacagcaggagctctagatacaccacgtttgtacacatttactgagtctacatttccatgtcaccttcaggaagagtggattggctt

SEQ ID NO: 13229 - DNA, 122 bp, Homo sapiens
  misc_feature (61)..(62): /note="This region represents a CpG dinucleotide"
  misc_feature (61)..(61): /note="Nucleotide may be methylated to form 5-methylcytosine"
tacataaacactactttttgttggtttgtttgttttaaaaacaagatagggttttcatttcgggaagtcataaaaacatcatgtccttcaacagtgattacaaaggaagtctgtggcagggt

SEQ ID NO: 13230 - DNA, 122 bp, Homo sapiens
  misc_feature (61)..(62): /note="This region represents a CpG dinucleotide"
  misc_feature (61)..(61): /note="Nucleotide may be methylated to form 5-methylcytosine"
tctgaagagattgctcattatcctgttttaaaccatgaataagatatgtgccatttgtgacgtacttaaaaaaataatttcactcatttcctgtaggacctactaccacctacaactgattt

SEQ ID NO: 13231 - DNA, 122 bp, Homo sapiens
  misc_feature (61)..(62): /note="This region represents a CpG dinucleotide"
  misc_feature (61)..(61): /note="Nucleotide may be methylated to form 5-methylcytosine"
aatccatttgtgggctgcaaccagaattttttaaaaaagaaagaaaacaaatagaaaagacgacaatagaagaggaaaaatcagagtacagcagatataggaagaataaatgttattccctg

SEQ ID NO: 13232 - DNA, 122 bp, Homo sapiens
  misc_feature (61)..(62): /note="This region represents a CpG dinucleotide"
  misc_feature (61)..(61): /note="Nucleotide may be methylated to form 5-methylcytosine"
ttgttcttgccctggtcctttctaaagaaccacaaaggtggcttgctttcttggcaagtacgtaatgaattcaggaagtagccatgactctttcttttttatcgtaatgtgagtttagcctg

SEQ ID NO: 13233 - DNA, 122 bp, Homo sapiens
  misc_feature (61)..(62): /note="This region represents a CpG dinucleotide"
  misc_feature (61)..(61): /note="Nucleotide may be methylated to form 5-methylcytosine"
aagaaaggagtcctcttacattctgaagtgaattggatttccaattgcgcacttcaagtacgttagcattaaataaccacgagtcacccagtgttgacttcggatggtgtcatgagtgttct

SEQ ID NO: 13234 - DNA, 122 bp, Homo sapiens
  misc_feature (61)..(62): /note="This region represents a CpG dinucleotide"
  misc_feature (61)..(61): /note="Nucleotide may be methylated to form 5-methylcytosine"
gagctcctgctgtcaggagctgggaactcccaggtgcgataaagagaaagccatgccatacgaagctgagaacagtaaacagtcatgaagagatccaagggctcagaaccacaattcccaga

SEQ ID NO: 13235 - DNA, 122 bp, Homo sapiens
  misc_feature (61)..(62): /note="This region represents a CpG dinucleotide"
  misc_feature (61)..(61): /note="Nucleotide may be methylated to form 5-methylcytosine"
tgtgggaagggctgacttttctacctgttgccaaagacctgctgtctgtggcagccgcaacgatatttgtcctgctattaatcctctggaatcgatcaaatatcaaaaataacttctctttg

SEQ ID NO: 13236 - DNA, 122 bp, Homo sapiens
  misc_feature (61)..(62): /note="This region represents a CpG dinucleotide"
  misc_feature (61)..(61): /note="Nucleotide may be methylated to form 5-methylcytosine"
attctccatgtctttggtctatcagagtcttgcttttacttccatttctgtttccagccacggtgactgagtcacagcaacacaggctgctccaaggcctctgttctctgctgactctgcag

SEQ ID NO: 13237 - DNA, 122 bp, Homo sapiens
  misc_feature (61)..(62): /note="This region represents a CpG dinucleotide"
  misc_feature (61)..(61): /note="Nucleotide may be methylated to form 5-methylcytosine"
catcccaggattctcatggactcacccactgcaatcctcttactatagtcacacaaagtccggaagttgtgccacctgttcagtcaaatacagaaaagtacagtaaactagatatggccgac

SEQ ID NO: 13238 - DNA, 122 bp, Homo sapiens
  misc_feature (61)..(62): /note="This region represents a CpG dinucleotide"
  misc_feature (61)..(61): /note="Nucleotide may be methylated to form 5-methylcytosine"
tcacagattaaggaaaatgacattgattacaaatgtcctcagcctgagttggctgtgttgcgtttgtacacttcagccctctgagctgaagtgggagtggtttctctcctgaaaatgtttct

SEQ ID NO: 13239 - DNA, 122 bp, Homo sapiens
  misc_feature (61)..(62): /note="This region represents a CpG dinucleotide"
  misc_feature (61)..(61): /note="Nucleotide may be methylated to form 5-methylcytosine"
gtgagtgagacacatctttcatgtgtctggggcccacctcttgtgttcagtaaacatacacgtgtctcagactcacgctgcatagtcaaggaacgaaggatcaagtcaaataatgcaaattt

SEQ ID NO: 13240 - DNA, 122 bp, Homo sapiens
  misc_feature (61)..(62): /note="This region represents a CpG dinucleotide"
  misc_feature (61)..(61): /note="Nucleotide may be methylated to form 5-methylcytosine"
tccttccccagactcctttcctcccctatcctttaccctcccctcccctcccctccccaacgcagcaccttcacacctgggagctaccctcagagcctgaagggtctctctcaccctaccca

SEQ ID NO: 13241 - DNA, 122 bp, Homo sapiens
  misc_feature (61)..(62): /note="This region represents a CpG dinucleotide"
  misc_feature (61)..(61): /note="Nucleotide may be methylated to form 5-methylcytosine"
gcttccggctgctgggcgtcactgacttgctgtggcttcctggcctggctcagcattggccgtccggctcctgcagcagtgacatctccactctggacccatgagcccatcagctcttggtg

SEQ ID NO: 13242 - DNA, 122 bp, Homo sapiens
  misc_feature (61)..(62): /note="This region represents a CpG dinucleotide"
  misc_feature (61)..(61): /note="Nucleotide may be methylated to form 5-methylcytosine"
tcctggtagaaatgacacccctgtgaaatctgcttcatagatgacattaggtgaccacaacgattagtgtaccatgaacctcagaaccactggagctgtgggtgccaaaccctgtgggacct

SEQ ID NO: 13243 - DNA, 122 bp, Homo sapiens
  misc_feature (61)..(62): /note="This region represents a CpG dinucleotide"
  misc_feature (61)..(61): /note="Nucleotide may be methylated to form 5-methylcytosine"
gaaaattaaattaaattaaacatgcgccgagggactagggaaaaatagatcccccctccccgccgctgcagcaaatcaacatttctgctcacagggagagcagcgaatctaaagacatggcc

SEQ ID NO: 13244 - DNA, 122 bp, Homo sapiens
  misc_feature (61)..(62): /note="This region represents a CpG dinucleotide"
  misc_feature (61)..(61): /note="Nucleotide may be methylated to form 5-methylcytosine"
ctctcaggtgatccacccgcctcagcctcccaaagggctggggttgtaggcgtgagccaccgcccccagccagcatggcctctttgaacttgccagctgtgctgttgcctctagggacctgc

SEQ ID NO: 13245 - DNA, 122 bp, Homo sapiens
  misc_feature (61)..(62): /note="This region represents a CpG dinucleotide"
  misc_feature (61)..(61): /note="Nucleotide may be methylated to form 5-methylcytosine"
tcctctcagggaagtttatcccagatcctctatagcacattttattctgttaccacacatcgtgctaatgttacaaaggcaatattaatgttttaccactggtgccaacatcaaatgctcct

SEQ ID NO: 13246 - DNA, 122 bp, Homo sapiens
  misc_feature (61)..(62): /note="This region represents a CpG dinucleotide"
  misc_feature (61)..(61): /note="Nucleotide may be methylated to form 5-methylcytosine"
taaattaattagacagtgtcatatgcttggagttgttcccagcctggcagttataataggcgcctaagttcctggtcttcatggagttatttgatgacattgttcaggtttgaaacaagtgg

SEQ ID NO: 13247 - DNA, 122 bp, Homo sapiens
  misc_feature (61)..(62): /note="This region represents a CpG dinucleotide"
  misc_feature (61)..(61): /note="Nucleotide may be methylated to form 5-methylcytosine"
accaagccaggaaggtttgcagatgagccaccacagaatagtgactgcaatttctgcctccgctggtacaggcaactttcgaaaaatggttttttaggctgggagtggtggctcatgcctgt

SEQ ID NO: 13248 - DNA, 122 bp, Homo sapiens
  misc_feature (61)..(62): /note="This region represents a CpG dinucleotide"
  misc_feature (61)..(61): /note="Nucleotide may be methylated to form 5-methylcytosine"
tatggagtgtgcacattctaacacagcaccttgtcagctggctgagaagctgaaaattctcggcattcctccttgatgtcaattacttcaaggagcaggaaggtgacttcttttaacaagtg

SEQ ID NO: 13249 - DNA, 122 bp, Homo sapiens
  misc_feature (61)..(62): /note="This region represents a CpG dinucleotide"
  misc_feature (61)..(61): /note="Nucleotide may be methylated to form 5-methylcytosine"
cctcgagaaaaaccagggtattcatccgggtcgtcggaggtgctgagaacggaggttggccggcagaaaaggtaggggaaaggggccactcttcattggttgctcctctttcccaccgttca

SEQ ID NO: 13250 - DNA, 122 bp, Homo sapiens
  misc_feature (61)..(62): /note="This region represents a CpG dinucleotide"
  misc_feature (61)..(61): /note="Nucleotide may be methylated to form 5-methylcytosine"
ctgagaccatactgcattataaagagcactagaaaaagaactgcagaacttctattctcgcgtgcatctgctactaacaaattacatgaccctaggcagggcaggcctctctgtgggcctca

SEQ ID NO: 13251 - DNA, 122 bp, Homo sapiens
  misc_feature (61)..(62): /note="This region represents a CpG dinucleotide"
  misc_feature (61)..(61): /note="Nucleotide may be methylated to form 5-methylcytosine"
ccggagctcaagcgatctgcccacctcccgaaatgttgggactagaggtgtgagccaccacgccaggccaatttgaactatatttgaaaaagagggttccattgtttaaaaataagtcttgg

SEQ ID NO: 13252 - DNA, 122 bp, Homo sapiens
  misc_feature (61)..(62): /note="This region represents a CpG dinucleotide"
  misc_feature (61)..(61): /note="Nucleotide may be methylated to form 5-methylcytosine"
ggagagcaacagctcacgactaggattccagctatgctacttatgactatcagggcccagcgtaggccagagcccagggatgtctaccatctctgcagggggtcatcagtaaggctcttgac

SEQ ID NO: 13253 - DNA, 122 bp, Homo sapiens
  misc_feature (61)..(62): /note="This region represents a CpG dinucleotide"
  misc_feature (61)..(61): /note="Nucleotide may be methylated to form 5-methylcytosine"
tcataatgaaccagacagccatatggaagagagtggatcatcaagttggagtgacaagcacggacttcatcatcaaagatccacctaggcctttgctcagtgctctatcaaaatgtaggatt

SEQ ID NO: 13254 - DNA, 122 bp, Homo sapiens
  misc_feature (61)..(62): /note="This region represents a CpG dinucleotide"
  misc_feature (61)..(61): /note="Nucleotide may be methylated to form 5-methylcytosine"
tgctaactcagcaagcgcgattacagtgctccaacttaataagttgataaaaagctgtcccgtggccagttcacaatggaactaaatagtttcgttccgagatgcctggggagtttctctgg

SEQ ID NO: 13255 - DNA, 122 bp, Homo sapiens
  misc_feature (61)..(62): /note="This region represents a CpG dinucleotide"
  misc_feature (61)..(61): /note="Nucleotide may be methylated to form 5-methylcytosine"
ctcaagtgatccgcccgcctcagcctccaaaagtgctgctattacaggcatgagccaccgcgccggccccaagtgactctcatgggctggagacacaggctattatgaattgctaaccacag

SEQ ID NO: 13256 - DNA, 122 bp, Homo sapiens
  misc_feature (61)..(62): /note="This region represents a CpG dinucleotide"
  misc_feature (61)..(61): /note="Nucleotide may be methylated to form 5-methylcytosine"
atatttgtctttcctgttcagcaaattatttatttaaatagttcttaagaaacagctcttcggaattctgtttagaaggaatgctttgaacatctaagattccacgttcctttattagtcat

SEQ ID NO: 13257 - DNA, 122 bp, Homo sapiens
  misc_feature (61)..(62): /note="This region represents a CpG dinucleotide"
  misc_feature (61)..(61): /note="Nucleotide may be methylated to form 5-methylcytosine"
atggagtaaagcctggaaacgtagattttgccaacactgccactcctactcagatgaagacgatgtctcagtcaaccaggatttggatgagaaacaacaaaggagaagagcacagaacaatt

SEQ ID NO: 13258 - DNA, 122 bp, Homo sapiens
  misc_feature (61)..(62): /note="This region represents a CpG dinucleotide"
  misc_feature (61)..(61): /note="Nucleotide may be methylated to form 5-methylcytosine"
atttatagaatctgataacactgccaaatttccacaaagttgtccaggcatggtggctcacgcctgtaatcccagcactctgggaggcagaggattgtttgagcccaggagtttgagaccag

SEQ ID NO: 13259 - DNA, 122 bp, Homo sapiens
  misc_feature (61)..(62): /note="This region represents a CpG dinucleotide"
  misc_feature (61)..(61): /note="Nucleotide may be methylated to form 5-methylcytosine"
ttcttatccctaggtttatttgtatttcctatctattgcctttgtaaaaaacagagaaaacgatcacggacaggtatgcactggtaacatgcagatgatttcatccagctaagctggttgga

SEQ ID NO: 13260 - DNA, 122 bp, Homo sapiens
  misc_feature (61)..(62): /note="This region represents a CpG dinucleotide"
  misc_feature (61)..(61): /note="Nucleotide may be methylated to form 5-methylcytosine"
agacagatatgttccatgtatccagtggctcagcctcaaggaaagggagagttgggactacgtcatttcataggaggggaggcgtgccatgaattatacaccctggcttctctgggattaga

SEQ ID NO: 13261 - DNA, 122 bp, Homo sapiens
  misc_feature (61)..(62): /note="This region represents a CpG dinucleotide"
  misc_feature (61)..(61): /note="Nucleotide may be methylated to form 5-methylcytosine"
aatggatccttgaagcacaataaacagatagtatttctgcatgtgtcactctgagtatgacggcagtaatcttgaaactccccttgaccacctggcactctggagacggaactccacagcct

SEQ ID NO: 13262 - DNA, 122 bp, Homo sapiens
  misc_feature (61)..(62): /note="This region represents a CpG dinucleotide"
  misc_feature (61)..(61): /note="Nucleotide may be methylated to form 5-methylcytosine"
aaaagggtcctggtttccctgtttctgtaagtgacacagccaggaaggacgtccaggactcgcctgagcattgtggctggctgacgcctcaggtccgctaagcatttcctgaattcacccca

SEQ ID NO: 13263 - DNA, 122 bp, Homo sapiens
  misc_feature (61)..(62): /note="This region represents a CpG dinucleotide"
  misc_feature (61)..(61): /note="Nucleotide may be methylated to form 5-methylcytosine"
tgtttggcatttcaaactttaattgtccaaaacagaattttgatcattagtctcttcaaacgtttatctcccattgtttgcaccttagtgaagtgcacatgccatagtcaaagacaaatatt

SEQ ID NO: 13264 - DNA, 122 bp, Homo sapiens
  misc_feature (61)..(62): /note="This region represents a CpG dinucleotide"
  misc_feature (61)..(61): /note="Nucleotide may be methylated to form 5-methylcytosine"
ttcacagagccttctctacaagtggactgctacatcttcagagcgagtcatgtcttgggccgtatgttccattttaatgtctcagtcagaagggagtgagctgcaactccatccatccaggc

SEQ ID NO: 13265 - DNA, 122 bp, Homo sapiens
  misc_feature (61)..(62): /note="This region represents a CpG dinucleotide"
  misc_feature (61)..(61): /note="Nucleotide may be methylated to form 5-methylcytosine"
tgcagccatgcttgaatccatcacactgggcaaaataccagaaacaataaccacaatatacgatacccagaatggtgtgttggtttttatttgctgaaatgaccttatggtttcctatattt

SEQ ID NO: 13266 - DNA, 122 bp, Homo sapiens
  misc_feature (61)..(62): /note="This region represents a CpG dinucleotide"
  misc_feature (61)..(61): /note="Nucleotide may be methylated to form 5-methylcytosine"
acctatagagaaaaatgaggtaacatttaacttgagattacttcagagaattcccattctcgtcaccaggtgtcagtaaaataaccatcactgcaagaccctgttccctagaacaataattg

SEQ ID NO: 13267 - DNA, 122 bp, Homo sapiens
  misc_feature (61)..(62): /note="This region represents a CpG dinucleotide"
  misc_feature (61)..(61): /note="Nucleotide may be methylated to form 5-methylcytosine"
ctgtatggctaacctttctgctgcagtccagggtgttgacactgacatgctgcagtgtaccgtcggtgatttatttaggataaatatgtctcaggtggcatttaatccttcataaaaccagt

SEQ ID NO: 13268 - DNA, 122 bp, Homo sapiens
  misc_feature (61)..(62): /note="This region represents a CpG dinucleotide"
  misc_feature (61)..(61): /note="Nucleotide may be methylated to form 5-methylcytosine"
gaggattagatgagataatgtgcattaactgcccagcacagggtaactgctcagctccagcgaaagacttgcaggttcagtgcaagctgtgctttgccccatggttcccctccctctgcccc

SEQ ID NO: 13269 - DNA, 122 bp, Homo sapiens
  misc_feature (61)..(62): /note="This region represents a CpG dinucleotide"
  misc_feature (61)..(61): /note="Nucleotide may be methylated to form 5-methylcytosine"
agcagacctgggagttccattcaggtgagcagggctgttgctcagcaggtgagcctgccccgccatggagactcagcgctagagtgagaaccacatctgctcacaccaggggcctgaaccct

SEQ ID NO: 13270 - DNA, 122 bp, Homo sapiens
  misc_feature (61)..(62): /note="This region represents a CpG dinucleotide"
  misc_feature (61)..(61): /note="Nucleotide may be methylated to form 5-methylcytosine"
ggcggggggggacagcaagtgcgtaagcagccccagctcccggcctgcctccggaaatgccgcccagggctcagtcacgaacctagccaggcaggggggcacagccagagcactcaggggtg

SEQ ID NO: 13271 - DNA, 122 bp, Homo sapiens
  misc_feature (61)..(62): /note="This region represents a CpG dinucleotide"
  misc_feature (61)..(61): /note="Nucleotide may be methylated to form 5-methylcytosine"
aactagttagagattattcactgtgaggcttttgcaaagggcacaggctggatgagtggccgtgagcgtccgtgttcctgagcagactgtgctgtggcccaatcctgtgcgtgtctcctctt

SEQ ID NO: 13272 - DNA, 122 bp, Homo sapiens
  misc_feature (61)..(62): /note="This region represents a CpG dinucleotide"
  misc_feature (61)..(61): /note="Nucleotide may be methylated to form 5-methylcytosine"
ttcaatgtgctctttcagcaccattcaatctgctgagtcatgtggcccaagatcagcttgcgtagaagcttagagctgccacagaagcttctgttgctctggaatccattcaaatctatggg

SEQ ID NO: 13273 - DNA, 122 bp, Homo sapiens
  misc_feature (61)..(62): /note="This region represents a CpG dinucleotide"
  misc_feature (61)..(61): /note="Nucleotide may be methylated to form 5-methylcytosine"
tctgcaccctcccttctctgtggtaatagtgagcactctgcttcactggattcatctgaacgccagcaccagcagcctcctgaggaatgcttgtttaagatagtggtaagagaaaaaagcag

SEQ ID NO: 13274 - DNA, 122 bp, Homo sapiens
  misc_feature (61)..(62): /note="This region represents a CpG dinucleotide"
  misc_feature (61)..(61): /note="Nucleotide may be methylated to form 5-methylcytosine"
aaccaagagcacagacagttgggtaattttgcttccaaatactgactcagcctctgtaaccgcttcctgggcccaaagaaaactaacgagtgctcccttctcagggacagtgccccaagtgg

SEQ ID NO: 13275 - DNA, 122 bp, Homo sapiens
  misc_feature (61)..(62): /note="This region represents a CpG dinucleotide"
  misc_feature (61)..(61): /note="Nucleotide may be methylated to form 5-methylcytosine"
aaggtccagtaggacctgacccttgcactctgccaactgctcccagctatgtccagcacacggcagcatacccagatgtccaggcacacccggccatcccagcggcaggaaggacctgcact

SEQ ID NO: 13276 - DNA, 122 bp, Homo sapiens
  misc_feature (61)..(62): /note="This region represents a CpG dinucleotide"
  misc_feature (61)..(61): /note="Nucleotide may be methylated to form 5-methylcytosine"
cccatgacagcccagaatgaaccagcctggctctccctgaattgatttggtaagtccctgcgttaactggctagcttcctgtaggctggcagtgggggcaccagtgtgaggtgaaaggactc

SEQ ID NO: 13277 - DNA, 122 bp, Homo sapiens
  misc_feature (61)..(62): /note="This region represents a CpG dinucleotide"
  misc_feature (61)..(61): /note="Nucleotide may be methylated to form 5-methylcytosine"
taataatagtctccgcacaaagccagccctggtcttacacatgtgcccaagctgtctccacgcagtgcctggtgagtcacttccccggctctgtccagagagcaacattccatgaccctgct

SEQ ID NO: 13278 - DNA, 122 bp, Homo sapiens
  misc_feature (61)..(62): /note="This region represents a CpG dinucleotide"
  misc_feature (61)..(61): /note="Nucleotide may be methylated to form 5-methylcytosine"
atactgaatagtgcatttgcatctgcaactcactgagtgctttgtgagctggaccagtaccgtcctttctacagttgaaaacaaattctggttgtggggaagaaaacaggcaaagctgtggc

SEQ ID NO: 13279 - DNA, 122 bp, Homo sapiens
  misc_feature (61)..(62): /note="This region represents a CpG dinucleotide"
  misc_feature (61)..(61): /note="Nucleotide may be methylated to form 5-methylcytosine"
cgctggtgtggtttgtgagtaatccacaagtgatcacagtcagagcaacatctactccagcgaattcagggatgtctgtcccctgccccagtgactaatggcatttcaactgtcagattagg

SEQ ID NO: 13280 - DNA, 122 bp, Homo sapiens
  misc_feature (61)..(62): /note="This region represents a CpG dinucleotide"
  misc_feature (61)..(61): /note="Nucleotide may be methylated to form 5-methylcytosine"
atgatctcttccctaaaagtgttaccaatgaaagccatgctaacacttgttttcaagcaacggcatcaaaataaactggagaagtgggtgttgcaaaatactcatgaaaacgacgcctcctt

SEQ ID NO: 13281 - DNA, 122 bp, Homo sapiens
  misc_feature (61)..(62): /note="This region represents a CpG dinucleotide"
  misc_feature (61)..(61): /note="Nucleotide may be methylated to form 5-methylcytosine"
agctctggtctgatctaggtcaccattgggcttcctgtgctgtcatctgctgcctcttgccgcagattcctggtggtatgtctcagcctttgcatgaaacacaaccatgaaacactaagtgc

SEQ ID NO: 13282 - DNA, 122 bp, Homo sapiens
  misc_feature (61)..(62): /note="This region represents a CpG dinucleotide"
  misc_feature (61)..(61): /note="Nucleotide may be methylated to form 5-methylcytosine"
tgaaagaatcttcttccttccttgactcatgatgagttacctgcattccacatcccaaagcgggtcagtgtgtaatcaggacagagcttttacctgaagtaagccaagttacagatccaaaa

SEQ ID NO: 13283 - DNA, 122 bp, Homo sapiens
  misc_feature (61)..(62): /note="This region represents a CpG dinucleotide"
  misc_feature (61)..(61): /note="Nucleotide may be methylated to form 5-methylcytosine"
aaaggcctcacaatgctccatcaacggtgatctctgctgagcagaggcacaaagaggcaacgtgacatttggtgacagcaacagactaggacttggggttttgtccctaggtggcccctgca

SEQ ID NO: 13284 - DNA, 122 bp, Homo sapiens
  misc_feature (61)..(62): /note="This region represents a CpG dinucleotide"
  misc_feature (61)..(61): /note="Nucleotide may be methylated to form 5-methylcytosine"
ggaagtatactgtttactctttattaccttgaaacaatagggtattcactttttcttccccgtaactcagtttaacagtcttcatttgaaagaaacaaggcagaatacattactagtccttc

SEQ ID NO: 13285 - DNA, 122 bp, Homo sapiens
  misc_feature (61)..(62): /note="This region represents a CpG dinucleotide"
  misc_feature (61)..(61): /note="Nucleotide may be methylated to form 5-methylcytosine"
cacctccttctgccatgcagttcaaacacataccatacccagtgtggcaggctcactgaacgctgttgtcctgcagtgtttattgttgtacgtttgtgtgattatcacctgctttaacagat

SEQ ID NO: 13286 - DNA, 122 bp, Homo sapiens
  misc_feature (61)..(62): /note="This region represents a CpG dinucleotide"
  misc_feature (61)..(61): /note="Nucleotide may be methylated to form 5-methylcytosine"
ctctgccattatctgctgtgacatcttgggtacttaatccctcactcgagacctcagtgtcgtcttctgtaaactgaatggagtggtccaggtgatctttcaactctgtaattccaaggaag

SEQ ID NO: 13287 - DNA, 122 bp, Homo sapiens
  misc_feature (61)..(62): /note="This region represents a CpG dinucleotide"
  misc_feature (61)..(61): /note="Nucleotide may be methylated to form 5-methylcytosine"
attgtgtagcctactatgctcctagggtattgctcataggctgcaaatctgtacagcatgcgattgaactgaattttgtaggtagttgtaacaaaatggtatttgtgtgtatctacacatag

SEQ ID NO: 13288 - DNA, 122 bp, Homo sapiens
  misc_feature (61)..(62): /note="This region represents a CpG dinucleotide"
  misc_feature (61)..(61): /note="Nucleotide may be methylated to form 5-methylcytosine"
gccaggcccttctaggaatgttggtgctcctagcacccagaggtttccaggggagtggcccgagtacgtccccgcctaattctggagccgtcccttcggctgcgcagtggagcgccgacgtg

SEQ ID NO: 13289 - DNA, 122 bp, Homo sapiens
  misc_feature (61)..(62): /note="This region represents a CpG dinucleotide"
  misc_feature (61)..(61): /note="Nucleotide may be methylated to form 5-methylcytosine"
agaaaaaaaaatcagaagcctgcaattgtgtaacatgaaaatcttttctggaccagggcccgtcactgtgatttggcaacacaactggcacatctcttttctcatctcttgaaaaaaaccaa

SEQ ID NO: 13290 - DNA, 122 bp, Homo sapiens
  misc_feature (61)..(62): /note="This region represents a CpG dinucleotide"
  misc_feature (61)..(61): /note="Nucleotide may be methylated to form 5-methylcytosine"
cgtggtgtggcgggaacgggaggccgtggggtgggcggcagcacaggttgtggctgagctcggggccggggcagcggcgcttgcccttgggagggagaaaacaggcaaaggacaggatgtgg

SEQ ID NO: 13291 - DNA, 122 bp, Homo sapiens
  misc_feature (61)..(62): /note="This region represents a CpG dinucleotide"
  misc_feature (61)..(61): /note="Nucleotide may be methylated to form 5-methylcytosine"
ccggacactaagagtcaccctattatatatcagctaatattatgcggcactcactaccaacgagaatctgctaaggacttggcaggcatcatctcgttgattattcacagcagcctgtatta

SEQ ID NO: 13292 - DNA, 122 bp, Homo sapiens
  misc_feature (61)..(62): /note="This region represents a CpG dinucleotide"
  misc_feature (61)..(61): /note="Nucleotide may be methylated to form 5-methylcytosine"
tcacacccacttctgactcaggccccaacaagcccttgctagcccagcttccccctcccccgcccaggcaatacaggcttctgcaacccctgactctgggatgtgaggcagaatccagagac

SEQ ID NO: 13293 - DNA, 122 bp, Homo sapiens
  misc_feature (61)..(62): /note="This region represents a CpG dinucleotide"
  misc_feature (61)..(61): /note="Nucleotide may be methylated to form 5-methylcytosine"
tagggttctaaacaatggaagatcttactaaaacttcctgtaaatattcacacaacaaagcgtgcaccacaaacatcacctttataacatgactgaaagttcctgtgatataaaaatttggc

SEQ ID NO: 13294 - DNA, 122 bp, Homo sapiens
  misc_feature (61)..(62): /note="This region represents a CpG dinucleotide"
  misc_feature (61)..(61): /note="Nucleotide may be methylated to form 5-methylcytosine"
gtaatcctagcactactttgggaggctgaggtgggtggattagttgaggtcaggtgttcacgtaatgaggtcggattacttgaggccagattacttgattacttgaggccaggtcaacctgg

SEQ ID NO: 13295 - DNA, 122 bp, Homo sapiens
  misc_feature (61)..(62): /note="This region represents a CpG dinucleotide"
  misc_feature (61)..(61): /note="Nucleotide may be methylated to form 5-methylcytosine"
ccccaggaggggactccagggcaagttcagattgggagcagataccgtccgacgggcgggcgcttggagtttctggacctgcgggtcaccagggatgcggggtccggggatcccttgtcccc

SEQ ID NO: 13296 - DNA, 122 bp, Homo sapiens
  misc_feature (61)..(62): /note="This region represents a CpG dinucleotide"
  misc_feature (61)..(61): /note="Nucleotide may be methylated to form 5-methylcytosine"
gaaaaggggaagtaggatttagtctactgcgtatttccctgctctctacagataccttatcgctcccgtgaagtgctggcttcatgcattcctatcacaaggcaatcactcagggtaaacga

SEQ ID NO: 13297 - DNA, 122 bp, Homo sapiens
  misc_feature (61)..(62): /note="This region represents a CpG dinucleotide"
  misc_feature (61)..(61): /note="Nucleotide may be methylated to form 5-methylcytosine"
tctaatcttatctatctgtcttatctatcgacctaactgtccatctggttttgaatattccgtattccagccataagtagtagatcttttgcatccctggggttaatggttccttgagcaga

SEQ ID NO: 13298 - DNA, 122 bp, Homo sapiens
  misc_feature (61)..(62): /note="This region represents a CpG dinucleotide"
  misc_feature (61)..(61): /note="Nucleotide may be methylated to form 5-methylcytosine"
aacctcatcgatagagacagagcctggagtcagcagcctgcattcaaagcaaggcttcgccgcttcctgacgtagagcctggctgacaggctttatctcacagggctgttgagataatgaaa

SEQ ID NO: 13299 - DNA, 122 bp, Homo sapiens
  misc_feature (61)..(62): /note="This region represents a CpG dinucleotide"
  misc_feature (61)..(61): /note="Nucleotide may be methylated to form 5-methylcytosine"
gagctgaaatctggtacagaaagcccggtgcagaaagtgtttctgacagagagaacagcacgtccaaaggccctgaggtcggaaccaccttggcatatttgaagaactgggggaaggcccaa

SEQ ID NO: 13300 - DNA, 122 bp, Homo sapiens
  misc_feature (61)..(62): /note="This region represents a CpG dinucleotide"
  misc_feature (61)..(61): /note="Nucleotide may be methylated to form 5-methylcytosine"
tgttcagggctgcagggagccgtgatgccatcattgctctctggcctggatgacagagtacgtccctgactcaaaaaaaaaaaaaaggagaaaaaaaatctctatctcttcctcatgctaga

SEQ ID NO: 13301 - DNA, 122 bp, Homo sapiens
  misc_feature (61)..(62): /note="This region represents a CpG dinucleotide"
  misc_feature (61)..(61): /note="Nucleotide may be methylated to form 5-methylcytosine"
cagtctttaagccttgtgggccacttggtccgtcacagctactcagctctgctgttgaagcgtgaaagcagccacagacaatacaaaatgaatgtgtgtggctgtgttccaataaaactcga

SEQ ID NO: 13302 - DNA, 122 bp, Homo sapiens
  misc_feature (61)..(62): /note="This region represents a CpG dinucleotide"
  misc_feature (61)..(61): /note="Nucleotide may be methylated to form 5-methylcytosine"
tcatgcatacccacctcctcatgtcatccacatgatgtggcaaggtccctcagggattcacgtctcagagcaaacctcacaggaaagaggttacatcttcaagcccctgacagtcattcgct

SEQ ID NO: 13303 - DNA, 122 bp, Homo sapiens
  misc_feature (61)..(62): /note="This region represents a CpG dinucleotide"
  misc_feature (61)..(61): /note="Nucleotide may be methylated to form 5-methylcytosine"
ttttacaaaagtgagtcataggatttaaggtttctaaactatgctgtccagcactgcagccgctagccacatgtggtcatagagcactgagaatgtgactagtccaagttgagatgtgcttt

SEQ ID NO: 13304 - DNA, 122 bp, Homo sapiens
  misc_feature (61)..(62): /note="This region represents a CpG dinucleotide"
  misc_feature (61)..(61): /note="Nucleotide may be methylated to form 5-methylcytosine"
gcatttattttggggacaagtactgaagtcattgctgcccgaaagtgctccaggcgggcccgcctgtctctgctttcccaggagagccctgaggtgagggaaccagacccacaggcaggcct

SEQ ID NO: 13305 - DNA, 122 bp, Homo sapiens
  misc_feature (61)..(62): /note="This region represents a CpG dinucleotide"
  misc_feature (61)..(61): /note="Nucleotide may be methylated to form 5-methylcytosine"
ggacaggtgggaaagggccgggtgtctggtcctgctgccaggggacagtgcaggtgtgaccgtccgggcagagatgagtcaccctccacactgtcttgctgcccgtctccacgcctagtttt

SEQ ID NO: 13306 - DNA, 122 bp, Homo sapiens
  misc_feature (61)..(62): /note="This region represents a CpG dinucleotide"
  misc_feature (61)..(61): /note="Nucleotide may be methylated to form 5-methylcytosine"
gaattcagtattcaaagccctccgtgaatgggcttggtccttcctccctggcctctcttgcgtggctccatgctctgagctgcctactcgctgactcattcatttaatgtttattctttggt

SEQ ID NO: 13307 - DNA, 122 bp, Homo sapiens
  misc_feature (61)..(62): /note="This region represents a CpG dinucleotide"
  misc_feature (61)..(61): /note="Nucleotide may be methylated to form 5-methylcytosine"
tctctcccgggacatgaatcatccctttgtccagcgtttctaggctgtatcctctacctgcgcgtcactgcccagcccagagtcactgagcagacatctctgttacaggatcacaaacagat

SEQ ID NO: 13308 - DNA, 122 bp, Homo sapiens
  misc_feature (61)..(62): /note="This region represents a CpG dinucleotide"
  misc_feature (61)..(61): /note="Nucleotide may be methylated to form 5-methylcytosine"
gttttccttccagacccctcctgcagaatgccaaagcctgcccacttcccacactcacagcgccgcatgtatctaggagtagagactgtcacaggcttacattgctaccgtcagaaaagagt

SEQ ID NO: 13309 - DNA, 122 bp, Homo sapiens
  misc_feature (61)..(62): /note="This region represents a CpG dinucleotide"
  misc_feature (61)..(61): /note="Nucleotide may be methylated to form 5-methylcytosine"
tttttttcctgcatgaatagtgactatttgtataaatgtatagagggtaattcaaagctacgaaacttgatgaagtcactcccagagtgaatgtggatagaaaaaggaagaggtctaagtat

SEQ ID NO: 13310 - DNA, 122 bp, Homo sapiens
  misc_feature (61)..(62): /note="This region represents a CpG dinucleotide"
  misc_feature (61)..(61): /note="Nucleotide may be methylated to form 5-methylcytosine"
ctttggagaagtgtaagccaattgatttttcaaattccccacacacaaccccctccccagcgcttctcaaatatcagccagagacaagacagaaatggtacgtcgggtttttttttttcttc

SEQ ID NO: 13311 - DNA, 122 bp, Homo sapiens
  misc_feature (61)..(62): /note="This region represents a CpG dinucleotide"
  misc_feature (61)..(61): /note="Nucleotide may be methylated to form 5-methylcytosine"
agagggctgtgggttttgtgggcactccatttataactcttgacactcttgatgtgtcctcgttcctcttttcccactccacaaggacaagtcgtttcccttctcctcaaacctagatccct

SEQ ID NO: 13312 - DNA, 122 bp, Homo sapiens
  misc_feature (61)..(62): /note="This region represents a CpG dinucleotide"
  misc_feature (61)..(61): /note="Nucleotide may be methylated to form 5-methylcytosine"
ttccagggtagacttgggatcagagcatacaggctgccaggatccaggcctcacagtgggcgtgggctgctggggaggcccaacccctggggctctatggatctgcctccatttccccaaag

SEQ ID NO: 13313 - DNA, 122 bp, Homo sapiens
  misc_feature (61)..(62): /note="This region represents a CpG dinucleotide"
  misc_feature (61)..(61): /note="Nucleotide may be methylated to form 5-methylcytosine"
atcctgtgcaaagagtccaaggagttctcagacagttgctgggattttcgtcctgctcttcggctctttaagtccacatcctcatatggattctccttgggcagatctcctgcagaggagga

SEQ ID NO: 13314 - DNA, 122 bp, Homo sapiens
  misc_feature (61)..(62): /note="This region represents a CpG dinucleotide"
  misc_feature (61)..(61): /note="Nucleotide may be methylated to form 5-methylcytosine"
gtgtttcacctgtcagagccccatcccctggaataaaggaggcccagaaatctaacaccacggctatcacttttagggcctagacccctggtttattttgttatgtagattggatgagctat

SEQ ID NO: 13315 - DNA, 122 bp, Homo sapiens
  misc_feature (61)..(62): /note="This region represents a CpG dinucleotide"
  misc_feature (61)..(61): /note="Nucleotide may be methylated to form 5-methylcytosine"
gatatcatttacccatatgttattgcatgccagatattgtgtcagtctgagatacacagacgaatgatccctaccttgggtatcttgtttaacagactatggaagacagacatgtgaataag

SEQ ID NO: 13316 - DNA, 122 bp, Homo sapiens
  misc_feature (61)..(62): /note="This region represents a CpG dinucleotide"
  misc_feature (61)..(61): /note="Nucleotide may be methylated to form 5-methylcytosine"
ggtcttgcaagtgggacaacagtgtgttctgccagtttgtgtcatcctgccacacctgcacgtcaggcatggagacgtgtccacaaggagcccgtgtctggtgctgagtctcctccaggacg

SEQ ID NO: 13317 - DNA, 122 bp, Homo sapiens
  misc_feature (61)..(62): /note="This region represents a CpG dinucleotide"
  misc_feature (61)..(61): /note="Nucleotide may be methylated to form 5-methylcytosine"
catcaggatgtgttgccagttttagaatatcagccacagagaagagagtggctgtgacaacgaaggagcttacaaaatgtggacactgcagctatgtgtgtcctggaacctaactttctaaa

SEQ ID NO: 13318 - DNA, 122 bp, Homo sapiens
  misc_feature (61)..(62): /note="This region represents a CpG dinucleotide"
  misc_feature (61)..(61): /note="Nucleotide may be methylated to form 5-methylcytosine"
ttccccctcaagcattcatgcaattgttttccatccagacccaagtgctgagaatttcctcgtctcccctgctttttcttcatctccctgaggtttgctagctctttccctggcttctctgc

SEQ ID NO: 13319 - DNA, 122 bp, Homo sapiens
  misc_feature (61)..(62): /note="This region represents a CpG dinucleotide"
  misc_feature (61)..(61): /note="Nucleotide may be methylated to form 5-methylcytosine"
aaatgctttacacatattaacttaatcctcccagcaattcttgaggatatttactattaccgtcattcccatttcacaggtgaagaaggggactaagttaataagttgcccctgtcatgtaa

SEQ ID NO: 13320 - DNA, 122 bp, Homo sapiens
  misc_feature (61)..(62): /note="This region represents a CpG dinucleotide"
  misc_feature (61)..(61): /note="Nucleotide may be methylated to form 5-methylcytosine"
agtacctgagtcatatcatcagtctcttgaacaaaccggacaccagttcttgatctcattcgtttaataccctgtggatccccatagtccttgagaggtgaggtaggtggaaaatgatggag

SEQ ID NO: 13321 - DNA, 122 bp, Homo sapiens
  misc_feature (61)..(62): /note="This region represents a CpG dinucleotide"
  misc_feature (61)..(61): /note="Nucleotide may be methylated to form 5-methylcytosine"
tactgccagctgtttgatcacaggcaaaattactcgaagccttgagcctgttttctaaaacgaaggtaatatctaccttcagagtttactgtgaaactttgatgtcatcatgtttgtaaaag

SEQ ID NO: 13322 - DNA, 122 bp, Homo sapiens
  misc_feature (61)..(62): /note="This region represents a CpG dinucleotide"
  misc_feature (61)..(61): /note="Nucleotide may be methylated to form 5-methylcytosine"
tgccagtacatcatgccaaaggtgcagagccacagcactgcccagaaggccgtcttcatgcggttgtgctgggagcacaccaggcggatggcgccgtggatggtggtgttgttgcagaagaa

SEQ ID NO: 13323 - DNA, 122 bp, Homo sapiens
  misc_feature (61)..(62): /note="This region represents a CpG dinucleotide"
  misc_feature (61)..(61): /note="Nucleotide may be methylated to form 5-methylcytosine"
aatggtagccacggcaggcattttagtcttgggccagagattggagcatttgctttggagcgagggaaaggtccccacagccggaaatgggcagtgagtttggagagtgcctagcagtgggt

SEQ ID NO: 13324 - DNA, 122 bp, Homo sapiens
  misc_feature (61)..(62): /note="This region represents a CpG dinucleotide"
  misc_feature (61)..(61): /note="Nucleotide may be methylated to form 5-methylcytosine"
actggaatgtaagctccatgagaatgaggatgtgtcttattcactgctgtgtccctagcacgtggcacatggtttatactgtcaatacatgtgagtgaatttgagtagtcttcttttcacac

SEQ ID NO: 13325 - DNA, 122 bp, Homo sapiens
  misc_feature (61)..(62): /note="This region represents a CpG dinucleotide"
  misc_feature (61)..(61): /note="Nucleotide may be methylated to form 5-methylcytosine"
ctaccaataactaagtgcaggttaatttactgtagcaggagatggaaagcagagctcaggcgtatgatactgcctaagtaaatgttgacagaaagaaactgaagaggaagggaaaagcatga

SEQ ID NO: 13326 - DNA, 122 bp, Homo sapiens
  misc_feature (61)..(62): /note="This region represents a CpG dinucleotide"
  misc_feature (61)..(61): /note="Nucleotide may be methylated to form 5-methylcytosine"
ggcctgatgcgaatagggcaggcctgtgaacagagcaaagacgagtcacttaggaggggacgagagaggccagcggtaaactaatattaccagctcagggtttatttgtcaaagcctccttt

SEQ ID NO: 13327 - DNA, 122 bp, Homo sapiens
  misc_feature (61)..(62): /note="This region represents a CpG dinucleotide"
  misc_feature (61)..(61): /note="Nucleotide may be methylated to form 5-methylcytosine"
cttatcctgccttatatgtcaataaccttaatttaccttctgatcatctccttggctgcccgtgctgtctgaaaatcagccttttcttaaaatggcaaatagtggggaaaagtagcatctaa

SEQ ID NO: 13328 - DNA, 122 bp, Homo sapiens
  misc_feature (61)..(62): /note="This region represents a CpG dinucleotide"
  misc_feature (61)..(61): /note="Nucleotide may be methylated to form 5-methylcytosine"
ctgaagcagaaatacaaaaactaagaacagaaatgagcaaacaaacaaaaaagaaagaaacgaaatgagttgacaggactcaaaaaagaaacagaaaagagtacacagacattttcaaaata

SEQ ID NO: 13329 - DNA, 122 bp, Homo sapiens
  misc_feature (61)..(62): /note="This region represents a CpG dinucleotide"
  misc_feature (61)..(61): /note="Nucleotide may be methylated to form 5-methylcytosine"
ttataaaagaaaaagtaagcgtcttacaattctggaacctcctttcctcttgggagtctacgtatgggccccggcttcgtcctgaagcagtgtcaagagtcctgtgccgtctgctcatgccc

SEQ ID NO: 13330 - DNA, 122 bp, Homo sapiens
  misc_feature (61)..(62): /note="This region represents a CpG dinucleotide"
  misc_feature (61)..(61): /note="Nucleotide may be methylated to form 5-methylcytosine"
ccctcacttgcctgcaaccagctgagagcctccctggtgatgggtgttactgagcttaaacgatgtaaacaaacagaacggcacacaagttgtgcagggaagtatatttcctctaccttgtt

SEQ ID NO: 13331 - DNA, 122 bp, Homo sapiens
  misc_feature (61)..(62): /note="This region represents a CpG dinucleotide"
  misc_feature (61)..(61): /note="Nucleotide may be methylated to form 5-methylcytosine"
gacaaaagctctgggcaaatagaagggttatgcaactatctgagctatttctctggctgtcgccccaaagaggaacagcccagaaccttatctgcctgccctagctctcccaagctccctga

SEQ ID NO: 13332 - DNA, 122 bp, Homo sapiens
  misc_feature (61)..(62): /note="This region represents a CpG dinucleotide"
  misc_feature (61)..(61): /note="Nucleotide may be methylated to form 5-methylcytosine"
cttgcaggaggccaggcttcctgtcacattgaagctctgctgatagcccaaggccacgtgcggcgatggcacctgctgggtggggatgggtggcctggtgtcagtcctgcactgtcattgtc

SEQ ID NO: 13333 - DNA, 122 bp, Homo sapiens
  misc_feature (61)..(62): /note="This region represents a CpG dinucleotide"
  misc_feature (61)..(61): /note="Nucleotide may be methylated to form 5-methylcytosine"
tggatgaaactcagtgaggttcattcagaccgtgaatcactggcagacctgctagtccagcgcagatgacatgacctctggtgttacctaagagggatatgttttgcttaatcatgaactat

SEQ ID NO: 13334 - DNA, 122 bp, Homo sapiens
  misc_feature (61)..(62): /note="This region represents a CpG dinucleotide"
  misc_feature (61)..(61): /note="Nucleotide may be methylated to form 5-methylcytosine"
gatggccagtcacttgtgacctactttcagagctggcagttctgacttctagaacaaactcggaacaagcccatctacagctggttgactgagtttcctttgggctcctggcaccagaaaga

SEQ ID NO: 13335 - DNA, 122 bp, Homo sapiens
  misc_feature (61)..(62): /note="This region represents a CpG dinucleotide"
  misc_feature (61)..(61): /note="Nucleotide may be methylated to form 5-methylcytosine"
agtagtgatccccccattatccatggggatacattccaggatcctcggtttcttcctatacgactgcattgtataggccaggtagcttatacagcatggatacactggacaaagggatgatt

SEQ ID NO: 13336 - DNA, 122 bp, Homo sapiens
  misc_feature (61)..(62): /note="This region represents a CpG dinucleotide"
  misc_feature (61)..(61): /note="Nucleotide may be methylated to form 5-methylcytosine"
agtagttcagcaggtttaaagtcagaaagacctggaattgagtcccagttccgccatttacgagctgtgtgaccttgtgaccttgaatagggtactcacctctctgtacttcagttatttca

SEQ ID NO: 13337 - DNA, 122 bp, Homo sapiens
  misc_feature (61)..(62): /note="This region represents a CpG dinucleotide"
  misc_feature (61)..(61): /note="Nucleotide may be methylated to form 5-methylcytosine"
gtcactgagccagcagacagtctggcttcagagcttgtgttcccagctcctgtgggaagccgttctcactacccccaccagaaggttcgtgaaggtttatggaagaccagacaggctgggag

SEQ ID NO: 13338 - DNA, 122 bp, Homo sapiens
  misc_feature (61)..(62): /note="This region represents a CpG dinucleotide"
  misc_feature (61)..(61): /note="Nucleotide may be methylated to form 5-methylcytosine"
tttagcatgaagctgctttcttacatattttaagttcggcttaaaggtttttctgtacatcgtgaactgtaacaagtggaatataaccagaccgtagcttacacttgtgccatttaccaagt

SEQ ID NO: 13339 - DNA, 122 bp, Homo sapiens
  misc_feature (61)..(62): /note="This region represents a CpG dinucleotide"
  misc_feature (61)..(61): /note="Nucleotide may be methylated to form 5-methylcytosine"
aaacgaattgactacctattatgtttattgcctgcttcatttatttataatttcaacatacgattagtctttgattacatgattgggtcaggcagtgagctcataacctaaataaagaacat

SEQ ID NO: 13340 - DNA, 122 bp, Homo sapiens
  misc_feature (61)..(62): /note="This region represents a CpG dinucleotide"
  misc_feature (61)..(61): /note="Nucleotide may be methylated to form 5-methylcytosine"
ttcctcagtgtctaatagtgttagaatagctctgtaatgtgaactgttactttttcctcccgctgggcttgttctaagacaggaagcttatttgaaaggtagaaggaaatgaagttctgggg

SEQ ID NO: 13341 - DNA, 122 bp, Homo sapiens
  misc_feature (61)..(62): /note="This region represents a CpG dinucleotide"
  misc_feature (61)..(61): /note="Nucleotide may be methylated to form 5-methylcytosine"
tgacagtttacacctctccctctaaatcaagtcacctgtgcagctgtgatttaaagagttcggatgattttctgagctgcactagccctggccctttcctctcccgaaatgttcccaaacat

SEQ ID NO: 13342 - DNA, 122 bp, Homo sapiens
  misc_feature (61)..(62): /note="This region represents a CpG dinucleotide"
  misc_feature (61)..(61): /note="Nucleotide may be methylated to form 5-methylcytosine"
tcacaatgaatgagaaatggattctgcccacaagtaacttagcctggggtggggacatggcgcacctaattagctgggttgaggctgacatttctgttaggaacttgaagtacaggtatttt

SEQ ID NO: 13343 - DNA, 122 bp, Homo sapiens
  misc_feature (61)..(62): /note="This region represents a CpG dinucleotide"
  misc_feature (61)..(61): /note="Nucleotide may be methylated to form 5-methylcytosine"
taccatgaatccctctaatcttctcctgagttcctcaaaccgctgtcatactgattaatacgtaacctactgacactgaaaaggacactgctttgtttctgaatcatgaagttttgctgatt

SEQ ID NO: 13344 - DNA, 122 bp, Homo sapiens
  misc_feature (61)..(62): /note="This region represents a CpG dinucleotide"
  misc_feature (61)..(61): /note="Nucleotide may be methylated to form 5-methylcytosine"
aatacttaatattgtgaggaattcatacctccacgtaattagaaatcatttactctattgcgaatgttttactaatttgtgactacctctataatcataattgaaacaaaaataaatatagg

SEQ ID NO: 13345 - DNA, 122 bp, Homo sapiens
  misc_feature (61)..(62): /note="This region represents a CpG dinucleotide"
  misc_feature (61)..(61): /note="Nucleotide may be methylated to form 5-methylcytosine"
agagcttggtagtaagcatgacagtaggtaggtgcggcaggaagtgaatcagggaggtggcgatatgtcaccaagccctttgtgtatgctgctccctggacatactcacattgctgcaggaa

SEQ ID NO: 13346 - DNA, 122 bp, Homo sapiens
  misc_feature (61)..(62): /note="This region represents a CpG dinucleotide"
  misc_feature (61)..(61): /note="Nucleotide may be methylated to form 5-methylcytosine"
acattgaccttgatcacctggctgaggtagtgtttctcaggtttctcttctgtaaagatacgttttaccccactttccatacttactcttgggaaggaagtcactatgcatggtccacacat

SEQ ID NO: 13347 - DNA, 122 bp, Homo sapiens
  misc_feature (61)..(62): /note="This region represents a CpG dinucleotide"
  misc_feature (61)..(61): /note="Nucleotide may be methylated to form 5-methylcytosine"
ctgagctttccccaaaaggtcaacagaagcaaagtctggcctgagcaaacagactttgatcgatagctccacaaccacagccccctccagccggcctggctctaccaataccaaggggtttc

SEQ ID NO: 13348 - DNA, 122 bp, Homo sapiens
  misc_feature (61)..(62): /note="This region represents a CpG dinucleotide"
  misc_feature (61)..(61): /note="Nucleotide may be methylated to form 5-methylcytosine"
gttaccttgtgatgatcccacaaccgagacgcatgtctcagaatgcatggatgcatgggacgcgtgactgtacgtgttacagacgtgtttcggcgtgaggctcggcccctgctcctttagga

SEQ ID NO: 13349 - DNA, 122 bp, Homo sapiens
  misc_feature (61)..(62): /note="This region represents a CpG dinucleotide"
  misc_feature (61)..(61): /note="Nucleotide may be methylated to form 5-methylcytosine"
atttcccaatgtacttcatgatctggttaagcgctttcatcaggtgctgaaagactaacacgggctttaatctccaaggcttgaagtcaccagaatggccagtcacaggcagtgaggaagcc

SEQ ID NO: 13350 - DNA, 122 bp, Homo sapiens
  misc_feature (61)..(62): /note="This region represents a CpG dinucleotide"
  misc_feature (61)..(61): /note="Nucleotide may be methylated to form 5-methylcytosine"
gcagttgctataaaggtacaagctgttatcatcacatctaaccagtcaaggggccttgtccgtcttccttcaacttgtcttcacatttccttttccttcctgctgccgctgtctcagtcagg

SEQ ID NO: 13351 - DNA, 122 bp, Homo sapiens
  misc_feature (61)..(62): /note="This region represents a CpG dinucleotide"
  misc_feature (61)..(61): /note="Nucleotide may be methylated to form 5-methylcytosine"
aaccacacaagttaattggtaggtttttcttttgcacttttcattaagatacattgggaacgagcaggtagacaaagccagagcctggaggcttgcaagagattggaaatgtgtgacatcaa

SEQ ID NO: 13352 - DNA, 122 bp, Homo sapiens
  misc_feature (61)..(62): /note="This region represents a CpG dinucleotide"
  misc_feature (61)..(61): /note="Nucleotide may be methylated to form 5-methylcytosine"
tgtcctgtggctttctgttttgccatggaaataccttcaaggacaagaaggcccttgtcacgcctaactcgaagacaacttgctcttggtacctctcacccattttctttttgtgaaaacag

SEQ ID NO: 13353 - DNA, 122 bp, Homo sapiens
  misc_feature (61)..(62): /note="This region represents a CpG dinucleotide"
  misc_feature (61)..(61): /note="Nucleotide may be methylated to form 5-methylcytosine"
ttatttaatccctacagcaatcctgctaatactgtccccattgtacagatggggacaatgcgaatccaagagaataacttctccaagaacacatggctaaatcaaagtaaagggattgaaaa

SEQ ID NO: 13354 - DNA, 122 bp, Homo sapiens
  misc_feature (61)..(62): /note="This region represents a CpG dinucleotide"
  misc_feature (61)..(61): /note="Nucleotide may be methylated to form 5-methylcytosine"
aggccccaggagtcagttttagtttccaccctgtcccaaggcaggggacagaaagaaccacgcctttatacacaaacatcctggacagatcaaagtagagtcatagattttatttaattaaa

SEQ ID NO: 13355 - DNA, 122 bp, Homo sapiens
  misc_feature (61)..(62): /note="This region represents a CpG dinucleotide"
  misc_feature (61)..(61): /note="Nucleotide may be methylated to form 5-methylcytosine"
cccacatctctcccaaatatgactgcataagggctcatgctatgggccagattgacgcttcgtaattggtattagtcatatgtttatgttgtattttttaaaaagtcttaactcctttaaat

SEQ ID NO: 13356 - DNA, 122 bp, Homo sapiens
  misc_feature (61)..(62): /note="This region represents a CpG dinucleotide"
  misc_feature (61)..(61): /note="Nucleotide may be methylated to form 5-methylcytosine"
tctgagaggtccttcgtaccgcaggagaggcagctctcacctgaaggcctccctggacaccggtctcaactttgtgtgttaccagttatggagaattatttttagtgagttacactctgtta

SEQ ID NO: 13357 - DNA, 122 bp, Homo sapiens
  misc_feature (61)..(62): /note="This region represents a CpG dinucleotide"
  misc_feature (61)..(61): /note="Nucleotide may be methylated to form 5-methylcytosine"
tctgctggaacaccactgtgacatggcagacatgagcctcagcttcccttatctacaagtcgtccctgagctgtgcttattgatggaaactacctggcacaggtgccacaggacaatgatca

SEQ ID NO: 13358 - DNA, 122 bp, Homo sapiens
  misc_feature (61)..(62): /note="This region represents a CpG dinucleotide"
  misc_feature (61)..(61): /note="Nucleotide may be methylated to form 5-methylcytosine"
acttcctagaaaccaccataagcaacttattatgtacctttccccatctgtgtgtgtgagcgtgtagaattctcttatttcagcctggagagcattagtctgatctgactgcaaaagttttg

SEQ ID NO: 13359 - DNA, 122 bp, Homo sapiens
  misc_feature (61)..(62): /note="This region represents a CpG dinucleotide"
  misc_feature (61)..(61): /note="Nucleotide may be methylated to form 5-methylcytosine"
gcatggccactataaataacctgaggactttggaaggctgactggggcacccagtcaccacgcctaacaaagataatcaaaagcaactaggctgagcatggtggctcacacctgtaatccca

SEQ ID NO: 13360 - DNA, 122 bp, Homo sapiens
  misc_feature (61)..(62): /note="This region represents a CpG dinucleotide"
  misc_feature (61)..(61): /note="Nucleotide may be methylated to form 5-methylcytosine"
ggttggcatcgtttgtcattctctttatgttctcatatgtgagatcgtgggggtgaaatacgcatctcactgtgggctgtggtcggaagtttgaaaaacaccctggcattttgcctgtcttc

SEQ ID NO: 13361 - DNA, 122 bp, Homo sapiens
  misc_feature (61)..(62): /note="This region represents a CpG dinucleotide"
  misc_feature (61)..(61): /note="Nucleotide may be methylated to form 5-methylcytosine"
ttcttttaaagcaattaacttgcagagatttgcaggagattgaaatgaacaccacagaaacgaagcaccctgccccaagcacaggttcttggaatgcctgtagagaagtgaggactgcctgc

SEQ ID NO: 13362 - DNA, 122 bp, Homo sapiens
  misc_feature (61)..(62): /note="This region represents a CpG dinucleotide"
  misc_feature (61)..(61): /note="Nucleotide may be methylated to form 5-methylcytosine"
gagcatgccaccacgccccactaactgttgcattagtctttttctatagagacggggtctcgctatgttgtccaggctggtctccaacagggagggatatttctttttggaagatttttttt

SEQ ID NO: 13363 - DNA, 122 bp, Homo sapiens
  misc_feature (61)..(62): /note="This region represents a CpG dinucleotide"
  misc_feature (61)..(61): /note="Nucleotide may be methylated to form 5-methylcytosine"
agggaaccctgggcctgctcacccagccgcaggtcaagcagcacaaagaaagggccagggcgggtcttgttttcagcttctgtggctcagtaaccccacccactggtaaactggccaactga

SEQ ID NO: 13364 - DNA, 122 bp, Homo sapiens
  misc_feature (61)..(62): /note="This region represents a CpG dinucleotide"
  misc_feature (61)..(61): /note="Nucleotide may be methylated to form 5-methylcytosine"
aagagcctggagagtaagaggtgttatcttcataactctcacagggcccacctcagcacccggcacaaaacaggtattcagccagtgtttgtagaaatgatgacctaagctgaagaaccggg

SEQ ID NO: 13365 - DNA, 122 bp, Homo sapiens
  misc_feature (61)..(62): /note="This region represents a CpG dinucleotide"
  misc_feature (61)..(61): /note="Nucleotide may be methylated to form 5-methylcytosine"
tttgtgctacctctcgtctgtggatctaggcgtgaggaggtagaagggagcccctggtcacgcccctgtgccgccttctagtggcatggcctttaagcagcaaagaatgtgacttgtaagca

SEQ ID NO: 13366 - DNA, 122 bp, Homo sapiens
  misc_feature (61)..(62): /note="This region represents a CpG dinucleotide"
  misc_feature (61)..(61): /note="Nucleotide may be methylated to form 5-methylcytosine"
tccctctcaatttacatgaccatgaggaaactgaaacctagcgaagttaaatgacttgcccggggacggacagctagctagttcctgcttgaactgaggaccatctatttggttaccgggag

SEQ ID NO: 13367 - DNA, 122 bp, Homo sapiens
  misc_feature (61)..(62): /note="This region represents a CpG dinucleotide"
  misc_feature (61)..(61): /note="Nucleotide may be methylated to form 5-methylcytosine"
atttgcaagcctagcctccactggggagaagtctgttctcagagtgaggagctctgcacgcgttggctaaaagggtggcgtggctttgtgaaattgagagctggaggagcccagcagaatga

SEQ ID NO: 13368 - DNA, 122 bp, Homo sapiens
  misc_feature (61)..(62): /note="This region represents a CpG dinucleotide"
  misc_feature (61)..(61): /note="Nucleotide may be methylated to form 5-methylcytosine"
cccgcttcggcctcctaaaatgctgggattacagtcgtgagccaccatgcccagccaatacgtttctttttgataacttgaaatgagatttgcataaggtgaaaagtgagtggaaattgtag

SEQ ID NO: 13369 - DNA, 122 bp, Homo sapiens
  misc_feature (61)..(62): /note="This region represents a CpG dinucleotide"
  misc_feature (61)..(61): /note="Nucleotide may be methylated to form 5-methylcytosine"
attcatcataaaattgaacccattcaaaatgtcctaacctaaagcactttgttagttatccgccttaaaaggcattgattcatctctgcatgtgttggagtataaatggcaagcctcagaga

SEQ ID NO: 13370 - DNA, 122 bp, Homo sapiens
  misc_feature (61)..(62): /note="This region represents a CpG dinucleotide"
  misc_feature (61)..(61): /note="Nucleotide may be methylated to form 5-methylcytosine"
ttttaaaaaagcaatttgctgtcaagaaccaagcagaaaacaaacagaggcatgccagaccgagtgtcagagtctctgaattggatctctgatgtgacccagagcctgggcctgtacaaacc

SEQ ID NO: 13371 - DNA, 122 bp, Homo sapiens
  misc_feature (61)..(62): /note="This region represents a CpG dinucleotide"
  misc_feature (61)..(61): /note="Nucleotide may be methylated to form 5-methylcytosine"
gtaaaggtgagacatattatcatctactcctagaactccttagctttatggagagctcagcgtttgaattcaagcagagataaatgagtgaggcagagaagaggagagttgaggaagtcagt

SEQ ID NO: 13372 - DNA, 122 bp, Homo sapiens
  misc_feature (61)..(62): /note="This region represents a CpG dinucleotide"
  misc_feature (61)..(61): /note="Nucleotide may be methylated to form 5-methylcytosine"
gatgactatgattaagctttttaaagtaatgaaccagattaacaaatcactataccatcacgaactaatcatcatatacagaataatttcataatctgcccactcctttttgcttttacata

SEQ ID NO: 13373 - DNA, 122 bp, Homo sapiens
  misc_feature (61)..(62): /note="This region represents a CpG dinucleotide"
  misc_feature (61)..(61): /note="Nucleotide may be methylated to form 5-methylcytosine"
tacaggcatgagccactgcacccagcctgttctttttattcttaaatgcatccaggaacacgctcccaggcactatgcccagcgacttcttgccagcattttattacaggccacttctgact

SEQ ID NO: 13374 - DNA, 122 bp, Homo sapiens
  misc_feature (61)..(62): /note="This region represents a CpG dinucleotide"
  misc_feature (61)..(61): /note="Nucleotide may be methylated to form 5-methylcytosine"
gactgagatgtaagggggttgattaggtcactcaagcaagatcacaccatttggatggggcgaagttaaactttagattccgcatctcagactggtgtgccctgctgacgctactcaggaaa

SEQ ID NO: 13375 - DNA, 122 bp, Homo sapiens
  misc_feature (61)..(62): /note="This region represents a CpG dinucleotide"
  misc_feature (61)..(61): /note="Nucleotide may be methylated to form 5-methylcytosine"
cgggagattccttgatgttccttgctgttcatgctccatgtttctgttcagtggagcatccgattaccgatgtggaccaggctctgttcggctccctcctcacactttattgctcatgattt

SEQ ID NO: 13376 - DNA, 122 bp, Homo sapiens
  misc_feature (61)..(62): /note="This region represents a CpG dinucleotide"
  misc_feature (61)..(61): /note="Nucleotide may be methylated to form 5-methylcytosine"
gtccatttcctcttccagaattggccaaatcacgccattgttgacagcccagctaggcagcgcctgatgacatttttggccctggaaatgacaggtgttgatgaccctagccttcctctggg

SEQ ID NO: 13377 - DNA, 122 bp, Homo sapiens
  misc_feature (61)..(62): /note="This region represents a CpG dinucleotide"
  misc_feature (61)..(61): /note="Nucleotide may be methylated to form 5-methylcytosine"
tccagtgaaatattgatcacctgtgtgtttcactccctaaattcaccataactgtgcctacgtggcttgtttcaaatacacatcttaccctccagtttgaagtttaaatcattgtggtaggc

SEQ ID NO: 13378 - DNA, 122 bp, Homo sapiens
  misc_feature (61)..(62): /note="This region represents a CpG dinucleotide"
  misc_feature (61)..(61): /note="Nucleotide may be methylated to form 5-methylcytosine"
tgcacacacaggaacacagaggcccacttacatataaatgcagatgcgtgcctgcatcaacgagcgggagcacattgggcaaatgcacgtgtacatgccctacgtgaacacaaacccgtgga

SEQ ID NO: 13379 - DNA, 122 bp, Homo sapiens
  misc_feature (61)..(62): /note="This region represents a CpG dinucleotide"
  misc_feature (61)..(61): /note="Nucleotide may be methylated to form 5-methylcytosine"
tccaactgctgctgagggctcccgggacagctacaaggcaccacaatgacctagaggcttcggaaagttgcacaacaggatatgaggccattcctgggagtcactgagtttgggttctgttt

SEQ ID NO: 13380 - DNA, 122 bp, Homo sapiens
  misc_feature (61)..(62): /note="This region represents a CpG dinucleotide"
  misc_feature (61)..(61): /note="Nucleotide may be methylated to form 5-methylcytosine"
gaaaatgagacaactgatccttctagctatttgacaggtcttgctcaaggtcaaagaatacgtgacttgcagtccaatgttatttctaaatgtaagctcttcagctggttaagctaaactgc

SEQ ID NO: 13381 - DNA, 122 bp, Homo sapiens
  misc_feature (61)..(62): /note="This region represents a CpG dinucleotide"
  misc_feature (61)..(61): /note="Nucleotide may be methylated to form 5-methylcytosine"
gaccctgctaatgggtccacgagggtggcaggctaaggaatgctaccctctatttactaacgagcaaagcgatgctgaaatacagtgaagaagctgtccagtgtcacatggtgaagagatgg

SEQ ID NO: 13382 - DNA, 122 bp, Homo sapiens
  misc_feature (61)..(62): /note="This region represents a CpG dinucleotide"
  misc_feature (61)..(61): /note="Nucleotide may be methylated to form 5-methylcytosine"
tgttacagcccatatttcttgaccttatttcttcctctttctttgtattttcctttatttcgttgcaaccccctgagaagtgggcttttgaaaggtaaattttttgagatcttgcatatctg

SEQ ID NO: 13383 - DNA, 122 bp, Homo sapiens
  misc_feature (61)..(62): /note="This region represents a CpG dinucleotide"
  misc_feature (61)..(61): /note="Nucleotide may be methylated to form 5-methylcytosine"
gagaaaacactggtgagattcaaggaaagtccgtcgtttagttagtcccacgacaacgtccgtttctcagctctggggaccgtagcgtggttatgtgagttcacgttagcggaaggcgggtg

SEQ ID NO: 13384 - DNA, 122 bp, Homo sapiens
  misc_feature (61)..(62): /note="This region represents a CpG dinucleotide"
  misc_feature (61)..(61): /note="Nucleotide may be methylated to form 5-methylcytosine"
tttgcataaaaactggcctgtgggctctgtgtgcagccaagtagccttcttatcctgcttcgtgcccatgaaaggttaggggatcagggcaggaactggaaagcttttcttgtaaattaagg

SEQ ID NO: 13385 - DNA, 122 bp, Homo sapiens
  misc_feature (61)..(62): /note="This region represents a CpG dinucleotide"
  misc_feature (61)..(61): /note="Nucleotide may be methylated to form 5-methylcytosine"
ttttaagtggtttacgacacacaggaaagaagtcatacttataatttcaaaatcaggcaacgctgcaattcaaattgtatgggaaaaggttttatctaaaagcagagctcacagggctaaga

SEQ ID NO: 13386 - DNA, 122 bp, Homo sapiens
  misc_feature (61)..(62): /note="This region represents a CpG dinucleotide"
  misc_feature (61)..(61): /note="Nucleotide may be methylated to form 5-methylcytosine"
tcttcgtgattatctgtattttctcaattctaacatgcatgaattttgtagttagaaattcgagttggcatttcacactacagggtatttagacctgctcatggcaaaggaggcagttttta

SEQ ID NO: 13387 - DNA, 122 bp, Homo sapiens
  misc_feature (61)..(62): /note="This region represents a CpG dinucleotide"
  misc_feature (61)..(61): /note="Nucleotide may be methylated to form 5-methylcytosine"
cttctgccccccaccgggggagctgtgtaggtttctcctttggaaaatttattgttggggcgattgctattattgccggctgtaagggaagataagacacaaaaatcctttgtctttgtgca

SEQ ID NO: 13388 - DNA, 122 bp, Homo sapiens
  misc_feature (61)..(62): /note="This region represents a CpG dinucleotide"
  misc_feature (61)..(61): /note="Nucleotide may be methylated to form 5-methylcytosine"
cagatgctgaggtcgtcatgattttattgaatcacacttcagttattttctctccactctcgttcttgcagctgtgttagtaatcattaagtcattttatgatcttgctggggttccacaca

SEQ ID NO: 13389 - DNA, 122 bp, Homo sapiens
  misc_feature (61)..(62): /note="This region represents a CpG dinucleotide"
  misc_feature (61)..(61): /note="Nucleotide may be methylated to form 5-methylcytosine"
ttaatatacaagcctaatataaacttaatacgctctccttccccgcccgaacagcagcaacgtgctgcaacagccaggaaatccttgcagtaaaaagcgatggaaggaacttgcccaccaca

SEQ ID NO: 13390 - DNA, 122 bp, Homo sapiens
  misc_feature (61)..(62): /note="This region represents a CpG dinucleotide"
  misc_feature (61)..(61): /note="Nucleotide may be methylated to form 5-methylcytosine"
caaacagaacaacaaacacaagagttgagcagcggggtgggggtggggggttgccatctacgccgttttagtgtgagggacactgggaacgatgcccagaggctgctctcctcccagcctca

SEQ ID NO: 13391 - DNA, 122 bp, Homo sapiens
  misc_feature (61)..(62): /note="This region represents a CpG dinucleotide"
  misc_feature (61)..(61): /note="Nucleotide may be methylated to form 5-methylcytosine"
tgagcccaggagttggaggttgtagtgtgctaggatagcgccattgcactccggcttgggcgacagagcgaggctgtttctgaatgaatgaacgaatacataagtaaataagaaaataggta

SEQ ID NO: 13392 - DNA, 122 bp, Homo sapiens
  misc_feature (61)..(62): /note="This region represents a CpG dinucleotide"
  misc_feature (61)..(61): /note="Nucleotide may be methylated to form 5-methylcytosine"
atgacctatggccagtaaaagaaacactggaatgagtcagcaggacaagtctcacagctccgtagatctgggaattccttacactgccaagaggtagaacagagaaacctcataatacatgg

SEQ ID NO: 13393 - DNA, 122 bp, Homo sapiens
  misc_feature (61)..(62): /note="This region represents a CpG dinucleotide"
  misc_feature (61)..(61): /note="Nucleotide may be methylated to form 5-methylcytosine"
gggggatgacataatcctcacgtgatcaggagctgacgtgaaccgaagtccttatattcccgggcttctttctcctctgggtaccagctccttactgccctgcagacaagcgtgccgtgcgt

SEQ ID NO: 13394 - DNA, 122 bp, Homo sapiens
  misc_feature (61)..(62): /note="This region represents a CpG dinucleotide"
  misc_feature (61)..(61): /note="Nucleotide may be methylated to form 5-methylcytosine"
ttttttctcctgcttctcagaaggcctctgctgagcacgatctctgtgggggtaggagctcggcatgtgtgtattgacagacaggctcatgccctttctcgtggctattttcagctctctgg

SEQ ID NO: 13395 - DNA, 122 bp, Homo sapiens
  misc_feature (61)..(62): /note="This region represents a CpG dinucleotide"
  misc_feature (61)..(61): /note="Nucleotide may be methylated to form 5-methylcytosine"
gcaagtcatcaatggggtatggagattttccaggtgggtgtggttgaaggcagggaagaacgagtttaggagcacattacaagaggaaggtaactgttaagtccaggctgagcaggaatgta

SEQ ID NO: 13396 - DNA, 122 bp, Homo sapiens
  misc_feature (61)..(62): /note="This region represents a CpG dinucleotide"
  misc_feature (61)..(61): /note="Nucleotide may be methylated to form 5-methylcytosine"
cttcgttctcatactgctctgagctagagaccttattgcacggcatggtcattgtggactcgcttttcctctccccagctgcactgtgactcatatagtaattgccaggataatctctcgtt

SEQ ID NO: 13397 - DNA, 122 bp, Homo sapiens
  misc_feature (61)..(62): /note="This region represents a CpG dinucleotide"
  misc_feature (61)..(61): /note="Nucleotide may be methylated to form 5-methylcytosine"
tgacgtgcttgtctggattggttttattttagtgcaggcaccacgtcgtctttttatatacgtgtgaacgtatatatgtaaacacacgtatgatgttggtgagttcatgttggtggtatttt

SEQ ID NO: 13398 - DNA, 122 bp, Homo sapiens
  misc_feature (61)..(62): /note="This region represents a CpG dinucleotide"
  misc_feature (61)..(61): /note="Nucleotide may be methylated to form 5-methylcytosine"
ggcaccatgtttaggggttggacgcacagccacctttacccccaccccccttcaaacccacgttaataattgcagccctagtcacagcactcggggttgctggaaagacttagggagataca

SEQ ID NO: 13399 - DNA, 122 bp, Homo sapiens
  misc_feature (61)..(62): /note="This region represents a CpG dinucleotide"
  misc_feature (61)..(61): /note="Nucleotide may be methylated to form 5-methylcytosine"
ccccagaactcgctgtgttaagtagattctggttggatatagaaacacaggcaccccaggcggaatgcagatacgcctcaacatgtggattaagtaagagccaggaagcagagtaatgaagc

SEQ ID NO: 13400 - DNA, 122 bp, Homo sapiens
  misc_feature (61)..(62): /note="This region represents a CpG dinucleotide"
  misc_feature (61)..(61): /note="Nucleotide may be methylated to form 5-methylcytosine"
aactgtgttctttcctttgagctaagtccttacacaacacctctatgaaaatatatatcacgctgatttgtaatgtgtgtttagctgtcagtcttcttcagcaacttccttcaaaactgagg

SEQ ID NO: 13401 - DNA, 122 bp, Homo sapiens
  misc_feature (61)..(62): /note="This region represents a CpG dinucleotide"
  misc_feature (61)..(61): /note="Nucleotide may be methylated to form 5-methylcytosine"
cgcagatgcgtagaaaggcaaagacacaaaaggtccggctccgtggcggggcgcgacctccgtacttggaattggacttggagcagctgagcccagccagcctggcccgcgcggagacacag

SEQ ID NO: 13402 - DNA, 122 bp, Homo sapiens
  misc_feature (61)..(62): /note="This region represents a CpG dinucleotide"
  misc_feature (61)..(61): /note="Nucleotide may be methylated to form 5-methylcytosine"
aaaaaattgagattcaaatgatggcaagctgtttcatccaagaacatgcatgtcagattacgttttccaaagatgctgcaacaatatttcctatcccacaatgtggccttgatactcctctc

SEQ ID NO: 13403 - DNA, 122 bp, Homo sapiens
  misc_feature (61)..(62): /note="This region represents a CpG dinucleotide"
  misc_feature (61)..(61): /note="Nucleotide may be methylated to form 5-methylcytosine"
ctgtttgacaaatgtcacgtaagaagaagcccatgatactgaggatggtataggaggggccgtatccaggttgaaggagtcaaatatgacagctgccgtgagaattacaatcagaaaaccat

SEQ ID NO: 13404 - DNA, 122 bp, Homo sapiens
  misc_feature (61)..(62): /note="This region represents a CpG dinucleotide"
  misc_feature (61)..(61): /note="Nucleotide may be methylated to form 5-methylcytosine"
tatgttgatgattttttttttaatcacagcagcccccagtttagcggactgatttactcccggtattggtaaatatgatcacgtgggccgcgcgaccaatggtggaggctgcagcctgcgaa

SEQ ID NO: 13405 - DNA, 122 bp, Homo sapiens
  misc_feature (61)..(62): /note="This region represents a CpG dinucleotide"
  misc_feature (61)..(61): /note="Nucleotide may be methylated to form 5-methylcytosine"
tggcagtacttgcattgttttcagaatctagtgcccaggttttcctactgtttttcttgccgtctttaagacagaatttctatttacatccttgtcgatttttgtatccctaaataaattat

SEQ ID NO: 13406 - DNA, 122 bp, Homo sapiens
  misc_feature (61)..(62): /note="This region represents a CpG dinucleotide"
  misc_feature (61)..(61): /note="Nucleotide may be methylated to form 5-methylcytosine"
tcaagcaaaccattcttataagcgcacactctcacgaataaaaggagagtgtctcatggacgatactggcaccctataaaagtgcaattcagccttatctaatctggtgcgtgtttcatcac

SEQ ID NO: 13407 - DNA, 122 bp, Homo sapiens
  misc_feature (61)..(62): /note="This region represents a CpG dinucleotide"
  misc_feature (61)..(61): /note="Nucleotide may be methylated to form 5-methylcytosine"
gtttccatctggtaagcaatggagttggagttcaagctcagaatccaagctctgagtcagcgattttgccagctgctgtggctcatcgtgttgtcattaaattcgatgagtctaccattggc

SEQ ID NO: 13408 - DNA, 122 bp, Homo sapiens
  misc_feature (61)..(62): /note="This region represents a CpG dinucleotide"
  misc_feature (61)..(61): /note="Nucleotide may be methylated to form 5-methylcytosine"
tttctaaacatggaaccagttctgccactggcttctgtgcgacactggtgaacttgctcacgtgtttttgggtttcaattcccctgccacattactttgtttaaaagaaccatgatcctaca

SEQ ID NO: 13409 - DNA, 122 bp, Homo sapiens
  misc_feature (61)..(62): /note="This region represents a CpG dinucleotide"
  misc_feature (61)..(61): /note="Nucleotide may be methylated to form 5-methylcytosine"
attcatcatgcaatcctggagaaaagtaagcaatgaacatactgtacaaattaattctttcgaccagcctatgtttgtgtaagaagtttgttttttgaatggaaaccactgctactagctgt

SEQ ID NO: 13410 - DNA, 122 bp, Homo sapiens
  misc_feature (61)..(62): /note="This region represents a CpG dinucleotide"
  misc_feature (61)..(61): /note="Nucleotide may be methylated to form 5-methylcytosine"
gcacacagttgttttcagagcagcaaggccacttcggcaacacccagagcttagggaggacgtggtcaaccagcctttactggggcctgggagactccccactgacacaaactcccttctgg

SEQ ID NO: 13411 - DNA, 122 bp, Homo sapiens
  misc_feature (61)..(62): /note="This region represents a CpG dinucleotide"
  misc_feature (61)..(61): /note="Nucleotide may be methylated to form 5-methylcytosine"
acctcctcttgtcgtttattgtatgagtgtacccctgtgccttatttacttttcctttcacggttgggtacttcccccattgcttagactttttggcccttaaacagtgctgggacaaacat

SEQ ID NO: 13412 - DNA, 122 bp, Homo sapiens
  misc_feature (61)..(62): /note="This region represents a CpG dinucleotide"
  misc_feature (61)..(61): /note="Nucleotide may be methylated to form 5-methylcytosine"
gcagcccagtgtcattgaccagtggccattctgtaaacaaggactgggcttcagcttcagcgtgctgcatgcactcccgcacccagacaccatctccaaaggcaacagccacggatttctgc

SEQ ID NO: 13413 - DNA, 122 bp, Homo sapiens
  misc_feature (61)..(62): /note="This region represents a CpG dinucleotide"
  misc_feature (61)..(61): /note="Nucleotide may be methylated to form 5-methylcytosine"
taagcccatggaggcagagagctttcttattagattttgtcatgatcctctaaagtaccacggagttgaatgtcaagttatattaaggaagtgaaatcaatagaatttagtcatggagttga

SEQ ID NO: 13414 - DNA, 122 bp, Homo sapiens
  misc_feature (61)..(62): /note="This region represents a CpG dinucleotide"
  misc_feature (61)..(61): /note="Nucleotide may be methylated to form 5-methylcytosine"
ggttaaatgtcttttagtcttccagctttaaaaaaaaaaccagtatagatgcatatttgccgtaagtgaatgtttacaaataatagagggatacagaagtcagtaactggatgtcactcttg

SEQ ID NO: 13415 - DNA, 122 bp, Homo sapiens
  misc_feature (61)..(62): /note="This region represents a CpG dinucleotide"
  misc_feature (61)..(61): /note="Nucleotide may be methylated to form 5-methylcytosine"
taaatgcttttccagttatgaggaagctgattagagctgtattttcagaagatgatacagcgcactagagatatatcttaggatataaaagattagtgacggggaattttagactatcaagc

SEQ ID NO: 13416 - DNA, 122 bp, Homo sapiens
  misc_feature (61)..(62): /note="This region represents a CpG dinucleotide"
  misc_feature (61)..(61): /note="Nucleotide may be methylated to form 5-methylcytosine"
caaaaccttagtcatcccactgagattccacactcaaagccaatttctctcacagggcatcgaatgctagttaaagatataaaatcacgcttatcacaattaactcccttgcctttatgatg

SEQ ID NO: 13417 - DNA, 122 bp, Homo sapiens
  misc_feature (61)..(62): /note="This region represents a CpG dinucleotide"
  misc_feature (61)..(61): /note="Nucleotide may be methylated to form 5-methylcytosine"
aataagaagagtgatggtcagaggaatacttaaaatcatggtcaacgcaagtaattctcacggtgttgtcctgggccaggagattcagcctcatctgataactgattggaaatctgattctc

SEQ ID NO: 13418 - DNA, 122 bp, Homo sapiens
  misc_feature (61)..(62): /note="This region represents a CpG dinucleotide"
  misc_feature (61)..(61): /note="Nucleotide may be methylated to form 5-methylcytosine"
gggcctggcccatggaggtgcttggcagatattgatggatgcctgcaatggcagccttttcgaggctctatctgctgagaaagcagcagagcccccaagggcatggagaggagtccatttcc

SEQ ID NO: 13419 - DNA, 122 bp, Homo sapiens
  misc_feature (61)..(62): /note="This region represents a CpG dinucleotide"
  misc_feature (61)..(61): /note="Nucleotide may be methylated to form 5-methylcytosine"
aacaggcctcccagccctgtgtcggagcaactgaaacgagggttaaatgaggaaaccatgcgacagatgtcagcataatccctgccacgcagaggaggcaaaatcactttgaagggttaaaa

SEQ ID NO: 13420 - DNA, 122 bp, Homo sapiens
  misc_feature (61)..(62): /note="This region represents a CpG dinucleotide"
  misc_feature (61)..(61): /note="Nucleotide may be methylated to form 5-methylcytosine"
tcaaatccaatgcacaaaatccatgcacctagaaggtaaaatgtgccttccagaggaaaacgctgggatgctgtttgattccaccccagagatatcacattgctaataaaaagactaacctc

SEQ ID NO: 13421 - DNA, 122 bp, Homo sapiens
  misc_feature (61)..(62): /note="This region represents a CpG dinucleotide"
  misc_feature (61)..(61): /note="Nucleotide may be methylated to form 5-methylcytosine"
gtctgaaatgcatttcgaggagaacaagtaaaacctgccctcttagagttcaaagtttcccggagacagctgaggccgatagcttattgtttaggtaagaacaacagaacagagaggcagag

SEQ ID NO: 13422 - DNA, 122 bp, Homo sapiens
  misc_feature (61)..(62): /note="This region represents a CpG dinucleotide"
  misc_feature (61)..(61): /note="Nucleotide may be methylated to form 5-methylcytosine"
agcctttgcatagctcctttcttggcatctgggctctgaaagctgacagtgctctaactgcgccacagggaggaggagggacagagagagccaaaggcagcaaaggggcaagcatcctggga

SEQ ID NO: 13423 - DNA, 122 bp, Homo sapiens
  misc_feature (61)..(62): /note="This region represents a CpG dinucleotide"
  misc_feature (61)..(61): /note="Nucleotide may be methylated to form 5-methylcytosine"
cctcctgcctgtccgatagattggatttcttgcagtgttggcatcatcccagtcacacctcgttttaccaggtattttatagaacctcccagatgagaattaagataatgagtatgaaagat

SEQ ID NO: 13424 - DNA, 122 bp, Homo sapiens
  misc_feature (61)..(62): /note="This region represents a CpG dinucleotide"
  misc_feature (61)..(61): /note="Nucleotide may be methylated to form 5-methylcytosine"
gccctaacccacaggaatgtagccaggggctcaggttttattgttcaagcaaggtggcaacggttaactacttcagtgtgagttcttagaaaattctatgggttggaatgctagcaaaatca

SEQ ID NO: 13425 - DNA, 122 bp, Homo sapiens
  misc_feature (61)..(62): /note="This region represents a CpG dinucleotide"
  misc_feature (61)..(61): /note="Nucleotide may be methylated to form 5-methylcytosine"
atcacagttgtagtgccagtgtccccagctgctccggttccccagcaactcacagacaaccgtggtctggagggtgtgtgactctgaaaagccaaaaccccagaactccaaagttacaagag

SEQ ID NO: 13426 - DNA, 122 bp, Homo sapiens
  misc_feature (61)..(62): /note="This region represents a CpG dinucleotide"
  misc_feature (61)..(61): /note="Nucleotide may be methylated to form 5-methylcytosine"
acatgttgagactttgttgcctgttcctggcactcttaggatctgtgctctggtcccttgcgtaagtggcagagaacagcaccagaagaaaaggggtatggggagattgaaaattgtttttg

SEQ ID NO: 13427 - DNA, 122 bp, Homo sapiens
  misc_feature (61)..(62): /note="This region represents a CpG dinucleotide"
  misc_feature (61)..(61): /note="Nucleotide may be methylated to form 5-methylcytosine"
gaagtggacagaggaatgatccgggccagcctgggcattctcatggcctacaggacagagcgcttctctgaggctggaagggttactgcagccttcacttggcacccacagccctgagacat

SEQ ID NO: 13428 - DNA, 122 bp, Homo sapiens
  misc_feature (61)..(62): /note="This region represents a CpG dinucleotide"
  misc_feature (61)..(61): /note="Nucleotide may be methylated to form 5-methylcytosine"
tttaagcctgtctctctggaacccagagcccacatttgcaatgagccctagaggctcttacgagttggaagcggtcacttgatattgatttagggcccttgggtttctggaagcatgccaaa

SEQ ID NO: 13429 - DNA, 122 bp, Homo sapiens
  misc_feature (61)..(62): /note="This region represents a CpG dinucleotide"
  misc_feature (61)..(61): /note="Nucleotide may be methylated to form 5-methylcytosine"
tcaaatattttgctaaattgcagcagaatgaaatgtcttccggctggggtcggtggctcacgcctgtaatcccagcactttaggaagctaaggaggatggatcacctgaggtcaggagttca

SEQ ID NO: 13430 - DNA, 122 bp, Homo sapiens
  misc_feature (61)..(62): /note="This region represents a CpG dinucleotide"
  misc_feature (61)..(61): /note="Nucleotide may be methylated to form 5-methylcytosine"
gcctaaagagacctgcctctaaaataaacaaacaaaacagacttaatgtcaacttttacacgcttttcccattccaaataatttactatcttatttttgccctaatataaattcatcaacag

SEQ ID NO: 13431 - DNA, 122 bp, Homo sapiens
  misc_feature (61)..(62): /note="This region represents a CpG dinucleotide"
  misc_feature (61)..(61): /note="Nucleotide may be methylated to form 5-methylcytosine"
tatgccaccctcccctatggtggacagacaataaatgctgacaaaatgttgtgcaagttacgtgttcattgccaacaatcttgagacatggaaagctggtatctaatttttcattaaacaag

SEQ ID NO: 13432 - DNA, 122 bp, Homo sapiens
  misc_feature (61)..(62): /note="This region represents a CpG dinucleotide"
  misc_feature (61)..(61): /note="Nucleotide may be methylated to form 5-methylcytosine"
atcttacgcgtatctaaataaactaaacagaatcctttgaaattgacccacaacaacccacgcctaacttctcaaaccctaccttagatctatgcctaaacatacagcatgaaaacttgtaa

SEQ ID NO: 13433 - DNA, 122 bp, Homo sapiens
  misc_feature (61)..(62): /note="This region represents a CpG dinucleotide"
  misc_feature (61)..(61): /note="Nucleotide may be methylated to form 5-methylcytosine"
aatgtaataaataataaatgtaaaaacaatattatatatatttgagatgctaggtcaccacggaatgaggtgacaacatggtatagaagacaacatagtttatagtttcgtaatacttgttt

SEQ ID NO: 13434 - DNA, 122 bp, Homo sapiens
  misc_feature (61)..(62): /note="This region represents a CpG dinucleotide"
  misc_feature (61)..(61): /note="Nucleotide may be methylated to form 5-methylcytosine"
tacctgtccctggtccaggaggattcgggcagctaactcagcctcctggagagacacacacggattcacacagaaacacatgaccatgtggcgtcccagatggagagacaaacagacaaaga

SEQ ID NO: 13435 - DNA, 122 bp, Homo sapiens
  misc_feature (61)..(62): /note="This region represents a CpG dinucleotide"
  misc_feature (61)..(61): /note="Nucleotide may be methylated to form 5-methylcytosine"
gagaactagaaggcactcaagggcaaggtgaggacctacaagccaatggaaaaccctcttcgttacagggcaggggattagccaatgtaagtttcatcactagaaacatcctagtggacctt

SEQ ID NO: 13436 - DNA, 122 bp, Homo sapiens
  misc_feature (61)..(62): /note="This region represents a CpG dinucleotide"
  misc_feature (61)..(61): /note="Nucleotide may be methylated to form 5-methylcytosine"
gacccaaactttagtggcttaaaacaacatgtaattatgatctcacagtttccatgcttccgtgagttgtagaagtcatggaagcttgcttcttcaaagccagtaaaataatctctttcttc

SEQ ID NO: 13437 - DNA, 122 bp, Homo sapiens
  misc_feature (61)..(62): /note="This region represents a CpG dinucleotide"
  misc_feature (61)..(61): /note="Nucleotide may be methylated to form 5-methylcytosine"
tgtatgactaaggagcatcaagtgactaccaaacccaaactccccatcaagcactgggtacgaactgtgagtaaaaacttcctggccaggggcagtggctcatgcctgtaatcccagcactt

SEQ ID NO: 13438 - DNA, 122 bp, Homo sapiens
  misc_feature (61)..(62): /note="This region represents a CpG dinucleotide"
  misc_feature (61)..(61): /note="Nucleotide may be methylated to form 5-methylcytosine"
caaagcccaggaggacccagggggctatggggaggaactcaaggctgtctctgcactcaccggtcttcagcttggggaggtgatactgccacaggaagcagccagtcatgaccactgagagc

SEQ ID NO: 13439 - DNA, 122 bp, Homo sapiens
  misc_feature (61)..(62): /note="This region represents a CpG dinucleotide"
  misc_feature (61)..(61): /note="Nucleotide may be methylated to form 5-methylcytosine"
gatacagtgaagagcaaaatagacttagtgcctagaattatgaaagaattatgaaacctacgttctgaaggaggaagatggagttttaaaaattcaaccctaaatgaagatctcattacaat

SEQ ID NO: 13440 - DNA, 122 bp, Homo sapiens
  misc_feature (61)..(62): /note="This region represents a CpG dinucleotide"
  misc_feature (61)..(61): /note="Nucleotide may be methylated to form 5-methylcytosine"
cattcttatttccaaggccaagaaacctcccgtgtggttagtaaaatcaccactgtattacgcaagttgtgtagcagacttggctgcacacacacataccacttagcatttttatgagacat

SEQ ID NO: 13441 - DNA, 122 bp, Homo sapiens
  misc_feature (61)..(62): /note="This region represents a CpG dinucleotide"
  misc_feature (61)..(61): /note="Nucleotide may be methylated to form 5-methylcytosine"
gacccactgaaccagaattactcagggtggtgtctgggaacccgcattgcatcagattcccgctgtgattcttacatacactgaacattgagaaatgctgtcaggtgaaaggcaaagcaaca

SEQ ID NO: 13442 - DNA, 122 bp, Homo sapiens
  misc_feature (61)..(62): /note="This region represents a CpG dinucleotide"
  misc_feature (61)..(61): /note="Nucleotide may be methylated to form 5-methylcytosine"
aatgacagccaagtcttccagtccaggaattaccaggagccttatcagaaccagaaattgcgtctttagacaacgtttatagcctcatagaagataccaggcttcactttgtcaagctctac

SEQ ID NO: 13443 - DNA, 122 bp, Homo sapiens
  misc_feature (61)..(62): /note="This region represents a CpG dinucleotide"
  misc_feature (61)..(61): /note="Nucleotide may be methylated to form 5-methylcytosine"
cattgctgggaaggagaacatccagggcagtgaggcaggtgctcaggcagagtccagcttcgtggggctgcggtgtggcctggacctggggcatgtcaaaggaaagaccttgtggattgcac

SEQ ID NO: 13444 - DNA, 122 bp, Homo sapiens
  misc_feature (61)..(62): /note="This region represents a CpG dinucleotide"
  misc_feature (61)..(61): /note="Nucleotide may be methylated to form 5-methylcytosine"
aacttttaatatgtaaataagtgtgacagtagccagaatactccaaaccacttctcccctcgtaatccttaaacaaggaacctttgacgtaggcagaattccaggatgaggctgcaggaaac

SEQ ID NO: 13445 - DNA, 122 bp, Homo sapiens
  misc_feature (61)..(62): /note="This region represents a CpG dinucleotide"
  misc_feature (61)..(61): /note="Nucleotide may be methylated to form 5-methylcytosine"
ggtagctcatgattcacaaacccagcagaagcgcttggcactaacgtgtttttcctaccacgctttagttgcataagaaagtaacactgatggaaaagggattgaattaaatctacctccct

SEQ ID NO: 13446 - DNA, 122 bp, Homo sapiens
  misc_feature (61)..(62): /note="This region represents a CpG dinucleotide"
  misc_feature (61)..(61): /note="Nucleotide may be methylated to form 5-methylcytosine"
tgttttgaaacaattgtgttgtaactgaaggggacaggagtattaaaccaagacagttttcgaaatggcatataatttaaggatttggggtagagcattgttattacgcaagtcaagatctg

SEQ ID NO: 13447 - DNA, 122 bp, Homo sapiens
  misc_feature (61)..(62): /note="This region represents a CpG dinucleotide"
  misc_feature (61)..(61): /note="Nucleotide may be methylated to form 5-methylcytosine"
cacctcagaaaacaaatctaggatcagtgggtggacaccactggaaagtgggtttcaattcgatggtaggaatttcttcagagtcagggatattagtgctcaaagtcacacaacaagctgaa

SEQ ID NO: 13448 - DNA, 122 bp, Homo sapiens
  misc_feature (61)..(62): /note="This region represents a CpG dinucleotide"
  misc_feature (61)..(61): /note="Nucleotide may be methylated to form 5-methylcytosine"
ctggccaagaggactggggagaagcctgagattattcatttttaacaaactttctggggacgctgaagctgctgctcctggtaacacctttagtaacaacatagaaaaagagaccccactgg

SEQ ID NO: 13449 - DNA, 122 bp, Homo sapiens
  misc_feature (61)..(62): /note="This region represents a CpG dinucleotide"
  misc_feature (61)..(61): /note="Nucleotide may be methylated to form 5-methylcytosine"
gtttatatagctatatcttccactaagccatactatttaatggacatgaattttctcatccgctgatatatttcaaaaatccagcacagtgactgacatatttccacacacacacataccca

SEQ ID NO: 13450 - DNA, 122 bp, Homo sapiens
  misc_feature (61)..(62): /note="This region represents a CpG dinucleotide"
  misc_feature (61)..(61): /note="Nucleotide may be methylated to form 5-methylcytosine"
aactaacttttgtgtgtctttgatgatgaaggtgtgaactgtgactaggcaaaccagtgacgaaggcttagggaacagaaaccacatcatacctcattaagtcattgttgtcatagagacaa

SEQ ID NO: 13451 - DNA, 122 bp, Homo sapiens
  misc_feature (61)..(62): /note="This region represents a CpG dinucleotide"
  misc_feature (61)..(61): /note="Nucleotide may be methylated to form 5-methylcytosine"
taaaaatactttttgatgatggagggagtggaaattgagcaacaccaactgagtgaaatacggaaatgataccaaatggcaccgaagcagcagagcaggcagcccacctggcctttgatccc

SEQ ID NO: 13452 - DNA, 122 bp, Homo sapiens
  misc_feature (61)..(62): /note="This region represents a CpG dinucleotide"
  misc_feature (61)..(61): /note="Nucleotide may be methylated to form 5-methylcytosine"
tcaagagttctccagagatgcagaaccagaaagatacatacacagtcataccttgtttaacgatgggaatacgttctgagaaatgagtcatgaggttattttgtcattgtgtgaacatcaga

SEQ ID NO: 13453 - DNA, 122 bp, Homo sapiens
  misc_feature (61)..(62): /note="This region represents a CpG dinucleotide"
  misc_feature (61)..(61): /note="Nucleotide may be methylated to form 5-methylcytosine"
cgctagctaatctcaagaacaaatatgaaaatgaaaaagcaatggtgactgaaaccatgacgaagcttagaaatgaactgaaggctttgaaagaagatgctgcaaccttctcatccctgaga

SEQ ID NO: 13454 - DNA, 122 bp, Homo sapiens
  misc_feature (61)..(62): /note="This region represents a CpG dinucleotide"
  misc_feature (61)..(61): /note="Nucleotide may be methylated to form 5-methylcytosine"
gaagtgccttcccagccactgaaccaggcagcagctgtttctccccacaacctcctgctgcggggtcatcctcagtctgaatatctggcgtgcttggtcacacttcgcctccttgtttacat

SEQ ID NO: 13455 - DNA, 122 bp, Homo sapiens
  misc_feature (61)..(62): /note="This region represents a CpG dinucleotide"
  misc_feature (61)..(61): /note="Nucleotide may be methylated to form 5-methylcytosine"
cacctttctggttcatgcagctcctatttcttgttcttatctttctttttctctgacctacgttccagatatctttagagttgctgctatggggagctgtatgtgattatctgactggcttc

SEQ ID NO: 13456 - DNA, 122 bp, Homo sapiens
  misc_feature (61)..(62): /note="This region represents a CpG dinucleotide"
  misc_feature (61)..(61): /note="Nucleotide may be methylated to form 5-methylcytosine"
actctcttttcggactcagcccgcctgcacccaggtgattaaaaagctttattgctcacacgaagcctgtttggtagactctcttcacacgggcgagtgtgacatttggtgccgaagaccca

SEQ ID NO: 13457 - DNA, 122 bp, Homo sapiens
  misc_feature (61)..(62): /note="This region represents a CpG dinucleotide"
  misc_feature (61)..(61): /note="Nucleotide may be methylated to form 5-methylcytosine"
cagtttgaaagacattgagatctaaacacggctctgcccaagacctctgccaagcagcgccgtctgtctgtctgtctgtctgaagggacgggaaggtggagaaactgcaggtactgacctgt

SEQ ID NO: 13458 - DNA, 122 bp, Homo sapiens
  misc_feature (61)..(62): /note="This region represents a CpG dinucleotide"
  misc_feature (61)..(61): /note="Nucleotide may be methylated to form 5-methylcytosine"
ggggtgggggatggggcgagttactctccacaaagggcttctgggaaatcaagcagcactcgctctgctgggtcttcaaggaaagggacagggcccaaagactcacggtgctacgactgtcc

SEQ ID NO: 13459 - DNA, 122 bp, Homo sapiens
  misc_feature (61)..(62): /note="This region represents a CpG dinucleotide"
  misc_feature (61)..(61): /note="Nucleotide may be methylated to form 5-methylcytosine"
gaagatgagagaagaggagtgggatatggagaaaacaatttcctagtcatctgtatgccccgtgacagtacacagcaatagcccagcaggagtgcacaggcaatatgtgattatgtcaacaa

SEQ ID NO: 13460 - DNA, 122 bp, Homo sapiens
  misc_feature (61)..(62): /note="This region represents a CpG dinucleotide"
  misc_feature (61)..(61): /note="Nucleotide may be methylated to form 5-methylcytosine"
gtccagctaccctgaggctgccatgttatgaggaagcccaagccacacagagaggtcatacgtaggtactctcgtcagcagtcctggtcttcaagtcatagcagcctagaagcctcaggatg

SEQ ID NO: 13461 - DNA, 122 bp, Homo sapiens
  misc_feature (61)..(62): /note="This region represents a CpG dinucleotide"
  misc_feature (61)..(61): /note="Nucleotide may be methylated to form 5-methylcytosine"
ttgatgaaaacatcagaattacctccaaggaccatgccagcctgacagcactttctaaggcgacatgctgggcagttttttctgcggattttatcaacgatgcagtcatttcttccagcaca

SEQ ID NO: 13462 - DNA, 122 bp, Homo sapiens
  misc_feature (61)..(62): /note="This region represents a CpG dinucleotide"
  misc_feature (61)..(61): /note="Nucleotide may be methylated to form 5-methylcytosine"
cccacagatgaatatgctgacagtggtttcagctgctcggtggtgattcagacctggacgcgtggcttcagtagccctggggccacactgcctgcccgcagcctcctgtcttgctctatgct

SEQ ID NO: 13463 - DNA, 122 bp, Homo sapiens
  misc_feature (61)..(62): /note="This region represents a CpG dinucleotide"
  misc_feature (61)..(61): /note="Nucleotide may be methylated to form 5-methylcytosine"
tgattcagcgatggatgaataaacgtacactgacacacagatattctgctctgccagtcccgctgagggtcccagtcgcttacaggcttcctgctgagccctgtaaacagttgccactgggc

SEQ ID NO: 13464 - DNA, 122 bp, Homo sapiens
  misc_feature (61)..(62): /note="This region represents a CpG dinucleotide"
  misc_feature (61)..(61): /note="Nucleotide may be methylated to form 5-methylcytosine"
agggccagacagcccagaactatctgcttcccggatactgtgcggctgctgttctatcaacgggctgcagacagaagcaatcttggaaagacttttcatgatgagcctgcaggggctggccc

SEQ ID NO: 13465 - DNA, 122 bp, Homo sapiens
  misc_feature (61)..(62): /note="This region represents a CpG dinucleotide"
  misc_feature (61)..(61): /note="Nucleotide may be methylated to form 5-methylcytosine"
acaatgggccttaccggttatgctagattaaatagtaataaagacgaaaacaatcgtggccgttcacgtgggcaaggctgtgaatcatggccattcactggggaaggaactcaggtacaggt

SEQ ID NO: 13466 - DNA, 122 bp, Homo sapiens
  misc_feature (61)..(62): /note="This region represents a CpG dinucleotide"
  misc_feature (61)..(61): /note="Nucleotide may be methylated to form 5-methylcytosine"
ccacaaacatttcaatttatctgcctttttacaacctgatttacacaagcaaattgcaaacgaaaaccaggcattctttaatcatccaaaatgcatgtataaaatatagaacaaaccctagt

SEQ ID NO: 13467 - DNA, 122 bp, Homo sapiens
  misc_feature (61)..(62): /note="This region represents a CpG dinucleotide"
  misc_feature (61)..(61): /note="Nucleotide may be methylated to form 5-methylcytosine"
ctcaggaatctgttgaaagagatgcgccctgaaaaaggaggataaaaccaagaaagaagacgacacgggatccaggaaataagagatttagcacagaaagaaaaagtaaaataaccctgtcg

SEQ ID NO: 13468 - DNA, 122 bp, Homo sapiens
  misc_feature (61)..(62): /note="This region represents a CpG dinucleotide"
  misc_feature (61)..(61): /note="Nucleotide may be methylated to form 5-methylcytosine"
tgggagtgaggacgtgagctgatttctaatccctctctagcagttgtgcatctggttcagcgtgtcccggggtttccctgggttttgcttgaccgcagcagtaagctgttcctcatttatcc

SEQ ID NO: 13469 - DNA, 122 bp, Homo sapiens
  misc_feature (61)..(62): /note="This region represents a CpG dinucleotide"
  misc_feature (61)..(61): /note="Nucleotide may be methylated to form 5-methylcytosine"
atatagttcagaccttggcagttctctaatctccttgacacttcagtgtttgattgcattcgtttgccctgcaaatagtcgacagtgtaagtgatctcaaagtgagaatatatctaaagtct

SEQ ID NO: 13470 - DNA, 122 bp, Homo sapiens
  misc_feature (61)..(62): /note="This region represents a CpG dinucleotide"
  misc_feature (61)..(61): /note="Nucleotide may be methylated to form 5-methylcytosine"
cccatcaattaactaactaattaacaagcagctagtactgagaaccactgcaggaactcacgtaaaaattttctcatgaaactatttttggcctaatatttttcacctggaacaggttaggt

SEQ ID NO: 13471 - DNA, 122 bp, Homo sapiens
  misc_feature (61)..(62): /note="This region represents a CpG dinucleotide"
  misc_feature (61)..(61): /note="Nucleotide may be methylated to form 5-methylcytosine"
atttttttttcttatataactctgccctaaaacatgctacccccctcctttccttagtaccgtaataactttctctaaaagaggaagcaacacttttgggttatctgtttttaaaagactcc

SEQ ID NO: 13472 - DNA, 122 bp, Homo sapiens
  misc_feature (61)..(62): /note="This region represents a CpG dinucleotide"
  misc_feature (61)..(61): /note="Nucleotide may be methylated to form 5-methylcytosine"
acctgacagcagggatagtgaggaggtcagagaagagggaagtgaaatgggtgacagcaacgagccccggcctatcctcatcatctgccttgagtgaacaaacataagtgattttggcaaaa

SEQ ID NO: 13473 - DNA, 122 bp, Homo sapiens
  misc_feature (61)..(62): /note="This region represents a CpG dinucleotide"
  misc_feature (61)..(61): /note="Nucleotide may be methylated to form 5-methylcytosine"
tgccaaagcacgagttgaaacgtgaagtgttgggccagcccgtgtggcaccaatacctgccgcctacgactgttgtgaacactgaatgggccaacaaacctaaacgttaaatgaactgataa

SEQ ID NO: 13474 - DNA, 122 bp, Homo sapiens
  misc_feature (61)..(62): /note="This region represents a CpG dinucleotide"
  misc_feature (61)..(61): /note="Nucleotide may be methylated to form 5-methylcytosine"
atgaggatcaaatggtaagttctcagtaattttcctacctcaagagtcaacctgaagtttcgcaacaaaagtgaaagagtcaagattctctgatataattctggcagtaaataaagacttag

SEQ ID NO: 13475 - DNA, 122 bp, Homo sapiens
  misc_feature (61)..(62): /note="This region represents a CpG dinucleotide"
  misc_feature (61)..(61): /note="Nucleotide may be methylated to form 5-methylcytosine"
ggcaggaagaaaacctgattactgctgtccacaggcccagagtagaaatgtttcaaaagacggaaggaaaagctgttttgaatctgctgatatatcatggtttgcccccagacaatcccagt

SEQ ID NO: 13476 - DNA, 122 bp, Homo sapiens
  misc_feature (61)..(62): /note="This region represents a CpG dinucleotide"
  misc_feature (61)..(61): /note="Nucleotide may be methylated to form 5-methylcytosine"
gtatccgccttacgtaaccacatggagtgatggaaatgggtgagcagcccggaatgtaggcggtggcctggcccatgcatctccagagaccatgaagactgctcaagccctacataggatgt

SEQ ID NO: 13477 - DNA, 122 bp, Homo sapiens
  misc_feature (61)..(62): /note="This region represents a CpG dinucleotide"
  misc_feature (61)..(61): /note="Nucleotide may be methylated to form 5-methylcytosine"
gtgactcttgggtcaagttgggctgcctcaccctgtccaagtctgggtggaccaaggccacgtagtcattgcaggtggtgacattgcccaaggctgagagccgctcctccacccgcctaatc

SEQ ID NO: 13478 - DNA, 122 bp, Homo sapiens
  misc_feature (61)..(62): /note="This region represents a CpG dinucleotide"
  misc_feature (61)..(61): /note="Nucleotide may be methylated to form 5-methylcytosine"
actgttcatgagtctggtactccctgctgaatgagaggatgcaggccaggccaatgcctgcgtcttcaatctcagatgaacaggcatctctttaggaaacagtgatggctcatgctaaagca

SEQ ID NO: 13479 - DNA, 122 bp, Homo sapiens
  misc_feature (61)..(62): /note="This region represents a CpG dinucleotide"
  misc_feature (61)..(61): /note="Nucleotide may be methylated to form 5-methylcytosine"
ccaacctagttatttttctccaagtatactgacttaagagtccttgttttcattttattgcgcaaatcatttgtatgtcatttcctgaattcagttcaaaagagtcatcagcaaattcacac

SEQ ID NO: 13480 - DNA, 122 bp, Homo sapiens
  misc_feature (61)..(62): /note="This region represents a CpG dinucleotide"
  misc_feature (61)..(61): /note="Nucleotide may be methylated to form 5-methylcytosine"
ggttcattatttaagcttctgaggtttgtacaagcacagattaactcaaatgttacttaacgttttacatttactataaacaccctgatgatgtattttacagtttcttgatttttccctac

SEQ ID NO: 13481 - DNA, 122 bp, Homo sapiens
  misc_feature (61)..(62): /note="This region represents a CpG dinucleotide"
  misc_feature (61)..(61): /note="Nucleotide may be methylated to form 5-methylcytosine"
ctccaggctcttaatctcattcacttggctggtcatggctaataactaacactcattgggcgcttaatgtttggcaggcagcattctcagtgttttatgcagattcattcatttagtcatca

SEQ ID NO: 13482 - DNA, 122 bp, Homo sapiens
  misc_feature (61)..(62): /note="This region represents a CpG dinucleotide"
  misc_feature (61)..(61): /note="Nucleotide may be methylated to form 5-methylcytosine"
ggactccctttcttctctgtccttgacacaccacaaagctgtgatgcttttgtttgcaggcgctgcagctgccaaggctccaatctgagttctatgctcctgtctctcttccaccttgagca

SEQ ID NO: 13483 - DNA, 122 bp, Homo sapiens
  misc_feature (61)..(62): /note="This region represents a CpG dinucleotide"
  misc_feature (61)..(61): /note="Nucleotide may be methylated to form 5-methylcytosine"
tgctgaaaacagaatgaatcatgaacattatctcaatgttttgcataatagacaagaccacggcgttttggttccctgacctgttttgtgtttatgttaggatctgaatcatgttctgggta

SEQ ID NO: 13484 - DNA, 122 bp, Homo sapiens
  misc_feature (61)..(62): /note="This region represents a CpG dinucleotide"
  misc_feature (61)..(61): /note="Nucleotide may be methylated to form 5-methylcytosine"
acgtatgaaaaaggaaatgaagagtactagtgtgtgagagtgtatgtgtgtccacacatgcgcatgcatgctcgctaatgttagtgctcagcagtcaggaaatatgtctctaatgaaatgat

SEQ ID NO: 13485 - DNA, 122 bp, Homo sapiens
  misc_feature (61)..(62): /note="This region represents a CpG dinucleotide"
  misc_feature (61)..(61): /note="Nucleotide may be methylated to form 5-methylcytosine"
gctgcttgggcctgcgctccctgtgcctccagccaatcggggtttctaaaaagtgactcacgctgtcctgaggcacagccagggtggagaatttctactttacagatgctggggctgggaga

SEQ ID NO: 13486 - DNA, 122 bp, Homo sapiens
  misc_feature (61)..(62): /note="This region represents a CpG dinucleotide"
  misc_feature (61)..(61): /note="Nucleotide may be methylated to form 5-methylcytosine"
aagtaaataagtaaatgaaataaagaatggatctcaagttaggtctccagtggtatgttccggaatttttcaacaacttataaaagccagagggaggcagcatggcctaataattaagagag

SEQ ID NO: 13487 - DNA, 122 bp, Homo sapiens
  misc_feature (61)..(62): /note="This region represents a CpG dinucleotide"
  misc_feature (61)..(61): /note="Nucleotide may be methylated to form 5-methylcytosine"
cttcctgactcagggcactgaaatcaccacgttgcttttgggttgcccaaaacactgtgtcgccaagaaaagcctttcaaagcccctttcgggaagggatttttttcgaacttgaaacaaga

SEQ ID NO: 13488 - DNA, 122 bp, Homo sapiens
  misc_feature (61)..(62): /note="This region represents a CpG dinucleotide"
  misc_feature (61)..(61): /note="Nucleotide may be methylated to form 5-methylcytosine"
ggcctccctaaggttttgctcagccagttcctcttactgttttgcctcatgcagttcagccgcttggttagatctgcccctggggccgagttcatttctacagtcacgtccccactggactg

SEQ ID NO: 13489 - DNA, 122 bp, Homo sapiens
  misc_feature (61)..(62): /note="This region represents a CpG dinucleotide"
  misc_feature (61)..(61): /note="Nucleotide may be methylated to form 5-methylcytosine"
cagaatcttccttctgggatgccgactttttcaacacgtgccaggagcccttcctcggcccggaatccccagagtgcccacagtggacagggcacctggatacaccccagactaacccacgt

SEQ ID NO: 13490 - DNA, 122 bp, Homo sapiens
  misc_feature (61)..(62): /note="This region represents a CpG dinucleotide"
  misc_feature (61)..(61): /note="Nucleotide may be methylated to form 5-methylcytosine"
gttctcatgtcccatgaatcgcttctgcctcagcattttcagagtgaagaacaataaggacgggtaccttccctcatactccagaccttttagtgaccctaggctgtgttctcagtcatccg

SEQ ID NO: 13491 - DNA, 122 bp, Homo sapiens
  misc_feature (61)..(62): /note="This region represents a CpG dinucleotide"
  misc_feature (61)..(61): /note="Nucleotide may be methylated to form 5-methylcytosine"
ctggctagacaccacagccctgcggccctgcagcccagccacgtctttttagcttcacctcgacggccttgctcttgacctgaaatcaccatcaccttaatgggctagaaaaggtggggttt

SEQ ID NO: 13492 - DNA, 122 bp, Homo sapiens
  misc_feature (61)..(62): /note="This region represents a CpG dinucleotide"
  misc_feature (61)..(61): /note="Nucleotide may be methylated to form 5-methylcytosine"
tttaccttgcaggagaatgaagttctttgcccaaccgtttcctcttgatacaagctcttgcgttaaaacttagggggaagatttgcctctcactttttttcttggaaaatgtgggcagcaat

SEQ ID NO: 13493 - DNA, 122 bp, Homo sapiens
  misc_feature (61)..(62): /note="This region represents a CpG dinucleotide"
  misc_feature (61)..(61): /note="Nucleotide may be methylated to form 5-methylcytosine"
atgggtgggagaacacgccccgaggtgctgctttggcagagaagccctgtctgcgagccccgaggcggagatggctccccaagcctgatgcagacaagagagcccgcccctcccctgtcccg

SEQ ID NO: 13494 - DNA, 122 bp, Homo sapiens
  misc_feature (61)..(62): /note="This region represents a CpG dinucleotide"
  misc_feature (61)..(61): /note="Nucleotide may be methylated to form 5-methylcytosine"
ctctcacctccaccagggacacaggagacagccctcacaccacactcagcccctcactcacgcatacatcccaacaagtcacggagcgggaggacgccttttcacatagattcctcgcaggc

SEQ ID NO: 13495 - DNA, 122 bp, Homo sapiens
  misc_feature (61)..(62): /note="This region represents a CpG dinucleotide"
  misc_feature (61)..(61): /note="Nucleotide may be methylated to form 5-methylcytosine"
agggtttgtcctcagctctctcctcttcccattctgtgtgttctcactggaaaactttatcgtaaatcacctcgatgctgctgactcagttttttccttctagctctgacctctgtttcctt

SEQ ID NO: 13496 - DNA, 122 bp, Homo sapiens
  misc_feature (61)..(62): /note="This region represents a CpG dinucleotide"
  misc_feature (61)..(61): /note="Nucleotide may be methylated to form 5-methylcytosine"
gagagatttgaagtatgaggaagactcaagtgccattgctgcttgaagatggcagcaccacgtgagaaggaatacctcaaggaactgaaagtggcccttgcctaacagtcagcaaggaaaga

SEQ ID NO: 13497 - DNA, 122 bp, Homo sapiens
  misc_feature (61)..(62): /note="This region represents a CpG dinucleotide"
  misc_feature (61)..(61): /note="Nucleotide may be methylated to form 5-methylcytosine"
gtccagactctgacagtgtcagaaaatgcagtcaccacggctgcttcacaggaagttacacgcaaggtccgcacacagtcagtttccctgtagcccagaagcctgatgaaatctgcactcac

SEQ ID NO: 13498 - DNA, 122 bp, Homo sapiens
  misc_feature (61)..(62): /note="This region represents a CpG dinucleotide"
  misc_feature (61)..(61): /note="Nucleotide may be methylated to form 5-methylcytosine"
actaaaagctgaaggactgtgctgaggctttgtagtagccactttatggaatgggacaagcggcatggagggcacaagtcagtgttgagatccccactaagcttagaaaccattggtatgtg

SEQ ID NO: 13499 - DNA, 122 bp, Homo sapiens
  misc_feature (61)..(62): /note="This region represents a CpG dinucleotide"
  misc_feature (61)..(61): /note="Nucleotide may be methylated to form 5-methylcytosine"
aatagccccagcacagcagtgttctgggtgtccagttcccacatttcccgagcagcctgacgcatgccaggtcctatgcaccagggatattaaagtgactcaaggaggcaggaagccattat

SEQ ID NO: 13500 - DNA, 122 bp, Homo sapiens
  misc_feature (61)..(62): /note="This region represents a CpG dinucleotide"
  misc_feature (61)..(61): /note="Nucleotide may be methylated to form 5-methylcytosine"
ccaggtgtagcccattccacagctacatgtgggtcagaggtttgctgagggagggagagacgggacaggatcctaaataccatggagaagattcacccaactaacagtcaccctccccacgt

SEQ ID NO: 13501 - DNA, 122 bp, Homo sapiens
  misc_feature (61)..(62): /note="This region represents a CpG dinucleotide"
  misc_feature (61)..(61): /note="Nucleotide may be methylated to form 5-methylcytosine"
ttccacttttacaaatgagtggctcagttccatgttttgctgctgatccaggtgcccaggcgcatacaacgcgagcctaagaagcacgcgggagggactaaaaatagaacagcagttttgga

SEQ ID NO: 13502 - DNA, 122 bp, Homo sapiens
  misc_feature (61)..(62): /note="This region represents a CpG dinucleotide"
  misc_feature (61)..(61): /note="Nucleotide may be methylated to form 5-methylcytosine"
tttgactagccaggaaaagaacctctccctgtgtgcaaacagaatcttttcttcacatcacgttattaaaactgacaacatcctgtaatctgttataagcccatcttcctctccccttatgt

SEQ ID NO: 13503 - DNA, 122 bp, Homo sapiens
  misc_feature (61)..(62): /note="This region represents a CpG dinucleotide"
  misc_feature (61)..(61): /note="Nucleotide may be methylated to form 5-methylcytosine"
ctcctggcctgacttggcactcgcagagccctggccatacccggctctaaagcctaagtccgtctcctcagcacagctcaggccggagctacaggctcctggatcctttccccatccgcccc

SEQ ID NO: 13504 - DNA, 122 bp, Homo sapiens
  misc_feature (61)..(62): /note="This region represents a CpG dinucleotide"
  misc_feature (61)..(61): /note="Nucleotide may be methylated to form 5-methylcytosine"
cacttgcaaaattcagaaatactttgtgcaaatgcccccacagcagatcttgatgtatctcgacttgttgcaacaccatgtttaagaactgtggttctcagtctgacacagaacaaagactc

SEQ ID NO: 13505 - DNA, 122 bp, Homo sapiens
  misc_feature (61)..(62): /note="This region represents a CpG dinucleotide"
  misc_feature (61)..(61): /note="Nucleotide may be methylated to form 5-methylcytosine"
tctgaactgctctgtagaaaaacaaacaccacacaatgcaattgatgaatggcaggttcgcgataaatcccaatggttagtattaaaaatgcaaacactgtaacccttgataaaacagagct

SEQ ID NO: 13506 - DNA, 122 bp, Homo sapiens
  misc_feature (61)..(62): /note="This region represents a CpG dinucleotide"
  misc_feature (61)..(61): /note="Nucleotide may be methylated to form 5-methylcytosine"
aggcaacactatcccagcatctcccagaacaggaactcggtatgagctaactgttagccacgttcttagcaaaagaacatgtgaactacacagtggaggctgcatgcacacttgggtgcaaa

SEQ ID NO: 13507 - DNA, 122 bp, Homo sapiens
  misc_feature (61)..(62): /note="This region represents a CpG dinucleotide"
  misc_feature (61)..(61): /note="Nucleotide may be methylated to form 5-methylcytosine"
acctccagcgggcagttgccttgtgctggtggcttaggaaccggagcccgtcgctccaaccgttgcagctccacgctccagcccaaccgcggctctgaaggattgacccgccctggcgtgcc

SEQ ID NO: 13508 - DNA, 122 bp, Homo sapiens
  misc_feature (61)..(62): /note="This region represents a CpG dinucleotide"
  misc_feature (61)..(61): /note="Nucleotide may be methylated to form 5-methylcytosine"
ggtagtggaactgctgacgcagatggtttcttaaattttattttgtcaaattaagtacaacgaagagctaaacggtttttggaaatagatatcatgacttgaatcaggagatggcagaagcc

SEQ ID NO: 13509 - DNA, 122 bp, Homo sapiens
  misc_feature (61)..(62): /note="This region represents a CpG dinucleotide"
  misc_feature (61)..(61): /note="Nucleotide may be methylated to form 5-methylcytosine"
gaagcgaagcggagtctgccgcatgaattcttaagacctcaggttatctaggaaatctaccgcacgctaaagtgctcctccgtaagtgctgcagttagaatcttcacagcctccctgcagga

SEQ ID NO: 13510 - DNA, 122 bp, Homo sapiens
  misc_feature (61)..(62): /note="This region represents a CpG dinucleotide"
  misc_feature (61)..(61): /note="Nucleotide may be methylated to form 5-methylcytosine"
gcccctgtcggatcccgcacctttctaagcctgtggttgcttcacccgctgcagagcacacgcaacccagcctcagcatcacagccgcagctctgttcagcggagcagccagccagggcgga

SEQ ID NO: 13511 - DNA, 122 bp, Homo sapiens
  misc_feature (61)..(62): /note="This region represents a CpG dinucleotide"
  misc_feature (61)..(61): /note="Nucleotide may be methylated to form 5-methylcytosine"
aggtatgagcaggtaggacacctgcaggggaggctccctaggaagaaacaactgggccttcgattacatcccttgggagacccaagggttggtcttagagcttggagtcactgacctgagtc

SEQ ID NO: 13512 - DNA, 122 bp, Homo sapiens
  misc_feature (61)..(62): /note="This region represents a CpG dinucleotide"
  misc_feature (61)..(61): /note="Nucleotide may be methylated to form 5-methylcytosine"
acccaccctgggttcctcgtagtgaacacgtcattcgaacttggtatcttgttactctcacgtctcacttgagcttcacttggcgatgataagaaggcctggtttttaggcttgcagtggcc

SEQ ID NO: 13513 - DNA, 122 bp, Homo sapiens
  misc_feature (61)..(62): /note="This region represents a CpG dinucleotide"
  misc_feature (61)..(61): /note="Nucleotide may be methylated to form 5-methylcytosine"
ctgtgtaagttacatattggagagaggaccgagccccccggagccccctccacctcccagcgcccagatcccagccggacagtgaaacgcacaatgtcaggagtaacgcggcttcacaaccg

SEQ ID NO: 13514 - DNA, 122 bp, Homo sapiens
  misc_feature (61)..(62): /note="This region represents a CpG dinucleotide"
  misc_feature (61)..(61): /note="Nucleotide may be methylated to form 5-methylcytosine"
taaatgagtggcttctctcagtcaaagtggtaccagctggcccctggctgcagctcaccacggccaactgtgtgacatagtaacagttaacctccactgactggtcaccgtgctccaggcac

SEQ ID NO: 13515 - DNA, 122 bp, Homo sapiens
  misc_feature (61)..(62): /note="This region represents a CpG dinucleotide"
  misc_feature (61)..(61): /note="Nucleotide may be methylated to form 5-methylcytosine"
ggccagggggtctcgccgccgtcccccccccgcgggggcgtgctgcagcctgcgaggggacgacggtgtccctgtgttgtgcctccccgtccccagcccgctgatccagttccacctgctgc

SEQ ID NO: 13516 - DNA, 122 bp, Homo sapiens
  misc_feature (61)..(62): /note="This region represents a CpG dinucleotide"
  misc_feature (61)..(61): /note="Nucleotide may be methylated to form 5-methylcytosine"
cagagacctggaccgaggcgtcccctcccctatccagctctggcctcggcctggcaaacccgggcaggagccccctcacctggttcacagcccctgagctgtgggagcacatggcggacacc

SEQ ID NO: 13517 - DNA, 122 bp, Homo sapiens
  misc_feature (61)..(62): /note="This region represents a CpG dinucleotide"
  misc_feature (61)..(61): /note="Nucleotide may be methylated to form 5-methylcytosine"
gcctattgccaattgcatcagagcctgattcactcggtgtaactggggcacgatgtgtatcgcgaggcccttctcagaaccctgctctcctgaggcccggagagaatcagcagttgaatttc

SEQ ID NO: 13518 - DNA, 122 bp, Homo sapiens
  misc_feature (61)..(62): /note="This region represents a CpG dinucleotide"
  misc_feature (61)..(61): /note="Nucleotide may be methylated to form 5-methylcytosine"
cccacaggcagggttgtggggaagctacccacccagccacacctcccaaggatccctcagcggaaggctgcagcctgaggttccagcacccacacctagagaacaggagattcccacccatc

SEQ ID NO: 13519 - DNA, 122 bp, Homo sapiens
  misc_feature (61)..(62): /note="This region represents a CpG dinucleotide"
  misc_feature (61)..(61): /note="Nucleotide may be methylated to form 5-methylcytosine"
agtctagctccagggcatccttgagagtccaaatgaactcagtcagggagctcagggccacgctttgtcatttgccttcaaagaaattgcactctatctgcttaagacagtcttagtgctag

SEQ ID NO: 13520 - DNA, 122 bp, Homo sapiens
  misc_feature (61)..(62): /note="This region represents a CpG dinucleotide"
  misc_feature (61)..(61): /note="Nucleotide may be methylated to form 5-methylcytosine"
taatttatgcaactaacttatgtggtaggtagaataatgcctctcttccccaaaaatgtccgtatcctaactccaggaacctgtgaaaacaggagaccttgcatggcaagtgactttgtaga

SEQ ID NO: 13521 - DNA, 122 bp, Homo sapiens
  misc_feature (61)..(62): /note="This region represents a CpG dinucleotide"
  misc_feature (61)..(61): /note="Nucleotide may be methylated to form 5-methylcytosine"
cccacacttgactggaaactcatctttctaatccagtgtagtatctccagctcctgcccccgaggtcaggactcaggaaaagtttgtcacgtgaaggagggagggatgctgtatggcttact

SEQ ID NO: 13522 - DNA, 122 bp, Homo sapiens
  misc_feature (61)..(62): /note="This region represents a CpG dinucleotide"
  misc_feature (61)..(61): /note="Nucleotide may be methylated to form 5-methylcytosine"
atccttgattaatttgctaattgctattttttgttggtatgtgaattcctgctaggaggccgaggctagtaggcaatgaaaaagacagaacaatggtaaaatgcagccccagtcctctacaa

SEQ ID NO: 13523 - DNA, 122 bp, Homo sapiens
  misc_feature (61)..(62): /note="This region represents a CpG dinucleotide"
  misc_feature (61)..(61): /note="Nucleotide may be methylated to form 5-methylcytosine"
gcacattggaccatgattcctattcattctgagaacggttcttgagtaaaaccccaatgtcgcagctggcaatacatagaattaaatcatcttacattattcattcaacaaatacttgagtg

SEQ ID NO: 13524 - DNA, 122 bp, Homo sapiens
  misc_feature (61)..(62): /note="This region represents a CpG dinucleotide"
  misc_feature (61)..(61): /note="Nucleotide may be methylated to form 5-methylcytosine"
taaggtgtgttttacctgaatgtaactggaggctatttcaaattagcagaggcataaaaacggaaaaaattacaatggataaggacacagtaggctttttgagtatccagttcaaatgaatg

SEQ ID NO: 13525 - DNA, 122 bp, Homo sapiens
  misc_feature (61)..(62): /note="This region represents a CpG dinucleotide"
  misc_feature (61)..(61): /note="Nucleotide may be methylated to form 5-methylcytosine"
ttatttgtatatataaagaaaatgtgtgaaaatcaggctagagacacaattgtttggtggcgtcacctggataaaaggtttatgaggttgacagtttatttaggtccgaagcttaaccccag

SEQ ID NO: 13526 - DNA, 122 bp, Homo sapiens
  misc_feature (61)..(62): /note="This region represents a CpG dinucleotide"
  misc_feature (61)..(61): /note="Nucleotide may be methylated to form 5-methylcytosine"
ctcacatctctccagaagaggcaagcccaatgatttgatccaaatcagggcatattctagcgccactctacatagagatagaggggtttttgtgtgtttgtttgtttttttgtgatggagtt

SEQ ID NO: 13527 - DNA, 122 bp, Homo sapiens
  misc_feature (61)..(62): /note="This region represents a CpG dinucleotide"
  misc_feature (61)..(61): /note="Nucleotide may be methylated to form 5-methylcytosine"
caacactgaggattacaattcaacatgagtcttgggcagggacacaaatccaaaccatatcgggcatccttgattcttaacaaagtcgtggttgagtaagctgctgtttcctagaacacaat

SEQ ID NO: 13528 - DNA, 122 bp, Homo sapiens
  misc_feature (61)..(62): /note="This region represents a CpG dinucleotide"
  misc_feature (61)..(61): /note="Nucleotide may be methylated to form 5-methylcytosine"
tgattatgattttgcaatatgctttcactctcctctggtggcaattcagtcagctaatctcggtgagatattaaaagtgaaactgtagtaggggcccagcctgcctgcaggaggacactatc

SEQ ID NO: 13529 - DNA, 122 bp, Homo sapiens
  misc_feature (61)..(62): /note="This region represents a CpG dinucleotide"
  misc_feature (61)..(61): /note="Nucleotide may be methylated to form 5-methylcytosine"
cactcatcgaatgctttcaatatgccagtgctttccacgtattatctcaagtaatacaatcgtcctattttctaggtactagtattatgtttcacacttgaagtgggcacagagaggttaag

SEQ ID NO: 13530 - DNA, 122 bp, Homo sapiens
  misc_feature (61)..(62): /note="This region represents a CpG dinucleotide"
  misc_feature (61)..(61): /note="Nucleotide may be methylated to form 5-methylcytosine"
ttccatgctgtacaagtacagctttcacacaatttctcttctgatcttcaaaacaatgcacggaggggtgtattattcctgtgtcctagtccagccaggacttcctgctcccctttcccccc

SEQ ID NO: 13531 - DNA, 122 bp, Homo sapiens
  misc_feature (61)..(62): /note="This region represents a CpG dinucleotide"
  misc_feature (61)..(61): /note="Nucleotide may be methylated to form 5-methylcytosine"
ttgcttgaaatatggctgagtttaaaaacttgaattgattattaaaatacattaagtagacgacactcatgcatgacaactacaggaggtgttaataggaataattgaagttagggagctct

SEQ ID NO: 13532 - DNA, 122 bp, Homo sapiens
  misc_feature (61)..(62): /note="This region represents a CpG dinucleotide"
  misc_feature (61)..(61): /note="Nucleotide may be methylated to form 5-methylcytosine"
caacatgcacatgaatcctcattaaatttgcatttcaattagctcctgagagctgcagaacgtgtttcaaatattccttcatcacatcactctcaatccagcctacctacctctttgactcc

SEQ ID NO: 13533 - DNA, 122 bp, Homo sapiens
  misc_feature (61)..(62): /note="This region represents a CpG dinucleotide"
  misc_feature (61)..(61): /note="Nucleotide may be methylated to form 5-methylcytosine"
aaaatcctcccctcacacatccttctagcttcaattttatcttcttatcttcttaaaagtcgcaattttcaaagaagttatctgcaattggcatctccctttcttcacttctccttttctct

SEQ ID NO: 13534 - DNA, 122 bp, Homo sapiens
  misc_feature (61)..(62): /note="This region represents a CpG dinucleotide"
  misc_feature (61)..(61): /note="Nucleotide may be methylated to form 5-methylcytosine"
aattcctccacttaacagtcactgcttggggttaaggctctgcctctgtagaaatcttcccgtacaagctaactacaagtggtaggctcttcttatcctaagctcttaatcagtcattaact

SEQ ID NO: 13535 - DNA, 122 bp, Homo sapiens
  misc_feature (61)..(62): /note="This region represents a CpG dinucleotide"
  misc_feature (61)..(61): /note="Nucleotide may be methylated to form 5-methylcytosine"
agagaggtccttccgcaccctcttgctgccaggtgcgcaacaatagctgggcgtccgccccgccctctctaccgcaggagccacagcgtccgccctcgcccccaagccgcgtctgccgggtg

SEQ ID NO: 13536 - DNA, 122 bp, Homo sapiens
  misc_feature (61)..(62): /note="This region represents a CpG dinucleotide"
  misc_feature (61)..(61): /note="Nucleotide may be methylated to form 5-methylcytosine"
ttaaactctaccaactatttacttttggggatcccctatgaagactgtgcaaacaatttccgttctatgaatatgcttttctttttttttttttttttccagacagagtcttactatgtcaa

SEQ ID NO: 13537 - DNA, 122 bp, Homo sapiens
  misc_feature (61)..(62): /note="This region represents a CpG dinucleotide"
  misc_feature (61)..(61): /note="Nucleotide may be methylated to form 5-methylcytosine"
tattgcccaactccagcatgagatcatcgggccattggcaagaaacccagagccaagtttcgttttagtctgtaaacaaacataccttttactcaatggaactatggggttaaaaggaaagc

SEQ ID NO: 13538 - DNA, 122 bp, Homo sapiens
  misc_feature (61)..(62): /note="This region represents a CpG dinucleotide"
  misc_feature (61)..(61): /note="Nucleotide may be methylated to form 5-methylcytosine"
ggcgtccagagttttcattacataggcacaattggttgactcatttgccaccgaattgaacgcaatctctagtcctcccaccctccgtcgaggttgggctggctctaaggcccaatcctttt

SEQ ID NO: 13539 - DNA, 122 bp, Homo sapiens
  misc_feature (61)..(62): /note="This region represents a CpG dinucleotide"
  misc_feature (61)..(61): /note="Nucleotide may be methylated to form 5-methylcytosine"
ctcgagaattcgggaatcagagtttttaaggataatttggttggggcaggggcagtgaatcgggagtgctgattggttgactcacagatgaaatcatagagagttgaaactgtcctcttata

SEQ ID NO: 13540 - DNA, 122 bp, Homo sapiens
  misc_feature (61)..(62): /note="This region represents a CpG dinucleotide"
  misc_feature (61)..(61): /note="Nucleotide may be methylated to form 5-methylcytosine"
gaggacgccggagtgcgcactagccctccgtggaagacgggagcagaggacatcggagtgcgcactagcagtccatggaagtcaggagcagagaatgcctggagggcgcactagccctccat

SEQ ID NO: 13541 - DNA, 122 bp, Homo sapiens
  misc_feature (61)..(62): /note="This region represents a CpG dinucleotide"
  misc_feature (61)..(61): /note="Nucleotide may be methylated to form 5-methylcytosine"
gtcacgttcttgagtcgcctgttgtgatgataggcaggaacactgttgccgtgggcagagcgacgcgtgcgggttgtgtgtgtgagtcaggaaggccgtcgccacgggcagagcgacgcgtg

SEQ ID NO: 13542 - DNA, 122 bp, Homo sapiens
  misc_feature (61)..(62): /note="This region represents a CpG dinucleotide"
  misc_feature (61)..(61): /note="Nucleotide may be methylated to form 5-methylcytosine"
tgtaccagtccctgctctaagcctttaagatgaatgaatttattttaatctttacaacagcgctgtaaggtaggtactgttattattatccccgttgtacagatgaggcaactgagtcacac

SEQ ID NO: 13543 - DNA, 122 bp, Homo sapiens
  misc_feature (61)..(62): /note="This region represents a CpG dinucleotide"
  misc_feature (61)..(61): /note="Nucleotide may be methylated to form 5-methylcytosine"
ggaggggtggggcaggcagggaggaggagggtggctgagaaagcttcccctttgtgggggcgtgtggccacctccagaggatcagggtgagggaagcttccagaagtggcatgaggagggag

SEQ ID NO: 13544 - DNA, 122 bp, Homo sapiens
  misc_feature (61)..(62): /note="This region represents a CpG dinucleotide"
  misc_feature (61)..(61): /note="Nucleotide may be methylated to form 5-methylcytosine"
ggaaaagcaaggcagaaggggcccagacttgaggaaagggcaggggcaggggctggcaggcgagagaacctcgaagaatgggtggggccttgcacctcatacctaccctcatacccacatat

SEQ ID NO: 13545 - DNA, 122 bp, Homo sapiens
  misc_feature (61)..(62): /note="This region represents a CpG dinucleotide"
  misc_feature (61)..(61): /note="Nucleotide may be methylated to form 5-methylcytosine"
acagcaggcctgagcatgactttcctcccctactcactgttgggctcccataagacaatacgtggaagccctggcacataatagatgagcagccaatgccagctctgttccctgtgaggggc

SEQ ID NO: 13546 - DNA, 122 bp, Homo sapiens
  misc_feature (61)..(62): /note="This region represents a CpG dinucleotide"
  misc_feature (61)..(61): /note="Nucleotide may be methylated to form 5-methylcytosine"
ataccatacatggaatcagaaaaaaccccaaacaacttattttgaagtgttcttaagaaacgatagaagaaaatgggagtgttctagctgtcaaagagagaagatatgaggagaatcatagc

SEQ ID NO: 13547 - DNA, 122 bp, Homo sapiens
  misc_feature (61)..(62): /note="This region represents a CpG dinucleotide"
  misc_feature (61)..(61): /note="Nucleotide may be methylated to form 5-methylcytosine"
agattgaagatggacatttatttctcagttgtggaggctggaagtctaagccctagatttcgttcctggtgagagttttcttcccggcatgcacgtggctgccttcttgctgtgtcctcaca

SEQ ID NO: 13548 - DNA, 122 bp, Homo sapiens
  misc_feature (61)..(62): /note="This region represents a CpG dinucleotide"
  misc_feature (61)..(61): /note="Nucleotide may be methylated to form 5-methylcytosine"
catcttggttttagctgggttctttaccacatcctgttctgaccagactgttttgttcagcggggtcatgactggtgcctgggaagcaagtcctgctgatctcctgcctcagaagggagggg

SEQ ID NO: 13549 - DNA, 122 bp, Homo sapiens
  misc_feature (61)..(62): /note="This region represents a CpG dinucleotide"
  misc_feature (61)..(61): /note="Nucleotide may be methylated to form 5-methylcytosine"
cacattcctgttggttactggggacagccagctgcgggcaggcggggcccagctctgctccgtgcggaggctgtgttctgccctctccctgcccacagcatgactcagagccacctcactgc

SEQ ID NO: 13550 - DNA, 122 bp, Homo sapiens
  misc_feature (61)..(62): /note="This region represents a CpG dinucleotide"
  misc_feature (61)..(61): /note="Nucleotide may be methylated to form 5-methylcytosine"
gggagactgtcatgttcattcaaataactcggttacttaagtaactattttcaattcaagcgatgtatttacaaaagaggaagtggcacttacaagtaaaagggaagaattactgttgttaa

SEQ ID NO: 13551 - DNA, 122 bp, Homo sapiens
  misc_feature (61)..(62): /note="This region represents a CpG dinucleotide"
  misc_feature (61)..(61): /note="Nucleotide may be methylated to form 5-methylcytosine"
gtaatagaatcataaaatgttagcactgcagcacatctcagggctgctgtctggaaaggccgtgtgacctaccaggtaagagtaggtctgaattgagaacctggatttctggactgtccagt

SEQ ID NO: 13552 - DNA, 122 bp, Homo sapiens
  misc_feature (61)..(62): /note="This region represents a CpG dinucleotide"
  misc_feature (61)..(61): /note="Nucleotide may be methylated to form 5-methylcytosine"
gagaggttaggagacctgcctgaagtcacacagcaagtaaacggagtagccattagattgcgtcttctctcggtgtgtgttttttctgctctcactctgggattcctagggtgactgtgata

SEQ ID NO: 13553 - DNA, 122 bp, Homo sapiens
  misc_feature (61)..(62): /note="This region represents a CpG dinucleotide"
  misc_feature (61)..(61): /note="Nucleotide may be methylated to form 5-methylcytosine"
ataccaaacctgagattacaatttaaacattgctatcaaagctcaggaagtacagacagacgttggggcatttttgtgacagggaagtattctggtttttacattactgaaatttgctaagg

SEQ ID NO: 13554 - DNA, 122 bp, Homo sapiens
  misc_feature (61)..(62): /note="This region represents a CpG dinucleotide"
  misc_feature (61)..(61): /note="Nucleotide may be methylated to form 5-methylcytosine"
accctcatccaaggcaatggtgctgctgggcctggatgactgagccgaaccagagaagaacgggagacaacaccaaggcagagaaactgaattaaacaaggaaatgaaaggagcgtgatgat

SEQ ID NO: 13555 - DNA, 122 bp, Homo sapiens
  misc_feature (61)..(62): /note="This region represents a CpG dinucleotide"
  misc_feature (61)..(61): /note="Nucleotide may be methylated to form 5-methylcytosine"
acaagaagtttttacataaacagacacagtaccagagggttattgctatgggcagtcacacgtacacgacacccagtcagtattgcttttctcagtgccagtgcctaagtaagtctgacctg

SEQ ID NO: 13556 - DNA, 122 bp, Homo sapiens
  misc_feature (61)..(62): /note="This region represents a CpG dinucleotide"
  misc_feature (61)..(61): /note="Nucleotide may be methylated to form 5-methylcytosine"
ccactgagaagttgatcctgttattattattcgcagcgacatttcctggcttagacctagcgtactgggtaatgcccatatgttcagaacagtcaatactgcaacggcgaaagggaaaggct

SEQ ID NO: 13557 - DNA, 122 bp, Homo sapiens
  misc_feature (61)..(62): /note="This region represents a CpG dinucleotide"
  misc_feature (61)..(61): /note="Nucleotide may be methylated to form 5-methylcytosine"
atttattgtagaaaataacttcacattgctctgcactgtaaaaaacctttgacatacattcgcattttatttaacatttcataacatcactttgaagtttgcagacctgatgtttgtttttg

SEQ ID NO: 13558 - DNA, 122 bp, Homo sapiens
  misc_feature (61)..(62): /note="This region represents a CpG dinucleotide"
  misc_feature (61)..(61): /note="Nucleotide may be methylated to form 5-methylcytosine"
agaaacagagtcaagagagagggcaggaatggtaactaaatggaatgagaagagtggatacggttgaagtttatactagttcctggggcaggtgcctagaaccattgaccataaatggaatg

SEQ ID NO: 13559 - DNA, 122 bp, Homo sapiens
  misc_feature (61)..(62): /note="This region represents a CpG dinucleotide"
  misc_feature (61)..(61): /note="Nucleotide may be methylated to form 5-methylcytosine"
ctaccatgtataaaacacacagatgcagctcaaagaaactttggtcatcgctccatggctcggttccctcatatgtaaaatgcaaataataatgtatcttcctttgaggaaaactgtgaaga

SEQ ID NO: 13560 - DNA, 122 bp, Homo sapiens
  misc_feature (61)..(62): /note="This region represents a CpG dinucleotide"
  misc_feature (61)..(61): /note="Nucleotide may be methylated to form 5-methylcytosine"
gcagccagacaggtgccttctagtttcctgattccagtcctgtgtggtatagtagtggcccgtgctgtatggactgacaggagtttggcccatctcctgggcttgcaaagcccttctttcaa

SEQ ID NO: 13561 - DNA, 122 bp, Homo sapiens
  misc_feature (61)..(62): /note="This region represents a CpG dinucleotide"
  misc_feature (61)..(61): /note="Nucleotide may be methylated to form 5-methylcytosine"
tgaactgaatcacacagctcggtattgtctgaaacagttaagaacttctagcacaagcatcgcactttcctcagctcatatttcacattttctccattcttctctgaaaggatcctggacct

SEQ ID NO: 13562 - DNA, 122 bp, Homo sapiens
  misc_feature (61)..(62): /note="This region represents a CpG dinucleotide"
  misc_feature (61)..(61): /note="Nucleotide may be methylated to form 5-methylcytosine"
ttcaacatttcctcaaatctttcagccactgtggtggttagatctgaagacaagcctgggcgcggtggctcacacctgtaatcccagcactttgagaggccgaggcgggccgatcacttgag

SEQ ID NO: 13563 - DNA, 122 bp, Homo sapiens
  misc_feature (61)..(62): /note="This region represents a CpG dinucleotide"
  misc_feature (61)..(61): /note="Nucleotide may be methylated to form 5-methylcytosine"
tccctccgggccccacccctcctgcaccacgggccacccagcagccggaaaagcagcagacgcccaacaagaggccctgggagagcctccggaaagcccacgggacgcccacgtgggtgaag

SEQ ID NO: 13564 - DNA, 122 bp, Homo sapiens
  misc_feature (61)..(62): /note="This region represents a CpG dinucleotide"
  misc_feature (61)..(61): /note="Nucleotide may be methylated to form 5-methylcytosine"
tcagctcataaaacgaaaagaacattgcctcagcatgtatattgtgaaataaagggattacgtgtcaaaaatgtgccaggaatagaagggttgacatcatctacagcttggtgatgagtttt

SEQ ID NO: 13565 - DNA, 122 bp, Homo sapiens
  misc_feature (61)..(62): /note="This region represents a CpG dinucleotide"
  misc_feature (61)..(61): /note="Nucleotide may be methylated to form 5-methylcytosine"
ctcacatgaccaagagagggatcatcgctcaacgtctcataaggtcactaatcccattcacgaaggctccaccctcatgacctaataattacctcccaaaggcccttcatccaaatactatc

SEQ ID NO: 13566 - DNA, 122 bp, Homo sapiens
  misc_feature (61)..(62): /note="This region represents a CpG dinucleotide"
  misc_feature (61)..(61): /note="Nucleotide may be methylated to form 5-methylcytosine"
ttcaacactttatacatgaactacttttcctgtcttttcatttgcctgcttttaataaaccgagtgacagatatatcaatgctagtgttatctgtgcatacatatatagaagggtgtgcatt

SEQ ID NO: 13567 - DNA, 122 bp, Homo sapiens
  misc_feature (61)..(62): /note="This region represents a CpG dinucleotide"
  misc_feature (61)..(61): /note="Nucleotide may be methylated to form 5-methylcytosine"
catgcttctgggtggtctggcccccgcgcctgcctccggccctcctgttcctcacacccacgcatagttaaggtccattatgcacccgactctgtccaggcagggagctgccagggacagtc

SEQ ID NO: 13568 - DNA, 122 bp, Homo sapiens
  misc_feature (61)..(62): /note="This region represents a CpG dinucleotide"
  misc_feature (61)..(61): /note="Nucleotide may be methylated to form 5-methylcytosine"
ttccacggctcacctcctgcccgcacccgggccccacctctgcctccaaatcacccaccccgccagccccccttgcaggtcacaacccgtcccaggtgacaccccgcccccagcctcgcccc

SEQ ID NO: 13569 - DNA, 122 bp, Homo sapiens
  misc_feature (61)..(62): /note="This region represents a CpG dinucleotide"
  misc_feature (61)..(61): /note="Nucleotide may be methylated to form 5-methylcytosine"
tcccagtcaagtggcaaacagatacagaccaaaaagtgctataatcatgacgcacgaagacggaaagactggttggaggatgaagaattgaaagaaaacttacttgaaatgaggtaattatg

SEQ ID NO: 13570 - DNA, 122 bp, Homo sapiens
  misc_feature (61)..(62): /note="This region represents a CpG dinucleotide"
  misc_feature (61)..(61): /note="Nucleotide may be methylated to form 5-methylcytosine"
tgcaagctccacggtgcaccctggcttctagaacagcacctggcatgcagcattttgttacgtaaatgagccccagctcccctactggctggaccagcaataggcagcccctggtccccatg

SEQ ID NO: 13571 - DNA, 122 bp, Homo sapiens
  misc_feature (61)..(62): /note="This region represents a CpG dinucleotide"
  misc_feature (61)..(61): /note="Nucleotide may be methylated to form 5-methylcytosine"
gctcacagccaatcctctcactgaagtgaaacaccaattctccaggcatacacacacatacgcacatcttattttcactgctctacacagggacctgagaatccttaattttaaagttggga

SEQ ID NO: 13572 - DNA, 122 bp, Homo sapiens
  misc_feature (61)..(62): /note="This region represents a CpG dinucleotide"
  misc_feature (61)..(61): /note="Nucleotide may be methylated to form 5-methylcytosine"
gtcagtcttaatgattcactttcctctttggggcctttgaggtctgtgggcacgtgaacacgcatttttactttctgctttctcagtttatcactataatgggaacaactctttattttatt

SEQ ID NO: 13573 - DNA, 122 bp, Homo sapiens
  misc_feature (61)..(62): /note="This region represents a CpG dinucleotide"
  misc_feature (61)..(61): /note="Nucleotide may be methylated to form 5-methylcytosine"
gcctcagcaagaaaagagcaggtctgtgagagcatctaaggcaagaagtggccctggcttcgaagtggaatgttaaattaaaccatttgctgactgataacttgggcaggtggcttcatctc

SEQ ID NO: 13574 - DNA, 122 bp, Homo sapiens
  misc_feature (61)..(62): /note="This region represents a CpG dinucleotide"
  misc_feature (61)..(61): /note="Nucleotide may be methylated to form 5-methylcytosine"
tgactcagtagggctttggcaactatcagaattgtattacagtgcaatctttaccagcctcggcaacatggtgaaatcccattgtattaatctgttctcacactgctaataaagacataccc

SEQ ID NO: 13575 - DNA, 122 bp, Homo sapiens
  misc_feature (61)..(62): /note="This region represents a CpG dinucleotide"
  misc_feature (61)..(61): /note="Nucleotide may be methylated to form 5-methylcytosine"
accacattatgaattcacaacacattttgacattaaagaaaaacttccctgtgtccaaagcgcatacctatgtttatataaaatgtaaccaaatcaatttcactttccttttataaaagaac

SEQ ID NO: 13576 - DNA, 122 bp, Homo sapiens
  misc_feature (61)..(62): /note="This region represents a CpG dinucleotide"
  misc_feature (61)..(61): /note="Nucleotide may be methylated to form 5-methylcytosine"
atcaataaggaaagggaggcactgaacagtgctataaactaactggacctaacagacacacgcagagtactctagtctctgagagcagagcatatatttttctcaagtacacatgggacatt

SEQ ID NO: 13577 - DNA, 122 bp, Homo sapiens
  misc_feature (61)..(62): /note="This region represents a CpG dinucleotide"
  misc_feature (61)..(61): /note="Nucleotide may be methylated to form 5-methylcytosine"
tactgagcctggcctatttgacctattttggtttggctgtccctcccaggtgcaatcagtcgtggccaggaggggtcatgtccctgctgctcactcagctcgggacaggatagtccctctga

SEQ ID NO: 13578 - DNA, 122 bp, Homo sapiens
  misc_feature (61)..(62): /note="This region represents a CpG dinucleotide"
  misc_feature (61)..(61): /note="Nucleotide may be methylated to form 5-methylcytosine"
gagatccgtggagataaactcagagcgcagcctgcgcattccagcaggcctgactaactacggaaacatcccggcgggcggcgcacagcacacaacatctcattaaacaatagcccccgccc

SEQ ID NO: 13579 - DNA, 122 bp, Homo sapiens
  misc_feature (61)..(62): /note="This region represents a CpG dinucleotide"
  misc_feature (61)..(61): /note="Nucleotide may be methylated to form 5-methylcytosine"
attcaatgcaggtcaactctcctggggttgtcctgagcaatgcctccagatccgtgttgacggtgcctacttggccttgggggacaacccactgaatacacaagagtgtcttctgcaagcag

SEQ ID NO: 13580 - DNA, 122 bp, Homo sapiens
  misc_feature (61)..(62): /note="This region represents a CpG dinucleotide"
  misc_feature (61)..(61): /note="Nucleotide may be methylated to form 5-methylcytosine"
gcctctctggctctggagctaatttggatgctgagtagccccgcaggtatttatatgtagcgtttggtatttttactgggtcctattcttctcccttggatcacctaaaatggttaagaatt

SEQ ID NO: 13581 - DNA, 122 bp, Homo sapiens
  misc_feature (61)..(62): /note="This region represents a CpG dinucleotide"
  misc_feature (61)..(61): /note="Nucleotide may be methylated to form 5-methylcytosine"
ctgttatcctggtcacaatgaaagtgtattcattctgggaggtcagccaaccctgtcctacgcacagcacctactactcatgatacaaatgtggtattaggtcatcacgctttggaagctgt

SEQ ID NO: 13582 - DNA, 122 bp, Homo sapiens
  misc_feature (61)..(62): /note="This region represents a CpG dinucleotide"
  misc_feature (61)..(61): /note="Nucleotide may be methylated to form 5-methylcytosine"
caggatttgtttattgctttgataaagccacagcatttctcaagtgctctatgctgcaagcgtcaggaacacgctaggaaacccaaatgtttgctgacccactaactttttccaccaaagct

SEQ ID NO: 13583 - DNA, 122 bp, Homo sapiens
  misc_feature (61)..(62): /note="This region represents a CpG dinucleotide"
  misc_feature (61)..(61): /note="Nucleotide may be methylated to form 5-methylcytosine"
ttgagcaagtgttgatcagaataaattatttatgtgagcactgggagctgcctccctatgcgcaaggcaatctgttaaagatttgctatcatgctagtgaatggggggaatggagtagtaca

SEQ ID NO: 13584 - DNA, 122 bp, Homo sapiens
  misc_feature (61)..(62): /note="This region represents a CpG dinucleotide"
  misc_feature (61)..(61): /note="Nucleotide may be methylated to form 5-methylcytosine"
gtttcgtctctttgtgctcaagtattagtaacagggagactgggcagaaaagcaacttgacgtttcctggaaatcttagtggaagctttaaagaaggaaaagagctaagagagactgtgcca

SEQ ID NO: 13585 - DNA, 122 bp, Homo sapiens
  misc_feature (61)..(62): /note="This region represents a CpG dinucleotide"
  misc_feature (61)..(61): /note="Nucleotide may be methylated to form 5-methylcytosine"
cctggaactgaaggtccctccccttttaggggactatttagggtaacttcccaaggttgccgtggcatttgtaaactgtcatggtggtggtgggagtgtcttttagcatgctgatgcattat

SEQ ID NO: 13586 - DNA, 122 bp, Homo sapiens
  misc_feature (61)..(62): /note="This region represents a CpG dinucleotide"
  misc_feature (61)..(61): /note="Nucleotide may be methylated to form 5-methylcytosine"
cttctgcagcacagacgccttgcccggcctcatggtgatgcagatatgactatgctgagacgttgctgtaacagcacggcccacagagctgcggagccaggctctcagttatctcccgtttg

SEQ ID NO: 13587 - DNA, 122 bp, Homo sapiens
  misc_feature (61)..(62): /note="This region represents a CpG dinucleotide"
  misc_feature (61)..(61): /note="Nucleotide may be methylated to form 5-methylcytosine"
tatagctgggagttcataaccataaaacctaaagtcaccagctcctacagtgtagaatcacgtggcatcttccttatcaccaccagctctgacattggtgcaaaacatcttacgcattttct

SEQ ID NO: 13588 - DNA, 122 bp, Homo sapiens
  misc_feature (61)..(62): /note="This region represents a CpG dinucleotide"
  misc_feature (61)..(61): /note="Nucleotide may be methylated to form 5-methylcytosine"
gttactcatggaatctgctcttcacaaatccattgtattatgacataaaatatggctagacgccaaggtttaaccatacataaaaatactaattctcggctgggtgcactggcttatgcctg

SEQ ID NO: 13589 - DNA, 122 bp, Homo sapiens
  misc_feature (61)..(62): /note="This region represents a CpG dinucleotide"
  misc_feature (61)..(61): /note="Nucleotide may be methylated to form 5-methylcytosine"
aatccttcctttatagcccacagagaggtaaggcagggcaggagcgcagcccatagcatgcgagctgttctagtgccagttcaagaaatagctcgtgtgcttaccagagccagacacagggc

SEQ ID NO: 13590 - DNA, 122 bp, Homo sapiens
  misc_feature (61)..(62): /note="This region represents a CpG dinucleotide"
  misc_feature (61)..(61): /note="Nucleotide may be methylated to form 5-methylcytosine"
ttcattaagagaaaatgcttaatatcttgctttttggtctctctacacagaaggcagaaacgtaactgattagagattctgatgaattcagagcagttgtaatcagaaacttcaggcaatta

SEQ ID NO: 13591 - DNA, 122 bp, Homo sapiens
  misc_feature (61)..(62): /note="This region represents a CpG dinucleotide"
  misc_feature (61)..(61): /note="Nucleotide may be methylated to form 5-methylcytosine"
gcagaatgagcaagatcaccgctcagatgtgtcatgaggagtaacgtgtcatgacaccggcgtgtgaagcttcagcgaaaagcccagtcttgagcgtggtcacgagtcattacttcgtggtg

SEQ ID NO: 13592 - DNA, 122 bp, Homo sapiens
  misc_feature (61)..(62): /note="This region represents a CpG dinucleotide"
  misc_feature (61)..(61): /note="Nucleotide may be methylated to form 5-methylcytosine"
ccacaagtgattaaacatggagtgaccacatgactcagcaattccactctgaggtatgtacgcaagagaaccgaaaacatcacgtcctcaatgtgtgcaaggctccccgattcacacctcca

SEQ ID NO: 13593 - DNA, 122 bp, Homo sapiens
  misc_feature (61)..(62): /note="This region represents a CpG dinucleotide"
  misc_feature (61)..(61): /note="Nucleotide may be methylated to form 5-methylcytosine"
gttttaacttgttcttgtttttcctcttgtgcaaggcaagctgcaatttcttcacatggtcgttcccttatagaagatgaggatgcttcttctgaaagtgcaggtgtgggttttccttcatc

SEQ ID NO: 13594 - DNA, 122 bp, Homo sapiens
  misc_feature (61)..(62): /note="This region represents a CpG dinucleotide"
  misc_feature (61)..(61): /note="Nucleotide may be methylated to form 5-methylcytosine"
tcccacccaccacctcccaccaagacgcatctccagctcctgagtcgacctgcagtacagcgttattagtctttttatttgcttattgcatcttgggagcgcgtgggtgggtgaagggagcg

SEQ ID NO: 13595 - DNA, 122 bp, Homo sapiens
  misc_feature (61)..(62): /note="This region represents a CpG dinucleotide"
  misc_feature (61)..(61): /note="Nucleotide may be methylated to form 5-methylcytosine"
gacaagggcacagccacagcccccgtgttatggcaacacatgggtcaggctcaggtctggcgcttggcaatcagctgatgatggcagggaggctctgcttcctgtcccaggcagaggggatg

SEQ ID NO: 13596 - DNA, 122 bp, Homo sapiens
  misc_feature (61)..(62): /note="This region represents a CpG dinucleotide"
  misc_feature (61)..(61): /note="Nucleotide may be methylated to form 5-methylcytosine"
aataaagatacaagatacttacaagtgaagtgtatgagatttaagacaaaaccagagtgacgctgcaggcaggactgcccattccatctggaatgcatgactgtctgtcatctatttggcta

SEQ ID NO: 13597 - DNA, 122 bp, Homo sapiens
  misc_feature (61)..(62): /note="This region represents a CpG dinucleotide"
  misc_feature (61)..(61): /note="Nucleotide may be methylated to form 5-methylcytosine"
acagactgcggggcctacaggcaggacctggcaatgggcatcatctggctaaagacaagtcgtggcctcggcctggggaacagctgccacggcctagttgcccctggggtcagttcaggaga

SEQ ID NO: 13598 - DNA, 122 bp, Homo sapiens
  misc_feature (61)..(62): /note="This region represents a CpG dinucleotide"
  misc_feature (61)..(61): /note="Nucleotide may be methylated to form 5-methylcytosine"
ctatttgtatgaactgtaagcttgtaagcttgtcatcatccttcatggtcctggggcaggcgcctggctagccactgtaacaggatgaggaaagagatacagcaagatccctgagacttcaa

SEQ ID NO: 13599 - DNA, 122 bp, Homo sapiens
  misc_feature (61)..(62): /note="This region represents a CpG dinucleotide"
  misc_feature (61)..(61): /note="Nucleotide may be methylated to form 5-methylcytosine"
atcttatcagcaacttccagagctgaaccttgattaatctggatacaaaaaggattgaaacgccacataataagcattaacaggagggtgtttcctttatcaatgaagcttgatttatccat

SEQ ID NO: 13600 - DNA, 122 bp, Homo sapiens
  misc_feature (61)..(62): /note="This region represents a CpG dinucleotide"
  misc_feature (61)..(61): /note="Nucleotide may be methylated to form 5-methylcytosine"
agaagttcccaggaaggctcctatgtaaagcatgcttctcctgtcatggtatttggcacccgtcattgacaacacttgtttaataagctctgtgggtacagccccatgtatattcatacaca

SEQ ID NO: 13601 - DNA, 122 bp, Homo sapiens
  misc_feature (61)..(62): /note="This region represents a CpG dinucleotide"
  misc_feature (61)..(61): /note="Nucleotide may be methylated to form 5-methylcytosine"
cagtaaaaataagtgaatggtcctgaatagaagcctactgagaagtgagttcaacattaacgtgtgtgtatgcggatgagtcatctggaaatttaaacttgccattcaaagaaggcctccta

SEQ ID NO: 13602 - DNA, 122 bp, Homo sapiens
  misc_feature (61)..(62): /note="This region represents a CpG dinucleotide"
  misc_feature (61)..(61): /note="Nucleotide may be methylated to form 5-methylcytosine"
gggagggatgctgagtggcaagtaggcaggctgggtacatttccttttgggatgtggtagcgacagtgtcctacagagtcagactggtggctttaacatcacagggctttgtccagctggat

SEQ ID NO: 13603 - DNA, 122 bp, Homo sapiens
  misc_feature (61)..(62): /note="This region represents a CpG dinucleotide"
  misc_feature (61)..(61): /note="Nucleotide may be methylated to form 5-methylcytosine"
ataccccacctacttccaaagagaattttgaaggtgactcacaatgaaaaccacatatgccgcaagatcacgaaaatagaaatagaaaatcaagtccatggagatgaagaaaggaaacccac

SEQ ID NO: 13604 - DNA, 122 bp, Homo sapiens
  misc_feature (61)..(62): /note="This region represents a CpG dinucleotide"
  misc_feature (61)..(61): /note="Nucleotide may be methylated to form 5-methylcytosine"
gcacacctcatgcctaagtcatgaccacacaactgtaagagtataacacattatccatcacgtctcctaaaaaattcaccctcagtattctgtaggatcctcttatcaatgggtttcacttt

SEQ ID NO: 13605 - DNA, 122 bp, Homo sapiens
  misc_feature (61)..(62): /note="This region represents a CpG dinucleotide"
  misc_feature (61)..(61): /note="Nucleotide may be methylated to form 5-methylcytosine"
actgtgttcctcatgccgggctcatgaacatatctcatctccaggtcccatacactcccacggtggctttgccggtgccttcctatgctgataatctctgtgactcagaaggcttaattgat

SEQ ID NO: 13606 - DNA, 122 bp, Homo sapiens
  misc_feature (61)..(62): /note="This region represents a CpG dinucleotide"
  misc_feature (61)..(61): /note="Nucleotide may be methylated to form 5-methylcytosine"
acacagggatggtgttaaaagccatgggatgtgctcatatactgagtgtagctgcagaaacggaaccaaaggctgagccctgagatatttcaacattaggagtcaaagtagagaagaatcga

SEQ ID NO: 13607 - DNA, 122 bp, Homo sapiens
  misc_feature (61)..(62): /note="This region represents a CpG dinucleotide"
  misc_feature (61)..(61): /note="Nucleotide may be methylated to form 5-methylcytosine"
ctcatgtttgtccttatctccaaggcaaaatacaaacactgtttcagggagctgcttctccgctccaagacaaatgagctgttgaagtgtcatgattttaaaatctggtgatatacataaag

SEQ ID NO: 13608 - DNA, 122 bp, Homo sapiens
  misc_feature (61)..(62): /note="This region represents a CpG dinucleotide"
  misc_feature (61)..(61): /note="Nucleotide may be methylated to form 5-methylcytosine"
gaaactctttgtaaggtgtgttcatctggttgacacttagtagtcattacttccactttccgtccatatagtcctcttaacagtaatatttgagaggcatttttattaaagcagtcttaagg

SEQ ID NO: 13609 - DNA, 122 bp, Homo sapiens
  misc_feature (61)..(62): /note="This region represents a CpG dinucleotide"
  misc_feature (61)..(61): /note="Nucleotide may be methylated to form 5-methylcytosine"
gacacatgtgtatgccatcgttctcataaatgctcatggaaaacaggacagtcttgtccccggtttccttcccaggcagattctaacccctgagtcacggactttgcagctagcttctgagc

SEQ ID NO: 13610 - DNA, 122 bp, Homo sapiens
  misc_feature (61)..(62): /note="This region represents a CpG dinucleotide"
  misc_feature (61)..(61): /note="Nucleotide may be methylated to form 5-methylcytosine"
tggggccaaaaaaaaaaaaaaggtttctgcttttagagctgggtgcagcctgattatttacggctgagggaaaaacaacttggtttgaaaacatagaagagagaaacgggaattcgtgacgc

SEQ ID NO: 13611 - DNA, 122 bp, Homo sapiens
  misc_feature (61)..(62): /note="This region represents a CpG dinucleotide"
  misc_feature (61)..(61): /note="Nucleotide may be methylated to form 5-methylcytosine"
tgactccaggctgtcactacactatgttactgggctacactgcctcacagattcagaacacgctcagaagactatcactttggtcacagtgccagtggcccaaataacctatagaacattaa

SEQ ID NO: 13612 - DNA, 122 bp, Homo sapiens
  misc_feature (61)..(62): /note="This region represents a CpG dinucleotide"
  misc_feature (61)..(61): /note="Nucleotide may be methylated to form 5-methylcytosine"
ggggaatttcttcttccaaccattgttagtccagttcccagctaagaatctcctcttctccgagtggctgacctcagggattagcactcccttgaccagagatgatgtctacccacaggggt

SEQ ID NO: 13613 - DNA, 122 bp, Homo sapiens
  misc_feature (61)..(62): /note="This region represents a CpG dinucleotide"
  misc_feature (61)..(61): /note="Nucleotide may be methylated to form 5-methylcytosine"
gattgttgtttttacagcgttaacagtctgaaccggagcataacgatcggctgtctcaggcgtttcatggcccgggacaggcggctctcttcttacagattacagggaactcacacaattaa

SEQ ID NO: 13614 - DNA, 122 bp, Homo sapiens
  misc_feature (61)..(62): /note="This region represents a CpG dinucleotide"
  misc_feature (61)..(61): /note="Nucleotide may be methylated to form 5-methylcytosine"
tgacagcagagttgagtagttgtgacagagtctgtgtggcctacaaagccaaaatatttacgatctggccctttccaggaagttttccagcccctggtttaaaagagtacaaattacctctg

SEQ ID NO: 13615 - DNA, 122 bp, Homo sapiens
  misc_feature (61)..(62): /note="This region represents a CpG dinucleotide"
  misc_feature (61)..(61): /note="Nucleotide may be methylated to form 5-methylcytosine"
cccttcttgccctccttgctctgaggggccactgttgggcctggcctgtgactgaggaatcggtcctctctcctggagccacagagataggctgccagctcgttccgcagcttttccatctg

SEQ ID NO: 13616 - DNA, 122 bp, Homo sapiens
  misc_feature (61)..(62): /note="This region represents a CpG dinucleotide"
  misc_feature (61)..(61): /note="Nucleotide may be methylated to form 5-methylcytosine"
gacactgctgaccttacagccttgcaaatgatgtcatcaccatacgttcttcactcatgacgtggcatggatttgaccaaaggcgtgatcatgtttaaaataaaaaccctttatgagagttc

SEQ ID NO: 13617 - DNA, 122 bp, Homo sapiens
  misc_feature (61)..(62): /note="This region represents a CpG dinucleotide"
  misc_feature (61)..(61): /note="Nucleotide may be methylated to form 5-methylcytosine"
cacagcaataatgtgggtggcagtaataacagcagctgaaccacctgagcaccatcctgacgaggcatagcctgagctctgtgaacagtgaagtccatctggtctctcagtggcctgagagt

SEQ ID NO: 13618 - DNA, 122 bp, Homo sapiens
  misc_feature (61)..(62): /note="This region represents a CpG dinucleotide"
  misc_feature (61)..(61): /note="Nucleotide may be methylated to form 5-methylcytosine"
gactacttaaaatatgctaggaatttttcatctatttcctttagctatcaccatacactacggtaaatattgtttctgacttacagatgaggcaaatgaggcttgaagagcttaaatacctt

SEQ ID NO: 13619 - DNA, 122 bp, Homo sapiens
  misc_feature (61)..(62): /note="This region represents a CpG dinucleotide"
  misc_feature (61)..(61): /note="Nucleotide may be methylated to form 5-methylcytosine"
ctttaggccctggggcctccagtgcccgtataaggctgtggcagaagccctgcccatttccgttccttccactccctatctccaccctcacacctccccaaaaacccacttcccttcttacc

SEQ ID NO: 13620 - DNA, 122 bp, Homo sapiens
  misc_feature (61)..(62): /note="This region represents a CpG dinucleotide"
  misc_feature (61)..(61): /note="Nucleotide may be methylated to form 5-methylcytosine"
cctgcatatagcaccagtctcattaacacaccctaatactggcctttcctccttgcctgtcgcactcttcctgcttcctctctccggcttctagggatcaccctaaatacaccaccagcagg

SEQ ID NO: 13621 - DNA, 122 bp, Homo sapiens
  misc_feature (61)..(62): /note="This region represents a CpG dinucleotide"
  misc_feature (61)..(61): /note="Nucleotide may be methylated to form 5-methylcytosine"
tgaaaagcctgcccacagccactaagtatgtatcagcttttcaagcctcactgtcaaatccgaaagaatggccaaggatcactaggtatttgagaaatttatatagtctgaaaactaagacc

SEQ ID NO: 13622 - DNA, 122 bp, Homo sapiens
  misc_feature (61)..(62): /note="This region represents a CpG dinucleotide"
  misc_feature (61)..(61): /note="Nucleotide may be methylated to form 5-methylcytosine"
aaagtgtaaatgatccttaaactaaaaacaccgtagaaatacaaagatccaggccgggtgcggtggctcatgcctgtaatcccagctacttgggaggctgaggcaggagaatcacttaaacc

SEQ ID NO: 13623 - DNA, 122 bp, Homo sapiens
  misc_feature (61)..(62): /note="This region represents a CpG dinucleotide"
  misc_feature (61)..(61): /note="Nucleotide may be methylated to form 5-methylcytosine"
acttcatgaaagaccctgaaccctgaggaggaagaaagatagaagataagagttaattggcgctaggctttgttgtaggaagtttgtaagttttaaaatagcaagtagattcacgtagacct

SEQ ID NO: 13624 - DNA, 122 bp, Homo sapiens
  misc_feature (61)..(62): /note="This region represents a CpG dinucleotide"
  misc_feature (61)..(61): /note="Nucleotide may be methylated to form 5-methylcytosine"
ttcagataccttaggaatactgtaatcaccgtggcaaaccatagttctgatgactcaatccgtttcaggttgacttactgtggatttcctcgtttccttcaatgtaatatataaaccacacc

SEQ ID NO: 13625 - DNA, 122 bp, Homo sapiens
  misc_feature (61)..(62): /note="This region represents a CpG dinucleotide"
  misc_feature (61)..(61): /note="Nucleotide may be methylated to form 5-methylcytosine"
acaggaccctgtgccagcatggtgccacatgccagctggtcagtacagccaaggagcatacgtatgctgggccctgtatcagcagtctcagctggtcactgacaaggcaaccatgctgaaga

SEQ ID NO: 13626 - DNA, 122 bp, Homo sapiens
  misc_feature (61)..(62): /note="This region represents a CpG dinucleotide"
  misc_feature (61)..(61): /note="Nucleotide may be methylated to form 5-methylcytosine"
tgactcactcactatgaagtgagtaccttcattattccatcttacagatgaggagactgacgctcagtgaagtgacagtcatagacaactagaagtgatggaactaagattcaaattcgggc

SEQ ID NO: 13627 - DNA, 122 bp, Homo sapiens
  misc_feature (61)..(62): /note="This region represents a CpG dinucleotide"
  misc_feature (61)..(61): /note="Nucleotide may be methylated to form 5-methylcytosine"
tgtcatcttgatagttacaaaacatggggcttctggctcctgccctaaaataacacttgacgtttttaaaactacccctttttttttgctctagcacggaggtatccagttagaaagcacct

SEQ ID NO: 13628 - DNA, 122 bp, Homo sapiens
  misc_feature (61)..(62): /note="This region represents a CpG dinucleotide"
  misc_feature (61)..(61): /note="Nucleotide may be methylated to form 5-methylcytosine"
caataaaatgaacaagttgtttacatagctgtgagaaaggttattgtttcattggttttgcgtcctagtgcagcattcagcatttagtgggagtccaatcagtgtttactgaataaaacaaa

SEQ ID NO: 13629 - DNA, 122 bp, Homo sapiens
  misc_feature (61)..(62): /note="This region represents a CpG dinucleotide"
  misc_feature (61)..(61): /note="Nucleotide may be methylated to form 5-methylcytosine"
gaagtgcttcagagctgcggagatgggagtgatttagcagctgcctcccccttgattgaccgcatcaggctttaaaaatatcaatggattcatcagcatcaaccctttgcagaactctcttg

SEQ ID NO: 13630 - DNA, 122 bp, Homo sapiens
  misc_feature (61)..(62): /note="This region represents a CpG dinucleotide"
  misc_feature (61)..(61): /note="Nucleotide may be methylated to form 5-methylcytosine"
tcttcctgtcctttggttctgcttcttgctaacaatcatctcagtggcttgagctttagtcgcagatagaacaaaccacagcaggcctgaagttttccagtgtatttccagccctttcagat

SEQ ID NO: 13631 - DNA, 122 bp, Homo sapiens
  misc_feature (61)..(62): /note="This region represents a CpG dinucleotide"
  misc_feature (61)..(61): /note="Nucleotide may be methylated to form 5-methylcytosine"
taatgaggagctgggttccttttctccattgatgacagcttcctttctgatctgatggtccgtcagaaactaaggtggtgtgtgactgtggggttatgtccccgctgaagccgtcttttcct

SEQ ID NO: 13632 - DNA, 122 bp, Homo sapiens
  misc_feature (61)..(62): /note="This region represents a CpG dinucleotide"
  misc_feature (61)..(61): /note="Nucleotide may be methylated to form 5-methylcytosine"
cagctctatggagccccagagtgcttaaagggctggcactaaatgaaccaggacctcttgcggcctacaaggaacattgtaagggggtagcagaaaaagtccatttcagtgattcatcatct

SEQ ID NO: 13633 - DNA, 122 bp, Homo sapiens
  misc_feature (61)..(62): /note="This region represents a CpG dinucleotide"
  misc_feature (61)..(61): /note="Nucleotide may be methylated to form 5-methylcytosine"
tccacagctttccctcctgcctttcctctggttctttatttcagtcttttttgcatacatcggtagagatgcagaaatagaacaaagaaacgggcaaatgggctaaattatagtgaaccaaa

SEQ ID NO: 13634 - DNA, 122 bp, Homo sapiens
  misc_feature (61)..(62): /note="This region represents a CpG dinucleotide"
  misc_feature (61)..(61): /note="Nucleotide may be methylated to form 5-methylcytosine"
cctgtgtggtctcggcccccagacttcctcatcttcactggtgtaatggtgtacttggtacgactcttccaggacacaaagttggcattaagggccacagaagtaagaactgggcggcaggg

SEQ ID NO: 13635 - DNA, 122 bp, Homo sapiens
  misc_feature (61)..(62): /note="This region represents a CpG dinucleotide"
  misc_feature (61)..(61): /note="Nucleotide may be methylated to form 5-methylcytosine"
gtcacacaacctctctgggcctgcttcctgatgattagattagaatgcctagagagagtgcgatcactgtcaactcctgcagttgctcaggagaagcaattggatgctgggctttcctgttg

SEQ ID NO: 13636 - DNA, 122 bp, Homo sapiens
  misc_feature (61)..(62): /note="This region represents a CpG dinucleotide"
  misc_feature (61)..(61): /note="Nucleotide may be methylated to form 5-methylcytosine"
gtatgtgttaatagctcattcactttgattgctgcgtagtagtccatggtttgaatgttccgcagttcagccatttatttactgaaagacatttagaggctgggcgtggttgctcatgcctg

SEQ ID NO: 13637 - DNA, 122 bp, Homo sapiens
  misc_feature (61)..(62): /note="This region represents a CpG dinucleotide"
  misc_feature (61)..(61): /note="Nucleotide may be methylated to form 5-methylcytosine"
gagttcagcctcttcctgggttctgttgcttcagtgctgctgctttgctccgatctaaagcgctcacagagccctacacctgggttttctctccctagactggcggttttcagccctggagg

SEQ ID NO: 13638 - DNA, 122 bp, Homo sapiens
  misc_feature (61)..(62): /note="This region represents a CpG dinucleotide"
  misc_feature (61)..(61): /note="Nucleotide may be methylated to form 5-methylcytosine"
tcattgacgaagatgaacacgatgctcacctctggcaggctgtcaggaaatgagaggttacggcacctgcaaagaacagccaagcgcttagatttgtgactcagctggagtcatctcaggag

SEQ ID NO: 13639 - DNA, 122 bp, Homo sapiens
  misc_feature (61)..(62): /note="This region represents a CpG dinucleotide"
  misc_feature (61)..(61): /note="Nucleotide may be methylated to form 5-methylcytosine"
gcagcactcagagccaggctccactcactcaggagctcccaggcaggtgctggggcctggcgcggcacagcggctgtccgtgtgtccccagacaggcaaggcaggacaggggtcctggaaag

SEQ ID NO: 13640 - DNA, 122 bp, Homo sapiens
  misc_feature (61)..(62): /note="This region represents a CpG dinucleotide"
  misc_feature (61)..(61): /note="Nucleotide may be methylated to form 5-methylcytosine"
gtttttgaaaagcaggaacattgtgttgaccttactcatagtatctttcacaggactgtgcgcatgcacacactaggatgttctacaattcaattagagttctgtacattttaatatgtgta

SEQ ID NO: 13641 - DNA, 122 bp, Homo sapiens
  misc_feature (61)..(62): /note="This region represents a CpG dinucleotide"
  misc_feature (61)..(61): /note="Nucleotide may be methylated to form 5-methylcytosine"
tgtaccaatgggtggcaataatacattcacccagaataactccacaggagggccttatcccgcctcgccttgcatatgttgaaaccagggcatggtttcctataaaaatgcttactgtgcag

SEQ ID NO: 13642 - DNA, 122 bp, Homo sapiens
  misc_feature (61)..(62): /note="This region represents a CpG dinucleotide"
  misc_feature (61)..(61): /note="Nucleotide may be methylated to form 5-methylcytosine"
tttgtaggggatataaagaagagtgggtttagtattacaaaataagttcagtttaactaacgtgtgttagtgtcttttatatcccactgaagtgctgagtatacagaaattaagacagttct

SEQ ID NO: 13643 - DNA, 122 bp, Homo sapiens
  misc_feature (61)..(62): /note="This region represents a CpG dinucleotide"
  misc_feature (61)..(61): /note="Nucleotide may be methylated to form 5-methylcytosine"
cacacacctccctgcagcctggcactggaaactgctgagccatgcagggcagcctggtggcggctaggacacttctgcagaggacctggagttgggctgctcccggggctcccatctcttgc

SEQ ID NO: 13644 - DNA, 122 bp, Homo sapiens
  misc_feature (61)..(62): /note="This region represents a CpG dinucleotide"
  misc_feature (61)..(61): /note="Nucleotide may be methylated to form 5-methylcytosine"
tcactctgattcttttccattcaagtctattttatttcatttctaaacacactggttgcccgccaggcatggtggctcacgcctataatccaggcgctttgggaggctgaggcggacagatc

SEQ ID NO: 13645 - DNA, 122 bp, Homo sapiens
  misc_feature (61)..(62): /note="This region represents a CpG dinucleotide"
  misc_feature (61)..(61): /note="Nucleotide may be methylated to form 5-methylcytosine"
ttacactgccagccaatgtggaggcagtgatcacggacaagacaaacatggttcttccctcgtgcagtttattgtccaatgggggaaatagtaaacagtaaagaaacaattatataaaatat

SEQ ID NO: 13646 - DNA, 122 bp, Homo sapiens
  misc_feature (61)..(62): /note="This region represents a CpG dinucleotide"
  misc_feature (61)..(61): /note="Nucleotide may be methylated to form 5-methylcytosine"
tggggccacatctgatgggtgaggggaagctgaggatcagaaggaggcagccctggttaacggatgtcaccctggggctccacaccgtctcagtctgtggccctgtcactggtccaacaaca

SEQ ID NO: 13647 - DNA, 122 bp, Homo sapiens
  misc_feature (61)..(62): /note="This region represents a CpG dinucleotide"
  misc_feature (61)..(61): /note="Nucleotide may be methylated to form 5-methylcytosine"
gagtcacaggtttcccaagcttcccggacctgttcaggaaatgtggtgtggctggggttccgcctttctcataagctccgagtaaagccaatacagctgatccactggccactctgaaaagc

SEQ ID NO: 13648 - DNA, 122 bp, Homo sapiens
  misc_feature (61)..(62): /note="This region represents a CpG dinucleotide"
  misc_feature (61)..(61): /note="Nucleotide may be methylated to form 5-methylcytosine"
actttgcaggagagagcagtagcagacctgggctattaacacaccacagttaattctctgcgggaacttttactaggtgggacttgtggaaggagaaaacgtctgtaaacagtgcatgctcc

SEQ ID NO: 13649 - DNA, 122 bp, Homo sapiens
  misc_feature (61)..(62): /note="This region represents a CpG dinucleotide"
  misc_feature (61)..(61): /note="Nucleotide may be methylated to form 5-methylcytosine"
ggggtgcggagagcgggcctgtgattcaccagagggttgcagagagaggcccaagaatcgcgggaggggtgcggagaggggcctgtgaatcacgggaggggtgcggagaggggcccgtgaat

SEQ ID NO: 13650 - DNA, 122 bp, Homo sapiens
  misc_feature (61)..(62): /note="This region represents a CpG dinucleotide"
  misc_feature (61)..(61): /note="Nucleotide may be methylated to form 5-methylcytosine"
tcctagtcccagcccagaggatttatctaaacatcaccccattgctgtgtcatatgtgtccgtgtgcaaaaacaggggaaagagatggtgtcaaactctcactcagcagctctgaggcaaca

SEQ ID NO: 13651 - DNA, 122 bp, Homo sapiens
  misc_feature (61)..(62): /note="This region represents a CpG dinucleotide"
  misc_feature (61)..(61): /note="Nucleotide may be methylated to form 5-methylcytosine"
agtcaaggcacagtctctcaggaagtggagaaaagggagattgtaggtgggaagagggtacgcagcaaggtaatggtgctgccttgagaaccaccaggcaattgatatccaaccactttcct

SEQ ID NO: 13652 - DNA, 122 bp, Homo sapiens
  misc_feature (61)..(62): /note="This region represents a CpG dinucleotide"
  misc_feature (61)..(61): /note="Nucleotide may be methylated to form 5-methylcytosine"
gtccacgacaacgctgccttcccagtgtgggtggaagccaggaggcgattactcaagctccgaaactgaatgtgctgagcccacagtcccgcaggaggaagatgaccgggtaggtggggaag

SEQ ID NO: 13653 - DNA, 122 bp, Homo sapiens
  misc_feature (61)..(62): /note="This region represents a CpG dinucleotide"
  misc_feature (61)..(61): /note="Nucleotide may be methylated to form 5-methylcytosine"
tcagcgctgtcccaccaacctattgcagcagctgagcctggtcctgtccaccacagcccacgtctgagcactggaacacacaagagtttgggccctcaagaccactctcagcctgagccctg

SEQ ID NO: 13654 - DNA, 122 bp, Homo sapiens
  misc_feature (61)..(62): /note="This region represents a CpG dinucleotide"
  misc_feature (61)..(61): /note="Nucleotide may be methylated to form 5-methylcytosine"
ctctgcccacccacacccctctggggctggcagggcctggagtgtgcgtgggcatgcagacgcatacacatctagcccttggctctcctcattggaccccttcagacactcctttctcttca

SEQ ID NO: 13655 - DNA, 122 bp, Homo sapiens
  misc_feature (61)..(62): /note="This region represents a CpG dinucleotide"
  misc_feature (61)..(61): /note="Nucleotide may be methylated to form 5-methylcytosine"
ctatttaaaccacttttacatgtgtttgcattttttttcctaaaagaaacctttaggatccgaacaaggtttaatgtgttagtcattgggatccagatagaaaggcaggactgttgtttgaa

SEQ ID NO: 13656 - DNA, 122 bp, Homo sapiens
  misc_feature (61)..(62): /note="This region represents a CpG dinucleotide"
  misc_feature (61)..(61): /note="Nucleotide may be methylated to form 5-methylcytosine"
gaagctaccaggaccctggcaagaaattgtgtcctgtgtctcgtggcccagcctggcactcgccctcctcgccccgctcagctttagggggcaggaagcagtgcagctccttaacccacttc

SEQ ID NO: 13657 - DNA, 122 bp, Homo sapiens
  misc_feature (61)..(62): /note="This region represents a CpG dinucleotide"
  misc_feature (61)..(61): /note="Nucleotide may be methylated to form 5-methylcytosine"
attgatcatcaatgcttctatgggaagattttggatcaaaaacgggaaataaaaaccagacgtcactttgacagtttaaaagaaaacaggctttcaaattaatctgccttgggaaagtcttg

SEQ ID NO: 13658 - DNA, 122 bp, Homo sapiens
  misc_feature (61)..(62): /note="This region represents a CpG dinucleotide"
  misc_feature (61)..(61): /note="Nucleotide may be methylated to form 5-methylcytosine"
ccaatatgcagttgagccagtacttgtggtcaaagaggagatgttctagacacatggatacgtagcctaagaagtcaagccaacaagatttctgaacaaaatgatttctgacatagctgagc

SEQ ID NO: 13659 - DNA, 122 bp, Homo sapiens
  misc_feature (61)..(62): /note="This region represents a CpG dinucleotide"
  misc_feature (61)..(61): /note="Nucleotide may be methylated to form 5-methylcytosine"
aagagcctatttaaggacaagcactgtgaacaaacaactatacgtctttcatgccctcatcgctgagtagctttaacattgagcctaatgactcaaaatgacctaatgaggcccttttctca

SEQ ID NO: 13660 - DNA, 122 bp, Homo sapiens
  misc_feature (61)..(62): /note="This region represents a CpG dinucleotide"
  misc_feature (61)..(61): /note="Nucleotide may be methylated to form 5-methylcytosine"
catttttcacctgctgactaaatatccctcgggccctgaataatcagcagcatggctgggcgcggtggctcatgcctgtaatcccagcactttgggaggccgaggtgggtggatcacttgag

SEQ ID NO: 13661 - DNA, 122 bp, Homo sapiens
  misc_feature (61)..(62): /note="This region represents a CpG dinucleotide"
  misc_feature (61)..(61): /note="Nucleotide may be methylated to form 5-methylcytosine"
atctgtcatagacacacactctttctctctctctctctctctctctcacacacacacacacgttcagcatggctgctttgcagtggaaacctgtactgcacatccacaggtgtggcaggagt

SEQ ID NO: 13662 - DNA, 122 bp, Homo sapiens
  misc_feature (61)..(62): /note="This region represents a CpG dinucleotide"
  misc_feature (61)..(61): /note="Nucleotide may be methylated to form 5-methylcytosine"
aatatgaaacaaacgcttacttcctctgtctctcttcctttctctttctttttgtcagagcgacagtggctctcatttgattccctcagttcctatgctatttgtgtggaaataagcagatt

SEQ ID NO: 13663 - DNA, 122 bp, Homo sapiens
  misc_feature (61)..(62): /note="This region represents a CpG dinucleotide"
  misc_feature (61)..(61): /note="Nucleotide may be methylated to form 5-methylcytosine"
gcttccttcctggctgggaggtggggcatgctgggtaatcagagagaatgcttctagagacgaggccaagctggtcttaaacaactgaggccttgtggaaggagtgaatgtgatggtgatcc

SEQ ID NO: 13664 - DNA, 122 bp, Homo sapiens
  misc_feature (61)..(62): /note="This region represents a CpG dinucleotide"
  misc_feature (61)..(61): /note="Nucleotide may be methylated to form 5-methylcytosine"
aaagcctgaaaagcctgcctcagaggatgtgaaagctctcgtttagttcagtgtggtcctcgggaaagctcttctgctcaccgcaagttggctggtttccaaagctgtgcgtgccagcttgg

SEQ ID NO: 13665 - DNA, 122 bp, Homo sapiens
  misc_feature (61)..(62): /note="This region represents a CpG dinucleotide"
  misc_feature (61)..(61): /note="Nucleotide may be methylated to form 5-methylcytosine"
caacctttgtgcctggatgatgctctacaaatgcagatcctacttccataactccaatagcgctgctgtagtagcaggtttctgacatactccaaggaagggagaattttagctggccattc

SEQ ID NO: 13666 - DNA, 122 bp, Homo sapiens
  misc_feature (61)..(62): /note="This region represents a CpG dinucleotide"
  misc_feature (61)..(61): /note="Nucleotide may be methylated to form 5-methylcytosine"
agcccccacccctccagccacataggaagcaggtggtgtttcctgggcaggggaacatggcgctgggggaggtggagctcatttgtctcttgatcttgcctttggtggttgcatccttagct

SEQ ID NO: 13667 - DNA, 122 bp, Homo sapiens
  misc_feature (61)..(62): /note="This region represents a CpG dinucleotide"
  misc_feature (61)..(61): /note="Nucleotide may be methylated to form 5-methylcytosine"
cggtcacctctgacacagcactgcctggggcccgaggcccggtggccccgcggtttctcgcgccaccaccccggggactgacacagcccgtgaaggctgggccaggctggggcagccccgta

SEQ ID NO: 13668 - DNA, 122 bp, Homo sapiens
  misc_feature (61)..(62): /note="This region represents a CpG dinucleotide"
  misc_feature (61)..(61): /note="Nucleotide may be methylated to form 5-methylcytosine"
tgcgggacaagttgtcaggacagaattatagcaagaaacgtaatcacaggtggaaaaccacgggatttgtgtttcaaagccagtaccttggcttaattcagaagtgacagtaaaagttgata

SEQ ID NO: 13669 - DNA, 122 bp, Homo sapiens
  misc_feature (61)..(62): /note="This region represents a CpG dinucleotide"
  misc_feature (61)..(61): /note="Nucleotide may be methylated to form 5-methylcytosine"
aataaccatctaaataagcgctaactaaataacactacagtgtggaagttagaaagcccccgcatttcagcaggctctgggaaaaattatgcagaagacaaagtcccctgctgaatgtaact

SEQ ID NO: 13670 - DNA, 122 bp, Homo sapiens
  misc_feature (61)..(62): /note="This region represents a CpG dinucleotide"
  misc_feature (61)..(61): /note="Nucleotide may be methylated to form 5-methylcytosine"
tccttaggatggataacatgccacatcctcctagctcaaccaacttcagcactgcagtgtcggacagctccatacacctctgcaaggaattccaagtcaggcaggggccacttgtctctctg

SEQ ID NO: 13671 - DNA, 122 bp, Homo sapiens
  misc_feature (61)..(62): /note="This region represents a CpG dinucleotide"
  misc_feature (61)..(61): /note="Nucleotide may be methylated to form 5-methylcytosine"
ctcaatgcagaataatcaaattagagttattctatgtctaaattctgcctgaagccaattcgtgctttctttccgtgttatgaaatgtgtgggggtgaagaagaagagggaaaaagccagct

SEQ ID NO: 13672 - DNA, 122 bp, Homo sapiens
  misc_feature (61)..(62): /note="This region represents a CpG dinucleotide"
  misc_feature (61)..(61): /note="Nucleotide may be methylated to form 5-methylcytosine"
ccctttccactttagacaaacaccagcagttcccctttagttcaatggtattcgcacaggcgttatgaaagctgttaagattcagaaccattgtcagaggacttggcagaatgtaacctaat

SEQ ID NO: 13673 - DNA, 122 bp, Homo sapiens
  misc_feature (61)..(62): /note="This region represents a CpG dinucleotide"
  misc_feature (61)..(61): /note="Nucleotide may be methylated to form 5-methylcytosine"
acccacacatcctgctgattggttcattttacagagagctgattgggccgttttacagagcgttcatttgtctgttttgacattgtgctgactggcgtgtttacaaacctttagctagacac

SEQ ID NO: 13674 - DNA, 122 bp, Homo sapiens
  misc_feature (61)..(62): /note="This region represents a CpG dinucleotide"
  misc_feature (61)..(61): /note="Nucleotide may be methylated to form 5-methylcytosine"
tgagtcaatctgctaagtgagatgactgctaagtgactaatgagcaagtggtatatacagcgtggatcctctagacaaggggatcattcaagtcccaggtggaatggagcaggagggcaagc

SEQ ID NO: 13675 - DNA, 122 bp, Homo sapiens
  misc_feature (61)..(62): /note="This region represents a CpG dinucleotide"
  misc_feature (61)..(61): /note="Nucleotide may be methylated to form 5-methylcytosine"
atgatctctttaatatctacaaccggggctgtgagctgacaagtggcagcactgcacagccgtggggctgcctaagggaaatgctccaaccctcagaggagacgcacaatttgattattaga

SEQ ID NO: 13676 - DNA, 122 bp, Homo sapiens
  misc_feature (61)..(62): /note="This region represents a CpG dinucleotide"
  misc_feature (61)..(61): /note="Nucleotide may be methylated to form 5-methylcytosine"
tacggtggtggtcttggaggggtggtggtcttggggggcgcggccccagccccatcttttcgcggggctgcttctgtccgcccgcacgggggaggggaggaggaggcggaggcggaggcaga

SEQ ID NO: 13677 - DNA, 122 bp, Homo sapiens
  misc_feature (61)..(62): /note="This region represents a CpG dinucleotide"
  misc_feature (61)..(61): /note="Nucleotide may be methylated to form 5-methylcytosine"
tattcagactacttcttggaagggccccaaatgccttgcctaagaacaatggacaaaagtcgcagtctcctaattccattagtcagaaaacattgtggtttcagaagtttttgcttataggg

SEQ ID NO: 13678 - DNA, 122 bp, Homo sapiens
  misc_feature (61)..(62): /note="This region represents a CpG dinucleotide"
  misc_feature (61)..(61): /note="Nucleotide may be methylated to form 5-methylcytosine"
cttttctcaagcttcaaagtatggctactttgccttcttttttacattgtttgggaaagtcgagaagtagtcacaaaataaaagaaatgagagggaggaaaaagaagaaaaggtcatgattc

SEQ ID NO: 13679 - DNA, 122 bp, Homo sapiens
  misc_feature (61)..(62): /note="This region represents a CpG dinucleotide"
  misc_feature (61)..(61): /note="Nucleotide may be methylated to form 5-methylcytosine"
tttgatgggggaagcctgtggtgaacccactgaggttgctggtgattaagtttatgtggacggtgaatctcaacagaatgaaaataaactgtgggtgtctattttgaagcagatgaaccagg

SEQ ID NO: 13680 - DNA, 122 bp, Homo sapiens
  misc_feature (61)..(62): /note="This region represents a CpG dinucleotide"
  misc_feature (61)..(61): /note="Nucleotide may be methylated to form 5-methylcytosine"
ctcttttaggtctctttcagttcataaatctttttttctttcagtttctttttgaaggaacgggattgattgtgcatcctacagagtgacccacagttcagattctgttggttccttcccca

SEQ ID NO: 13681 - DNA, 122 bp, Homo sapiens
  misc_feature (61)..(62): /note="This region represents a CpG dinucleotide"
  misc_feature (61)..(61): /note="Nucleotide may be methylated to form 5-methylcytosine"
gtgtgtgtgtgtgtaaagagagagagggaactagagactaggggaccaactcagccaaatcgcctccttgcaagcctttccagcagccccaggtatcttggaaagagccaactcacctcctt

SEQ ID NO: 13682 - DNA, 122 bp, Homo sapiens
  misc_feature (61)..(62): /note="This region represents a CpG dinucleotide"
  misc_feature (61)..(61): /note="Nucleotide may be methylated to form 5-methylcytosine"
gcccaggcggtgcgactcagggatggtgtaggagacacgcccactgttgttggtcaccagcgtatccaggtagagccactcgcctgagggcggctgggtcatgatgtgcacatccacctggg

SEQ ID NO: 13683 - DNA, 122 bp, Homo sapiens
  misc_feature (61)..(62): /note="This region represents a CpG dinucleotide"
  misc_feature (61)..(61): /note="Nucleotide may be methylated to form 5-methylcytosine"
ggtcagggtaaagcctgggcctcagaattgtccaaagaacacccaagtgtggttgggtttcggttttgctgatagcaccatttgctcacagtgaatcatgatcaggagaggaggcttgggat

SEQ ID NO: 13684 - DNA, 122 bp, Homo sapiens
  misc_feature (61)..(62): /note="This region represents a CpG dinucleotide"
  misc_feature (61)..(61): /note="Nucleotide may be methylated to form 5-methylcytosine"
caactgtgtttttaacggataagtgtccatgacaacaggaaaaaatgccacagcagtgcacgcaacactgttagcagactcaaagagattagggtagaattagcctagtgattccttccttc

SEQ ID NO: 13685 - DNA, 122 bp, Homo sapiens
  misc_feature (61)..(62): /note="This region represents a CpG dinucleotide"
  misc_feature (61)..(61): /note="Nucleotide may be methylated to form 5-methylcytosine"
tttctgtgccaaggagactgtcaaacagataggaccaaagccttagcaaattcctgactgcgtatctcgttatcacacttgtgggtcaggggtagacaatgaatattagtcgaacaaataaa

SEQ ID NO: 13686 - DNA, 122 bp, Homo sapiens
  misc_feature (61)..(62): /note="This region represents a CpG dinucleotide"
  misc_feature (61)..(61): /note="Nucleotide may be methylated to form 5-methylcytosine"
ataatcatccatcccacaggctgtctgatggcaagaattttaagccccatttaaggtggacgctagaattatttctggatggagcagagtagcacaagctgctgagctgcaaatcaccgtga

SEQ ID NO: 13687 - DNA, 122 bp, Homo sapiens
  misc_feature (61)..(62): /note="This region represents a CpG dinucleotide"
  misc_feature (61)..(61): /note="Nucleotide may be methylated to form 5-methylcytosine"
acttgaaatatggacgaaaccaaatatagcatttagacaagggggatttctttacccagccggaattaatacaataaaaaatatttttgtctttattattaacagtgctaattaagccaaaa

SEQ ID NO: 13688 - DNA, 122 bp, Homo sapiens
  misc_feature (61)..(62): /note="This region represents a CpG dinucleotide"
  misc_feature (61)..(61): /note="Nucleotide may be methylated to form 5-methylcytosine"
cttcttcaatcctaacattcacagttccttctaccacatggcttctaacgtctctcatcacgcaagtctcactccttttgagccaatctagcctactaatccattctgttaatgttcctctg

SEQ ID NO: 13689 - DNA, 122 bp, Homo sapiens
  misc_feature (61)..(62): /note="This region represents a CpG dinucleotide"
  misc_feature (61)..(61): /note="Nucleotide may be methylated to form 5-methylcytosine"
agaacaagaccagctggccttctgcagtccctgccaggtcccagccctgactttgtggttcgactttggtttgttcatccatgaaatggatgagcagaaccaactttggagagttgtagaga

SEQ ID NO: 13690 - DNA, 122 bp, Homo sapiens
  misc_feature (61)..(62): /note="This region represents a CpG dinucleotide"
  misc_feature (61)..(61): /note="Nucleotide may be methylated to form 5-methylcytosine"
ctacaaacaaaaaacagctcactgatatacgccctatctgaccaagcttagtcaccagagcggttatggaaagtgactagactgcagcacacatattcacctgccagaggaatcagataatt

SEQ ID NO: 13691 - DNA, 122 bp, Homo sapiens
  misc_feature (61)..(62): /note="This region represents a CpG dinucleotide"
  misc_feature (61)..(61): /note="Nucleotide may be methylated to form 5-methylcytosine"
tgagtttggtaattgccaaccggtatgttacccaagacatatgcatcctctcatgtggagcggccaggctcatggctggaatttcaagcacttgctccaattgtttgcagagttctggtcat

SEQ ID NO: 13692 - DNA, 122 bp, Homo sapiens
  misc_feature (61)..(62): /note="This region represents a CpG dinucleotide"
  misc_feature (61)..(61): /note="Nucleotide may be methylated to form 5-methylcytosine"
ttggcatctgaacttctcctgttctgtcttcgctgtctgtgtggtatagctgggattgtacgtgaaagaaaacttaatacaccctatctacacagaggaacatggtgtcccatctcccagaa

SEQ ID NO: 13693 - DNA, 122 bp, Homo sapiens
  misc_feature (61)..(62): /note="This region represents a CpG dinucleotide"
  misc_feature (61)..(61): /note="Nucleotide may be methylated to form 5-methylcytosine"
aacaaaagctgagaactcaggggaagcttttccaaaaggttgatgctatgtttttgcatgcgaaaattttgctttggggttgtgaactctttaaaacaaacagttgaggtcattgttaatgg

SEQ ID NO: 13694 - DNA, 122 bp, Homo sapiens
  misc_feature (61)..(62): /note="This region represents a CpG dinucleotide"
  misc_feature (61)..(61): /note="Nucleotide may be methylated to form 5-methylcytosine"
tccgcaggccccggccattccacagcatgcggcagagggcgccgcagccactgccaggagcggcagaacccccaccctctgcaggtccggccccggggttctgagccacgagggcgggcgca

SEQ ID NO: 13695 - DNA, 122 bp, Homo sapiens
  misc_feature (61)..(62): /note="This region represents a CpG dinucleotide"
  misc_feature (61)..(61): /note="Nucleotide may be methylated to form 5-methylcytosine"
ggctgaagggcacacatgctacttctggggcttggcacgatctctccagagaagtgtgcacgtgggcctaagcaccacggcgttctgcagagaggaggcagcttggcatcagaaacccgggt

SEQ ID NO: 13696 - DNA, 122 bp, Homo sapiens
  misc_feature (61)..(62): /note="This region represents a CpG dinucleotide"
  misc_feature (61)..(61): /note="Nucleotide may be methylated to form 5-methylcytosine"
agcctcaagttgcacctctgtggctttctgtaaattcgagtcctacagccacttcgagaacgctgcaatccccaaggcccacttggtccatgctgaagaagcggctgtgaccccaatcctgc

SEQ ID NO: 13697 - DNA, 122 bp, Homo sapiens
  misc_feature (61)..(62): /note="This region represents a CpG dinucleotide"
  misc_feature (61)..(61): /note="Nucleotide may be methylated to form 5-methylcytosine"
taaagagggtggaaagaactctaatactgaaacctagtcataggtcaaggctgcagaattcgccccatttccattttgctgattcatatcagtcagatatgactatgccacttgattttgtc

SEQ ID NO: 13698 - DNA, 122 bp, Homo sapiens
  misc_feature (61)..(62): /note="This region represents a CpG dinucleotide"
  misc_feature (61)..(61): /note="Nucleotide may be methylated to form 5-methylcytosine"
agtttattgcaactacactaacttcgtaattttagatttgcagttgcatcctcctaactgcgtctaatggcagaagcaccaccttgtggcaaaagtaggagcttttaaattacagaagttag

SEQ ID NO: 13699 - DNA, 122 bp, Homo sapiens
  misc_feature (61)..(62): /note="This region represents a CpG dinucleotide"
  misc_feature (61)..(61): /note="Nucleotide may be methylated to form 5-methylcytosine"
tttccctacaaaataatttattggaacacacagctacagcagacactctatgtacaagcacgttgacactcctgacctaccctcaactaggggacccttttcttcccccttgccttgcggac

SEQ ID NO: 13700 - DNA, 122 bp, Homo sapiens
  misc_feature (61)..(62): /note="This region represents a CpG dinucleotide"
  misc_feature (61)..(61): /note="Nucleotide may be methylated to form 5-methylcytosine"
ttaaaaaagctttgaaacagaaaacatcagtgctccattctcaaaaccctgcactgtttacgatgaataaagtatgtaagaatcatagataatgtctgttagttagttggccaatggtcaac

SEQ ID NO: 13701 - DNA, 122 bp, Homo sapiens
  misc_feature (61)..(62): /note="This region represents a CpG dinucleotide"
  misc_feature (61)..(61): /note="Nucleotide may be methylated to form 5-methylcytosine"
actcaccactgacttaagcaatgcagagcacataagcactaagagactccttcggcagggcgtggtggctcctgcctgtaatcccagcactttgggagggtgaggtgggtggataacaaggt

SEQ ID NO: 13702 - DNA, 122 bp, Homo sapiens
  misc_feature (61)..(62): /note="This region represents a CpG dinucleotide"
  misc_feature (61)..(61): /note="Nucleotide may be methylated to form 5-methylcytosine"
tctgtaaattatcttaattcaaatcttatctcctcaggacattaccattcgagtctcccacggatgtttattagagtgataaataagaaaaaaatttcagagatgcatagtatgttgtaaaa

SEQ ID NO: 13703 - DNA, 122 bp, Homo sapiens
  misc_feature (61)..(62): /note="This region represents a CpG dinucleotide"
  misc_feature (61)..(61): /note="Nucleotide may be methylated to form 5-methylcytosine"
gttgaggtggccttctggtacagcatgaatcagcaggtttggagcactggtgcacagccccgcatgttatgtaaccatgctacgtgaggcgcattaggtgattacccatgtgagctcgtgct

SEQ ID NO: 13704 - DNA, 122 bp, Homo sapiens
  misc_feature (61)..(62): /note="This region represents a CpG dinucleotide"
  misc_feature (61)..(61): /note="Nucleotide may be methylated to form 5-methylcytosine"
ttctgttgtaatgaaaggtgaggctccaggcagactgcattccttttaaaacaagacagacgtaacaaatcagctgaagtccaaaaaaaaaaaaaaaaaaaaaaaacaaaagctttaaatgc

SEQ ID NO: 13705 - DNA, 122 bp, Homo sapiens
  misc_feature (61)..(62): /note="This region represents a CpG dinucleotide"
  misc_feature (61)..(61): /note="Nucleotide may be methylated to form 5-methylcytosine"
gcccttaaaaggcttaagcagggggaggcttaatcagattttgaagcattaatctctgcacggtgtagatatgaatcagagggagtcaagaatggatatagcagatcagtttggaaactctg

SEQ ID NO: 13706 - DNA, 122 bp, Homo sapiens
  misc_feature (61)..(62): /note="This region represents a CpG dinucleotide"
  misc_feature (61)..(61): /note="Nucleotide may be methylated to form 5-methylcytosine"
gcaggctgaagattcaggagcagatacagataaacccagtgtggccccagccaagaggtccggatcacttccctcttctcacagaatcctgcagagatggcagctgttcttcagggggtgtt

SEQ ID NO: 13707 - DNA, 122 bp, Homo sapiens
  misc_feature (61)..(62): /note="This region represents a CpG dinucleotide"
  misc_feature (61)..(61): /note="Nucleotide may be methylated to form 5-methylcytosine"
agtcatagcttttctttctttgctcatgaacctgatgactactttaactacaagagcttccgtaaaggattgcacgcatgaatgcacatgtgcacacacacatacatatgcacagatacgca

SEQ ID NO: 13708 - DNA, 122 bp, Homo sapiens
  misc_feature (61)..(62): /note="This region represents a CpG dinucleotide"
  misc_feature (61)..(61): /note="Nucleotide may be methylated to form 5-methylcytosine"
tattttctgggacagtcggtctgttcatgagaaagggcggttgtgcaatcgttctccctacgtcaactctgagaagtcggttgtgccctgcagatattgatgtcagcctgtttgctctctgg

SEQ ID NO: 13709 - DNA, 122 bp, Homo sapiens
  misc_feature (61)..(62): /note="This region represents a CpG dinucleotide"
  misc_feature (61)..(61): /note="Nucleotide may be methylated to form 5-methylcytosine"
gttcacttaaagttgtaaattatggttttcagaggaagttgattttatttactcaccttgcgattaatccactgtgaactctggcctctaggaagctgtccaagaaatagggacatagttgg

SEQ ID NO: 13710 - DNA, 122 bp, Homo sapiens
  misc_feature (61)..(62): /note="This region represents a CpG dinucleotide"
  misc_feature (61)..(61): /note="Nucleotide may be methylated to form 5-methylcytosine"
ggaagaggggctaagatgtgggacgaacgtgattattcaatgggcatgcgcttccggccacgcatcacacgcacatacaccagcgcggttatccataactctaccatttcaagtgagccgca

SEQ ID NO: 13711 - DNA, 122 bp, Homo sapiens
  misc_feature (61)..(62): /note="This region represents a CpG dinucleotide"
  misc_feature (61)..(61): /note="Nucleotide may be methylated to form 5-methylcytosine"
agaaggtcagggagagactctttttctgaggcctaaagcttcccatcgttagaacaagaccgtaacaagggctgtgggagtcatgagccaggagccgtggacagagcccaatgtatacgtat

SEQ ID NO: 13712 - DNA, 122 bp, Homo sapiens
  misc_feature (61)..(62): /note="This region represents a CpG dinucleotide"
  misc_feature (61)..(61): /note="Nucleotide may be methylated to form 5-methylcytosine"
atgagatgtgactcagcagcccttccctttctagatgatctgcagattttctggtgttgtcgtcttttgtcctggggccagtttggagtggctgtctctactcatcctggccccgttggctg

SEQ ID NO: 13713 - DNA, 122 bp, Homo sapiens
  misc_feature (61)..(62): /note="This region represents a CpG dinucleotide"
  misc_feature (61)..(61): /note="Nucleotide may be methylated to form 5-methylcytosine"
tcttaaacatacattgcttaatcccttgctttgtgcatggtgaatactcaaagccttcatcgtaggaatgactaaatgacaagtggatgaaacacagacctatcacagcttgatcctgtcca

SEQ ID NO: 13714 - DNA, 122 bp, Homo sapiens
  misc_feature (61)..(62): /note="This region represents a CpG dinucleotide"
  misc_feature (61)..(61): /note="Nucleotide may be methylated to form 5-methylcytosine"
cacacagcgacatgtgcacacacaggaacacagaggcccacttacatataaatgcagatgcgtgcctgcatcaacgagcgggagcacattgggcaaatgcacgtgtacatgccctacgtgaa

SEQ ID NO: 13715 - DNA, 122 bp, Homo sapiens
  misc_feature (61)..(62): /note="This region represents a CpG dinucleotide"
  misc_feature (61)..(61): /note="Nucleotide may be methylated to form 5-methylcytosine"
ctaccagagctggagtctcatctgaaggctcaactgaggaaagatctactttcaacctcacgtagttgttggtaggatttagttaattgtggaccattgggtgaaattctttttcttgtggg

SEQ ID NO: 13716 - DNA, 122 bp, Homo sapiens
  misc_feature (61)..(62): /note="This region represents a CpG dinucleotide"
  misc_feature (61)..(61): /note="Nucleotide may be methylated to form 5-methylcytosine"
ctggagtcatcctctgctggaccctgccccactgactcactcttgctcagagagtagcagcgatgcctctcaccactgggaaggcagcccactcctgtggatgggaaatttgttctctagtt

SEQ ID NO: 13717 - DNA, 122 bp, Homo sapiens
  misc_feature (61)..(62): /note="This region represents a CpG dinucleotide"
  misc_feature (61)..(61): /note="Nucleotide may be methylated to form 5-methylcytosine"
gcttactcactaaattttatttgtaaccccaaaatcaatcttaacatttttgtggtcattcgtgaacatgcacagagcagcaaaaagtaagagtcatggatgcacacattcccagctgactt

SEQ ID NO: 13718 - DNA, 122 bp, Homo sapiens
  misc_feature (61)..(62): /note="This region represents a CpG dinucleotide"
  misc_feature (61)..(61): /note="Nucleotide may be methylated to form 5-methylcytosine"
ataaataacaaaaagctgtggaaccattcacttatctgtgcatttcctttaggtaaattacgtctcaataaagtgctggggagaaagcaatgaagcactgacatacgctacaccaaggatga

SEQ ID NO: 13719 - DNA, 122 bp, Homo sapiens
  misc_feature (61)..(62): /note="This region represents a CpG dinucleotide"
  misc_feature (61)..(61): /note="Nucleotide may be methylated to form 5-methylcytosine"
tttagtagagacaggtttcaccatgttacccaggttggtctcctgacctcacgatctgcccgtctcggcctcccaaagtgctgggattacaggcctgagccactgtgcccggcccaacaaga

SEQ ID NO: 13720 - DNA, 122 bp, Homo sapiens
  misc_feature (61)..(62): /note="This region represents a CpG dinucleotide"
  misc_feature (61)..(61): /note="Nucleotide may be methylated to form 5-methylcytosine"
tgcagtgccagcctcattaggtcggcctgcgtggtcctctgaaatgtacagttctgttgtcgtcactgtgtataaacagaacaaggagagaactgccttattcctgggcactggccttttta

SEQ ID NO: 13721 - DNA, 122 bp, Homo sapiens
  misc_feature (61)..(62): /note="This region represents a CpG dinucleotide"
  misc_feature (61)..(61): /note="Nucleotide may be methylated to form 5-methylcytosine"
cttaagatcagaatatagatctattgtctttcctcacctggctgttaccaaactaacttccgcatctcctgggagtgctttctatttcatccaggcagtgcccttatctgatctggagtggg

SEQ ID NO: 13722 - DNA, 122 bp, Homo sapiens
  misc_feature (61)..(62): /note="This region represents a CpG dinucleotide"
  misc_feature (61)..(61): /note="Nucleotide may be methylated to form 5-methylcytosine"
aaccgcagttctcagatgttgctctgagggttaagtggatcgtgtgtgatgtgcctggctcggttcctggctcactgggtgagctctgttaagtggcagctgttgttgctgccactgccact

SEQ ID NO: 13723 - DNA, 122 bp, Homo sapiens
  misc_feature (61)..(62): /note="This region represents a CpG dinucleotide"
  misc_feature (61)..(61): /note="Nucleotide may be methylated to form 5-methylcytosine"
atacactataggatgtttcaacaatgatgaaatcacctaatgactcatttcacagaacctcgcctagtattccctacatgactgtatgtgtgcgtgttgtacacatatatgtgtgtgtgttt

SEQ ID NO: 13724 - DNA, 122 bp, Homo sapiens
  misc_feature (61)..(62): /note="This region represents a CpG dinucleotide"
  misc_feature (61)..(61): /note="Nucleotide may be methylated to form 5-methylcytosine"
aaaaagatagcaatagccttaaagtaaaagcacagaacaatatacatttctgttttttgccggaatggaaaagcattgcttaaattaatagaatttttaaacatatattttaagtataaaaa

SEQ ID NO: 13725 - DNA, 122 bp, Homo sapiens
  misc_feature (61)..(62): /note="This region represents a CpG dinucleotide"
  misc_feature (61)..(61): /note="Nucleotide may be methylated to form 5-methylcytosine"
gtgacatagttcttggcaatgataatatggaaatgacaccaaaagctcaggcaacaaaaacgaaagtaagcaggtaggaccacatcgaatgtaaaagctctgtacagcaaagaaagcagaag

SEQ ID NO: 13726 - DNA, 122 bp, Homo sapiens
  misc_feature (61)..(62): /note="This region represents a CpG dinucleotide"
  misc_feature (61)..(61): /note="Nucleotide may be methylated to form 5-methylcytosine"
gacctctggatgaccctggtttcctgtttctgtggaccacaatgctctggggcagtgctgcgtatcagaggttcaagccatggctggagcagccacccctgaagtagacaccctaatatcct

SEQ ID NO: 13727 - DNA, 122 bp, Homo sapiens
  misc_feature (61)..(62): /note="This region represents a CpG dinucleotide"
  misc_feature (61)..(61): /note="Nucleotide may be methylated to form 5-methylcytosine"
tagtccctccctttgtggccatttacaattacacagcaaccacagggtttcatgactacacgtgtttatttgtacaagcgcagcgtcccctgtgtgtgcccagtgctgtgcctgtgcgcagt

SEQ ID NO: 13728 - DNA, 122 bp, Homo sapiens
  misc_feature (61)..(62): /note="This region represents a CpG dinucleotide"
  misc_feature (61)..(61): /note="Nucleotide may be methylated to form 5-methylcytosine"
tcacagtaacagcctctgcccagcaatttccttttcagcctgcagggtcctcacgctcaccggtctggtcacagggttcaccctgttttgccagctgccagctcatccagccttcctaagtg

SEQ ID NO: 13729 - DNA, 122 bp, Homo sapiens
  misc_feature (61)..(62): /note="This region represents a CpG dinucleotide"
  misc_feature (61)..(61): /note="Nucleotide may be methylated to form 5-methylcytosine"
cgataactgtaatatgtacacacacccacagaagactcccttcagctgtaaaaaatcaagcgtgatctggagcacaaacccacttttctgattgctgtagggactttagtcacaaacaaggg

SEQ ID NO: 13730 - DNA, 122 bp, Homo sapiens
  misc_feature (61)..(62): /note="This region represents a CpG dinucleotide"
  misc_feature (61)..(61): /note="Nucleotide may be methylated to form 5-methylcytosine"
tgagtttgcattagcagtggatgtctggtgtgtggcattgagaaggattccaagtacaaccgcaggctaaacaggaaagatcaatgagtaatatttgccttgggtgtagaatgggggaatga

SEQ ID NO: 13731 - DNA, 122 bp, Homo sapiens
  misc_feature (61)..(62): /note="This region represents a CpG dinucleotide"
  misc_feature (61)..(61): /note="Nucleotide may be methylated to form 5-methylcytosine"
accccggatgtcgtccccacttctcgctccaaggagcgcggggccggactctgaacgcctcgcccgccaattcaaagggttggccctaactttgaacgccccacccaccacgtggaatgttc

SEQ ID NO: 13732 - DNA, 122 bp, Homo sapiens
  misc_feature (61)..(62): /note="This region represents a CpG dinucleotide"
  misc_feature (61)..(61): /note="Nucleotide may be methylated to form 5-methylcytosine"
tagctggcctgcaggtacaaaaagagtgagggacatgtatgcagagcaggctcagcccaacggtggcttagagctgcccagccaacatcagcctcatctagccaacctccagctgactcaca

SEQ ID NO: 13733 - DNA, 122 bp, Homo sapiens
  misc_feature (61)..(62): /note="This region represents a CpG dinucleotide"
  misc_feature (61)..(61): /note="Nucleotide may be methylated to form 5-methylcytosine"
gatgggcgcgtggcctgtgcacgcatgcaggcctgcacactcacatgcacgcacacacaccggacaggttaatccccgtatcattggctgccacgggttgcctaagaagcttaacagggcat

SEQ ID NO: 13734 - DNA, 122 bp, Homo sapiens
  misc_feature (61)..(62): /note="This region represents a CpG dinucleotide"
  misc_feature (61)..(61): /note="Nucleotide may be methylated to form 5-methylcytosine"
tggcaagctgaagtgtgacaaaagaataatgaatcacagatatatctaaaataagctctacgccatcacagtagttttgaattagcagccaatggtagtggtggtaatctcctcccccttca

SEQ ID NO: 13735 - DNA, 122 bp, Homo sapiens
  misc_feature (61)..(62): /note="This region represents a CpG dinucleotide"
  misc_feature (61)..(61): /note="Nucleotide may be methylated to form 5-methylcytosine"
gtttgaactgaggagccctggcattgaagtgttctgtgctttcactctctgtgtgaggatcgtttagaggtggtagaattaaatgtaatgtgtcagacatttgttaagtgacctttcctaga

SEQ ID NO: 13736 - DNA, 122 bp, Homo sapiens
  misc_feature (61)..(62): /note="This region represents a CpG dinucleotide"
  misc_feature (61)..(61): /note="Nucleotide may be methylated to form 5-methylcytosine"
ccattattctaggtcctaatctgtttggtggagttgttactccacttctctgaccttgcgcgtagggcctgggcactcctaggaattaggggcagggtggggttagggctgaaacccatttg

SEQ ID NO: 13737 - DNA, 122 bp, Homo sapiens
  misc_feature (61)..(62): /note="This region represents a CpG dinucleotide"
  misc_feature (61)..(61): /note="Nucleotide may be methylated to form 5-methylcytosine"
gcacaaggctttccaagcagaaccttgctgattgtgtgtgtgtgtgtgtgtgtgtgtgcacgtgtgcttgcagatgcttagaatcacaggcttttatgatctgggtttcttaaaccttatct

SEQ ID NO: 13738 - DNA, 122 bp, Homo sapiens
  misc_feature (61)..(62): /note="This region represents a CpG dinucleotide"
  misc_feature (61)..(61): /note="Nucleotide may be methylated to form 5-methylcytosine"
gccctgggcactgtggagcagagaaaagccatttccacaatactctaaattcttcacccacgaaatctgtaagtctaggtatttggttagtgtgtatgcctctaaatcagagttagattgtt

SEQ ID NO: 13739 - DNA, 122 bp, Homo sapiens
  misc_feature (61)..(62): /note="This region represents a CpG dinucleotide"
  misc_feature (61)..(61): /note="Nucleotide may be methylated to form 5-methylcytosine"
tggaaatatttttggttgccaccactgggatggggatgctactggtctctagtaggcagacgccagagatgctgccaaacttcctccaatgaccaggacagcccccacgacaaagaattatc

SEQ ID NO: 13740 - DNA, 122 bp, Homo sapiens
  misc_feature (61)..(62): /note="This region represents a CpG dinucleotide"
  misc_feature (61)..(61): /note="Nucleotide may be methylated to form 5-methylcytosine"
atttctttaaaaagggtgagaaactggccactgtcttgcattttgacttctgactcacggcgaatatttcaaggcttatagactcaatctatttttccatatcttggtcaatttattaacca

SEQ ID NO: 13741 - DNA, 122 bp, Homo sapiens
  misc_feature (61)..(62): /note="This region represents a CpG dinucleotide"
  misc_feature (61)..(61): /note="Nucleotide may be methylated to form 5-methylcytosine"
tgtttctgtttcactttcaggattcttcagctatttggcaaagttgaagacataagttcccggttcacaaccattttctccattttacagagggagagacgtaaggcagaagaagattacat

SEQ ID NO: 13742 - DNA, 122 bp, Homo sapiens
  misc_feature (61)..(62): /note="This region represents a CpG dinucleotide"
  misc_feature (61)..(61): /note="Nucleotide may be methylated to form 5-methylcytosine"
aactggaattgaagcatcaactgaagatttctgtgcaactgtggtttaaattgaatgctgcgctttgtataaacataattttttgtggtttaactttaggctgttctctgcggtcttcccat

SEQ ID NO: 13743 - DNA, 122 bp, Homo sapiens
  misc_feature (61)..(62): /note="This region represents a CpG dinucleotide"
  misc_feature (61)..(61): /note="Nucleotide may be methylated to form 5-methylcytosine"
ccccaccccctgcagccctgtccctccaggatgcatggccttgtcctgtgtgggggtggccgagagcactgccccagccctgggtaccttgggcaggaagctggcagaggccagggctgcca

SEQ ID NO: 13744 - DNA, 122 bp, Homo sapiens
  misc_feature (61)..(62): /note="This region represents a CpG dinucleotide"
  misc_feature (61)..(61): /note="Nucleotide may be methylated to form 5-methylcytosine"
tggcagagtaagtgggatccaaatacgggagtttgtatctgttttaagattggagaaaagcggcatgtttgtatgctgctgggaaagatccagcagagaatgaaacatcaacattatgagag

SEQ ID NO: 13745 - DNA, 122 bp, Homo sapiens
  misc_feature (61)..(62): /note="This region represents a CpG dinucleotide"
  misc_feature (61)..(61): /note="Nucleotide may be methylated to form 5-methylcytosine"
taatgcacggcgttcagcactgacgatgtgtttagcagctgtggctgtgtctcagttcaccgctcattctctgagcccttcctgcaagacctgccctggcctcagaacacggagggaagcag

SEQ ID NO: 13746 - DNA, 122 bp, Homo sapiens
  misc_feature (61)..(62): /note="This region represents a CpG dinucleotide"
  misc_feature (61)..(61): /note="Nucleotide may be methylated to form 5-methylcytosine"
atgtccacaaagacattgaagttctagagaatactacagtaacattcttgacaatgaaaacggaattcatatataggggttcagctgagggtagtataaacaaagtatcaaaccatgttttc

SEQ ID NO: 13747 - DNA, 122 bp, Homo sapiens
  misc_feature (61)..(62): /note="This region represents a CpG dinucleotide"
  misc_feature (61)..(61): /note="Nucleotide may be methylated to form 5-methylcytosine"
tgcccgccttgacctcccaaactgctgggattaaaggcatgagccaccgtgcccagccagcgtgtgaattttctgattcagacctgccaagggaggaagtctctggcaagtccagaaatgct

SEQ ID NO: 13748 - DNA, 122 bp, Homo sapiens
  misc_feature (61)..(62): /note="This region represents a CpG dinucleotide"
  misc_feature (61)..(61): /note="Nucleotide may be methylated to form 5-methylcytosine"
tgtcttggtctcacgccttccccagctcttcctgatgagctgccagtccacacctgcaagcgtccccaggccccacacagcaggtctgaccagcactggtccaggcccaggcccagggagtg

SEQ ID NO: 13749 - DNA, 122 bp, Homo sapiens
  misc_feature (61)..(62): /note="This region represents a CpG dinucleotide"
  misc_feature (61)..(61): /note="Nucleotide may be methylated to form 5-methylcytosine"
cagtgctaagttgtgccaaaaactagcatgtttcactgaatcagagtggtaagcacaccccgcctgtccgggactggggtgccttgttgtttacgaggaggtgcggcagcccccgcaactgg

SEQ ID NO: 13750 - DNA, 122 bp, Homo sapiens
  misc_feature (61)..(62): /note="This region represents a CpG dinucleotide"
  misc_feature (61)..(61): /note="Nucleotide may be methylated to form 5-methylcytosine"
tcatgtcacagaagcaatgctgcagatggaattgagttaccaataaaagtctacagtctgcgtttgtattgtattgttcatgatgattttgccatagatacagtcagtctctttgattaaag

SEQ ID NO: 13751 - DNA, 122 bp, Homo sapiens
  misc_feature (61)..(62): /note="This region represents a CpG dinucleotide"
  misc_feature (61)..(61): /note="Nucleotide may be methylated to form 5-methylcytosine"
acaacataaatgtcgttcaacagctaagtacacaaacaaattgcagtatatccatacaatcgaataccatttggcaataaaaagaaacaagctacggatatacctaacaacatggctgaatc

SEQ ID NO: 13752 - DNA, 122 bp, Homo sapiens
  misc_feature (61)..(62): /note="This region represents a CpG dinucleotide"
  misc_feature (61)..(61): /note="Nucleotide may be methylated to form 5-methylcytosine"
ccaagtgatcaaggctaacatcaccagtggtgagtcatgttgacatcgtcatgttgacctcgtcctccccgctatggtacgatatgaaggacacttcacttctgtggtattttcccccaaaa

SEQ ID NO: 13753 - DNA, 122 bp, Homo sapiens
  misc_feature (61)..(62): /note="This region represents a CpG dinucleotide"
  misc_feature (61)..(61): /note="Nucleotide may be methylated to form 5-methylcytosine"
gagcgctcttctagccctagattctataaaactgtccttacctgctgtggaaaacaggtgcggactgagtgctctgtgtaaccaaaagatggcccttcaaagacagctgttgggagcttcag

SEQ ID NO: 13754 - DNA, 122 bp, Homo sapiens
  misc_feature (61)..(62): /note="This region represents a CpG dinucleotide"
  misc_feature (61)..(61): /note="Nucleotide may be methylated to form 5-methylcytosine"
aacaggattaaaaagaaatttttaattccttgtctctcttctgatggctgaacagaactgcggtgtcaaatggaaagcagcacacaagaattcccttgcagaccttgatctttcgcagaaat

SEQ ID NO: 13755 - DNA, 122 bp, Homo sapiens
  misc_feature (61)..(62): /note="This region represents a CpG dinucleotide"
  misc_feature (61)..(61): /note="Nucleotide may be methylated to form 5-methylcytosine"
atcaaccttagaatcagactgcccatatcttaatttctactttgacacaatccttatggccgttggaaagttattttatcattctgggcctcagtttcctcatctgtaaatgggtgtaataa

SEQ ID NO: 13756 - DNA, 122 bp, Homo sapiens
  misc_feature (61)..(62): /note="This region represents a CpG dinucleotide"
  misc_feature (61)..(61): /note="Nucleotide may be methylated to form 5-methylcytosine"
cagctggacttttccttggttggtcttcattcacgttgcctattatgaggatggcttcctcgtgaactccaagcagctccaaacaggaaacctggtttcctcaaaatgtggtttgtttacaa

SEQ ID NO: 13757 - DNA, 122 bp, Homo sapiens
  misc_feature (61)..(62): /note="This region represents a CpG dinucleotide"
  misc_feature (61)..(61): /note="Nucleotide may be methylated to form 5-methylcytosine"
gtgggtcagatagcaagatatgtagcatgaggcaggcatgacacatgcttcggtgttccgcgctgagtaccatgggaaggcacaagcgggcctgtactcttgcctcatgaggaagtggttat

SEQ ID NO: 13758 - DNA, 122 bp, Homo sapiens
  misc_feature (61)..(62): /note="This region represents a CpG dinucleotide"
  misc_feature (61)..(61): /note="Nucleotide may be methylated to form 5-methylcytosine"
ccctcttcaacttcgtcagcccaatcctcagtaggtaaagttgtcttcttgtctgatgcacgtgctgcccttgctgcacctctatcacacctgtgccttctctatcatgacacttaatctac

SEQ ID NO: 13759 - DNA, 122 bp, Homo sapiens
  misc_feature (61)..(62): /note="This region represents a CpG dinucleotide"
  misc_feature (61)..(61): /note="Nucleotide may be methylated to form 5-methylcytosine"
tgcattgtaggttattgagcagtcattatccctagtcctcaccagcagatgtcagtagcacgtcccctgacttgtgacaaccaaatatgtctccagtaaatgtctggagaaggcaaaatcag

SEQ ID NO: 13760 - DNA, 122 bp, Homo sapiens
  misc_feature (61)..(62): /note="This region represents a CpG dinucleotide"
  misc_feature (61)..(61): /note="Nucleotide may be methylated to form 5-methylcytosine"
cattagttgagtcacacttaagcctgaatttcttcctttgtaaaatggaaataactatctcgtgagttgctatgagaattaaaggagatgatgagttataaaaagcctatagtaaatatact

SEQ ID NO: 13761 - DNA, 122 bp, Homo sapiens
  misc_feature (61)..(62): /note="This region represents a CpG dinucleotide"
  misc_feature (61)..(61): /note="Nucleotide may be methylated to form 5-methylcytosine"
ctggttttgagggaggatgaccttaaactctctcactcccaagctgggtgcaaaggtgaccgagctcaaagcccagcctccaagtatcacgactgccctgttctagaaatcatttctgggag

SEQ ID NO: 13762 - DNA, 122 bp, Homo sapiens
  misc_feature (61)..(62): /note="This region represents a CpG dinucleotide"
  misc_feature (61)..(61): /note="Nucleotide may be methylated to form 5-methylcytosine"
attgctgctatgaagactactactacattgcacaacatcctaactcactttataatttctcgcaacttcttttctcccaccatagagataattctttaacatctgaacacatcctattggaa

SEQ ID NO: 13763 - DNA, 122 bp, Homo sapiens
  misc_feature (61)..(62): /note="This region represents a CpG dinucleotide"
  misc_feature (61)..(61): /note="Nucleotide may be methylated to form 5-methylcytosine"
tcattgcagacaacactattggacagcactaagtgtggcttccttgtttataagccctctcgccattccacattattctctagctacagcctcatttctctgattctcttccaagccagttt

SEQ ID NO: 13764 - DNA, 122 bp, Homo sapiens
  misc_feature (61)..(62): /note="This region represents a CpG dinucleotide"
  misc_feature (61)..(61): /note="Nucleotide may be methylated to form 5-methylcytosine"
ctttgctaacatttacatgtgatcactttgaaatactccttgagttttgctgaggaataacgctgattacaatggcgaatgaacaataatttaaagcatattaatgactttgttaatccaaa

SEQ ID NO: 13765 - DNA, 122 bp, Homo sapiens
  misc_feature (61)..(62): /note="This region represents a CpG dinucleotide"
  misc_feature (61)..(61): /note="Nucleotide may be methylated to form 5-methylcytosine"
cagtggccaggtttgtgtatcttgccctgcctgtccagttgcacacactcaagcatgactcgttaacttaatttcctgccatatatctcggttcttctagaactggaatcttgtccttaatt

SEQ ID NO: 13766 - DNA, 122 bp, Homo sapiens
  misc_feature (61)..(62): /note="This region represents a CpG dinucleotide"
  misc_feature (61)..(61): /note="Nucleotide may be methylated to form 5-methylcytosine"
gtcagttggaggtcagggaggcagggaaggggtaagctgtgggctgagagatgaaacaagcggttctaccaatccatgtgaaacctttagggagaatgtagggctttaaaaaacacatttgg

SEQ ID NO: 13767 - DNA, 122 bp, Homo sapiens
  misc_feature (61)..(62): /note="This region represents a CpG dinucleotide"
  misc_feature (61)..(61): /note="Nucleotide may be methylated to form 5-methylcytosine"
gcactttgccacaccatatgggtggggaccatacatgatcgcttccagtctcatgccaaacgtggcacagaaacttcattccttatttttattttctgattttcctccacaacttgagatcc

SEQ ID NO: 13768 - DNA, 122 bp, Homo sapiens
  misc_feature (61)..(62): /note="This region represents a CpG dinucleotide"
  misc_feature (61)..(61): /note="Nucleotide may be methylated to form 5-methylcytosine"
ttctcagagacttcagctgaaatccaacttctgagaatgcttctagggttcgccagaacccgcctttgctagcctccctaggattatctcttgtgaccagcaccttcactgacagctccagt

SEQ ID NO: 13769 - DNA, 122 bp, Homo sapiens
  misc_feature (61)..(62): /note="This region represents a CpG dinucleotide"
  misc_feature (61)..(61): /note="Nucleotide may be methylated to form 5-methylcytosine"
ccttgcctcccccggcccccccgccccgccccgccccgtgcccagtaaatcacatgcaaccgcagtgtgagtttgccgggaatttccactgaaaccacactaagatattcttgactttacct

SEQ ID NO: 13770 - DNA, 122 bp, Homo sapiens
  misc_feature (61)..(62): /note="This region represents a CpG dinucleotide"
  misc_feature (61)..(61): /note="Nucleotide may be methylated to form 5-methylcytosine"
ggaagtgaaagggattgggcactttttgagcccattcaaagtcccaggcactctgttagacgctttccattcatctcctttaatcctttcaataaccctatgaaacgattggtgtcatctcc

SEQ ID NO: 13771 - DNA, 122 bp, Homo sapiens
  misc_feature (61)..(62): /note="This region represents a CpG dinucleotide"
  misc_feature (61)..(61): /note="Nucleotide may be methylated to form 5-methylcytosine"
tcatttagctgctctttgtctgctacacctttatatcatctttcatattcaaacattccacgtgctgcagctctaaataggagagatgttaatgaaatgcaaagactgtctcaacagttaaa

SEQ ID NO: 13772 - DNA, 122 bp, Homo sapiens
  misc_feature (61)..(62): /note="This region represents a CpG dinucleotide"
  misc_feature (61)..(61): /note="Nucleotide may be methylated to form 5-methylcytosine"
cttgttcctgactttctagtaccaaccgcaatgtaaaactatttgtgctccactgcaagccgagcaccatagattttatgggactgacatactttttttttatttaaaattcttgctttgtg

SEQ ID NO: 13773 - DNA, 122 bp, Homo sapiens
  misc_feature (61)..(62): /note="This region represents a CpG dinucleotide"
  misc_feature (61)..(61): /note="Nucleotide may be methylated to form 5-methylcytosine"
taccgtaactgtgatacacaatgtgaaaacacctaggatagtgcctgctgtgcagaaacacgttaacaagcagtagcagcgttagtaagtaacagtgtaaagtgaactgcagaaatgcaccc

SEQ ID NO: 13774 - DNA, 122 bp, Homo sapiens
  misc_feature (61)..(62): /note="This region represents a CpG dinucleotide"
  misc_feature (61)..(61): /note="Nucleotide may be methylated to form 5-methylcytosine"
tgaccttttgcttcctgaaacatggctcaaacacttccttaatttgcaggaacactcacacggccagggaaggtctgggtgctttttcagtagctgtgtacctcatattggcttgtttgcag

SEQ ID NO: 13775 - DNA, 122 bp, Homo sapiens
  misc_feature (61)..(62): /note="This region represents a CpG dinucleotide"
  misc_feature (61)..(61): /note="Nucleotide may be methylated to form 5-methylcytosine"
ttttaaacagagagcaagtgtaggagtaacaagtgccccccttgccgcggtcttgctaatcgcatcgccttttgagactttacgagacttctggggggccggtagctaagggagttactgga

SEQ ID NO: 13776 - DNA, 122 bp, Homo sapiens
  misc_feature (61)..(62): /note="This region represents a CpG dinucleotide"
  misc_feature (61)..(61): /note="Nucleotide may be methylated to form 5-methylcytosine"
atggcaacctccatcgctctacccagctgacagtgagctccaactttccagccatgtaagcgagtcatcttggaagcaactgtttctgcccgtagttgagtcacccctgctgatgccatatg

SEQ ID NO: 13777 - DNA, 122 bp, Homo sapiens
  misc_feature (61)..(62): /note="This region represents a CpG dinucleotide"
  misc_feature (61)..(61): /note="Nucleotide may be methylated to form 5-methylcytosine"
tggcttcagatggggctttgaaagctgtaattttaaagacaattaaattgctcaatgcaacgagctatgcaatacctccttaaattgctcaatacattggaagatttgggaaccactgggta

SEQ ID NO: 13778 - DNA, 122 bp, Homo sapiens
  misc_feature (61)..(62): /note="This region represents a CpG dinucleotide"
  misc_feature (61)..(61): /note="Nucleotide may be methylated to form 5-methylcytosine"
aggaagctgttgcaccatacaaccattgtgtgtgtgtgtgtgtgtgtgtgtgtgtgcacgcgccacaaactaaagtggaaaagtgtcacaggtatatcatttaggagaccttaatcacttct

SEQ ID NO: 13779 - DNA, 122 bp, Homo sapiens
  misc_feature (61)..(62): /note="This region represents a CpG dinucleotide"
  misc_feature (61)..(61): /note="Nucleotide may be methylated to form 5-methylcytosine"
cataatgttttcaaggttcatccatgattaagaatgtatcagcatttaattcctttttatcgtatgatgcactgagaagggctagtagtatctcacatggtatctcacatggtatggataca

SEQ ID NO: 13780 - DNA, 122 bp, Homo sapiens
  misc_feature (61)..(62): /note="This region represents a CpG dinucleotide"
  misc_feature (61)..(61): /note="Nucleotide may be methylated to form 5-methylcytosine"
cattggcttcctttccttgtcctctctcatgatcatccttagtgagctcatgattcctggcgaggagccgttagacctcttgatctcatgagtcaccgacttgacacagttatgtttacctc

SEQ ID NO: 13781 - DNA, 122 bp, Homo sapiens
  misc_feature (61)..(62): /note="This region represents a CpG dinucleotide"
  misc_feature (61)..(61): /note="Nucleotide may be methylated to form 5-methylcytosine"
cgccaaggacggagaaatagctctggtataactgctacccagttctccccctttctctcccgggcgagccaaatctttttcacgttttcaaccacaacgcagcgagccaagcatttaacgcg

SEQ ID NO: 13782 - DNA, 122 bp, Homo sapiens
  misc_feature (61)..(62): /note="This region represents a CpG dinucleotide"
  misc_feature (61)..(61): /note="Nucleotide may be methylated to form 5-methylcytosine"
ttttacaagtttctccagactatgtagctgggtcagagtccttggcaggtgttgccctttcgttcctttatctcctggattatagtgtgggccagaaggtcctaggagaggggtctggagtc

SEQ ID NO: 13783 - DNA, 122 bp, Homo sapiens
  misc_feature (61)..(62): /note="This region represents a CpG dinucleotide"
  misc_feature (61)..(61): /note="Nucleotide may be methylated to form 5-methylcytosine"
ttgaaaactgagggattaaaaagggtctgcagagttagtgacagagcattagctgttcctcgtagtaacagagttacagaaaatatttagcaacagaaggtttgtggctgaatctataacag

SEQ ID NO: 13784 - DNA, 122 bp, Homo sapiens
  misc_feature (61)..(62): /note="This region represents a CpG dinucleotide"
  misc_feature (61)..(61): /note="Nucleotide may be methylated to form 5-methylcytosine"
cagccatttcgataaaaaatagatataagaaataggacagaaaatgtcagatcgtatgtgcgttctagaccgctgattcgtcgatttgtaaaacaagagaaggataagatggtttccagatg

SEQ ID NO: 13785 - DNA, 122 bp, Homo sapiens
  misc_feature (61)..(62): /note="This region represents a CpG dinucleotide"
  misc_feature (61)..(61): /note="Nucleotide may be methylated to form 5-methylcytosine"
aatttgtcacttcattcttaaccatattatctctgctgcttaagtgagccctggttctgacgacctgaattctactcaaactagttatgcgaccttgaataagtcatctcacctttcgctaa

SEQ ID NO: 13786 - DNA, 122 bp, Homo sapiens
  misc_feature (61)..(62): /note="This region represents a CpG dinucleotide"
  misc_feature (61)..(61): /note="Nucleotide may be methylated to form 5-methylcytosine"
ttgttattcctgtcacaacttagaagttcgagtgctcacatggtaagctttgatttccatcgagaggaaaggctttatgttttataaaaaatatatactaaagtaatctacacgaagcttag

SEQ ID NO: 13787 - DNA, 122 bp, Homo sapiens
  misc_feature (61)..(62): /note="This region represents a CpG dinucleotide"
  misc_feature (61)..(61): /note="Nucleotide may be methylated to form 5-methylcytosine"
cactccggcgggaggtcctcttcacttccttccctccacgaagatctctccccttcaccacggacacagtgacatgtgctatccaattgtgacaaacacatcatctctgaatttggacactg

SEQ ID NO: 13788 - DNA, 122 bp, Homo sapiens
  misc_feature (61)..(62): /note="This region represents a CpG dinucleotide"
  misc_feature (61)..(61): /note="Nucleotide may be methylated to form 5-methylcytosine"
gcacaaagcctgggaaagtgggaagggaggggaagaaactgggacagacacctgggtcagcggctcgcccagggccccgaaccctgtgtcccagagctgagaagtcctgccccccttacctc

SEQ ID NO: 13789 - DNA, 122 bp, Homo sapiens
  misc_feature (61)..(62): /note="This region represents a CpG dinucleotide"
  misc_feature (61)..(61): /note="Nucleotide may be methylated to form 5-methylcytosine"
gatttggtttaatcggagcctcagctcatcagttaatttcactgtgtctgatctttcattcgtaaaatgagagataacctatctgacagccagataaagaggaataaagtttgcaaagcact

SEQ ID NO: 13790 - DNA, 122 bp, Homo sapiens
  misc_feature (61)..(62): /note="This region represents a CpG dinucleotide"
  misc_feature (61)..(61): /note="Nucleotide may be methylated to form 5-methylcytosine"
tcaccttcccccacgtgagttgagtccctgcccaggtggaaatcactgatgtgctccaggcgctggagagcccaaaaaagagtgggagtttcctagaagccaggggaggggaggtgcgtggt

SEQ ID NO: 13791 - DNA, 122 bp, Homo sapiens
  misc_feature (61)..(62): /note="This region represents a CpG dinucleotide"
  misc_feature (61)..(61): /note="Nucleotide may be methylated to form 5-methylcytosine"
tgacgccttcactgctgtctgcccagacaacttcattgtgtccaccagaagtcagtatgacgcaacttcccagatcacactgtgaaagctgccgaggagctgagactttgcctgtcctccct

SEQ ID NO: 13792 - DNA, 122 bp, Homo sapiens
  misc_feature (61)..(62): /note="This region represents a CpG dinucleotide"
  misc_feature (61)..(61): /note="Nucleotide may be methylated to form 5-methylcytosine"
ttgctaagcatttacacccattatcccatttaatcctatattaatccataaggtagttgccgttatgcccatttttcagatgatgaaactgaggcacagaagttaaagtcttcacactatct

SEQ ID NO: 13793 - DNA, 122 bp, Homo sapiens
  misc_feature (61)..(62): /note="This region represents a CpG dinucleotide"
  misc_feature (61)..(61): /note="Nucleotide may be methylated to form 5-methylcytosine"
agaaaaacacctatactcatacccagagtccctctcatctgctgacagcttcccaggaagcgtacaaatagctacccttccttgagccttattgaaacttgctcttcagatacccacaccat

SEQ ID NO: 13794 - DNA, 122 bp, Homo sapiens
  misc_feature (61)..(62): /note="This region represents a CpG dinucleotide"
  misc_feature (61)..(61): /note="Nucleotide may be methylated to form 5-methylcytosine"
aaatcagttgtggcccaactagactgcctggatataatatccttttggactggatcatgtcgtttcattgcagtcaggatggctaagcatggtgatggatcataactgaccaaacagacagg

SEQ ID NO: 13795 - DNA, 122 bp, Homo sapiens
  misc_feature (61)..(62): /note="This region represents a CpG dinucleotide"
  misc_feature (61)..(61): /note="Nucleotide may be methylated to form 5-methylcytosine"
aggagtggttacagtaggtagggtcttttgaatatcatctcatggcctcattctcaccagcgcaggttttcctgactatcctcatattagcacagagcaccttacctccatcatagcctcat

SEQ ID NO: 13796 - DNA, 122 bp, Homo sapiens
  misc_feature (61)..(62): /note="This region represents a CpG dinucleotide"
  misc_feature (61)..(61): /note="Nucleotide may be methylated to form 5-methylcytosine"
ctttacacttgagagaactgaggcacagagaagttaagtaacttacccagagtcacacagcgaggaaataccaagcccaagattgggacccaggtagtctggcttcagagtctctgcttcat

SEQ ID NO: 13797 - DNA, 122 bp, Homo sapiens
  misc_feature (61)..(62): /note="This region represents a CpG dinucleotide"
  misc_feature (61)..(61): /note="Nucleotide may be methylated to form 5-methylcytosine"
tgtggcaagttcagcttccttctcactttcagcttcaaatggacttttggactacctgggcgttcctttatttgtctctttctgatttcctatgtcaaagataaacaaggtggaaggacaga

SEQ ID NO: 13798 - DNA, 122 bp, Homo sapiens
  misc_feature (61)..(62): /note="This region represents a CpG dinucleotide"
  misc_feature (61)..(61): /note="Nucleotide may be methylated to form 5-methylcytosine"
aagcacagcagcacccagaggctaacctatttcccctatagcccaagctctgagatctcccgtctggtcacaatgatctacaggagaggaagaaagctatctagggacgagatctagaatca

SEQ ID NO: 13799 - DNA, 122 bp, Homo sapiens
  misc_feature (61)..(62): /note="This region represents a CpG dinucleotide"
  misc_feature (61)..(61): /note="Nucleotide may be methylated to form 5-methylcytosine"
cctctccccacccccacatgttttactggatttggccccaaagtttctgattttaaccatcgtactgatacagagggctgggctcccagctaaaccccattcttaagcctggaactgcccct

SEQ ID NO: 13800 - DNA, 122 bp, Homo sapiens
  misc_feature (61)..(62): /note="This region represents a CpG dinucleotide"
  misc_feature (61)..(61): /note="Nucleotide may be methylated to form 5-methylcytosine"
cctgttcctctgatttaaggaaattagaacactgaaaatgtttaatttttgataaaggaacgagagaaaagaaagcatgaaagaattctgagtgaagaacttgttgctgctgtgacctatct

SEQ ID NO: 13801 - DNA, 122 bp, Homo sapiens
  misc_feature (61)..(62): /note="This region represents a CpG dinucleotide"
  misc_feature (61)..(61): /note="Nucleotide may be methylated to form 5-methylcytosine"
cattagtaagcttaggatgactgtaaagctggtctaccaattgtgcaagcacttatgggacgtctactgctgataaaaggtcgtatttgtcaaggggaagcaaattactcttggccaattga

SEQ ID NO: 13802 - DNA, 122 bp, Homo sapiens
  misc_feature (61)..(62): /note="This region represents a CpG dinucleotide"
  misc_feature (61)..(61): /note="Nucleotide may be methylated to form 5-methylcytosine"
actgtaataccttcctcagttgttttccaatttaccacccccttcctaggaaaatccacacgccttaatgaattgctacagtcattagcaaagggagtaagttttgatgtttgtcttgtctg

SEQ ID NO: 13803 - DNA, 122 bp, Homo sapiens
  misc_feature (61)..(62): /note="This region represents a CpG dinucleotide"
  misc_feature (61)..(61): /note="Nucleotide may be methylated to form 5-methylcytosine"
atggttggaaatgcatgtggcagtggttcccaaacactggtgtgcagatggaacacagcccgtgaagttttcagcggtccttgttaaaaagagataaaggaaagagataaaggataaagtgc

SEQ ID NO: 13804 - DNA, 122 bp, Homo sapiens
  misc_feature (61)..(62): /note="This region represents a CpG dinucleotide"
  misc_feature (61)..(61): /note="Nucleotide may be methylated to form 5-methylcytosine"
ctttggcgatgtccaggttcacatccttgagtgtagtcatttctgtactcatcaatgtagcgtcgactatgataatctttctcatttatagacctgctttccaaataatggctagagaaata

SEQ ID NO: 13805 - DNA, 122 bp, Homo sapiens
  misc_feature (61)..(62): /note="This region represents a CpG dinucleotide"
  misc_feature (61)..(61): /note="Nucleotide may be methylated to form 5-methylcytosine"
ccccagccccgccttgttactgcatccgtctgaggtacaaggttagaagccacagacacccgagctgcagcctgacccacacaagctgcgggcgcaatggcgctttgcagacaagacagcct

SEQ ID NO: 13806 - DNA, 122 bp, Homo sapiens
  misc_feature (61)..(62): /note="This region represents a CpG dinucleotide"
  misc_feature (61)..(61): /note="Nucleotide may be methylated to form 5-methylcytosine"
cctgctgggagtggagattgcatttcagttgccatttgcattcccaatcaatccggactccgcaattaagtcggctggcggagctgggagggaggcggcggcgggaacgggtcctctggggg

SEQ ID NO: 13807 - DNA, 122 bp, Homo sapiens
  misc_feature (61)..(62): /note="This region represents a CpG dinucleotide"
  misc_feature (61)..(61): /note="Nucleotide may be methylated to form 5-methylcytosine"
cttgaactcctgacctcatgatcttcccgcctcggcttcctgaagtgctgggattataggcgtgagccaccatgcccagccgtagatggcttttaaagctataaaatgaggagggattactt

SEQ ID NO: 13808 - DNA, 122 bp, Homo sapiens
  misc_feature (61)..(62): /note="This region represents a CpG dinucleotide"
  misc_feature (61)..(61): /note="Nucleotide may be methylated to form 5-methylcytosine"
aagctaagcataacacgaggaagaacacttagtgcctgctcccaggaagcccggagttggcgatgtttcacaatcagtcaaccaccacttgagggctgaagtgcatgccaagcattcaacta

SEQ ID NO: 13809 - DNA, 122 bp, Homo sapiens
  misc_feature (61)..(62): /note="This region represents a CpG dinucleotide"
  misc_feature (61)..(61): /note="Nucleotide may be methylated to form 5-methylcytosine"
tttttatcacagtggtacacatctgtcaatgaatccactctcctgactttttgtccaatgcgttaaaaacaatagatgacaccatatcaaattcctagtttctgattacttcagccttgctt

SEQ ID NO: 13810 - DNA, 122 bp, Homo sapiens
  misc_feature (61)..(62): /note="This region represents a CpG dinucleotide"
  misc_feature (61)..(61): /note="Nucleotide may be methylated to form 5-methylcytosine"
ctaatggctctacataagagagttttatcacttccctggttccaaacgccagaaagaccacgccagctatccagagcagacaccgaatacaggagccatacagcatgcggaagcctccacca

SEQ ID NO: 13811 - DNA, 122 bp, Homo sapiens
  misc_feature (61)..(62): /note="This region represents a CpG dinucleotide"
  misc_feature (61)..(61): /note="Nucleotide may be methylated to form 5-methylcytosine"
tcaggtgatccacctacctcggcctgggattacagtgctgggattacaggcatgagccaccgctctcagccagggtgtaacattttaaggtacatgatttataaaaagcttttttaaatagc

SEQ ID NO: 13812 - DNA, 122 bp, Homo sapiens
  misc_feature (61)..(62): /note="This region represents a CpG dinucleotide"
  misc_feature (61)..(61): /note="Nucleotide may be methylated to form 5-methylcytosine"
gtgaagtaaatttcagtcactcacagtaagatggcaatgtggtgacatttgaagcctggacgtgagctcttacattcattgtaggtgactgctgtgcagcaggggcctgtttccaactgcca

SEQ ID NO: 13813 - DNA, 122 bp, Homo sapiens
  misc_feature (61)..(62): /note="This region represents a CpG dinucleotide"
  misc_feature (61)..(61): /note="Nucleotide may be methylated to form 5-methylcytosine"
agctgtgagccattgcgtctggctcacaaatgatttaaacagacagagcacaatccaaagcgaggattttccaggcaactcccaagccctggcccagaaaaactcacacataaaaaacactc

SEQ ID NO: 13814 - DNA, 122 bp, Homo sapiens
  misc_feature (61)..(62): /note="This region represents a CpG dinucleotide"
  misc_feature (61)..(61): /note="Nucleotide may be methylated to form 5-methylcytosine"
cactaaaaagggaggaaaatctcaattctgctagtttcgatctggaatacaaacgacaggcgccaggcttcccatctcacaatgagtgccttggagagatggtggtgtgccaggggtggggg

SEQ ID NO: 13815 - DNA, 122 bp, Homo sapiens
  misc_feature (61)..(62): /note="This region represents a CpG dinucleotide"
  misc_feature (61)..(61): /note="Nucleotide may be methylated to form 5-methylcytosine"
atcttccttcaactgcccggaatgctgcaaagtgggccttttctaggatacatgagtcaccgtttccagaaaaaccagaactgaggacaccttcccagacattcaatgactgacgttcatta

SEQ ID NO: 13816 - DNA, 122 bp, Homo sapiens
  misc_feature (61)..(62): /note="This region represents a CpG dinucleotide"
  misc_feature (61)..(61): /note="Nucleotide may be methylated to form 5-methylcytosine"
gaaagtaaaggactcaacacagtacacagtcaaagggaattcccccaacaaaggtcaaggcgagtgaatctcagcacaacagccttgcaaaaggtcagaaagcgccagatctggtgtgaagc

SEQ ID NO: 13817 - DNA, 122 bp, Homo sapiens
  misc_feature (61)..(62): /note="This region represents a CpG dinucleotide"
  misc_feature (61)..(61): /note="Nucleotide may be methylated to form 5-methylcytosine"
aaacagatgatgatctgttttgttcactgttgtatccccggtccctagaatagtgcctggcgtgtggttggcactcaatgcatatttatcaaaggaatgaagggctggctcagccatttgat

SEQ ID NO: 13818 - DNA, 122 bp, Homo sapiens
  misc_feature (61)..(62): /note="This region represents a CpG dinucleotide"
  misc_feature (61)..(61): /note="Nucleotide may be methylated to form 5-methylcytosine"
taaatgctttatttggtcaaaaactggaagctgacgctccacttaagagtctaggtcacgcggcaagccagacacttgaaggagcttaaagctttctgttcttaatagtattttagacactt

SEQ ID NO: 13819 - DNA, 122 bp, Homo sapiens
  misc_feature (61)..(62): /note="This region represents a CpG dinucleotide"
  misc_feature (61)..(61): /note="Nucleotide may be methylated to form 5-methylcytosine"
ggtggaagcaggaaggggaggtcagaggaaaactggggccctcagtgggcatccgtgatgcggaaacactaataatgccaacagcaatagcagaggcaggcagggcttacgtggccagggct

SEQ ID NO: 13820 - DNA, 122 bp, Homo sapiens
  misc_feature (61)..(62): /note="This region represents a CpG dinucleotide"
  misc_feature (61)..(61): /note="Nucleotide may be methylated to form 5-methylcytosine"
agcttgccagctggtgtggttttaccacaagctaacaaacattttccagctctgctcttacggaaacaacaggcacccgaagctatgagataataatgtttttatccagagtactgggagta

SEQ ID NO: 13821 - DNA, 122 bp, Homo sapiens
  misc_feature (61)..(62): /note="This region represents a CpG dinucleotide"
  misc_feature (61)..(61): /note="Nucleotide may be methylated to form 5-methylcytosine"
atccacccgcctaggcctcccaaagtgctaggattacagacataagccaccacacttgggcgatacagagggtttttatggcaacagcagtgcccagagtgagagacctctgtgtttcattc

SEQ ID NO: 13822 - DNA, 122 bp, Homo sapiens
  misc_feature (61)..(62): /note="This region represents a CpG dinucleotide"
  misc_feature (61)..(61): /note="Nucleotide may be methylated to form 5-methylcytosine"
cagacagtgaggctttgcaaaggtgcaagtgtcttaatcaagaacccttcctgctcagtccgtggaaacttacccagtggtgtaaaccctgccacggtggcttacacaggttctctgtgctt

SEQ ID NO: 13823 - DNA, 122 bp, Homo sapiens
  misc_feature (61)..(62): /note="This region represents a CpG dinucleotide"
  misc_feature (61)..(61): /note="Nucleotide may be methylated to form 5-methylcytosine"
ttaggcaagacccctgtgcacaatgaccttggtaggtcagaggttctctaaggacattcccgtatctgcttaggagagttctctgcctcctgcctctatcagtttcattccacaacatccct

SEQ ID NO: 13824 - DNA, 122 bp, Homo sapiens
  misc_feature (61)..(62): /note="This region represents a CpG dinucleotide"
  misc_feature (61)..(61): /note="Nucleotide may be methylated to form 5-methylcytosine"
tatgagcaaatgaatgagtgaatggatgaataaacaaacgctaagttgaatggatgataacgtaacccaggctcaagtcaagagcatttaattgaggaaacaggagaagagccagaagataa

SEQ ID NO: 13825 - DNA, 122 bp, Homo sapiens
  misc_feature (61)..(62): /note="This region represents a CpG dinucleotide"
  misc_feature (61)..(61): /note="Nucleotide may be methylated to form 5-methylcytosine"
gctcagcgtttaaatgccgtctgtatttttatccgatgatgggccacttttgaaaaaccccgctcatgctctgcccctctaagaatacatttccatttatagcatctgcacacaggatgttg

SEQ ID NO: 13826 - DNA, 122 bp, Homo sapiens
  misc_feature (61)..(62): /note="This region represents a CpG dinucleotide"
  misc_feature (61)..(61): /note="Nucleotide may be methylated to form 5-methylcytosine"
aggcagagcaaaactggatcttaatcaaagtgtatcttttgaccctggggcagtgatgaccggtagataccagaatttctacagatggtgactaccatgtgcctcctactctaccccactcc

SEQ ID NO: 13827 - DNA, 122 bp, Homo sapiens
  misc_feature (61)..(62): /note="This region represents a CpG dinucleotide"
  misc_feature (61)..(61): /note="Nucleotide may be methylated to form 5-methylcytosine"
ctgttgaaaatggccatgtgaactagttacctcatacaagtctctttggatgtaacatttcgtacagctggcttaggctcattgtgatttgaattcacccatggttggggctcttcatttcc

SEQ ID NO: 13828 - DNA, 122 bp, Homo sapiens
  misc_feature (61)..(62): /note="This region represents a CpG dinucleotide"
  misc_feature (61)..(61): /note="Nucleotide may be methylated to form 5-methylcytosine"
ttgtcctttttttccccttgcacgacccgttccagcaactgcaggtcaaagtcctgctcacgcttccactggcaacagaacaagaggttaaacgtagtcgcttcctgattgctgaaagagcc

SEQ ID NO: 13829 - DNA, 122 bp, Homo sapiens
  misc_feature (61)..(62): /note="This region represents a CpG dinucleotide"
  misc_feature (61)..(61): /note="Nucleotide may be methylated to form 5-methylcytosine"
aaattctgccttgggtaaacatgtatagtatttcctcaagagctacatttccccagcctacggtaaacaaggggaaagataccaagttcatcacagattatttctcttcaatcttgtatgat

SEQ ID NO: 13830 - DNA, 122 bp, Homo sapiens
  misc_feature (61)..(62): /note="This region represents a CpG dinucleotide"
  misc_feature (61)..(61): /note="Nucleotide may be methylated to form 5-methylcytosine"
acaaagctaagatgaggaagttctgtacagtttaggaaatagaggctttcaaagataattcgcagtgatgtgaaactggcctcccaagccctgataagtaagttaaataagagtaggagcca

SEQ ID NO: 13831 - DNA, 122 bp, Homo sapiens
  misc_feature (61)..(62): /note="This region represents a CpG dinucleotide"
  misc_feature (61)..(61): /note="Nucleotide may be methylated to form 5-methylcytosine"
gacacactcactctgctctgctcctatgggaaactctttcctctttcctttttagcttggcgccagcccaaagggatgggttgaacatcaggaagctcttagccccagctctgccactcact

SEQ ID NO: 13832 - DNA, 122 bp, Homo sapiens
  misc_feature (61)..(62): /note="This region represents a CpG dinucleotide"
  misc_feature (61)..(61): /note="Nucleotide may be methylated to form 5-methylcytosine"
aaagggatgtacaaaatcccagacggctaaaatgaacaaacctgtagtgaaaggaaacaacgtttcctttactgattcccagagctttgtcctcttgctagcgtccagtgccagtgagcttt

SEQ ID NO: 13833 - DNA, 122 bp, Homo sapiens
  misc_feature (61)..(62): /note="This region represents a CpG dinucleotide"
  misc_feature (61)..(61): /note="Nucleotide may be methylated to form 5-methylcytosine"
ggtcacctggcaaattggatacagaacccacttactgaatcactatactaccttataacacgtaaacttaatctcatttaagcttttcaatctcatttagactgacaacaaccttgatatca

SEQ ID NO: 13834 - DNA, 122 bp, Homo sapiens
  misc_feature (61)..(62): /note="This region represents a CpG dinucleotide"
  misc_feature (61)..(61): /note="Nucleotide may be methylated to form 5-methylcytosine"
ccaccttctgactaatatgaacatgggtgtacacatttatatccactcttgcctcccctccgtagtccttccttctccacactgcatctagagtaacccctttacactctcaagtatggaca

SEQ ID NO: 13835 - DNA, 122 bp, Homo sapiens
  misc_feature (61)..(62): /note="This region represents a CpG dinucleotide"
  misc_feature (61)..(61): /note="Nucleotide may be methylated to form 5-methylcytosine"
aaacaaacaaagaaacaaaaaactacatgaggtgggttcggtcccaaggctaccagcttacgatccttgggctataagccatctgacttcaactatcactgctgtgtttgctcagtctcaga

SEQ ID NO: 13836 - DNA, 122 bp, Homo sapiens
  misc_feature (61)..(62): /note="This region represents a CpG dinucleotide"
  misc_feature (61)..(61): /note="Nucleotide may be methylated to form 5-methylcytosine"
ggaatgtgatgagatgatgcatttttggcacctctttgccaaagataacaccttgctctccgtgcttacagatgtacaagggcagccgtggggctggcaacagcttcgtaatcctggcttcc

SEQ ID NO: 13837 - DNA, 122 bp, Homo sapiens
  misc_feature (61)..(62): /note="This region represents a CpG dinucleotide"
  misc_feature (61)..(61): /note="Nucleotide may be methylated to form 5-methylcytosine"
cctctgcgtaacaaccgcctgcaggataacagaaaacagtatccacaaagacttagaaaccgttccaagcggttttttcaagtgtcgactaaaagctaacaaagacatccaaaccaaatgtg

SEQ ID NO: 13838 - DNA, 122 bp, Homo sapiens
  misc_feature (61)..(62): /note="This region represents a CpG dinucleotide"
  misc_feature (61)..(61): /note="Nucleotide may be methylated to form 5-methylcytosine"
ccttgtttttctaaacatctgtcccatctgtcccaggcctcagctcaccctttcgtggctcgagccagttaaacgtgaatttgacaaggaagcacttctgaaggctggtttgtgagtggaaa

SEQ ID NO: 13839 - DNA, 122 bp, Homo sapiens
  misc_feature (61)..(62): /note="This region represents a CpG dinucleotide"
  misc_feature (61)..(61): /note="Nucleotide may be methylated to form 5-methylcytosine"
tctctcagcctctgtttcctggggtccaagtgaaacatactcagattgtgcaaacatttgcgtttgtggcatctttgtttcctgtaagtgatctgaacttcctcaggagcctcctggtgctg

SEQ ID NO: 13840 - DNA, 122 bp, Homo sapiens
  misc_feature (61)..(62): /note="This region represents a CpG dinucleotide"
  misc_feature (61)..(61): /note="Nucleotide may be methylated to form 5-methylcytosine"
aagaagacacttagcaaccctaattgcgtttcaaaatgcaattcacattctgaaatcatacgtaagtcttcgcttgtgtatgattttcaaatcaagtgaagacttgtgtatgatttcaaaat

SEQ ID NO: 13841 - DNA, 122 bp, Homo sapiens
  misc_feature (61)..(62): /note="This region represents a CpG dinucleotide"
  misc_feature (61)..(61): /note="Nucleotide may be methylated to form 5-methylcytosine"
cactttctcccttgctcttcctgggcagcatcttgaaagcatgcttacactcttgcctctcgttcacacctgacctcctccaacctgacttacatccatcactttacaaaagtagctcctcc

SEQ ID NO: 13842 - DNA, 122 bp, Homo sapiens
  misc_feature (61)..(62): /note="This region represents a CpG dinucleotide"
  misc_feature (61)..(61): /note="Nucleotide may be methylated to form 5-methylcytosine"
ttacccactgaagaagtctctctctcctcccttatctgatgaagctgtctctcccttgttcgaaaacatatctatcccctttccttgtaagaggaagacaatcctctctaactaaagacaaa

SEQ ID NO: 13843 - DNA, 122 bp, Homo sapiens
  misc_feature (61)..(62): /note="This region represents a CpG dinucleotide"
  misc_feature (61)..(61): /note="Nucleotide may be methylated to form 5-methylcytosine"
tgggtgtagccggggctgccatgtcctttcctactggctgagtgtctgtttggtttggtccgtgcttgtgctaaaactcttcctgaactattctgtctaatccctcctgcgtatgtcaactt

SEQ ID NO: 13844 - DNA, 122 bp, Homo sapiens
  misc_feature (61)..(62): /note="This region represents a CpG dinucleotide"
  misc_feature (61)..(61): /note="Nucleotide may be methylated to form 5-methylcytosine"
attaacacatttctcagtattatttaccaaatgagccatcatttccccattgatctgtaacggcttttgtgtcttataccaaaatctgactcatactagagtttcctagtctgttctactgg

SEQ ID NO: 13845 - DNA, 122 bp, Homo sapiens
  misc_feature (61)..(62): /note="This region represents a CpG dinucleotide"
  misc_feature (61)..(61): /note="Nucleotide may be methylated to form 5-methylcytosine"
ttttctcacgggcaaaatgcagttaatgccagggcatggctgggaggtcaaatgaggtgacggaggtaagtaatgcctgacagtgagaagctccatgatggttagctctattctcccacatg

SEQ ID NO: 13846 - DNA, 122 bp, Homo sapiens
  misc_feature (61)..(62): /note="This region represents a CpG dinucleotide"
  misc_feature (61)..(61): /note="Nucleotide may be methylated to form 5-methylcytosine"
gctgcttttttttttgaggcggagttttgctcttgttgcccaggctggagtgcaatggcacgatctaggctcaccacaagggaggcgctgctttcatttggagcagccataagcaaaaggct

SEQ ID NO: 13847 - DNA, 122 bp, Homo sapiens
  misc_feature (61)..(62): /note="This region represents a CpG dinucleotide"
  misc_feature (61)..(61): /note="Nucleotide may be methylated to form 5-methylcytosine"
acctacttatgggacattttcaagttctacttatagatcttgtagttcagggagcagtggcgtctcatgtattcagcacaatgtggagttatgctgttgtttaatgtggcttaggccttctg

SEQ ID NO: 13848 - DNA, 122 bp, Homo sapiens
  misc_feature (61)..(62): /note="This region represents a CpG dinucleotide"
  misc_feature (61)..(61): /note="Nucleotide may be methylated to form 5-methylcytosine"
tgactcccagccacacaggagctgtgtgacttttatcaaggtgcttgccctctctgatcccgttgcctcatctgtaaaataagaaagcaagagtgcattctcaggggctgaatatcaaatta

SEQ ID NO: 13849 - DNA, 122 bp, Homo sapiens
  misc_feature (61)..(62): /note="This region represents a CpG dinucleotide"
  misc_feature (61)..(61): /note="Nucleotide may be methylated to form 5-methylcytosine"
caggccagactgccctagaaggaagtcaggggcctcaaggggtggcactcttccttaactcgtaactcttggaggcaagcttggaaggtgctttatttcccgctatgattataccaaccctg

SEQ ID NO: 13850 - DNA, 122 bp, Homo sapiens
  misc_feature (61)..(62): /note="This region represents a CpG dinucleotide"
  misc_feature (61)..(61): /note="Nucleotide may be methylated to form 5-methylcytosine"
catagaagtcacttggtcacaggctagaaaaatcttcaagcactgaaacaatccattgagcgaaacaaagaggaagtgagaaaaactgggaactaaagtttactgtgccaggcatttgacat

SEQ ID NO: 13851 - DNA, 122 bp, Homo sapiens
  misc_feature (61)..(62): /note="This region represents a CpG dinucleotide"
  misc_feature (61)..(61): /note="Nucleotide may be methylated to form 5-methylcytosine"
aatctaccaggtggtcaattattctaaaatgacagaactggggctaaaatccaggattctcgattcccagtccagtgctctttcttacacactaagccatgccaaaatccactctaaaataa

SEQ ID NO: 13852 - DNA, 122 bp, Homo sapiens
  misc_feature (61)..(62): /note="This region represents a CpG dinucleotide"
  misc_feature (61)..(61): /note="Nucleotide may be methylated to form 5-methylcytosine"
ctccttgagatcacagcctggtaaacagatcagccattaacaattgaggcggcagggttccgtgcagaaggctgcatgactttgctgtctattgtgactgcgttttgatagttacctttgtc

SEQ ID NO: 13853 - DNA, 122 bp, Homo sapiens
  misc_feature (61)..(62): /note="This region represents a CpG dinucleotide"
  misc_feature (61)..(61): /note="Nucleotide may be methylated to form 5-methylcytosine"
gtatctgtgtgtgtatatgtaagaggcagaggaaaagcattgcacaaagagaaagctgcacgcaggcaaaggctatggtattctcagaaaaggtgtgcctggccctctcggtaaagaggcca

SEQ ID NO: 13854 - DNA, 122 bp, Homo sapiens
  misc_feature (61)..(62): /note="This region represents a CpG dinucleotide"
  misc_feature (61)..(61): /note="Nucleotide may be methylated to form 5-methylcytosine"
agcaatcttttcgtgagtcagatgattaaggaatcgacaggcagcctcctctgccagcaccgcccagtgcccgtgggccaatgcgtgtgccttcgtctctgacgtcacttgtttttcaccag

SEQ ID NO: 13855 - DNA, 122 bp, Homo sapiens
  misc_feature (61)..(62): /note="This region represents a CpG dinucleotide"
  misc_feature (61)..(61): /note="Nucleotide may be methylated to form 5-methylcytosine"
ctctaatcctttttctaataaaagaaatttcctctttctccaccgggagcgctaagtgggcgtggaattgtttgacagtttaccactactgttagctttgtttttgtgtttttgtttttaaa

SEQ ID NO: 13856 - DNA, 122 bp, Homo sapiens
  misc_feature (61)..(62): /note="This region represents a CpG dinucleotide"
  misc_feature (61)..(61): /note="Nucleotide may be methylated to form 5-methylcytosine"
taaggaagtttcccttctgttttgcaatttcccttaatgaatcaacgttctcaaatgaagcgcatttaatcttaggaagacagcactcttctcaatgctgaatgagttttgcagataaatat

SEQ ID NO: 13857 - DNA, 122 bp, Homo sapiens
  misc_feature (61)..(62): /note="This region represents a CpG dinucleotide"
  misc_feature (61)..(61): /note="Nucleotide may be methylated to form 5-methylcytosine"
cctgccctttatcaggcaaaagcagccaaaggcttggcaaagtcaggagagggaaatcagcgtattctgagctagtctccatggtccagaggatgaccatttccttctaataaaaccaatat

SEQ ID NO: 13858 - DNA, 122 bp, Homo sapiens
  misc_feature (61)..(62): /note="This region represents a CpG dinucleotide"
  misc_feature (61)..(61): /note="Nucleotide may be methylated to form 5-methylcytosine"
ttgagggcggagctgtgaacccttccaaagctctccctccctgtcataaagaccagaagtcggaagccacccctccccctagaccaggcagggactgaggtctccccagcccactctccacc

SEQ ID NO: 13859 - DNA, 122 bp, Homo sapiens
  misc_feature (61)..(62): /note="This region represents a CpG dinucleotide"
  misc_feature (61)..(61): /note="Nucleotide may be methylated to form 5-methylcytosine"
aggagcgaccggcgggttctggggttcgtttgcttgggttcctgcacccgcttgctcttacgctcccccatgcgaggagtggccagtgacgggctgagtgaaacgagccactccagttcctg

SEQ ID NO: 13860 - DNA, 122 bp, Homo sapiens
  misc_feature (61)..(62): /note="This region represents a CpG dinucleotide"
  misc_feature (61)..(61): /note="Nucleotide may be methylated to form 5-methylcytosine"
atttttttaatacacattgtgaaacaatcaccacagtcaagccaataaacatatctagcacgtcatactttttttggtggtaagagcacttaatgtttatttataagatctttgattctaga

SEQ ID NO: 13861 - DNA, 122 bp, Homo sapiens
  misc_feature (61)..(62): /note="This region represents a CpG dinucleotide"
  misc_feature (61)..(61): /note="Nucleotide may be methylated to form 5-methylcytosine"
gtgggagtcccagggaactgagttcttcccccatcacccccaaagccagctgcctgctcccgcctcagccattagtaacccagagacgcgcacctgcgtgggggctcttctccagcccttgc

SEQ ID NO: 13862 - DNA, 122 bp, Homo sapiens
  misc_feature (61)..(62): /note="This region represents a CpG dinucleotide"
  misc_feature (61)..(61): /note="Nucleotide may be methylated to form 5-methylcytosine"
aagtccgatctgcccacgcttcacagaactcaatgcggagccttctcaggagtcacttgacgtcaaggctgacttttaaatttgccaaaaaggcattctttggggagcggtcggcaccatca

SEQ ID NO: 13863 - DNA, 122 bp, Homo sapiens
  misc_feature (61)..(62): /note="This region represents a CpG dinucleotide"
  misc_feature (61)..(61): /note="Nucleotide may be methylated to form 5-methylcytosine"
tctggcctcttgttaaatgtgacatactgagtcagaggcagacgtccttctgtggttattcgcttcctgtctgattaatttgttgtttgttgttccttcctcctttgctgcagaaaaagaaa

SEQ ID NO: 13864 - DNA, 122 bp, Homo sapiens
  misc_feature (61)..(62): /note="This region represents a CpG dinucleotide"
  misc_feature (61)..(61): /note="Nucleotide may be methylated to form 5-methylcytosine"
tgaatatctgccgaggcaggcaacccctccctgacacaatcttcactaacaggaaaagggcggtaacctctggcagctaaggaatccctattagagcttcacctgcagataagaaaaggcct

SEQ ID NO: 13865 - DNA, 122 bp, Homo sapiens
  misc_feature (61)..(62): /note="This region represents a CpG dinucleotide"
  misc_feature (61)..(61): /note="Nucleotide may be methylated to form 5-methylcytosine"
gtgtggtctgattgcagagtgacggggcatatgattagggcattgtcgcacgccgtgtgccgggctgagggctgatgagcacaccatcgcgttggagcacagccagaccgcgcacgtgacca

SEQ ID NO: 13866 - DNA, 122 bp, Homo sapiens
  misc_feature (61)..(62): /note="This region represents a CpG dinucleotide"
  misc_feature (61)..(61): /note="Nucleotide may be methylated to form 5-methylcytosine"
atggaatcaggaaggaaattaccaagtctgtaaaataagatgtgaaattgtgtataaacacggggtaatattcagagtcatttaataatgtataggaaattgggtaatgtttagagtcattt

SEQ ID NO: 13867 - DNA, 122 bp, Homo sapiens
  misc_feature (61)..(62): /note="This region represents a CpG dinucleotide"
  misc_feature (61)..(61): /note="Nucleotide may be methylated to form 5-methylcytosine"
tgaggctacttgagagcagaggggcgtggagagtcccttcctgcttcctcttcctgttagcgccttgcttgtcatgtcacctggtcaccaagtcatccagggctacaggcaggaaatcaagc

SEQ ID NO: 13868 - DNA, 122 bp, Homo sapiens
  misc_feature (61)..(62): /note="This region represents a CpG dinucleotide"
  misc_feature (61)..(61): /note="Nucleotide may be methylated to form 5-methylcytosine"
tgatgactcatgtatacacatttaatgtacaatgactaacatataatgacaagcacccaccgtaacagcatcatgcaaaatagattcactgccccaaaatcccctgtattccacctcgtcat

SEQ ID NO: 13869 - DNA, 122 bp, Homo sapiens
  misc_feature (61)..(62): /note="This region represents a CpG dinucleotide"
  misc_feature (61)..(61): /note="Nucleotide may be methylated to form 5-methylcytosine"
gttgggccaaatggaactgccattattgtaggtcaagaacaggtcaatatcggccaggcacggtggctcacacctgtaatcccagcactttaggaggccgaggcaggtggatcacgaggtca

SEQ ID NO: 13870 - DNA, 122 bp, Homo sapiens
  misc_feature (61)..(62): /note="This region represents a CpG dinucleotide"
  misc_feature (61)..(61): /note="Nucleotide may be methylated to form 5-methylcytosine"
tcaaagccaaagatgttatacaacacctattatatgaaatgataaatacccttattgttacgattatctgccaattcaagtaggggttttctgttacttggtgctaaaagttccccatgata

SEQ ID NO: 13871 - DNA, 122 bp, Homo sapiens
  misc_feature (61)..(62): /note="This region represents a CpG dinucleotide"
  misc_feature (61)..(61): /note="Nucleotide may be methylated to form 5-methylcytosine"
gacttacctggggataagctgagctgggggcaggggtggagggtggagaagagcccatcccgtaggtgctccaacctgtttggctgtttggtctagcaagcacagagcaggtgagtgatgca

SEQ ID NO: 13872 - DNA, 122 bp, Homo sapiens
  misc_feature (61)..(62): /note="This region represents a CpG dinucleotide"
  misc_feature (61)..(61): /note="Nucleotide may be methylated to form 5-methylcytosine"
ggccccgtccccagtccgtgagtgacagaagatgtgaccaaacactggactcaatgaggacggagtgacaacctaggctgcagcctttcctggcaggcctttatccctgctctgagcagggc

SEQ ID NO: 13873 - DNA, 122 bp, Homo sapiens
  misc_feature (61)..(62): /note="This region represents a CpG dinucleotide"
  misc_feature (61)..(61): /note="Nucleotide may be methylated to form 5-methylcytosine"
ctgggattacaggcgtgagccaccatgcccggcccgttagtcaatttcttacaaactaaacgtgtgttggggaaaccagccccacaccacccagagggtaccctgagtctggtggagacaaa

SEQ ID NO: 13874 - DNA, 122 bp, Homo sapiens
  misc_feature (61)..(62): /note="This region represents a CpG dinucleotide"
  misc_feature (61)..(61): /note="Nucleotide may be methylated to form 5-methylcytosine"
attcctggcattgccggttttcttcattcagaatctgtttatctatcaagtgactgtcctcgtaaaaagcagatgtttgttaaagtatttttataagcagcttaatataaaacattatagat

SEQ ID NO: 13875 - DNA, 122 bp, Homo sapiens
  misc_feature (61)..(62): /note="This region represents a CpG dinucleotide"
  misc_feature (61)..(61): /note="Nucleotide may be methylated to form 5-methylcytosine"
ctccatcctccctccttcctggggactctgggaagtgcctgagtgtggccttgcaggttgcgccaccgctttcatcccaatccaggtggctgcaatccagtacaggatttacgctgccctga

SEQ ID NO: 13876 - DNA, 122 bp, Homo sapiens
  misc_feature (61)..(62): /note="This region represents a CpG dinucleotide"
  misc_feature (61)..(61): /note="Nucleotide may be methylated to form 5-methylcytosine"
ttaaagagttcctgggaagaagcccaacttcttggctgaaatttactgaaagcctttgcccggcatgatcttgctctcttgtgctcatgacaaagaaatgtaacctttggccaattgcattt

SEQ ID NO: 13877 - DNA, 122 bp, Homo sapiens
  misc_feature (61)..(62): /note="This region represents a CpG dinucleotide"
  misc_feature (61)..(61): /note="Nucleotide may be methylated to form 5-methylcytosine"
ggacatcgtcagaaatattgggctggagagggagatcaggaagggatcagtacatgttgtcgagaaataagtgacatgatgtgcaattatgtatgtgctcaccactctatactcaacgccca

SEQ ID NO: 13878 - DNA, 122 bp, Homo sapiens
  misc_feature (61)..(62): /note="This region represents a CpG dinucleotide"
  misc_feature (61)..(61): /note="Nucleotide may be methylated to form 5-methylcytosine"
caagacactaggcagcgtcctgaacgctggagatctagcagcaagcacgcaaggttctcacgctcacattctagtgagagcgtacattccaatgagagagagtaattaagtaaataataatt

SEQ ID NO: 13879 - DNA, 122 bp, Homo sapiens
  misc_feature (61)..(62): /note="This region represents a CpG dinucleotide"
  misc_feature (61)..(61): /note="Nucleotide may be methylated to form 5-methylcytosine"
cgtgatccgccctcctcggcctcccgaagtgctgggattataggcgtgagccaccgcacccggcccgtcgtcttaattgacagctgttgcctaccacaaaccccactgacaacagggcctgg

SEQ ID NO: 13880 - DNA, 122 bp, Homo sapiens
  misc_feature (61)..(62): /note="This region represents a CpG dinucleotide"
  misc_feature (61)..(61): /note="Nucleotide may be methylated to form 5-methylcytosine"
taactcagcatgttcccggccacatcccggtgaaccatgcagcctaactcaccacgttcccggccacacagggccaagaacagcccaggcaatgttaaggagcattgcatggaggagccact

SEQ ID NO: 13881 - DNA, 122 bp, Homo sapiens
  misc_feature (61)..(62): /note="This region represents a CpG dinucleotide"
  misc_feature (61)..(61): /note="Nucleotide may be methylated to form 5-methylcytosine"
agtgtgtggcttacatgcatgcttgctgtgtgcatctgagtttgatgtggggggcttgtgcgcatgttcatgtgggtgtttgtgtgttcgtgtgtgtttcggtttatgtgcatgtggggttt

SEQ ID NO: 13882 - DNA, 122 bp, Homo sapiens
  misc_feature (61)..(62): /note="This region represents a CpG dinucleotide"
  misc_feature (61)..(61): /note="Nucleotide may be methylated to form 5-methylcytosine"
atgtctatatatctttcaacattttagtcatacctcttcatcttggaatcctggttcttccgccacaacttgatcctccttcatattgaaaagtgggcaacagaaaaataatcacttctggg

SEQ ID NO: 13883 - DNA, 122 bp, Homo sapiens
  misc_feature (61)..(62): /note="This region represents a CpG dinucleotide"
  misc_feature (61)..(61): /note="Nucleotide may be methylated to form 5-methylcytosine"
agtattactcatctgacgtccatcactgtagacaaaggttgtggagcatcgcgcggtgcccgctgctgcatttggaaaggctccctcacctctcaccatcctgagtttcactccttagccag

SEQ ID NO: 13884 - DNA, 122 bp, Homo sapiens
  misc_feature (61)..(62): /note="This region represents a CpG dinucleotide"
  misc_feature (61)..(61): /note="Nucleotide may be methylated to form 5-methylcytosine"
ttagtaagagcatcctggtagcaaaggtcaatcattatcagactgcaggagtagtttcaacggcaacaatgcagcaacagcatcaatggaaacaacaaaatgaagagaatggccatttccca

SEQ ID NO: 13885 - DNA, 122 bp, Homo sapiens
  misc_feature (61)..(62): /note="This region represents a CpG dinucleotide"
  misc_feature (61)..(61): /note="Nucleotide may be methylated to form 5-methylcytosine"
ttggaaacacttaatgcgctctccaaatggggagtctgttggggaggccctggcgggagccggggctacatccaggtcctcggcttggtggccttgttcacttatttgttcaggaagcagca

SEQ ID NO: 13886 - DNA, 122 bp, Homo sapiens
  misc_feature (61)..(62): /note="This region represents a CpG dinucleotide"
  misc_feature (61)..(61): /note="Nucleotide may be methylated to form 5-methylcytosine"
gccttggtgtccttagccaggaagattttccttttatcatgcagctctgtccacacccttcgttcagtttctccctgcaactcagctcagctgtcatgctgatgtgaaacaggagctcataa

SEQ ID NO: 13887 - DNA, 122 bp, Homo sapiens
  misc_feature (61)..(62): /note="This region represents a CpG dinucleotide"
  misc_feature (61)..(61): /note="Nucleotide may be methylated to form 5-methylcytosine"
acccagttgcaagtaacaaccaaaatttccgagcccgaaaccagatggagtcatgagctgcgaaataagcgatccaggctccacaaagttccgatgagcatgggaggtttcaagccccatgt

SEQ ID NO: 13888 - DNA, 122 bp, Homo sapiens
  misc_feature (61)..(62): /note="This region represents a CpG dinucleotide"
  misc_feature (61)..(61): /note="Nucleotide may be methylated to form 5-methylcytosine"
gtgagttcatgctaggcttggagcgactattgtttgtaaaaggtataattatcctgctaacgctgtacatatggctcgtgcctggactcgctcgtgcctagaaagagtaaagccatgtcgaa

SEQ ID NO: 13889 - DNA, 122 bp, Homo sapiens
  misc_feature (61)..(62): /note="This region represents a CpG dinucleotide"
  misc_feature (61)..(61): /note="Nucleotide may be methylated to form 5-methylcytosine"
gttatgtatgtatgtatattgatttgatttttcgtgtgtggcatgtgtgtaggaggtgaacgagaggagagtgggaagggcaaagttttctctgaatcatccaaacttgcccagcctagtgg

SEQ ID NO: 13890 - DNA, 122 bp, Homo sapiens
  misc_feature (61)..(62): /note="This region represents a CpG dinucleotide"
  misc_feature (61)..(61): /note="Nucleotide may be methylated to form 5-methylcytosine"
caatcggttaagactttggtcccataatgcttagcaaaagaagctgaagatcattcagaacggaaatggaattctgtgtgccaagccttagagctaagctttaaaaagtcacccatgaacga

SEQ ID NO: 13891 - DNA, 122 bp, Homo sapiens
  misc_feature (61)..(62): /note="This region represents a CpG dinucleotide"
  misc_feature (61)..(61): /note="Nucleotide may be methylated to form 5-methylcytosine"
taagccttatatagtgcatttggctggagctcatgtgtacttctgtggaatgatggctttcgtccatggggcctactttgtggtgatctcattaggtttcacaaggtaaacagctgaaaact

SEQ ID NO: 13892 - DNA, 122 bp, Homo sapiens
  misc_feature (61)..(62): /note="This region represents a CpG dinucleotide"
  misc_feature (61)..(61): /note="Nucleotide may be methylated to form 5-methylcytosine"
gcattggatttagtgccaggcgggttggtgagtagactcagcacccacattctcttcttgcgtctctctctggccacccagattatccaggggctgctgtttacttgagagctagaagtatc

SEQ ID NO: 13893 - DNA, 122 bp, Homo sapiens
  misc_feature (61)..(62): /note="This region represents a CpG dinucleotide"
  misc_feature (61)..(61): /note="Nucleotide may be methylated to form 5-methylcytosine"
gtgtttcgtaattaaccagagacagacatgaaaatccctaagcaaatcttcggcctcagtcgagcattcactggacttaatccacttgactcaatagtaatcatttatgaataaataagcca

SEQ ID NO: 13894 - DNA, 122 bp, Homo sapiens
  misc_feature (61)..(62): /note="This region represents a CpG dinucleotide"
  misc_feature (61)..(61): /note="Nucleotide may be methylated to form 5-methylcytosine"
ggtccttatatgtgtacaacattaaaatgaaaggctttgtcttgcattgtgaggtacaggcggaagttggaatcaggttttaggattctgtctctcattagctgaataatgtgaggattaac

SEQ ID NO: 13895 - DNA, 122 bp, Homo sapiens
  misc_feature (61)..(62): /note="This region represents a CpG dinucleotide"
  misc_feature (61)..(61): /note="Nucleotide may be methylated to form 5-methylcytosine"
aacatgtccaaccttcaatttatcatttttattatcatcatcattgagactcctttactacggttgcatgaaattgcaatagtcaaggctggtcatgtgctctgtttgtatttcaggtgatg

SEQ ID NO: 13896 - DNA, 122 bp, Homo sapiens
  misc_feature (61)..(62): /note="This region represents a CpG dinucleotide"
  misc_feature (61)..(61): /note="Nucleotide may be methylated to form 5-methylcytosine"
gagcagaggcagtggccggcttcatgttcatgtgcttgtggaggccccagccctcggcctcggcttttatgctagggaggtcctcccaccctgctcctcagtgactcacggcttctccctct

SEQ ID NO: 13897 - DNA, 122 bp, Homo sapiens
  misc_feature (61)..(62): /note="This region represents a CpG dinucleotide"
  misc_feature (61)..(61): /note="Nucleotide may be methylated to form 5-methylcytosine"
gtggtcgatttaacccgttccctattgatagacgctgtgtgggctccagccttttgcagtcgactctgcgatgcataacttcgtgtatagatagcagtctgcagctgcacgtgggggtgtgt

SEQ ID NO: 13898 - DNA, 122 bp, Homo sapiens
  misc_feature (61)..(62): /note="This region represents a CpG dinucleotide"
  misc_feature (61)..(61): /note="Nucleotide may be methylated to form 5-methylcytosine"
tgatgtatcattaaaggccaaaaaaaaaaaaaagtcaattcagctgtgtctgtaaccaggcgtgtcatatgtagacacttataccgtgggaggtcactttatgtgggtttgcattgacaaaa

SEQ ID NO: 13899 - DNA, 122 bp, Homo sapiens
  misc_feature (61)..(62): /note="This region represents a CpG dinucleotide"
  misc_feature (61)..(61): /note="Nucleotide may be methylated to form 5-methylcytosine"
gaaaaacaatccatccataaaagtcttatctacagtgaaaaaaatgaatcatataagagacggcttcagaatgtacgtaaggtgtgctttgactagccaggaaaagaacctctccctgtgtg

SEQ ID NO: 13900 - DNA, 122 bp, Homo sapiens
  misc_feature (61)..(62): /note="This region represents a CpG dinucleotide"
  misc_feature (61)..(61): /note="Nucleotide may be methylated to form 5-methylcytosine"
tttgaaagaactacaataaagtcacctgtggattgacccacatgccttagctctgaaacacgcaaactggctaactggggaatccactcccatgccattctctaatatttgttcatctaaac

SEQ ID NO: 13901 - DNA, 122 bp, Homo sapiens
  misc_feature (61)..(62): /note="This region represents a CpG dinucleotide"
  misc_feature (61)..(61): /note="Nucleotide may be methylated to form 5-methylcytosine"
tggctgacagccaccagacctgggttctggtcctagcttttctgttaaaactccctgtgtcgctttggcaaggtcatttgacctctgtttgattgggaacctctgttttctccacattgacc

SEQ ID NO: 13902 - DNA, 122 bp, Homo sapiens
  misc_feature (61)..(62): /note="This region represents a CpG dinucleotide"
  misc_feature (61)..(61): /note="Nucleotide may be methylated to form 5-methylcytosine"
aggcagctggagtgtgaatttccctgagggtttccacttccctgtggttcaggctggggccgtccccgctctcctggccccagagctgccccactaggcagggaaagcctctggaatgaggg

SEQ ID NO: 13903 - DNA, 122 bp, Homo sapiens
  misc_feature (61)..(62): /note="This region represents a CpG dinucleotide"
  misc_feature (61)..(61): /note="Nucleotide may be methylated to form 5-methylcytosine"
tttggctataaatttttattcactccacttattaaaatgcaaggcccttggtccagagcacgtgtcatatcagaaaccttcccatcacctgcataataaacctgtgcaagctgtgtccaaca

SEQ ID NO: 13904 - DNA, 122 bp, Homo sapiens
  misc_feature (61)..(62): /note="This region represents a CpG dinucleotide"
  misc_feature (61)..(61): /note="Nucleotide may be methylated to form 5-methylcytosine"
agaacttccgtctgtcccaggatgacatcaagggcattcaggagctctatggtaaacctccgggcgggggttgggggtggagggtgaggaggggggaggtcatgtagcctgggatggaggcc

SEQ ID NO: 13905 - DNA, 122 bp, Homo sapiens
  misc_feature (61)..(62): /note="This region represents a CpG dinucleotide"
  misc_feature (61)..(61): /note="Nucleotide may be methylated to form 5-methylcytosine"
tctgggaagcagaagttacagtgagccaagatcacgccactgcactccagcctgggtgaccgagggagactctgtctcagtaaaacaaaggaaagaaaagaaaagaaaagaagagacacaga

SEQ ID NO: 13906 - DNA, 122 bp, Homo sapiens
  misc_feature (61)..(62): /note="This region represents a CpG dinucleotide"
  misc_feature (61)..(61): /note="Nucleotide may be methylated to form 5-methylcytosine"
taggtatcactgcacttctgaaatatgcagaaaccagatagttgaacaatcctcacacagcgtgggtgagagtacacctggagcacttcctatcctatgcttagaggtcttactttgtaaaa

SEQ ID NO: 13907 - DNA, 122 bp, Homo sapiens
  misc_feature (61)..(62): /note="This region represents a CpG dinucleotide"
  misc_feature (61)..(61): /note="Nucleotide may be methylated to form 5-methylcytosine"
ttttacccatgtgccatgcttcctgcattgtttaaatatggtcattcaggactttttctgcgagcacaaaagcattgagaatatgttagtggctgccaggaaaacttgtcatcattttagtc

SEQ ID NO: 13908 - DNA, 122 bp, Homo sapiens
  misc_feature (61)..(62): /note="This region represents a CpG dinucleotide"
  misc_feature (61)..(61): /note="Nucleotide may be methylated to form 5-methylcytosine"
tctcgtttcagaggtgaggacacgcctatggtgctgtgtctgtgtccagcaggttctgctcggccccgacagtgctgcccgccaggtgcccttcccgcacgcttgctgcagtcagccctgca

SEQ ID NO: 13909 - DNA, 122 bp, Homo sapiens
  misc_feature (61)..(62): /note="This region represents a CpG dinucleotide"
  misc_feature (61)..(61): /note="Nucleotide may be methylated to form 5-methylcytosine"
acaggcctgagccactacacttgacagaggtaaggcttcttctattgtcttcataaaatacgcagcatagtaccctggggctatgaaatccacaaaagctgactcagcatggactttccaaa

SEQ ID NO: 13910 - DNA, 122 bp, Homo sapiens
  misc_feature (61)..(62): /note="This region represents a CpG dinucleotide"
  misc_feature (61)..(61): /note="Nucleotide may be methylated to form 5-methylcytosine"
tactgagtaatggggcatcagaaaggaagtcacaagggtaatggccctcttttccccaaacgttaaggacctacctctctgggttttgcctttttaaggaagcaggcccacttggctaattc

SEQ ID NO: 13911 - DNA, 122 bp, Homo sapiens
  misc_feature (61)..(62): /note="This region represents a CpG dinucleotide"
  misc_feature (61)..(61): /note="Nucleotide may be methylated to form 5-methylcytosine"
tgaactgtcacagaatcacagaacagtgatctttcccatcatacattataagttgccttccgtaccacgcctgttgatgaagaagccctagtaattcaagaacttaaattcttttcctaggg

SEQ ID NO: 13912 - DNA, 122 bp, Homo sapiens
  misc_feature (61)..(62): /note="This region represents a CpG dinucleotide"
  misc_feature (61)..(61): /note="Nucleotide may be methylated to form 5-methylcytosine"
gactgcagttcagggggaagaaaataacttggaagtttctgaatttagtggagataaatacggatagctcagaaatatatttaccaaatatcacagtctcgatctttgtctagcattgccag

SEQ ID NO: 13913 - DNA, 122 bp, Homo sapiens
  misc_feature (61)..(62): /note="This region represents a CpG dinucleotide"
  misc_feature (61)..(61): /note="Nucleotide may be methylated to form 5-methylcytosine"
cctaatccccagttacactggctttctgggagattccagaatgtcaggtgcccattcccccgatgggcctttgcaccgacccatccctgaacctggaccatgtgtctccctgctcttcaacg

SEQ ID NO: 13914 - DNA, 122 bp, Homo sapiens
  misc_feature (61)..(62): /note="This region represents a CpG dinucleotide"
  misc_feature (61)..(61): /note="Nucleotide may be methylated to form 5-methylcytosine"
ttactagttcacatagcaaaaaaattctgaggtagggtggtttcaggttggttgattcagcgtctcaataatattatcaaagactcagattctggccaggcacaatggctcatgcctataat

SEQ ID NO: 13915 - DNA, 122 bp, Homo sapiens
  misc_feature (61)..(62): /note="This region represents a CpG dinucleotide"
  misc_feature (61)..(61): /note="Nucleotide may be methylated to form 5-methylcytosine"
ctgtcccattaaagctgaagatgtggcttgtggaacagggggcagttagtcagcataaggcgtaagttgcaattgtttagtgttgctgatcttgaggtcagtgcttgtttagatgctagaga

SEQ ID NO: 13916 - DNA, 122 bp, Homo sapiens
  misc_feature (61)..(62): /note="This region represents a CpG dinucleotide"
  misc_feature (61)..(61): /note="Nucleotide may be methylated to form 5-methylcytosine"
agtgtcttctgtgtctgaattaccacagtcatgtagtggctcagtgagaactccttgtcccggtcattacaaaaataaaacagaaatctctctgttgctaggttaggaattagatcacaatt

SEQ ID NO: 13917 - DNA, 122 bp, Homo sapiens
  misc_feature (61)..(62): /note="This region represents a CpG dinucleotide"
  misc_feature (61)..(61): /note="Nucleotide may be methylated to form 5-methylcytosine"
gggaagtaacctgtgtggctggggagtcaatgaggccatcgtgtgaggggaggactggaacgcagttctatgatgcattccagggataaaggctgagttactcaccacagagaggaatcgct

SEQ ID NO: 13918 - DNA, 122 bp, Homo sapiens
  misc_feature (61)..(62): /note="This region represents a CpG dinucleotide"
  misc_feature (61)..(61): /note="Nucleotide may be methylated to form 5-methylcytosine"
gaactcactcaatgtcagtatacagagaattcccttgtctttttataactctgtgctatacgctgacggaagttcattcagtcagtcccctattgatggacacttgagttattctcagactt

SEQ ID NO: 13919 - DNA, 122 bp, Homo sapiens
  misc_feature (61)..(62): /note="This region represents a CpG dinucleotide"
  misc_feature (61)..(61): /note="Nucleotide may be methylated to form 5-methylcytosine"
cctgtttttaggcctatgccattaccatatttaccttgtgggcagtgattttaatttgagcggcatcattgattaatgttattttgaattttgctggtttggtgattttgtttgtatttaat

SEQ ID NO: 13920 - DNA, 122 bp, Homo sapiens
  misc_feature (61)..(62): /note="This region represents a CpG dinucleotide"
  misc_feature (61)..(61): /note="Nucleotide may be methylated to form 5-methylcytosine"
caaatatagttcaattcagacaaacattaaaaaagatgcgtagcaatagagaactacaaacgagggctgtggaaacacatttcaatggactaatcatccagcacaccaaccagaaaatattt

SEQ ID NO: 13921 - DNA, 122 bp, Homo sapiens
  misc_feature (61)..(62): /note="This region represents a CpG dinucleotide"
  misc_feature (61)..(61): /note="Nucleotide may be methylated to form 5-methylcytosine"
tgctctgcatgtggaactcaagaactgcggagctttctgatgcctggcagggttttgtcccggtcagtggttgagtgagccacacctccctcccctgaccaggcaaacttagacaagaaaag

SEQ ID NO: 13922 - DNA, 122 bp, Homo sapiens
  misc_feature (61)..(62): /note="This region represents a CpG dinucleotide"
  misc_feature (61)..(61): /note="Nucleotide may be methylated to form 5-methylcytosine"
tgagggtagggcagggcagggcaggcctaggcctctgcatcctactcccggcctgccagccgggacaaaccaggcaaagaggcccctctaggcacccgaggcagcccccatgggagggggtg

SEQ ID NO: 13923 - DNA, 122 bp, Homo sapiens
  misc_feature (61)..(62): /note="This region represents a CpG dinucleotide"
  misc_feature (61)..(61): /note="Nucleotide may be methylated to form 5-methylcytosine"
aaatctagtccattctgaggctccgccgcaccccgccccctcaggctctcccattagcaccgccccttaggtacagttacactggctccgcccactaattggcctcgccccccaagggccca

SEQ ID NO: 13924 - DNA, 122 bp, Homo sapiens
  misc_feature (61)..(62): /note="This region represents a CpG dinucleotide"
  misc_feature (61)..(61): /note="Nucleotide may be methylated to form 5-methylcytosine"
aggccatctgacttcagaatctgagctctaaccaccatgttatacagtttagcctgctcacgttggttcttagcacttgcaactaagacgtattagctaaatagggctcctcagtctggccc

SEQ ID NO: 13925 - DNA, 122 bp, Homo sapiens
  misc_feature (61)..(62): /note="This region represents a CpG dinucleotide"
  misc_feature (61)..(61): /note="Nucleotide may be methylated to form 5-methylcytosine"
agtaagaaacactgaatcatacataatgctgtttaaaaatcttagctgacagccaccttgcgatattctgaaaaatatttaaggaagatagtttgaggttagtaaagattttcttccccact

SEQ ID NO: 13926 - DNA, 122 bp, Homo sapiens
  misc_feature (61)..(62): /note="This region represents a CpG dinucleotide"
  misc_feature (61)..(61): /note="Nucleotide may be methylated to form 5-methylcytosine"
aaaaagttggaagatgtatacattaccttattaatatcccacagaaccaatatgctctgtcgttttgcaaattcataagtagtctgcctgcctattccatgcccagctccagtaatgagaac

SEQ ID NO: 13927 - DNA, 122 bp, Homo sapiens
  misc_feature (61)..(62): /note="This region represents a CpG dinucleotide"
  misc_feature (61)..(61): /note="Nucleotide may be methylated to form 5-methylcytosine"
cccagctactcaggaggctgaggaaagaagatcaattgagcccaggaggctgcagtgaaccgtggtcataccctgtactccggcctgtgtgacagaaggagatcttatctccaaaaaaagtc

SEQ ID NO: 13928 - DNA, 122 bp, Homo sapiens
  misc_feature (61)..(62): /note="This region represents a CpG dinucleotide"
  misc_feature (61)..(61): /note="Nucleotide may be methylated to form 5-methylcytosine"
ctctgagtgtgtttgtgctgggttcttacaccttgaggcatgattttcctgtctcacagacgaagatgttgaggctccaagaggttacgtgcctttcaggaacccatattaagtggtaacaa

SEQ ID NO: 13929 - DNA, 122 bp, Homo sapiens
  misc_feature (61)..(62): /note="This region represents a CpG dinucleotide"
  misc_feature (61)..(61): /note="Nucleotide may be methylated to form 5-methylcytosine"
ggaagtctgatgtcctatttgctttgagggccagtgagaaactggcttatggggcaaaaacggacttgtatcccccaagatttgtaatgtcctaccagacattgtgcaagtaaaaaacattt

SEQ ID NO: 13930 - DNA, 122 bp, Homo sapiens
  misc_feature (61)..(62): /note="This region represents a CpG dinucleotide"
  misc_feature (61)..(61): /note="Nucleotide may be methylated to form 5-methylcytosine"
acttgttccacctctagatagaaatcaaaagcaaggaactttactgtttcgcccaagaaccggaagaaagatctagctcagcatcaaaggcttgccaaggttgttgttggaactccataccg

SEQ ID NO: 13931 - DNA, 122 bp, Homo sapiens
  misc_feature (61)..(62): /note="This region represents a CpG dinucleotide"
  misc_feature (61)..(61): /note="Nucleotide may be methylated to form 5-methylcytosine"
aaccaccatcaccatccatctccagaaagatttcatcaacacaccatgtttcaaacttctcgattttataaagtgcctctcattcaaatagtaacagctgaagaaaaaaatgcaggtaccat

SEQ ID NO: 13932 - DNA, 122 bp, Homo sapiens
  misc_feature (61)..(62): /note="This region represents a CpG dinucleotide"
  misc_feature (61)..(61): /note="Nucleotide may be methylated to form 5-methylcytosine"
ttgcctgaggtcacacagctaataagccatgaattaagccaaatctttctgagcctaagtcgtgtcttcaagttaatagtaccagactgtctgtactttcaattctttccactccaaaaagg

SEQ ID NO: 13933 - DNA, 122 bp, Homo sapiens
  misc_feature (61)..(62): /note="This region represents a CpG dinucleotide"
  misc_feature (61)..(61): /note="Nucleotide may be methylated to form 5-methylcytosine"
tcaccattgtcaaattccagaacgttttcatcatctttgaaacaaattatactggccagacgcagtggctcacgcctctaatcccaacactttgggagaccggggtaggtggatcacttgag

SEQ ID NO: 13934 - DNA, 122 bp, Homo sapiens
  misc_feature (61)..(62): /note="This region represents a CpG dinucleotide"
  misc_feature (61)..(61): /note="Nucleotide may be methylated to form 5-methylcytosine"
taggtagggactaagtaactaggagtagctcagggtcacctagccaatgatcggagatcccgggctcagagccaggccttctgactccttccaagttgcgtgccctcctctttttcgtttga

SEQ ID NO: 13935 - DNA, 122 bp, Homo sapiens
  misc_feature (61)..(62): /note="This region represents a CpG dinucleotide"
  misc_feature (61)..(61): /note="Nucleotide may be methylated to form 5-methylcytosine"
tgtgggcaaaactgctggaaccaggcaggtcctacctccacgacacagcatagagggtgacgtgtctgagggcacacaggctctggttaggctttgtggaattctgacctcaatgagtcact

SEQ ID NO: 13936 - DNA, 122 bp, Homo sapiens
  misc_feature (61)..(62): /note="This region represents a CpG dinucleotide"
  misc_feature (61)..(61): /note="Nucleotide may be methylated to form 5-methylcytosine"
agatgcagtgctgcataaaccccagtccccaaggggcaacatccccagtagatggaaaaacgagaagtctgagatttagaagcgtatatacaggaaagaaacttgcttgttttgacctctga

SEQ ID NO: 13937 - DNA, 122 bp, Homo sapiens
  misc_feature (61)..(62): /note="This region represents a CpG dinucleotide"
  misc_feature (61)..(61): /note="Nucleotide may be methylated to form 5-methylcytosine"
gccgccttgggaatgaatcacatcctgttctggaaacatgaaaggatgttctaaagagcacgtgacccattgctgggcttggtagcttggtcagaacttcatttgctatttattggaatttg

SEQ ID NO: 13938 - DNA, 122 bp, Homo sapiens
  misc_feature (61)..(62): /note="This region represents a CpG dinucleotide"
  misc_feature (61)..(61): /note="Nucleotide may be methylated to form 5-methylcytosine"
tttattggttttcaactttcagatcctatcaatagaagctgtagacaaatatccattcttcgtctgaggacaaatgacagaggatttaaccattcagggaactgaaaagaacacggatggca

SEQ ID NO: 13939 - DNA, 122 bp, Homo sapiens
  misc_feature (61)..(62): /note="This region represents a CpG dinucleotide"
  misc_feature (61)..(61): /note="Nucleotide may be methylated to form 5-methylcytosine"
agcaagcaagttaatccacatgaagggctgcaccgtctggcaggggctttatatagtaagcgagtggctgaaagatgatgggtaaatcacacaagcactcagcttgtttctccttatgtgag

SEQ ID NO: 13940 - DNA, 122 bp, Homo sapiens
  misc_feature (61)..(62): /note="This region represents a CpG dinucleotide"
  misc_feature (61)..(61): /note="Nucleotide may be methylated to form 5-methylcytosine"
aaaaaaaaagtcactgcaaccagtacttatgtttattactgtacctaataaacagcccagcgtggtgattcctattcacttagtagcctccccatctagaatatactccgtgatctttcttg

SEQ ID NO: 13941 - DNA, 122 bp, Homo sapiens
  misc_feature (61)..(62): /note="This region represents a CpG dinucleotide"
  misc_feature (61)..(61): /note="Nucleotide may be methylated to form 5-methylcytosine"
agctaggctctgttaatcagggatgaggcttcgggtagtcaagttacaagaaggcttcagcgggtgcatgtcagctatgcggttgggcgggttggccccactctaattagcctggcttccca

SEQ ID NO: 13942 - DNA, 122 bp, Homo sapiens
  misc_feature (61)..(62): /note="This region represents a CpG dinucleotide"
  misc_feature (61)..(61): /note="Nucleotide may be methylated to form 5-methylcytosine"
gatttcatactttcccaggctctgatatcttatgtatttgaatatgaataggtgattgagcgtgtgtgtctgtgtgtttctccaaggtatctgaaaccggtcccctctttagttcatttggt

SEQ ID NO: 13943 - DNA, 122 bp, Homo sapiens
  misc_feature (61)..(62): /note="This region represents a CpG dinucleotide"
  misc_feature (61)..(61): /note="Nucleotide may be methylated to form 5-methylcytosine"
aattatatcccttgattatcctgggtgattttctctccacactacatcttttctcattcacgatgattttggtctcttctggaactcattgcaagaaactggcatgtggctggtttgctttt

SEQ ID NO: 13944 - DNA, 122 bp, Homo sapiens
  misc_feature (61)..(62): /note="This region represents a CpG dinucleotide"
  misc_feature (61)..(61): /note="Nucleotide may be methylated to form 5-methylcytosine"
tgtcagagtcagtctctcccttgatgaggttaccaaggtgtaacaggaagtatacaaatacgcacagctagaatgtaaggcacaggccgcaggagaagtgcatggagaagggagagaaattg

SEQ ID NO: 13945 - DNA, 122 bp, Homo sapiens
  misc_feature (61)..(62): /note="This region represents a CpG dinucleotide"
  misc_feature (61)..(61): /note="Nucleotide may be methylated to form 5-methylcytosine"
ccaacagcatgtgctcacttcatgtctgtgtctctcattttggtaattcttacagtagttcgaactttcttattaatattatcatatctgttatggtgatctgtgatcaccaatctttgatg

SEQ ID NO: 13946 - DNA, 122 bp, Homo sapiens
  misc_feature (61)..(62): /note="This region represents a CpG dinucleotide"
  misc_feature (61)..(61): /note="Nucleotide may be methylated to form 5-methylcytosine"
tatagagtacaaatggaagtaaaagagtaattgcaatttgaccccaaaaaagctacgtggcgctcccatctggctgttcctgtactgaagttctcagtaagtttctactttaaaacagattg

SEQ ID NO: 13947 - DNA, 122 bp, Homo sapiens
  misc_feature (61)..(62): /note="This region represents a CpG dinucleotide"
  misc_feature (61)..(61): /note="Nucleotide may be methylated to form 5-methylcytosine"
cctatcccatccctcaaggcagcaagttcttaggttggcttcccactgtgtgggcaaacacgcggcctcactcttactggaagccaagacttgctccaactgggctcggcaggagagagttc

SEQ ID NO: 13948 - DNA, 122 bp, Homo sapiens
  misc_feature (61)..(62): /note="This region represents a CpG dinucleotide"
  misc_feature (61)..(61): /note="Nucleotide may be methylated to form 5-methylcytosine"
ccagcgcttcatgttcatttgtatttgttccttgtatcctctaaatcccacagaggggagcgatggtgatgactcaggtgggccaagaggattccaactcacctagtgtattgcattacaac

SEQ ID NO: 13949 - DNA, 122 bp, Homo sapiens
  misc_feature (61)..(62): /note="This region represents a CpG dinucleotide"
  misc_feature (61)..(61): /note="Nucleotide may be methylated to form 5-methylcytosine"
catgggatctggaaacagagcggaggaaggagctcgggaatggtcttgctcaatccttcccggcctctgctcatcggaatcacccagagggcttttaagcttagacaaaacactctgatgtt

SEQ ID NO: 13950 - DNA, 122 bp, Homo sapiens
  misc_feature (61)..(62): /note="This region represents a CpG dinucleotide"
  misc_feature (61)..(61): /note="Nucleotide may be methylated to form 5-methylcytosine"
acttaacattcctgtcctacaattaagactgcaaacggtggccaaataattgggccacaacgttgaacaaactaatgagtattatatacaaccagttttaaaagactagtagtaggaattaa

SEQ ID NO: 13951 - DNA, 122 bp, Homo sapiens
  misc_feature (61)..(62): /note="This region represents a CpG dinucleotide"
  misc_feature (61)..(61): /note="Nucleotide may be methylated to form 5-methylcytosine"
gctgcatgtagcaaactctccacaaacatgaaataatacccatggccaaattgagccaatcgacgagaataggaagtcaataagcacagctgagtattatttattttttagtgtcattcaaa

SEQ ID NO: 13952 - DNA, 122 bp, Homo sapiens
  misc_feature (61)..(62): /note="This region represents a CpG dinucleotide"
  misc_feature (61)..(61): /note="Nucleotide may be methylated to form 5-methylcytosine"
acatagcaggcaagaaggcaaattgttggaagcaatggtgtaatccacaccctctgtgcacgggttacaggctccagtatattctgatctatgagatcctgggaagggagagaaaagttaat

SEQ ID NO: 13953 - DNA, 122 bp, Homo sapiens
  misc_feature (61)..(62): /note="This region represents a CpG dinucleotide"
  misc_feature (61)..(61): /note="Nucleotide may be methylated to form 5-methylcytosine"
gaaactctggggctgggccccggtaatgtttctacaggctcctcaggtggttctcaggcacgctgaggtttgagaaccaaggctgaagagccacgtcctaacagtgttccctctattcgtga

SEQ ID NO: 13954 - DNA, 122 bp, Homo sapiens
  misc_feature (61)..(62): /note="This region represents a CpG dinucleotide"
  misc_feature (61)..(61): /note="Nucleotide may be methylated to form 5-methylcytosine"
aaatcctattattcccattgtcttccattataaaatcagatctgccacacaacacctatacgatactggatttagagtaaccaagcagtcccgactcctgttgcagagaagggagtggtgta

SEQ ID NO: 13955 - DNA, 122 bp, Homo sapiens
  misc_feature (61)..(62): /note="This region represents a CpG dinucleotide"
  misc_feature (61)..(61): /note="Nucleotide may be methylated to form 5-methylcytosine"
gaaatcacctaacaacacattactcagaatgtaaccacaatgttaagcaatgcatgacatcgcaaagaccctatttccaaataaggtcatagtctaaggttctagagaaaacatgaatttag

SEQ ID NO: 13956 - DNA, 122 bp, Homo sapiens
  misc_feature (61)..(62): /note="This region represents a CpG dinucleotide"
  misc_feature (61)..(61): /note="Nucleotide may be methylated to form 5-methylcytosine"
aatataggtgaagcacttaatgtgctgccagttacatcagtacgcaagaaaagttagcaccgccattataataaccctgaatcataaagacctgaatgcccttagtcagagcaccacccaga

SEQ ID NO: 13957 - DNA, 122 bp, Homo sapiens
  misc_feature (61)..(62): /note="This region represents a CpG dinucleotide"
  misc_feature (61)..(61): /note="Nucleotide may be methylated to form 5-methylcytosine"
agtagttaagatttatagacttgtttaccagttacctggggctcttcggttccatccaggcgtctctgaggttcttcagatactatttgttttattttattttttttgagacggagtcacct

SEQ ID NO: 13958 - DNA, 122 bp, Homo sapiens
  misc_feature (61)..(62): /note="This region represents a CpG dinucleotide"
  misc_feature (61)..(61): /note="Nucleotide may be methylated to form 5-methylcytosine"
gtaggttagaaaacaggaggaacagaggattgggtggggcctaaaggaattctacagttccgagtgtaggagggaaaagagcaactaacttcttatcagcaagccacaggaagtgtttttaa

SEQ ID NO: 13959 - DNA, 122 bp, Homo sapiens
  misc_feature (61)..(62): /note="This region represents a CpG dinucleotide"
  misc_feature (61)..(61): /note="Nucleotide may be methylated to form 5-methylcytosine"
aaggcctccattggattacttaagccttcagaggctgagcaagttgagcaagatggtcagcgtaaaaaacctgatgctgtacaaatctcggagaaagaagtataccagtctaacttgcttat

SEQ ID NO: 13960 - DNA, 122 bp, Homo sapiens
  misc_feature (61)..(62): /note="This region represents a CpG dinucleotide"
  misc_feature (61)..(61): /note="Nucleotide may be methylated to form 5-methylcytosine"
ggggcagctgcccccgtcggcccctaaatggtgcttggcagcttggcggagtgcacctgacgcagcagcaggacaagcgcagccaggagcgcggaggcgaagagcagcaggaggacgaccca

SEQ ID NO: 13961 - DNA, 122 bp, Homo sapiens
  misc_feature (61)..(62): /note="This region represents a CpG dinucleotide"
  misc_feature (61)..(61): /note="Nucleotide may be methylated to form 5-methylcytosine"
aggtggggcctggtgggaggtatttgggtcatggggctggatccctcataaatgacttggcgccattctcacgggagagagtgagctctcactcttagttcccgctagaactggttgttgac

SEQ ID NO: 13962 - DNA, 122 bp, Homo sapiens
  misc_feature (61)..(62): /note="This region represents a CpG dinucleotide"
  misc_feature (61)..(61): /note="Nucleotide may be methylated to form 5-methylcytosine"
tgagccaactgaattaccaagtaatgggggccccatggcatcccatgacaggtggagagccggctcttcaccctggatggacctgaaatgcctgctaaggccttgctccaccgagtagcaca

SEQ ID NO: 13963 - DNA, 122 bp, Homo sapiens
  misc_feature (61)..(62): /note="This region represents a CpG dinucleotide"
  misc_feature (61)..(61): /note="Nucleotide may be methylated to form 5-methylcytosine"
cagcacattcccaattatacttccaattccagacacagataactacattcctctactcaacggcttttagttgaatgtaactttggaatgtgaaatgactcaaggatcatgtaaagctaatt

SEQ ID NO: 13964 - DNA, 122 bp, Homo sapiens
  misc_feature (61)..(62): /note="This region represents a CpG dinucleotide"
  misc_feature (61)..(61): /note="Nucleotide may be methylated to form 5-methylcytosine"
tctcagaaggtctgagaatcttataggcttactgcctggtaaataaaacattcctttccacggtatttatttttctgtctgttacctgctgtttgcttttagctgatttcctggtgggaaac

SEQ ID NO: 13965 - DNA, 122 bp, Homo sapiens
  misc_feature (61)..(62): /note="This region represents a CpG dinucleotide"
  misc_feature (61)..(61): /note="Nucleotide may be methylated to form 5-methylcytosine"
tttttgccatcctgcttctccttggccccagcccctcagatagttccctgcgtgaggacacgggtgagggtttagagctcacacctgctgaccagatgccttcacttttttctatgcttttt

SEQ ID NO: 13966 - DNA, 122 bp, Homo sapiens
  misc_feature (61)..(62): /note="This region represents a CpG dinucleotide"
  misc_feature (61)..(61): /note="Nucleotide may be methylated to form 5-methylcytosine"
accttgtgatccgcccgcctcggcctcccaaagtggtgggattacaagtgtgagccaccgcggctggctggtgtcttcatctgtaaagagagaatgacacatccctcaggggcatgctgtga

SEQ ID NO: 13967 - DNA, 122 bp, Homo sapiens
  misc_feature (61)..(62): /note="This region represents a CpG dinucleotide"
  misc_feature (61)..(61): /note="Nucleotide may be methylated to form 5-methylcytosine"
accagaaggctcaagttgccatgacgggaggctgaaagagcaagtggatctaggacgtgtcgagtctgagacgtctgatcgacatgaaagaggtgacattgagagggcaagtgcagccagcg

SEQ ID NO: 13968 - DNA, 122 bp, Homo sapiens
  misc_feature (61)..(62): /note="This region represents a CpG dinucleotide"
  misc_feature (61)..(61): /note="Nucleotide may be methylated to form 5-methylcytosine"
gacaaacaaacatctgctctttcattacacaaagaaatttccaagcacctccctccccctcgctcctgggatgtgtatgcttgtttattttgcaactgtatttagtcatggaatttccagaa

SEQ ID NO: 13969 - DNA, 122 bp, Homo sapiens
  misc_feature (61)..(62): /note="This region represents a CpG dinucleotide"
  misc_feature (61)..(61): /note="Nucleotide may be methylated to form 5-methylcytosine"
gacaaatcttgtgcaaaacagctccgtatgactcacatcaacttttaaagatgttggtaacgaagtctgacgaatcgttattgacccagctttgagagtgtacacagtttatctcagctatt

SEQ ID NO: 13970 - DNA, 122 bp, Homo sapiens
  misc_feature (61)..(62): /note="This region represents a CpG dinucleotide"
  misc_feature (61)..(61): /note="Nucleotide may be methylated to form 5-methylcytosine"
ctgggccgggatgtgagtgctgctgtgctgtctccaaagcccacactctttcctctgtgccgctccataaatgctacttgttcccctctgtctctgtgggaggacgttgccattcaggaggg

SEQ ID NO: 13971 - DNA, 122 bp, Homo sapiens
  misc_feature (61)..(62): /note="This region represents a CpG dinucleotide"
  misc_feature (61)..(61): /note="Nucleotide may be methylated to form 5-methylcytosine"
agtagtttggcattttaataaagggtctctaagtaaattaaaatagaacactcggttggccgatctctgaatctctctacacctcggggagacctcactacaaagtaagggagagtgtgtag

SEQ ID NO: 13972 - DNA, 122 bp, Homo sapiens
  misc_feature (61)..(62): /note="This region represents a CpG dinucleotide"
  misc_feature (61)..(61): /note="Nucleotide may be methylated to form 5-methylcytosine"
tcctaatctagtctccagaagagaaaaaagaaaaacatacagaaaggaatgtataagttacggaggataaagagaggggttatgatatgatcaaaacaataacagttaagatcttttgagat

SEQ ID NO: 13973 - DNA, 122 bp, Homo sapiens
  misc_feature (61)..(62): /note="This region represents a CpG dinucleotide"
  misc_feature (61)..(61): /note="Nucleotide may be methylated to form 5-methylcytosine"
acagagccctcagaagcttatggaagcactgcaaacagctgcagacacaactctagggggcgccatgcatctagaccaaaatctatgtgaatgtgaatacagcctggacaactctactgggt

SEQ ID NO: 13974 - DNA, 122 bp, Homo sapiens
  misc_feature (61)..(62): /note="This region represents a CpG dinucleotide"
  misc_feature (61)..(61): /note="Nucleotide may be methylated to form 5-methylcytosine"
gttcttaggggcataggacatgaggttcgtctctttgttttgggaaactgaatctcctaacgcgatggactcgctctttatctccagcattgcccgctgccttggtgtctgctttgtttatt

SEQ ID NO: 13975 - DNA, 122 bp, Homo sapiens
  misc_feature (61)..(62): /note="This region represents a CpG dinucleotide"
  misc_feature (61)..(61): /note="Nucleotide may be methylated to form 5-methylcytosine"
cccagctatatgtggtgaaaaggaattgcttaactatgtaaactggcgtgggagagttggcgctatgctctgtttgtacagctgctcctggggctccggctccgctatctttcacggcccag

SEQ ID NO: 13976 - DNA, 122 bp, Homo sapiens
  misc_feature (61)..(62): /note="This region represents a CpG dinucleotide"
  misc_feature (61)..(61): /note="Nucleotide may be methylated to form 5-methylcytosine"
gacactgagatgttaacaattacagacgatgcttatggagtcagtggtagacttggaaaacggtgagtctactgtggtaagaacaaacataggcagacagctataaattgcagtaaacaaac

SEQ ID NO: 13977 - DNA, 122 bp, Homo sapiens
  misc_feature (61)..(62): /note="This region represents a CpG dinucleotide"
  misc_feature (61)..(61): /note="Nucleotide may be methylated to form 5-methylcytosine"
gcagagcgggtcgcagtcagtggcactggtccacatataaaagaagctcttaagagcgtacgataaagcctttgagaatattaatgtgatgtcaaggccttcagccagtccaaaagtattta

SEQ ID NO: 13978 - DNA, 122 bp, Homo sapiens
  misc_feature (61)..(62): /note="This region represents a CpG dinucleotide"
  misc_feature (61)..(61): /note="Nucleotide may be methylated to form 5-methylcytosine"
aattacctgtcttaaccatccggtcttaattacctggcttttgttttgtcttcacaacagcgttttgggagaatgttgaatccaagcgagctgagtcagctgtctgctgttaagctggagac

SEQ ID NO: 13979 - DNA, 122 bp, Homo sapiens
  misc_feature (61)..(62): /note="This region represents a CpG dinucleotide"
  misc_feature (61)..(61): /note="Nucleotide may be methylated to form 5-methylcytosine"
agtttcccatctgctgtgcctctgggaggagagggactcctggggggcctgcccctcatacgccatcaccaaaaggaaaggacaaagccacacgcagccagggcttcacacccttcaggctg

SEQ ID NO: 13980 - DNA, 122 bp, Homo sapiens
  misc_feature (61)..(62): /note="This region represents a CpG dinucleotide"
  misc_feature (61)..(61): /note="Nucleotide may be methylated to form 5-methylcytosine"
cattaatgctagtcagctgttgagtctaaattccaaaatggagggggtagacttcccttccggctgtagctagaaactcagctttaaggtttttctggggtctgcttggccaaggaggtcca

SEQ ID NO: 13981 - DNA, 122 bp, Homo sapiens
  misc_feature (61)..(62): /note="This region represents a CpG dinucleotide"
  misc_feature (61)..(61): /note="Nucleotide may be methylated to form 5-methylcytosine"
agttatgctgttagtcataaggttctttgtctctgactcaggaatcttgggtcttccacccgtaatggacaaagttattaacctgtaagcagggtaatcaaatcctgataccaggtaaggta

SEQ ID NO: 13982 - DNA, 122 bp, Homo sapiens
  misc_feature (61)..(62): /note="This region represents a CpG dinucleotide"
  misc_feature (61)..(61): /note="Nucleotide may be methylated to form 5-methylcytosine"
catgaccctctgttcttcctcaaagactcttacagactacactgcagtataactatattacgtaatgttattatctgattacctctttaagaccataaaacaaacacctcaaaggccaggcc

SEQ ID NO: 13983 - DNA, 122 bp, Homo sapiens
  misc_feature (61)..(62): /note="This region represents a CpG dinucleotide"
  misc_feature (61)..(61): /note="Nucleotide may be methylated to form 5-methylcytosine"
tgacttaactacatttaaagacagagtaggaaaagagaatgaggcctcattttgcggaagcgaaggctgcctgagagccagctgcagtaaacactaaagaaaaagaacaatgactgagaaaa

SEQ ID NO: 13984 - DNA, 122 bp, Homo sapiens
  misc_feature (61)..(62): /note="This region represents a CpG dinucleotide"
  misc_feature (61)..(61): /note="Nucleotide may be methylated to form 5-methylcytosine"
acctcaggtgatccgcccacctcggcctcccaaagtgctgggattacaggcgtgagccaccgtgcctggcctaaaaatgcctggctaaatttgttaggggccacaaccccagatttacctgc

SEQ ID NO: 13985 - DNA, 122 bp, Homo sapiens
  misc_feature (61)..(62): /note="This region represents a CpG dinucleotide"
  misc_feature (61)..(61): /note="Nucleotide may be methylated to form 5-methylcytosine"
ccagcctgtcttgcaggttgagtagggttgtgcgcttgggatctctgatcagaccggcaccgcagtgtgggagagaagctgtgtgaagagtctgtcgtctgactttggcaagggttcctctg

SEQ ID NO: 13986 - DNA, 122 bp, Homo sapiens
  misc_feature (61)..(62): /note="This region represents a CpG dinucleotide"
  misc_feature (61)..(61): /note="Nucleotide may be methylated to form 5-methylcytosine"
gagggacattactcattattatgaggcttaaggaaaggaaccatctcccatgttgttatacggaggggcattactcattattatgagacttaaggacaggaaccatctcccatgctgttatg

SEQ ID NO: 13987 - DNA, 122 bp, Homo sapiens
  misc_feature (61)..(62): /note="This region represents a CpG dinucleotide"
  misc_feature (61)..(61): /note="Nucleotide may be methylated to form 5-methylcytosine"
caataaacctctctcttttgtaaattgcccagtcttgggtgtgtcttaccagcagcatgacgatgaactaatccagtaaattggtactagtagagtcaggcgctactgaaaagataccaaaa

SEQ ID NO: 13988 - DNA, 122 bp, Homo sapiens
  misc_feature (61)..(62): /note="This region represents a CpG dinucleotide"
  misc_feature (61)..(61): /note="Nucleotide may be methylated to form 5-methylcytosine"
gcagtgaaagtggcattttcttttgtttggtagtaacataccacattgcaccaagcatatcgctggtgggtgtgattactatatcagataaagaaatctcattgaagaatctaacacaaatg

SEQ ID NO: 13989 - DNA, 122 bp, Homo sapiens
  misc_feature (61)..(62): /note="This region represents a CpG dinucleotide"
  misc_feature (61)..(61): /note="Nucleotide may be methylated to form 5-methylcytosine"
atatagctcacaggattctgtgagaaattgtatcggtgaaaacaaatgacctagtttcttcgaccaaaaaaactacaagggagaaacaaggaaggaaaaggggaaggctgtggattaaaaga

SEQ ID NO: 13990 - DNA, 122 bp, Homo sapiens
  misc_feature (61)..(62): /note="This region represents a CpG dinucleotide"
  misc_feature (61)..(61): /note="Nucleotide may be methylated to form 5-methylcytosine"
tttaccatgttgcaactgctgcgactatggctcctgtggcaaaggtcaaactctttgtctcgcctgaccagcacttcagctcctaggatttcttcctgttttactttgggactcactgttcc

SEQ ID NO: 13991 - DNA, 122 bp, Homo sapiens
  misc_feature (61)..(62): /note="This region represents a CpG dinucleotide"
  misc_feature (61)..(61): /note="Nucleotide may be methylated to form 5-methylcytosine"
ggatactttgttagggcccctcctgggccctggaggtggagcctcatgttagggtggatgcgcctctgccctgaatctgcaatgggccaagtgcaaagctgtgttgtcagtgccagatggcc

SEQ ID NO: 13992 - DNA, 122 bp, Homo sapiens
  misc_feature (61)..(62): /note="This region represents a CpG dinucleotide"
  misc_feature (61)..(61): /note="Nucleotide may be methylated to form 5-methylcytosine"
gacctgtcatttccatttatgtaatggattttgaactcaaaagccctgtaaatacataagcgatcttgaaccaagccccattgtgaaaggcaggattgaggaatatgaaacaaattatgctt

SEQ ID NO: 13993 - DNA, 122 bp, Homo sapiens
  misc_feature (61)..(62): /note="This region represents a CpG dinucleotide"
  misc_feature (61)..(61): /note="Nucleotide may be methylated to form 5-methylcytosine"
acccacaccccagcttcaccccgagctactcactgccatcttgtatgtattagggttttgcgtaaggttttgtttgggagaaactggtgcccacaaaaaagaaaatggaaaatcaacctccc

SEQ ID NO: 13994 - DNA, 122 bp, Homo sapiens
  misc_feature (61)..(62): /note="This region represents a CpG dinucleotide"
  misc_feature (61)..(61): /note="Nucleotide may be methylated to form 5-methylcytosine"
gactttggggttgtatttaatacagctcttgtgatattcttatggaaatgataatccttacgggctaaatggcagaaaaatcaggaagatacatgactaagtaaatacgcctaataatgcag

SEQ ID NO: 13995 - DNA, 122 bp, Homo sapiens
  misc_feature (61)..(62): /note="This region represents a CpG dinucleotide"
  misc_feature (61)..(61): /note="Nucleotide may be methylated to form 5-methylcytosine"
tttcttttggagtctctgctttcacttctagtttccttttgaagccttatactgctttgtcgttggctgaaatggtaaggcagcagctgacctgtctctagctttccccattaccttgctga

SEQ ID NO: 13996 - DNA, 122 bp, Homo sapiens
  misc_feature (61)..(62): /note="This region represents a CpG dinucleotide"
  misc_feature (61)..(61): /note="Nucleotide may be methylated to form 5-methylcytosine"
gagattttttaggaacacatatgtcgcaatacaacagaactgactgtatttcttgcaaatcggcagctgagtccagaggcttagtcagactcatattctttggtagtgtgttctttcaacag

SEQ ID NO: 13997 - DNA, 122 bp, Homo sapiens
  misc_feature (61)..(62): /note="This region represents a CpG dinucleotide"
  misc_feature (61)..(61): /note="Nucleotide may be methylated to form 5-methylcytosine"
agctgtagatgatgtgggtacagaggaagcggtcaagggcatctgggaagcagctcccatcgccttcccggtactgggaccagctggtgtagtagcagaccagtttgtatgcagagcctgaa

SEQ ID NO: 13998 - DNA, 122 bp, Homo sapiens
  misc_feature (61)..(62): /note="This region represents a CpG dinucleotide"
  misc_feature (61)..(61): /note="Nucleotide may be methylated to form 5-methylcytosine"
acaaaagtaaatcattgaaatgtagtcattctcttaatcatctaatggttttattacttacgtatagacaaatgcacacagggcaccctgttgtcttcagtaaggtcattgagtaatcatta

SEQ ID NO: 13999 - DNA, 122 bp, Homo sapiens
  misc_feature (61)..(62): /note="This region represents a CpG dinucleotide"
  misc_feature (61)..(61): /note="Nucleotide may be methylated to form 5-methylcytosine"
atggtgtgaacttgacttatactgcttgtgaaacctgagtcatgtgctgaaatcctgccccgccaccgctttcctcccttaactggatccttagccttggactccaaggctacagctctgtc

SEQ ID NO: 14000 - DNA, 122 bp, Homo sapiens
  misc_feature (61)..(62): /note="This region represents a CpG dinucleotide"
  misc_feature (61)..(61): /note="Nucleotide may be methylated to form 5-methylcytosine"
gcttcccccagttctgctccgaggactgggtctaagggacgagggccaggaactgagcagcgggttcacctcccaggtccttcatgatcctggtgtccctgccgcggctgccacttctggga

SEQ ID NO: 14001 - DNA, 122 bp, Homo sapiens
  misc_feature (61)..(62): /note="This region represents a CpG dinucleotide"
  misc_feature (61)..(61): /note="Nucleotide may be methylated to form 5-methylcytosine"
gacagtatctctgtcctgtgattatggctgttttcaaggcctaccaataaaacaagcttgcgaaaggggtatgtacaaaagaaaaaaaaattctgcatacctgggcaagaattgaagagaaa

SEQ ID NO: 14002 - DNA, 122 bp, Homo sapiens
  misc_feature (61)..(62): /note="This region represents a CpG dinucleotide"
  misc_feature (61)..(61): /note="Nucleotide may be methylated to form 5-methylcytosine"
cttaactgaactgctgtgacttcattctgatcctctatcatttatgtgacttactgcattcgccacctaactggtctttgtgtttctgtctgtgtccgcctacaaccagttctcaaaaaact

SEQ ID NO: 14003 - DNA, 122 bp, Homo sapiens
  misc_feature (61)..(62): /note="This region represents a CpG dinucleotide"
  misc_feature (61)..(61): /note="Nucleotide may be methylated to form 5-methylcytosine"
aatcaattctgcaactgtatcatgaaagcagctatagattatatataaacaaatgaatgtcgttatgttccaatgaaactttgtttacagaaacagtgggctggccaggcacagtggctcaa

SEQ ID NO: 14004 - DNA, 122 bp, Homo sapiens
  misc_feature (61)..(62): /note="This region represents a CpG dinucleotide"
  misc_feature (61)..(61): /note="Nucleotide may be methylated to form 5-methylcytosine"
acccagaatggtttctgtattttaccctaaactcattcagacttttcaagttgtcagagccgtaactgatctaaaaatgcacgtaataagtagaagtctaaactagacatttcttttctcta

SEQ ID NO: 14005 - DNA, 122 bp, Homo sapiens
  misc_feature (61)..(62): /note="This region represents a CpG dinucleotide"
  misc_feature (61)..(61): /note="Nucleotide may be methylated to form 5-methylcytosine"
tagatctaggacaattcaaaaaccaggcagaaaacggtgctcacggtggccgtgttcaggcggctgggggcattttaagtgagaaagtcgcctctctcaggagggaacttgcaaagggctgg

SEQ ID NO: 14006 - DNA, 122 bp, Homo sapiens
  misc_feature (61)..(62): /note="This region represents a CpG dinucleotide"
  misc_feature (61)..(61): /note="Nucleotide may be methylated to form 5-methylcytosine"
gacagatagcacggtagcatctcaagatacagaccatgcagctgtactgacatcaaaaaacggcctgagtgtgacatctaatctcaagacaaacctgtcttttttcagttcctattttaagc

SEQ ID NO: 14007 - DNA, 122 bp, Homo sapiens
  misc_feature (61)..(62): /note="This region represents a CpG dinucleotide"
  misc_feature (61)..(61): /note="Nucleotide may be methylated to form 5-methylcytosine"
gcaacggcccaactgaactcaagataggtaacatctatcactctctgcaatctgcaagctcgtcactctgcctgggaagattagattagtaagcacccggtcatcggaaaaatccagctcca

SEQ ID NO: 14008 - DNA, 122 bp, Homo sapiens
  misc_feature (61)..(62): /note="This region represents a CpG dinucleotide"
  misc_feature (61)..(61): /note="Nucleotide may be methylated to form 5-methylcytosine"
gtgcggtgcaaatgcctgtttgtgcaaggctccgagcggctgaccttcccctggctgtgccgcaggtgcagaacaagttggacggctgctgctacgcagtgaagcgcatccccatcaacccg

SEQ ID NO: 14009 - DNA, 122 bp, Homo sapiens
  misc_feature (61)..(62): /note="This region represents a CpG dinucleotide"
  misc_feature (61)..(61): /note="Nucleotide may be methylated to form 5-methylcytosine"
cttgcaatagaaggctgctccaaacttttcttctgcaacttcctcacctctctcagtcttcgtggaactgaggtgagttaaggccttgctctgcactaggctttggcttaatgaaatgttgt

SEQ ID NO: 14010 - DNA, 122 bp, Homo sapiens
  misc_feature (61)..(62): /note="This region represents a CpG dinucleotide"
  misc_feature (61)..(61): /note="Nucleotide may be methylated to form 5-methylcytosine"
aggacgcccaggcttccggaagactcgggggtcccatccccactgtgcagagggctagagcgggagctgggggagggagaggtcagaggtcaaggctgccgcgtggagcgtgggccgtggag

SEQ ID NO: 14011 - DNA, 122 bp, Homo sapiens
  misc_feature (61)..(62): /note="This region represents a CpG dinucleotide"
  misc_feature (61)..(61): /note="Nucleotide may be methylated to form 5-methylcytosine"
gccacgttttccaaccctaagagttctatccttggaggcccatgctctgggaccaagtaccgtggtgatgagtatatgcccagtgggagagtgtttctacagagtgtgaaatgagacagagt

SEQ ID NO: 14012 - DNA, 122 bp, Homo sapiens
  misc_feature (61)..(62): /note="This region represents a CpG dinucleotide"
  misc_feature (61)..(61): /note="Nucleotide may be methylated to form 5-methylcytosine"
catactgggaagccagggtagacaggccagaaggcaggctctttcattgcaaaacagcagcgtgtcttctgggtggatccccaagggataaaggtctggccatatgggaatccaggtgttag

SEQ ID NO: 14013 - DNA, 122 bp, Homo sapiens
  misc_feature (61)..(62): /note="This region represents a CpG dinucleotide"
  misc_feature (61)..(61): /note="Nucleotide may be methylated to form 5-methylcytosine"
cacatggcactgaagaaacaaagtaaaaaattctcttttaattctgagctgcatgcccagcgccacatgcactgtctgttacatgtcgcttcttatgaggttcatgctgggaagtttctttt

SEQ ID NO: 14014 - DNA, 122 bp, Homo sapiens
  misc_feature (61)..(62): /note="This region represents a CpG dinucleotide"
  misc_feature (61)..(61): /note="Nucleotide may be methylated to form 5-methylcytosine"
cttggagtcatcctttgaaaagtctgtaaagatctcatttaggtattcttcccccaacttcgctaattccctggatcctgctagtatttagaatcttgttcatcatttgttggaaagtaatg

SEQ ID NO: 14015 - DNA, 122 bp, Homo sapiens
  misc_feature (61)..(62): /note="This region represents a CpG dinucleotide"
  misc_feature (61)..(61): /note="Nucleotide may be methylated to form 5-methylcytosine"
cattcatttccccgaagctgccggattcagatcccaccagccacgttggtacttgctctccgcttcctgtgtgtagacaggaggcaccatctctgtattgactctgtagcaatctggagggt

SEQ ID NO: 14016 - DNA, 122 bp, Homo sapiens
  misc_feature (61)..(62): /note="This region represents a CpG dinucleotide"
  misc_feature (61)..(61): /note="Nucleotide may be methylated to form 5-methylcytosine"
aggaagagacccaaaccaattcaaatagcatgttaaaattcaatctatctacaatcttcacgtccttgattattacattctgtaatctcatgggtatttttgcttccaaatataaggacata

SEQ ID NO: 14017 - DNA, 122 bp, Homo sapiens
  misc_feature (61)..(62): /note="This region represents a CpG dinucleotide"
  misc_feature (61)..(61): /note="Nucleotide may be methylated to form 5-methylcytosine"
agggttcaaactggcttgtagtcgcggggaggatattggactcagcacccaggggtcctgcgcaggagaaaccgctgtgctgtgctctttaaggtgctgggccgtgtgcagtctgggaggaa

SEQ ID NO: 14018 - DNA, 122 bp, Homo sapiens
  misc_feature (61)..(62): /note="This region represents a CpG dinucleotide"
  misc_feature (61)..(61): /note="Nucleotide may be methylated to form 5-methylcytosine"
aaaggttgtgagtgacttcagaacacacccactcagttaaattccttatctttgttaccacgcctattcagtgcctacaataagaattccaagcatcaaacatctcatgcttgaatccattc

SEQ ID NO: 14019 - DNA, 122 bp, Homo sapiens
  misc_feature (61)..(62): /note="This region represents a CpG dinucleotide"
  misc_feature (61)..(61): /note="Nucleotide may be methylated to form 5-methylcytosine"
cagaaggcggcttgccagcattttctcgggctgcagaggctggaggcttatggacgactccgtggtcgcctcccccggggttacgatatttggagaaggtttttcctccttgatcattttgg

SEQ ID NO: 14020 - DNA, 122 bp, Homo sapiens
  misc_feature (61)..(62): /note="This region represents a CpG dinucleotide"
  misc_feature (61)..(61): /note="Nucleotide may be methylated to form 5-methylcytosine"
aaatccacaatcaagcccttgttgatgcaaatgttagtcgcccaaagcagaatgggttaacgaattactgcagtggttttaggtgcatgggtttgacccatgtaaatcattttaataagtaa

SEQ ID NO: 14021 - DNA, 122 bp, Homo sapiens
  misc_feature (61)..(62): /note="This region represents a CpG dinucleotide"
  misc_feature (61)..(61): /note="Nucleotide may be methylated to form 5-methylcytosine"
tgagttcctgacttcaggttatccacccaccttggcctcccaaagtgctgagattacagacgtgagccaccaagcccggcgaattttttttgctcgttaaaaaaatcaggaggtctgccttt

SEQ ID NO: 14022 - DNA, 122 bp, Homo sapiens
  misc_feature (61)..(62): /note="This region represents a CpG dinucleotide"
  misc_feature (61)..(61): /note="Nucleotide may be methylated to form 5-methylcytosine"
gcattgactaatcatttcctgaatcattactaagtgatgcttcatacaattcttggcaaccgagtcttttaaactgcaacagatgtgaagtggtgagtaatatacttccgtatttttctccc

SEQ ID NO: 14023 - DNA, 122 bp, Homo sapiens
  misc_feature (61)..(62): /note="This region represents a CpG dinucleotide"
  misc_feature (61)..(61): /note="Nucleotide may be methylated to form 5-methylcytosine"
ctgtgaggaagttagcagccttccttctgacctgactgcttccgcttctggtggtggcagcgctgtcaagcctcattactggaaagttcatcttgttaaatttccacttagagcaggggatg

SEQ ID NO: 14024 - DNA, 122 bp, Homo sapiens
  misc_feature (61)..(62): /note="This region represents a CpG dinucleotide"
  misc_feature (61)..(61): /note="Nucleotide may be methylated to form 5-methylcytosine"
cagcagcactattttagactcacttaccctcagggttgatctcattaactacccctgttacgattcaaatgaagcgggattacttccaggtgttctgttttctgcagttaggctctttctct

SEQ ID NO: 14025 - DNA, 122 bp, Homo sapiens
  misc_feature (61)..(62): /note="This region represents a CpG dinucleotide"
  misc_feature (61)..(61): /note="Nucleotide may be methylated to form 5-methylcytosine"
aaaaaggcaaatttgggagtccatggataccctattattttagattccaggacaaattgtcgaataagcacgtttcataaaaacaatcctccgcagcatcccgtgacagcagctggtccctc

SEQ ID NO: 14026 - DNA, 122 bp, Homo sapiens
  misc_feature (61)..(62): /note="This region represents a CpG dinucleotide"
  misc_feature (61)..(61): /note="Nucleotide may be methylated to form 5-methylcytosine"
cattaccctccaggggcctgagaggtcgagtcatttgtccaagtttgggtggtaagtaagcggcagtgccaggaggcaaacccacaagtagtgccttatcactaagtcacattgttacacaa

SEQ ID NO: 14027 - DNA, 122 bp, Homo sapiens
  misc_feature (61)..(62): /note="This region represents a CpG dinucleotide"
  misc_feature (61)..(61): /note="Nucleotide may be methylated to form 5-methylcytosine"
ctccaagatacacctgtttattaaaccttccgccaagatacacccatttatgaaacccttcgccatgatgcacctgtttattaaacccttcccctagatacacccgtttattaaacccttcg

SEQ ID NO: 14028 - DNA, 122 bp, Homo sapiens
  misc_feature (61)..(62): /note="This region represents a CpG dinucleotide"
  misc_feature (61)..(61): /note="Nucleotide may be methylated to form 5-methylcytosine"
tgctcaacacatggtaagtgctcactaatttacatccatggttatcattagaattaaagacgtcatggtttaggtgctgtacatgagccccaaagtgagtcagatgatgacctgtcatgtca

SEQ ID NO: 14029 - DNA, 122 bp, Homo sapiens
  misc_feature (61)..(62): /note="This region represents a CpG dinucleotide"
  misc_feature (61)..(61): /note="Nucleotide may be methylated to form 5-methylcytosine"
tgcagggatctcggctttgttgcaccagggttaaatttgacgtaacatatatctaatcaacgccatttgttaggagcgctgactaaaataaatagaagataaggctcctgactcacaagtga

SEQ ID NO: 14030 - DNA, 122 bp, Homo sapiens
  misc_feature (61)..(62): /note="This region represents a CpG dinucleotide"
  misc_feature (61)..(61): /note="Nucleotide may be methylated to form 5-methylcytosine"
aactgaatagttaaatgtgactaaagagagaacaggagctggtttgtggtataagaagggcggaactagtacaggcaaggcaagaacaaaaaaagacttgaagtgggcaaggtggaggtcag

SEQ ID NO: 14031 - DNA, 122 bp, Homo sapiens
  misc_feature (61)..(62): /note="This region represents a CpG dinucleotide"
  misc_feature (61)..(61): /note="Nucleotide may be methylated to form 5-methylcytosine"
ctcctggagcccctgggcaagcatttctctgggtgtggacccattactacaccaggcatacgtccagcaagctaattaatgtgcagaattaagagataatgctaaactgttttccaaagcag

SEQ ID NO: 14032 - DNA, 122 bp, Homo sapiens
  misc_feature (61)..(62): /note="This region represents a CpG dinucleotide"
  misc_feature (61)..(61): /note="Nucleotide may be methylated to form 5-methylcytosine"
atgggatataatcgaatcctttgtagtccttcagcaccctctagttgtaaaggtgatatccggataattttacagtgctacagttaaccctgttgatggacttaatatcttctaagacccag

SEQ ID NO: 14033 - DNA, 122 bp, Homo sapiens
  misc_feature (61)..(62): /note="This region represents a CpG dinucleotide"
  misc_feature (61)..(61): /note="Nucleotide may be methylated to form 5-methylcytosine"
attgataattgaaggtttcctccgtgaccctgtaacactccaatactgcccataaagaagcgggaagccagttagtgcaagatcttagagctattaatcagatagtccaaactacccaccct

SEQ ID NO: 14034 - DNA, 122 bp, Homo sapiens
  misc_feature (61)..(62): /note="This region represents a CpG dinucleotide"
  misc_feature (61)..(61): /note="Nucleotide may be methylated to form 5-methylcytosine"
tggccaggccgtggcttctgctccgggcctggggacgggtggagagaccctgcccgcagacgtcccccgtcggaggtggggagacaggctggcagcaggagcggcctgtgtacacttcccta

SEQ ID NO: 14035 - DNA, 122 bp, Homo sapiens
  misc_feature (61)..(62): /note="This region represents a CpG dinucleotide"
  misc_feature (61)..(61): /note="Nucleotide may be methylated to form 5-methylcytosine"
tccagggcccactctggcagggagagtggcttacccgcttaacctggcatgccgaggtctcggctgtgcccctgaatcattgctgagtgcgtcaaggactccagtccccaaccctctgcagg

SEQ ID NO: 14036 - DNA, 122 bp, Homo sapiens
  misc_feature (61)..(62): /note="This region represents a CpG dinucleotide"
  misc_feature (61)..(61): /note="Nucleotide may be methylated to form 5-methylcytosine"
cctttatcttatcaaactagtatttcctagtatggtagactgctaggtgtcaccccaagtcgtctttcctgtttctactcttaagttttttcttgagcatgtgatcacacagttatggatga

SEQ ID NO: 14037 - DNA, 122 bp, Homo sapiens
  misc_feature (61)..(62): /note="This region represents a CpG dinucleotide"
  misc_feature (61)..(61): /note="Nucleotide may be methylated to form 5-methylcytosine"
ccgccagaggcctctgtgagaactgaactgtagacgcagaggggcagggaggaggtcaaacgcagtttccagcgcccggggccgcctaactctgcctttctgcattaacacttgacgagcat

SEQ ID NO: 14038 - DNA, 122 bp, Homo sapiens
  misc_feature (61)..(62): /note="This region represents a CpG dinucleotide"
  misc_feature (61)..(61): /note="Nucleotide may be methylated to form 5-methylcytosine"
ttgggaccccactccccactaacagcgccacagaaagagaagtgacagcacccggggccacgaccctcagtggagctctggtcacagttagcaggaatccccttgaagaaacctcagccctc

SEQ ID NO: 14039 - DNA, 122 bp, Homo sapiens
  misc_feature (61)..(62): /note="This region represents a CpG dinucleotide"
  misc_feature (61)..(61): /note="Nucleotide may be methylated to form 5-methylcytosine"
agaatgaagtactcagacaattctagctgagcggggcggggagcagttcctttgagagagcgtcactctaagatctgtctgccaggtatttattgagagagcttgtttaaactacaatttag

SEQ ID NO: 14040 - DNA, 122 bp, Homo sapiens
  misc_feature (61)..(62): /note="This region represents a CpG dinucleotide"
  misc_feature (61)..(61): /note="Nucleotide may be methylated to form 5-methylcytosine"
gttcgaatttatctgtgtgatttatttccaatcccagctggtggattagagcctgagcaccgctctcctccttttcctccccactaatcatcacttctagttattctagcaaataagttact

SEQ ID NO: 14041 - DNA, 122 bp, Homo sapiens
  misc_feature (61)..(62): /note="This region represents a CpG dinucleotide"
  misc_feature (61)..(61): /note="Nucleotide may be methylated to form 5-methylcytosine"
agtggtttttagctctttcctgctttttagctccttagcatttagccttgtttcacaggccgctgttacacatgaagaatgctgctgtgtggagtgcccttccttgtattacatgtccttca

SEQ ID NO: 14042 - DNA, 122 bp, Homo sapiens
  misc_feature (61)..(62): /note="This region represents a CpG dinucleotide"
  misc_feature (61)..(61): /note="Nucleotide may be methylated to form 5-methylcytosine"
cctgtcaccaattaaataagctgccttaatctcctctcagttggcctaacttacctgaaccgtactattggtcttgaaggtggcactgtcatcccattagcaggcagcaggccctgcgagcc

SEQ ID NO: 14043 - DNA, 122 bp, Homo sapiens
  misc_feature (61)..(62): /note="This region represents a CpG dinucleotide"
  misc_feature (61)..(61): /note="Nucleotide may be methylated to form 5-methylcytosine"
ttcacacatacttgttgagcatcctaccatgggccagggttaggcaagggactgatcatacggacaggaaggagtcccagatcatgcccttggggagttcatagtttagtgggaggagagat

SEQ ID NO: 14044 - DNA, 122 bp, Homo sapiens
  misc_feature (61)..(62): /note="This region represents a CpG dinucleotide"
  misc_feature (61)..(61): /note="Nucleotide may be methylated to form 5-methylcytosine"
gtggtttccttccccagcccatatttggttctcatgaaaacagaagctccgtggagaaagcgaagaaagtccttgaaagtcgcctgttcaaagccgccactgccgtgatgccccctgactcc

SEQ ID NO: 14045 - DNA, 122 bp, Homo sapiens
  misc_feature (61)..(62): /note="This region represents a CpG dinucleotide"
  misc_feature (61)..(61): /note="Nucleotide may be methylated to form 5-methylcytosine"
gggccttgagcactcagctgctgagttgatacctaatcttgtgcaatctggagttggccacgcaggagccacagcaggacagaaaggtcttctaagctcattctttacttcctgacactctc

SEQ ID NO: 14046 - DNA, 122 bp, Homo sapiens
  misc_feature (61)..(62): /note="This region represents a CpG dinucleotide"
  misc_feature (61)..(61): /note="Nucleotide may be methylated to form 5-methylcytosine"
cacgtcctcctcatgagactacaagctccactgaacccagcacaatgtctggaatgtggtcgtcactcaacagatgtttgctgaaagaatgaaataatgaacatcaaaaactgtaatctgag

SEQ ID NO: 14047 - DNA, 122 bp, Homo sapiens
  misc_feature (61)..(62): /note="This region represents a CpG dinucleotide"
  misc_feature (61)..(61): /note="Nucleotide may be methylated to form 5-methylcytosine"
gtagagtggaaataagaagacagcatgaagaactgaggggcaagttgagaagaatgggctcgtgcagttggtgacttgatggctaatttgcaccttgccacttggcacttggtcacacacag

SEQ ID NO: 14048 - DNA, 122 bp, Homo sapiens
  misc_feature (61)..(62): /note="This region represents a CpG dinucleotide"
  misc_feature (61)..(61): /note="Nucleotide may be methylated to form 5-methylcytosine"
aggacacagggcatggaggggattggagagagaaagtagccagagggatctagggttccacgcagggagaaaacaagggcagtaatgaagtaacttgtcttcttgtgactctcagcctctcc

SEQ ID NO: 14049 - DNA, 122 bp, Homo sapiens
  misc_feature (61)..(62): /note="This region represents a CpG dinucleotide"
  misc_feature (61)..(61): /note="Nucleotide may be methylated to form 5-methylcytosine"
actttatccaagagagaattctgagattggtttctattcttgagtattccatgaactagccgtatgatgtatgattcaaccacttactgtaagtctcaaatttattcatttgcaaatgagac

SEQ ID NO: 14050 - DNA, 122 bp, Homo sapiens
  misc_feature (61)..(62): /note="This region represents a CpG dinucleotide"
  misc_feature (61)..(61): /note="Nucleotide may be methylated to form 5-methylcytosine"
ctcgaagtcatacagtcctatagagaaataagaaggatccacaaacaaaatcagcagcagcgttgcatgatgatgaacttgctatcacttgagatgatcaggaaatgccaggtgacaacttg

SEQ ID NO: 14051 - DNA, 122 bp, Homo sapiens
  misc_feature (61)..(62): /note="This region represents a CpG dinucleotide"
  misc_feature (61)..(61): /note="Nucleotide may be methylated to form 5-methylcytosine"
tctcccagggcaacccccgccgccgggtgtgagaggaaagagtatgtgtcactgtgtatgcgtgacactccgggtctttttgaagggaggggttcgtgcgtcacccctttccactggttctg

SEQ ID NO: 14052 - DNA, 122 bp, Homo sapiens
  misc_feature (61)..(62): /note="This region represents a CpG dinucleotide"
  misc_feature (61)..(61): /note="Nucleotide may be methylated to form 5-methylcytosine"
acatcttattttttcttgcaaaagagaacaacttctgaacattcaaaaaagccaccatagcgatagcaatacacacacatgcacacacacatacatacaattattttatgtatctaaatgtt

SEQ ID NO: 14053 - DNA, 122 bp, Homo sapiens
  misc_feature (61)..(62): /note="This region represents a CpG dinucleotide"
  misc_feature (61)..(61): /note="Nucleotide may be methylated to form 5-methylcytosine"
agccagcactcttgggcccgggacccttgcttgagacttgacatgaaatggaagagagtgcgagaactggaaggagatcacagtagctctggctttcagacacaagtgtctatttcctcagt

SEQ ID NO: 14054 - DNA, 122 bp, Homo sapiens
  misc_feature (61)..(62): /note="This region represents a CpG dinucleotide"
  misc_feature (61)..(61): /note="Nucleotide may be methylated to form 5-methylcytosine"
aagtaacacctgactcatggagttttcctgctgatgatataatgagatgaggtatgtgaacgaagcacatggtttattaaatgtgtcatggcagtttcactgtcttgggtggtatgggaagg

SEQ ID NO: 14055 - DNA, 122 bp, Homo sapiens
  misc_feature (61)..(62): /note="This region represents a CpG dinucleotide"
  misc_feature (61)..(61): /note="Nucleotide may be methylated to form 5-methylcytosine"
gtaacatgcaatttccctgatatattgaactgatgcttttatttgatcacaggactcagccgttacaaaaataacaagtcattttctttaataaaaaataaaaggaagtatatggttgggtc

SEQ ID NO: 14056 - DNA, 122 bp, Homo sapiens
  misc_feature (61)..(62): /note="This region represents a CpG dinucleotide"
  misc_feature (61)..(61): /note="Nucleotide may be methylated to form 5-methylcytosine"
ctccccctctgctaggaggtctttgcctctggcccctgatttccggaaggctgtgggaggcgaggctgggctgggctggtcgagccaatccccatggactgggtgtgtcttccaagcctggg

SEQ ID NO: 14057 - DNA, 122 bp, Homo sapiens
  misc_feature (61)..(62): /note="This region represents a CpG dinucleotide"
  misc_feature (61)..(61): /note="Nucleotide may be methylated to form 5-methylcytosine"
gtttttctttaaaaagtttgttgaaaaagcaaaagatcttgtacttacatatcagtgactcgttcgggtctctgtgtagtagctgtgagtagttgtccaaactgaagtaagttttaactgtg

SEQ ID NO: 14058 - DNA, 122 bp, Homo sapiens
  misc_feature (61)..(62): /note="This region represents a CpG dinucleotide"
  misc_feature (61)..(61): /note="Nucleotide may be methylated to form 5-methylcytosine"
taaacaaaccctgcagcagaggcctgtggctgcatgcatgtcccctcaaccgggcttcagcgcagctgtggagaacagttcctgtgccagttgctcctgcctatgctgcagggggctctgct

SEQ ID NO: 14059 - DNA, 122 bp, Homo sapiens
  misc_feature (61)..(62): /note="This region represents a CpG dinucleotide"
  misc_feature (61)..(61): /note="Nucleotide may be methylated to form 5-methylcytosine"
tcatgctggcttgggacagtggcttggagaccagacttcaatgacagaagcactaggcagcggcactcatggcaatgtgtgcacccacagaaatgtaacccacacctcgggttcaggagccg

SEQ ID NO: 14060 - DNA, 122 bp, Homo sapiens
  misc_feature (61)..(62): /note="This region represents a CpG dinucleotide"
  misc_feature (61)..(61): /note="Nucleotide may be methylated to form 5-methylcytosine"
ttggaaaggaaagctttatttctcagaaagggtggcagcctccctcccgggtggccattccggcaggctaggaaacacagcctcaggccagaagccagaaaactgcactttgaagttcagag

SEQ ID NO: 14061 - DNA, 122 bp, Homo sapiens
  misc_feature (61)..(62): /note="This region represents a CpG dinucleotide"
  misc_feature (61)..(61): /note="Nucleotide may be methylated to form 5-methylcytosine"
tctctgggcccagaggatgaaggcgcctacagatgtgtggtagcagaggtcatgaaaacacgcacaggttcctggcaggtgcttcagagaaagcagtcaccagacagccacgtgcacctgag

SEQ ID NO: 14062 - DNA, 122 bp, Homo sapiens
  misc_feature (61)..(62): /note="This region represents a CpG dinucleotide"
  misc_feature (61)..(61): /note="Nucleotide may be methylated to form 5-methylcytosine"
tgaagttgcttaattggttgccttgacacaggcttattacatcttacatcattaagccttcgctgtaacaatatttttgaagcacagacaaaagatgaatttgagtagctattattttcctg

SEQ ID NO: 14063 - DNA, 122 bp, Homo sapiens
  misc_feature (61)..(62): /note="This region represents a CpG dinucleotide"
  misc_feature (61)..(61): /note="Nucleotide may be methylated to form 5-methylcytosine"
acatttgtaataaacagagaaagcatttagaattcgagtgcttttaagatatagcaactccgccagtgactgtgttagcaaagcaatgcttaccaccataacactttctaaggacatgtttt

SEQ ID NO: 14064 - DNA, 122 bp, Homo sapiens
  misc_feature (61)..(62): /note="This region represents a CpG dinucleotide"
  misc_feature (61)..(61): /note="Nucleotide may be methylated to form 5-methylcytosine"
aaagaaattccaagtctgagcccagatctatccaaaaaccttttcatattatctggagagcgtttgccaagcaaatattcctagagactaagtcaaacaaatagaacccatgcagaaacaac

SEQ ID NO: 14065 - DNA, 122 bp, Homo sapiens
  misc_feature (61)..(62): /note="This region represents a CpG dinucleotide"
  misc_feature (61)..(61): /note="Nucleotide may be methylated to form 5-methylcytosine"
ttgttctttttatttttttctattcagggcaagttgctatgcaaaacacagtatgtctcacgactgcatcatctacactaaattcttcaagtccctctcatcagcttgggcctgttttccat

SEQ ID NO: 14066 - DNA, 122 bp, Homo sapiens
  misc_feature (61)..(62): /note="This region represents a CpG dinucleotide"
  misc_feature (61)..(61): /note="Nucleotide may be methylated to form 5-methylcytosine"
aaaggttctttgacttgcttaagtgcttcccagatgtgtccaacatgggcggaggcacatcgtgaggtcctggagtgtgcctgtgattcagcacctgttccctttttggaggacttatttgc

SEQ ID NO: 14067 - DNA, 122 bp, Homo sapiens
  misc_feature (61)..(62): /note="This region represents a CpG dinucleotide"
  misc_feature (61)..(61): /note="Nucleotide may be methylated to form 5-methylcytosine"
ctgcagcagagtctatatgggaaatcaaatgacaatccaaagtttgcttggtgagcatgacgtcagagccaaagggagttggatggtctgagtggcatatgtcacagccccaggggcaggac

SEQ ID NO: 14068 - DNA, 122 bp, Homo sapiens
  misc_feature (61)..(62): /note="This region represents a CpG dinucleotide"
  misc_feature (61)..(61): /note="Nucleotide may be methylated to form 5-methylcytosine"
gtgctggggatgaaatgacaacaatagctactattgactgagcactcactatgcactggccgctcccctaagcactggccattcctgagctcattcactcctcacaaacagccctgccaggc

SEQ ID NO: 14069 - DNA, 122 bp, Homo sapiens
  misc_feature (61)..(62): /note="This region represents a CpG dinucleotide"
  misc_feature (61)..(61): /note="Nucleotide may be methylated to form 5-methylcytosine"
tgtcagttagatgagtcagcttggtaggtcagagttttgtttgtttgtttcttagcacaacgtattgctgaagctttcaagaaaaccacgattgtaggctttatatcatactgtctgtggtt

SEQ ID NO: 14070 - DNA, 122 bp, Homo sapiens
  misc_feature (61)..(62): /note="This region represents a CpG dinucleotide"
  misc_feature (61)..(61): /note="Nucleotide may be methylated to form 5-methylcytosine"
gggcagactctgccccagagtctgcctgagttcagtgcttcagcctgccacactgagctgcgatgcatggggtgacaaacatcaattagtttaaatgttttctgaattattgcccactttaa

SEQ ID NO: 14071 - DNA, 122 bp, Homo sapiens
  misc_feature (61)..(62): /note="This region represents a CpG dinucleotide"
  misc_feature (61)..(61): /note="Nucleotide may be methylated to form 5-methylcytosine"
taaacatttacataaggcaggaggttcaacacttggagagtgtaatcaaggcagtagtaacgcagtgctcctctctttgacttgaatgacttcctccccattagggtcattattgttttgca

SEQ ID NO: 14072 - DNA, 122 bp, Homo sapiens
  misc_feature (61)..(62): /note="This region represents a CpG dinucleotide"
  misc_feature (61)..(61): /note="Nucleotide may be methylated to form 5-methylcytosine"
tacagggcttaactcattttatccttaccacaatcctatgaagtaggaacttttataaaacgcattttataaacaaggcacagagaggttaattaacttgccctctggtcacacagctagga

SEQ ID NO: 14073 - DNA, 122 bp, Homo sapiens
  misc_feature (61)..(62): /note="This region represents a CpG dinucleotide"
  misc_feature (61)..(61): /note="Nucleotide may be methylated to form 5-methylcytosine"
cagtaaagtgtagcaagtatcagaccacatgaatgaatcctctccctgctgagaactgaccgcaagagggctcctgggaacagaagtccactgagcttctgcagattgaccgagagttgtct

SEQ ID NO: 14074 - DNA, 122 bp, Homo sapiens
  misc_feature (61)..(62): /note="This region represents a CpG dinucleotide"
  misc_feature (61)..(61): /note="Nucleotide may be methylated to form 5-methylcytosine"
gttttctcttagcctcagttagctatgacacacagccatgccttactgctctgagtgatgcgtgtgttatccacagcctcacgtggccagctagactgactcaggcctcggcaggtgcttgg

SEQ ID NO: 14075 - DNA, 122 bp, Homo sapiens
  misc_feature (61)..(62): /note="This region represents a CpG dinucleotide"
  misc_feature (61)..(61): /note="Nucleotide may be methylated to form 5-methylcytosine"
accaacgtgaaaaataaggcttagagaagaaaagtaacttgccataactaatgaagaacacgaaaaggaacctaggttagttagctcgaaagaacaagcctttgtgcatgaggcaacactgc

SEQ ID NO: 14076 - DNA, 122 bp, Homo sapiens
  misc_feature (61)..(62): /note="This region represents a CpG dinucleotide"
  misc_feature (61)..(61): /note="Nucleotide may be methylated to form 5-methylcytosine"
gttctcctacagccatggtaaggactttgacttttactctgagatgaaaagccagaggagcggcatgacctggaattatgttttaactaggatcacattgtctgctgtatggagaataggcc

SEQ ID NO: 14077 - DNA, 122 bp, Homo sapiens
  misc_feature (61)..(62): /note="This region represents a CpG dinucleotide"
  misc_feature (61)..(61): /note="Nucleotide may be methylated to form 5-methylcytosine"
ctctgggtctcgacttccttgtgagtgaaataaaggggtgggaccagatgctctttgagccgctccagtgtcaccctgtctggcttaggggctcttgctctggggtctacagagaggctgtg

SEQ ID NO: 14078 - DNA, 122 bp, Homo sapiens
  misc_feature (61)..(62): /note="This region represents a CpG dinucleotide"
  misc_feature (61)..(61): /note="Nucleotide may be methylated to form 5-methylcytosine"
ctgacagcctgccatccctcagccttttattctaacacacagacagggagttagtgtgtgcggatctgtggtggagaaggtatctcattcctctctaacatcatctccactttgcatctgtc

SEQ ID NO: 14079 - DNA, 122 bp, Homo sapiens
  misc_feature (61)..(62): /note="This region represents a CpG dinucleotide"
  misc_feature (61)..(61): /note="Nucleotide may be methylated to form 5-methylcytosine"
gctgtgtcataaggcatggagatttgacaagaaagggcaggtaggatgctcatgatattgcgtggcccaggtcaaagcttagtaatgttggcttttgtcatgtaggggaggaatatcttttc

SEQ ID NO: 14080 - DNA, 122 bp, Homo sapiens
  misc_feature (61)..(62): /note="This region represents a CpG dinucleotide"
  misc_feature (61)..(61): /note="Nucleotide may be methylated to form 5-methylcytosine"
atcatctggcagcacagtaccctgtagcgtattggttgtttaccctgatctgtggctgatcgtgtggctgactaggatggtgtggctgactgggagctgcggcttgctgccgctgcgcagca

SEQ ID NO: 14081 - DNA, 122 bp, Homo sapiens
  misc_feature (61)..(62): /note="This region represents a CpG dinucleotide"
  misc_feature (61)..(61): /note="Nucleotide may be methylated to form 5-methylcytosine"
caccacacagacactcacatactcacagacacattctattggttctactggtctggagaacgctgactcatacattgactaataggatccatggaactattgaacaaccaaaccattgaaag

SEQ ID NO: 14082 - DNA, 122 bp, Homo sapiens
  misc_feature (61)..(62): /note="This region represents a CpG dinucleotide"
  misc_feature (61)..(61): /note="Nucleotide may be methylated to form 5-methylcytosine"
taagtgactaatggcaggaggcatccacagcgtagagatgctggacaaagggatgattcacgtctgagcaggacagtgcaagatttcatcacactactgaggacagtacagaatttaattat

SEQ ID NO: 14083 - DNA, 122 bp, Homo sapiens
  misc_feature (61)..(62): /note="This region represents a CpG dinucleotide"
  misc_feature (61)..(61): /note="Nucleotide may be methylated to form 5-methylcytosine"
cttctgcctttcaaaatccctttggccccagggaggaaatcagaagaaagggcttgttatcgccctaccggtgcctctcaggcatggtctatattaagaagctctttcctcagcatcctttt

SEQ ID NO: 14084 - DNA, 122 bp, Homo sapiens
  misc_feature (61)..(62): /note="This region represents a CpG dinucleotide"
  misc_feature (61)..(61): /note="Nucleotide may be methylated to form 5-methylcytosine"
atttccttcaaatctcagaatccctgggagcttgtaaggaacatttagtaaccccatccccgtcgctaccctcaatggtcctgcctttcggagatatcataccattttccttttctcaatga

SEQ ID NO: 14085 - DNA, 122 bp, Homo sapiens
  misc_feature (61)..(62): /note="This region represents a CpG dinucleotide"
  misc_feature (61)..(61): /note="Nucleotide may be methylated to form 5-methylcytosine"
accaagggacaaaggttccagagtccaatcagcagaagtggattgcgtgggcacccctcacgtaatgcatgggctcacagcaggtcctcaatagtgagattggaaactccagattcccctag

SEQ ID NO: 14086 - DNA, 122 bp, Homo sapiens
  misc_feature (61)..(62): /note="This region represents a CpG dinucleotide"
  misc_feature (61)..(61): /note="Nucleotide may be methylated to form 5-methylcytosine"
cgtaagcgaacataggcaggaaggacttgagaaaggaactggcttatgattataagaccacgcccgtctattgtgtttctgtccggagctgtggagttagcgtcagaataattcgtagacgg

SEQ ID NO: 14087 - DNA, 122 bp, Homo sapiens
  misc_feature (61)..(62): /note="This region represents a CpG dinucleotide"
  misc_feature (61)..(61): /note="Nucleotide may be methylated to form 5-methylcytosine"
gctgtttatgtgcaaatctacacgtccctttctctactggggaagaacagagataaggagcggacgtgctcaaagggtgagtcaatgggatcttaggccaggagcctattgttttcccattt

SEQ ID NO: 14088 - DNA, 122 bp, Homo sapiens
  misc_feature (61)..(62): /note="This region represents a CpG dinucleotide"
  misc_feature (61)..(61): /note="Nucleotide may be methylated to form 5-methylcytosine"
cctgactgccagccggccccttgatggcggtgcctgtctcagattctgtggtcagtgccacgcagctacctccagaggcagcctgcagcctggccatgtggccccaagctccaggctagagg

SEQ ID NO: 14089 - DNA, 122 bp, Homo sapiens
  misc_feature (61)..(62): /note="This region represents a CpG dinucleotide"
  misc_feature (61)..(61): /note="Nucleotide may be methylated to form 5-methylcytosine"
ctgacagtcagcctagcaagaacacacctggcatgagatcgtcatagtttcaccattagacgcccccattcctctcgccaatgcctcatccctcctttagcaaaatgccaccagggaatggg

SEQ ID NO: 14090 - DNA, 122 bp, Homo sapiens
  misc_feature (61)..(62): /note="This region represents a CpG dinucleotide"
  misc_feature (61)..(61): /note="Nucleotide may be methylated to form 5-methylcytosine"
gtggctgagttctccttgggcaccaagaaacacaggccagatggatgactgccaagatctcgtaatggcatgaactgaggggcaagtttgtttggatggcactgtgaaaatcaacttaccct

SEQ ID NO: 14091 - DNA, 122 bp, Homo sapiens
  misc_feature (61)..(62): /note="This region represents a CpG dinucleotide"
  misc_feature (61)..(61): /note="Nucleotide may be methylated to form 5-methylcytosine"
gcttatacagaagaaaaaaacatcccaggtaaacagaaactgtccctgaggaagcccacacgctgaacttgacatagacgttaactcagctttataaatacgttcaaagaactagaaaaaat

SEQ ID NO: 14092 - DNA, 122 bp, Homo sapiens
  misc_feature (61)..(62): /note="This region represents a CpG dinucleotide"
  misc_feature (61)..(61): /note="Nucleotide may be methylated to form 5-methylcytosine"
gggcagctcccgcaggtgaagcctctagcatgtcctttccggtattcagtgcacgttggacggcagagcttactagtcattagggccccagagcctgtgctacctagaaacaagcccgtaaa

SEQ ID NO: 14093 - DNA, 122 bp, Homo sapiens
  misc_feature (61)..(62): /note="This region represents a CpG dinucleotide"
  misc_feature (61)..(61): /note="Nucleotide may be methylated to form 5-methylcytosine"
ctgggacccctgctgttttaaaatcctagaaggccccagtcacacgttgtcaataatagccgtcggaggtgaggagtgaagaagggctgttcaggaaacagtttgagcccttcaagtggaca

SEQ ID NO: 14094 - DNA, 122 bp, Homo sapiens
  misc_feature (61)..(62): /note="This region represents a CpG dinucleotide"
  misc_feature (61)..(61): /note="Nucleotide may be methylated to form 5-methylcytosine"
attggattgtttgactgaaaaagctttgtttcctcctcagcttcagcctctttccatgtgcgttcctgaagctatgtgtgggatattagtatagaggaaggggaggtcttctcacctctttc

SEQ ID NO: 14095 - DNA, 122 bp, Homo sapiens
  misc_feature (61)..(62): /note="This region represents a CpG dinucleotide"
  misc_feature (61)..(61): /note="Nucleotide may be methylated to form 5-methylcytosine"
aaaaggtgtggtgtggcagggacacacagagtaaggtcaaaggcaaaacagctgggagagcggtggagccagacagatgaaaagtcctcaaagagaattaggggcgagatcagggtagaaag

SEQ ID NO: 14096 - DNA, 122 bp, Homo sapiens
  misc_feature (61)..(62): /note="This region represents a CpG dinucleotide"
  misc_feature (61)..(61): /note="Nucleotide may be methylated to form 5-methylcytosine"
ttaaaaggccatgaccaggaaatagccgtaactggcctttaaaagataagtaaccaaaagcgtttattattttgtaaggacaaaaggcagggaaagaatgttgacttcatgccaagagaagt

SEQ ID NO: 14097 - DNA, 122 bp, Homo sapiens
  misc_feature (61)..(62): /note="This region represents a CpG dinucleotide"
  misc_feature (61)..(61): /note="Nucleotide may be methylated to form 5-methylcytosine"
agcctgtttgccctgttcacaatgaatcaaaccctagctatggtcacaacccataatggccggcagcccaggattggaaaaatgaggaaaagaagagcgagaaaaagagaggctggcaggca

SEQ ID NO: 14098 - DNA, 122 bp, Homo sapiens
  misc_feature (61)..(62): /note="This region represents a CpG dinucleotide"
  misc_feature (61)..(61): /note="Nucleotide may be methylated to form 5-methylcytosine"
cctgtgggtgagaaacatgggtaagcgtgtgcagacgtggagagggcgtggggtgagggacgcccacccctgtgggtgagaaaatgggcaagcatgcgcagacgtggagagggtgtggggga

SEQ ID NO: 14099 - DNA, 122 bp, Homo sapiens
  misc_feature (61)..(62): /note="This region represents a CpG dinucleotide"
  misc_feature (61)..(61): /note="Nucleotide may be methylated to form 5-methylcytosine"
gcagtggcttccagcactctagacccaaggccctgggtgagcaagctggtcttcctggggcgccctggctggattcttgttacttcagctgttgcaacagctgtctcactgggtccccagct

SEQ ID NO: 14100 - DNA, 122 bp, Homo sapiens
  misc_feature (61)..(62): /note="This region represents a CpG dinucleotide"
  misc_feature (61)..(61): /note="Nucleotide may be methylated to form 5-methylcytosine"
acattttcgtgtaagcctcatcaactgcagcaaataatgattccttcctgttctgggaaacgcctcataagcaagtagatgttgaatcatagtgacatggtttctgtaaacacagaccatgc

SEQ ID NO: 14101 - DNA, 122 bp, Homo sapiens
  misc_feature (61)..(62): /note="This region represents a CpG dinucleotide"
  misc_feature (61)..(61): /note="Nucleotide may be methylated to form 5-methylcytosine"
aatgctgatgaataaagcttctgcttaagtcactggcccacgtctgtgctgtgctgggcacgcacagtggccctcttgcctcaagctcatttcctcttctgttatctgaccctaatctagtt

SEQ ID NO: 14102 - DNA, 122 bp, Homo sapiens
  misc_feature (61)..(62): /note="This region represents a CpG dinucleotide"
  misc_feature (61)..(61): /note="Nucleotide may be methylated to form 5-methylcytosine"
ctgcttggagtctggttgtcgccatggagggacagcttctatccagggccctaactgtagcgtgggttggggggactctttcgagagggtggggcgaggacgctggccccactgctgcggcg

SEQ ID NO: 14103 - DNA, 122 bp, Homo sapiens
  misc_feature (61)..(62): /note="This region represents a CpG dinucleotide"
  misc_feature (61)..(61): /note="Nucleotide may be methylated to form 5-methylcytosine"
cctgttagtcaacagccagatgccaacagataatcacattagactcatcagcaagcacaccgtgcacacaagttccactcccatgtacaggttcctgtcccatgtacacaagcctgcacaca

SEQ ID NO: 14104 - DNA, 122 bp, Homo sapiens
  misc_feature (61)..(62): /note="This region represents a CpG dinucleotide"
  misc_feature (61)..(61): /note="Nucleotide may be methylated to form 5-methylcytosine"
ttttggtctgactcagagactgagtttattaaccctaggactcaaagcaggaaccctggccggagctcccaggttgccagggttcctcttgtgctctgtgtggccccaccatagctcacctg

SEQ ID NO: 14105 - DNA, 122 bp, Homo sapiens
  misc_feature (61)..(62): /note="This region represents a CpG dinucleotide"
  misc_feature (61)..(61): /note="Nucleotide may be methylated to form 5-methylcytosine"
aagaataaaaagcttttaaggtatcatatattgttttttatagttcctttgcttaactgacgttttggtttgctaaaaaactaccaatcacatcagattacaagtactttcactgtaaaaat

SEQ ID NO: 14106 - DNA, 122 bp, Homo sapiens
  misc_feature (61)..(62): /note="This region represents a CpG dinucleotide"
  misc_feature (61)..(61): /note="Nucleotide may be methylated to form 5-methylcytosine"
accgtagccagtacagtaccatgctgtacaggtttgcagctcaggagcaacaggccatatcgtgtagcctaggtatggggtagataccatctaagtttgtgtaagcacactcatgtttacac

SEQ ID NO: 14107 - DNA, 122 bp, Homo sapiens
  misc_feature (61)..(62): /note="This region represents a CpG dinucleotide"
  misc_feature (61)..(61): /note="Nucleotide may be methylated to form 5-methylcytosine"
gccgtcgctggaatgggtgtgggccccgaggttgcaagggtaggcgcgggtgtgtgtcctcgctctctctgctcccagctcagctctggccgcgcgccgcaggttgaacccactccttgctg

SEQ ID NO: 14108 - DNA, 122 bp, Homo sapiens
  misc_feature (61)..(62): /note="This region represents a CpG dinucleotide"
  misc_feature (61)..(61): /note="Nucleotide may be methylated to form 5-methylcytosine"
ttttgaccctcacaacaaacatgtgccactgagtattttactgaatcagtggctcaggttcgttgcaaggattaaggagacaacatttgtagactctttgggaacctagaaaaaaacaaaga

SEQ ID NO: 14109 - DNA, 122 bp, Homo sapiens
  misc_feature (61)..(62): /note="This region represents a CpG dinucleotide"
  misc_feature (61)..(61): /note="Nucleotide may be methylated to form 5-methylcytosine"
gctttgattttcacatgtaccatctcctgcagctaagcttctgtgttaacctcctgtcatcgtctctttcatgggcagcccagtaagccacacctcctgagactcatgcgcttgtacagtct

SEQ ID NO: 14110 - DNA, 122 bp, Homo sapiens
  misc_feature (61)..(62): /note="This region represents a CpG dinucleotide"
  misc_feature (61)..(61): /note="Nucleotide may be methylated to form 5-methylcytosine"
ctgactattaactgattcacttttcatgacccagcctcggaagtcacataggctcctttccgatgtagtcacaagtctagtcagcttcaagggcagggaacatagattccatctcttggtag

SEQ ID NO: 14111 - DNA, 122 bp, Homo sapiens
  misc_feature (61)..(62): /note="This region represents a CpG dinucleotide"
  misc_feature (61)..(61): /note="Nucleotide may be methylated to form 5-methylcytosine"
aaaaaaaaaacctctagaaaaccagactcaaaagaagaggaaattgtggtaaaccacagtcgcataagagcagggtaatgtaagtgccctctgtctaacttaaagtagtgttatgactatac

SEQ ID NO: 14112 - DNA, 122 bp, Homo sapiens
  misc_feature (61)..(62): /note="This region represents a CpG dinucleotide"
  misc_feature (61)..(61): /note="Nucleotide may be methylated to form 5-methylcytosine"
cctcgtgtgttagggtgggtccttgctgcaataacaaacaaccccagatctcagtaactgcgtgcaatgaaacacctgcttctccctcacacgaagccgaatgtgatggtttctagttacat

SEQ ID NO: 14113 - DNA, 122 bp, Homo sapiens
  misc_feature (61)..(62): /note="This region represents a CpG dinucleotide"
  misc_feature (61)..(61): /note="Nucleotide may be methylated to form 5-methylcytosine"
tccagctaggtttttcctgttacttcctctctgggatttgaaactagtctttgccattggcgtccctcttgttggttatgccagtaggctgtgtaccttaggcagataatgtctgcttggcc

SEQ ID NO: 14114 - DNA, 122 bp, Homo sapiens
  misc_feature (61)..(62): /note="This region represents a CpG dinucleotide"
  misc_feature (61)..(61): /note="Nucleotide may be methylated to form 5-methylcytosine"
ctgtgtgtatttgggcaagttactttacctctgtgagactcagttttctcatctttaaagcgggaataataatcatatcgatcttgtagggctgataggaaggttatataagacagtgattg

SEQ ID NO: 14115 - DNA, 122 bp, Homo sapiens
  misc_feature (61)..(62): /note="This region represents a CpG dinucleotide"
  misc_feature (61)..(61): /note="Nucleotide may be methylated to form 5-methylcytosine"
gagtttgtatttcattcattcccatggcaaatatttaccaagcaactgctaagtgccagacgtgtataatacaatacactagaaaaactagtccatgtgatgatgtaaaaatcaatcaactt

SEQ ID NO: 14116 - DNA, 122 bp, Homo sapiens
  misc_feature (61)..(62): /note="This region represents a CpG dinucleotide"
  misc_feature (61)..(61): /note="Nucleotide may be methylated to form 5-methylcytosine"
ccaaactgacatgattcttcctcaagattctcgtcacttctgtttccctgggttggtttccggacaaagggttccttttttgttaactttgtttgtgtgtgtacttgggggagggtgggatc

SEQ ID NO: 14117 - DNA, 122 bp, Homo sapiens
  misc_feature (61)..(62): /note="This region represents a CpG dinucleotide"
  misc_feature (61)..(61): /note="Nucleotide may be methylated to form 5-methylcytosine"
gattacaggcatgcaccactgcacctagccacacttctcattttcaaaacttaactacaacgctacagtgatcaaagcagtgtggtgatggcataaggacagatcatacagaacaatggaat

SEQ ID NO: 14118 - DNA, 122 bp, Homo sapiens
  misc_feature (61)..(62): /note="This region represents a CpG dinucleotide"
  misc_feature (61)..(61): /note="Nucleotide may be methylated to form 5-methylcytosine"
ctggattggctgcaactctccaggagcagcgctgctagtgagctggccaaggacagtgggcgtgggggagctccggcagtggtgcttcatatggggtgggtgggagctgaggccacagcctg

SEQ ID NO: 14119 - DNA, 122 bp, Homo sapiens
  misc_feature (61)..(62): /note="This region represents a CpG dinucleotide"
  misc_feature (61)..(61): /note="Nucleotide may be methylated to form 5-methylcytosine"
ggacggttatgacaatatactgtaataaaagttatgcaatgtgttctctctctcttaaaacgtcttgctgtactgtactaacctatctttggactgcagatactgggggcaaactaaaacct

SEQ ID NO: 14120 - DNA, 122 bp, Homo sapiens
  misc_feature (61)..(62): /note="This region represents a CpG dinucleotide"
  misc_feature (61)..(61): /note="Nucleotide may be methylated to form 5-methylcytosine"
gtgagtttctcctccagaacggggcgaacgtgaaccaagcggacagtgcgggccggggcccgctgcaccacgcaaccattcttggccacacggggtagggatgatggcatggggaggaaggc

SEQ ID NO: 14121 - DNA, 122 bp, Homo sapiens
  misc_feature (61)..(62): /note="This region represents a CpG dinucleotide"
  misc_feature (61)..(61): /note="Nucleotide may be methylated to form 5-methylcytosine"
atcaatgaaatatataaaaatagagatttagagttgcagaacttcaagtgacagagaccacggggcattgagttcagaagccacttctgggccagacgtcccatcccagtgtccctgggtgt

SEQ ID NO: 14122 - DNA, 122 bp, Homo sapiens
  misc_feature (61)..(62): /note="This region represents a CpG dinucleotide"
  misc_feature (61)..(61): /note="Nucleotide may be methylated to form 5-methylcytosine"
tgtgttttaaaaacatgcagcttggctttagaaatttcctggctgtttccttcttccagccgtatctgaaccttctctttcctgtttctcaactgccccttttcttcaaactgtttattcca

SEQ ID NO: 14123 - DNA, 122 bp, Homo sapiens
  misc_feature (61)..(62): /note="This region represents a CpG dinucleotide"
  misc_feature (61)..(61): /note="Nucleotide may be methylated to form 5-methylcytosine"
gctggttctaatgtagcaaatgagaacatgtaagccattaaaacagaacagtgttttgcacgtaattaggtacttggcaaattgttgtggagtgacaagtagtacattgaagttcacccttt

SEQ ID NO: 14124 - DNA, 122 bp, Homo sapiens
  misc_feature (61)..(62): /note="This region represents a CpG dinucleotide"
  misc_feature (61)..(61): /note="Nucleotide may be methylated to form 5-methylcytosine"
acttggctggaaataggttaccttagattcccatccacccactgtctttgtgggggatagcgtgaagaattctatatgtgcctatatactagataccaagcagccttataaaaatggcttgg

SEQ ID NO: 14125 - DNA, 122 bp, Homo sapiens
  misc_feature (61)..(62): /note="This region represents a CpG dinucleotide"
  misc_feature (61)..(61): /note="Nucleotide may be methylated to form 5-methylcytosine"
gcacagccatctctccaacacccacgataatgttctggcccaaaatgtgagtcatgccaacgctaagaaactctgcataatgcagtaagcattttaaaggccaagcctgttattaacagctt

SEQ ID NO: 14126 - DNA, 122 bp, Homo sapiens
  misc_feature (61)..(62): /note="This region represents a CpG dinucleotide"
  misc_feature (61)..(61): /note="Nucleotide may be methylated to form 5-methylcytosine"
ttcctcataacttggatttacacactgcaaatcctctgatctgattacctccagtgatcacgtaaaatactggctttaaactctttgccttagtgataaaacagccactttgattcacaacg

SEQ ID NO: 14127 - DNA, 122 bp, Homo sapiens
  misc_feature (61)..(62): /note="This region represents a CpG dinucleotide"
  misc_feature (61)..(61): /note="Nucleotide may be methylated to form 5-methylcytosine"
aagtccacaaatttctcttttacactctggaaagtaaaaccgtactctgccaagtccaggcggatctgaaggggaatatgcacactgctattttgttgttagagagagatttgtactcagtt

SEQ ID NO: 14128 - DNA, 122 bp, Homo sapiens
  misc_feature (61)..(62): /note="This region represents a CpG dinucleotide"
  misc_feature (61)..(61): /note="Nucleotide may be methylated to form 5-methylcytosine"
tgacctctgcctgaaactggaatcaagaccaagatgacatagctgtggtcacacaaagcccgttaactacatcagttgtctttgtttattcaataactctgagctacacttttttttacaca

SEQ ID NO: 14129 - DNA, 122 bp, Homo sapiens
  misc_feature (61)..(62): /note="This region represents a CpG dinucleotide"
  misc_feature (61)..(61): /note="Nucleotide may be methylated to form 5-methylcytosine"
agctctatctattgtgactgcttggcattgtcaacctccgaagttgcctaaatcacccctcggagaagggaagagagtaacaacgctagcaaaaccatttttgttacagacatggttatata

SEQ ID NO: 14130 - DNA, 122 bp, Homo sapiens
  misc_feature (61)..(62): /note="This region represents a CpG dinucleotide"
  misc_feature (61)..(61): /note="Nucleotide may be methylated to form 5-methylcytosine"
tttctgaaatttgttaccaggtgaactctgtgtaggcaagtatggaggctcttctaattacggattacaagcaagaatgactacctagatcagagttgatataagcgatgcccaaccattca

SEQ ID NO: 14131 - DNA, 122 bp, Homo sapiens
  misc_feature (61)..(62): /note="This region represents a CpG dinucleotide"
  misc_feature (61)..(61): /note="Nucleotide may be methylated to form 5-methylcytosine"
gccattcatcaagacagaaacagaatccacatccctgctgttcatctaagcagagacaaacggttgaccaaagactagacatggggtgactaagattaagaaatcctacagaaaagtcaaga

SEQ ID NO: 14132 - DNA, 122 bp, Homo sapiens
  misc_feature (61)..(62): /note="This region represents a CpG dinucleotide"
  misc_feature (61)..(61): /note="Nucleotide may be methylated to form 5-methylcytosine"
gggcatggcctttcatggccctaacccaaaggaaatggagttcaccaggctcccccttgacgggtcctgaacactaatccatttcctgttactttagttcaaagaggcacttttcatgacct

SEQ ID NO: 14133 - DNA, 122 bp, Homo sapiens
  misc_feature (61)..(62): /note="This region represents a CpG dinucleotide"
  misc_feature (61)..(61): /note="Nucleotide may be methylated to form 5-methylcytosine"
aagatttttcagttttcccttagagacactttcccttgtggggcatgatagtgtgttcctcgttgcagaaggacccctgtatgcagaagtagaggcgctggcctcaggctcctccacttcct

SEQ ID NO: 14134 - DNA, 122 bp, Homo sapiens
  misc_feature (61)..(62): /note="This region represents a CpG dinucleotide"
  misc_feature (61)..(61): /note="Nucleotide may be methylated to form 5-methylcytosine"
attgagatttaatcccagatgtaaactgaggacacaggccatccccaatttcccactcttcgtgctgttcacttatacccttccctgcatagagctgcctctacctccctccagccctgaca

SEQ ID NO: 14135 - DNA, 122 bp, Homo sapiens
  misc_feature (61)..(62): /note="This region represents a CpG dinucleotide"
  misc_feature (61)..(61): /note="Nucleotide may be methylated to form 5-methylcytosine"
cttctgaggtcagagaatatacaaagcaagtctagaagctgctgtgactatgagcgtcaacggtgaaatcttaggcatctacttcatgccagacttgttccacatgctttatctcagttaat

SEQ ID NO: 14136 - DNA, 122 bp, Homo sapiens
  misc_feature (61)..(62): /note="This region represents a CpG dinucleotide"
  misc_feature (61)..(61): /note="Nucleotide may be methylated to form 5-methylcytosine"
ggtgtctcgttgagttcatgattctctcatgatgggtggcgttgagcacctcttcctgttcgtgtcattccgttttcaactggggcctttgttttcttgagttttgagagcttttaaaattc

SEQ ID NO: 14137 - DNA, 122 bp, Homo sapiens
  misc_feature (61)..(62): /note="This region represents a CpG dinucleotide"
  misc_feature (61)..(61): /note="Nucleotide may be methylated to form 5-methylcytosine"
agctggtagtggagactcccttgtttgaagctctgactttttttccagtggcctttaaatcgctcacgtggaatcacacaacatgattaattcacttaacaaactcaatgactcatcatcag

SEQ ID NO: 14138 - DNA, 122 bp, Homo sapiens
  misc_feature (61)..(62): /note="This region represents a CpG dinucleotide"
  misc_feature (61)..(61): /note="Nucleotide may be methylated to form 5-methylcytosine"
tcatgttttgaagtaagcacccagatcgacctgtcgggcagtgttgggagaatgtctgcacgtaggcgtggtcacgtccgtccctgttgcctgcgctgctccgagaagccccactctgacca

SEQ ID NO: 14139 - DNA, 122 bp, Homo sapiens
  misc_feature (61)..(62): /note="This region represents a CpG dinucleotide"
  misc_feature (61)..(61): /note="Nucleotide may be methylated to form 5-methylcytosine"
ttggccagaacctgctgccagtctgaaagagttgggggaatgtacaagtcaaagatccctcgggcccagaaccaggtcagtgtcaaggtcactcctaagaacactgagatgaaaatagcaga

SEQ ID NO: 14140 - DNA, 122 bp, Homo sapiens
  misc_feature (61)..(62): /note="This region represents a CpG dinucleotide"
  misc_feature (61)..(61): /note="Nucleotide may be methylated to form 5-methylcytosine"
gtctatgttgtatttgagaatgtacaggcactaggagtgcgtgaactcttgtgcagctgacgttgattggagggcaaaaggggaaggggaaggcccttaggacaatgaattcagtcatgggg

SEQ ID NO: 14141 - DNA, 122 bp, Homo sapiens
  misc_feature (61)..(62): /note="This region represents a CpG dinucleotide"
  misc_feature (61)..(61): /note="Nucleotide may be methylated to form 5-methylcytosine"
ggatttctgggcgggagtgggattaggccttgtggggaagatacaaggagtcagtgagggcgatgacttcatacagagcacacagcatgagtgagtatgaggcatgtttgagtcacagcaag

SEQ ID NO: 14142 - DNA, 122 bp, Homo sapiens
  misc_feature (61)..(62): /note="This region represents a CpG dinucleotide"
  misc_feature (61)..(61): /note="Nucleotide may be methylated to form 5-methylcytosine"
ttttggctttgcttcaatagccctatggcacttgtgttggtaggtttttacattgagttgcgcagttcaattcacaggccagtagagggtacttatgagtaagagccagctgtgccaaagca

SEQ ID NO: 14143 - DNA, 122 bp, Homo sapiens
  misc_feature (61)..(62): /note="This region represents a CpG dinucleotide"
  misc_feature (61)..(61): /note="Nucleotide may be methylated to form 5-methylcytosine"
gagtgaggccagcaggggtgggtctccaagtgcttcctttgacagctgctctggatgggacgtggcttggggtgggtgagaacccttggctgagtttggattttcctgcagggtttcattgg

SEQ ID NO: 14144 - DNA, 122 bp, Homo sapiens
  misc_feature (61)..(62): /note="This region represents a CpG dinucleotide"
  misc_feature (61)..(61): /note="Nucleotide may be methylated to form 5-methylcytosine"
tctggccccatttcctgggagcctgaccccgccctaggattcctggagtgggtgtgcccacgcttccggcccagacgtgggtggagggatcccaccctgccaggcctcccgcctgtgcggct

SEQ ID NO: 14145 - DNA, 122 bp, Homo sapiens
  misc_feature (61)..(62): /note="This region represents a CpG dinucleotide"
  misc_feature (61)..(61): /note="Nucleotide may be methylated to form 5-methylcytosine"
caactataaaatggggatgatagcacttaccccatagggtgatgcttataaagcaattagcgcaaagcctggctcatagtgctctaaagtcatagcaatatgattgctatgaaatgcaaata

SEQ ID NO: 14146 - DNA, 122 bp, Homo sapiens
  misc_feature (61)..(62): /note="This region represents a CpG dinucleotide"
  misc_feature (61)..(61): /note="Nucleotide may be methylated to form 5-methylcytosine"
actaggtgggtaagtttgcttttgaaaaacatacaacttctgtattttccagtccctccccgccccgcagtgtcgagtcgaatacattttcagatctttttccccaaccggatcttttttct

SEQ ID NO: 14147 - DNA, 122 bp, Homo sapiens
  misc_feature (61)..(62): /note="This region represents a CpG dinucleotide"
  misc_feature (61)..(61): /note="Nucleotide may be methylated to form 5-methylcytosine"
ttcgattactcatcctatccctttgcacaatggagaaatttacatgtattcagccctagccgtccttctagtcattctctcagtttagtacttacttgttttcttatttgggttttggcctg

SEQ ID NO: 14148 - DNA, 122 bp, Homo sapiens
  misc_feature (61)..(62): /note="This region represents a CpG dinucleotide"
  misc_feature (61)..(61): /note="Nucleotide may be methylated to form 5-methylcytosine"
tgggattacaggtgtgagccaccgcacccagccttaataaggacttatgaacagaagccacgtctccagccatggtggatcccagcaccatcccccagagccagggattacatacagtaggg

SEQ ID NO: 14149 - DNA, 122 bp, Homo sapiens
  misc_feature (61)..(62): /note="This region represents a CpG dinucleotide"
  misc_feature (61)..(61): /note="Nucleotide may be methylated to form 5-methylcytosine"
tttggttgtaataaaatgtgactgctggggaaatgttcacagagttggcattcatttgcacgctactgccatttcagcccagggcattctctctttcttcctggttctcctgcctccctcca

SEQ ID NO: 14150 - DNA, 122 bp, Homo sapiens
  misc_feature (61)..(62): /note="This region represents a CpG dinucleotide"
  misc_feature (61)..(61): /note="Nucleotide may be methylated to form 5-methylcytosine"
caacctgggcaacatggcaaagcaaaaaatacaaaaaaattagccaagcatgatggtgtgcgcctgtggttccagctgagttaagaggatcacctaagcccagggagattgaggctgcggtg

SEQ ID NO: 14151 - DNA, 122 bp, Homo sapiens
  misc_feature (61)..(62): /note="This region represents a CpG dinucleotide"
  misc_feature (61)..(61): /note="Nucleotide may be methylated to form 5-methylcytosine"
ccctgcacacacacactttgaagccacacctcttccccgacaacacccgtctccacactgcgcacctaggcctgagctcacacacacccaggcccatgctcacggccctgtcacctatgcac

SEQ ID NO: 14152 - DNA, 122 bp, Homo sapiens
  misc_feature (61)..(62): /note="This region represents a CpG dinucleotide"
  misc_feature (61)..(61): /note="Nucleotide may be methylated to form 5-methylcytosine"
ggggtgcaggaaggcttatcaggatccatatcgcagcttgtaaagtcaccacaatcaccacgccaacagacggaacgcctggaagtaaacagaacttctagaacagtagaacatcaaagggt

SEQ ID NO: 14153 - DNA, 122 bp, Homo sapiens
  misc_feature (61)..(62): /note="This region represents a CpG dinucleotide"
  misc_feature (61)..(61): /note="Nucleotide may be methylated to form 5-methylcytosine"
ctctgagatgagcaaattgtaccaactgcatacaagtagcaagccagtcactagtgccctcgactgggcacatggaagctggctgaaaatccatccccaactgtaaattttaagtgtaacat

SEQ ID NO: 14154 - DNA, 122 bp, Homo sapiens
  misc_feature (61)..(62): /note="This region represents a CpG dinucleotide"
  misc_feature (61)..(61): /note="Nucleotide may be methylated to form 5-methylcytosine"
atactactgcggaattcctgttaaacgcgctgatttaataaagtcttcggtttatccaaacgggctacacaaatgattaatccaaactccaaagacctagaaagaacaggcggggccgggtt

SEQ ID NO: 14155 - DNA, 122 bp, Homo sapiens
  misc_feature (61)..(62): /note="This region represents a CpG dinucleotide"
  misc_feature (61)..(61): /note="Nucleotide may be methylated to form 5-methylcytosine"
caaatagcatctgctgtgtcagctaaacacccacagcatttctttttactggctatcatacgtgtgcaatattgagccctccctcctccttcttatttggtttccactttcagtaaacctta

SEQ ID NO: 14156 - DNA, 122 bp, Homo sapiens
  misc_feature (61)..(62): /note="This region represents a CpG dinucleotide"
  misc_feature (61)..(61): /note="Nucleotide may be methylated to form 5-methylcytosine"
tttcactggctggacccacagctgattcctactctaatttttcacactgaacacctggggcgtgatatacctgtatcaaaacaaaaggcagtctgcagtcccgcaggcaagggtctgcccac

SEQ ID NO: 14157 - DNA, 122 bp, Homo sapiens
  misc_feature (61)..(62): /note="This region represents a CpG dinucleotide"
  misc_feature (61)..(61): /note="Nucleotide may be methylated to form 5-methylcytosine"
gaagggtccgctccaggagggtgtgggttccgatgcctgggtcctggaggtccggggagtcgcggagggacctccctccggtaaccgacggattggggacaaatgctctgcccagtctgatc

SEQ ID NO: 14158 - DNA, 122 bp, Homo sapiens
  misc_feature (61)..(62): /note="This region represents a CpG dinucleotide"
  misc_feature (61)..(61): /note="Nucleotide may be methylated to form 5-methylcytosine"
tgcaggatttggatacatttccccgtctggtcctaattctgttgaatgacatcatttatccgtattcccacccagagatgggcagatttcttgtaacctgaatagataccaaagaatcccaa

SEQ ID NO: 14159 - DNA, 122 bp, Homo sapiens
  misc_feature (61)..(62): /note="This region represents a CpG dinucleotide"
  misc_feature (61)..(61): /note="Nucleotide may be methylated to form 5-methylcytosine"
agcttggccatgagtatgaaatcatcatttccacctggtctgagtcccggtccagtgaggcgaggaccctgctgtttcaacagagggtttcccatcacaaggggactaggtgtaaagtcgat

SEQ ID NO: 14160 - DNA, 122 bp, Homo sapiens
  misc_feature (61)..(62): /note="This region represents a CpG dinucleotide"
  misc_feature (61)..(61): /note="Nucleotide may be methylated to form 5-methylcytosine"
taaggcacagagagtaacttccccaatgctatacacatagtaagtcaccaacctggtattcgagcccaggcaggctagcttcaaagcctgagttctcaaaccacagctatgtgtctcataat

SEQ ID NO: 14161 - DNA, 122 bp, Homo sapiens
  misc_feature (61)..(62): /note="This region represents a CpG dinucleotide"
  misc_feature (61)..(61): /note="Nucleotide may be methylated to form 5-methylcytosine"
ttttctggaaaacaaggataaataagttttttgaacatttttctcccctgaaactaaatccgtaagagagttaaaaacccgtggaaagcgagttaagtcacttttcaagtctttgtactcag

SEQ ID NO: 14162 - DNA, 122 bp, Homo sapiens
  misc_feature (61)..(62): /note="This region represents a CpG dinucleotide"
  misc_feature (61)..(61): /note="Nucleotide may be methylated to form 5-methylcytosine"
ggggagacattccatacctgtggtgtcagctcagcaagggccccaggcagatgccttcggcgaggctgcagcagctgctgccagccaagcaccaccccacgttcccaggtgtccacaaatca

SEQ ID NO: 14163 - DNA, 122 bp, Homo sapiens
  misc_feature (61)..(62): /note="This region represents a CpG dinucleotide"
  misc_feature (61)..(61): /note="Nucleotide may be methylated to form 5-methylcytosine"
aatgatgagacaaaacaaatgaaagagcctagaatgttcttggctaggagaactttaatacgtgttagttgagcctgtgaagtccagaagccctacagctagtcttgtttctaagaattagt

SEQ ID NO: 14164 - DNA, 122 bp, Homo sapiens
  misc_feature (61)..(62): /note="This region represents a CpG dinucleotide"
  misc_feature (61)..(61): /note="Nucleotide may be methylated to form 5-methylcytosine"
catacagacacacacatataaacattgatcaacactgaaatgtttaatagtcattattttcgggtcgtaaaattcactgttcttcaatgaatacttgtagagcacatattatatgcagtagt

SEQ ID NO: 14165 - DNA, 122 bp, Homo sapiens
  misc_feature (61)..(62): /note="This region represents a CpG dinucleotide"
  misc_feature (61)..(61): /note="Nucleotide may be methylated to form 5-methylcytosine"
ctggctatggagcttagatgagagtttaagggattggactcagggcagggccagtttctacgtgtttagcaatagggttgattgtgttttcaagcaacctaaacagctttatcagggaatgt

SEQ ID NO: 14166 - DNA, 122 bp, Homo sapiens
  misc_feature (61)..(62): /note="This region represents a CpG dinucleotide"
  misc_feature (61)..(61): /note="Nucleotide may be methylated to form 5-methylcytosine"
gtgagccagcaagtacttctgactcaacctggacatccaaatccatctgggtcgctactgcggttttgcagttgctactgaagtttaaacacctgtggagacactactgggtcttgaggctg

SEQ ID NO: 14167 - DNA, 122 bp, Homo sapiens
  misc_feature (61)..(62): /note="This region represents a CpG dinucleotide"
  misc_feature (61)..(61): /note="Nucleotide may be methylated to form 5-methylcytosine"
agagaacgctctagtttctcttcctcttttgttttcttcttcctcttcttttaaggacaccgatgctattggattaggaccccacccttatgaccccatgtaaccttactttcctcttggta

SEQ ID NO: 14168 - DNA, 122 bp, Homo sapiens
  misc_feature (61)..(62): /note="This region represents a CpG dinucleotide"
  misc_feature (61)..(61): /note="Nucleotide may be methylated to form 5-methylcytosine"
aacaggttgtacccactggcagtcagagtgacatactagccaaagattgctggagacctacgggcatgggcatctgcctggtgcccaagcctgacacccagctctggttgggaacgcagtgt

SEQ ID NO: 14169 - DNA, 122 bp, Homo sapiens
  misc_feature (61)..(62): /note="This region represents a CpG dinucleotide"
  misc_feature (61)..(61): /note="Nucleotide may be methylated to form 5-methylcytosine"
tttagctttccccagagcccccttataaaacattcagatatctactgcccaacagtgaatcgtggagctttttaataaaagataaatgagtacctgtttgggaatgtattttccattttccc

SEQ ID NO: 14170 - DNA, 122 bp, Homo sapiens
  misc_feature (61)..(62): /note="This region represents a CpG dinucleotide"
  misc_feature (61)..(61): /note="Nucleotide may be methylated to form 5-methylcytosine"
ggtaaacaatgacttgcctaccctggtcccacaggggcagtggcaggactgatatgaagacgcttacctcctctgccatccctacaataatctatgtttttttgtcataaataaaaagagta

SEQ ID NO: 14171 - DNA, 122 bp, Homo sapiens
  misc_feature (61)..(62): /note="This region represents a CpG dinucleotide"
  misc_feature (61)..(61): /note="Nucleotide may be methylated to form 5-methylcytosine"
gggcaatgggcagtagatcaagctggcctgccctgcgtgggccctcagcagggatgcaggcgaggctcccagaagacgatgactcaggcctgcatctgtgactggttattccagatgctgcc

SEQ ID NO: 14172 - DNA, 122 bp, Homo sapiens
  misc_feature (61)..(62): /note="This region represents a CpG dinucleotide"
  misc_feature (61)..(61): /note="Nucleotide may be methylated to form 5-methylcytosine"
cttccttgatcatctcttcactcttaccacatacacacacgcacgcacaccacaggaaaacgcatcagatgaagaacttccccagtccagtgcagatttaagaaagaggacactgacatagg

SEQ ID NO: 14173 - DNA, 122 bp, Homo sapiens
  misc_feature (61)..(62): /note="This region represents a CpG dinucleotide"
  misc_feature (61)..(61): /note="Nucleotide may be methylated to form 5-methylcytosine"
tttttcttcgctctctaaccaaattccttttttcttgctgtagtctaagaaatctctattcgtttccaatagaggtggaaagcagcccatgccacccattatttagccctttcttttttttt

SEQ ID NO: 14174 - DNA, 122 bp, Homo sapiens
  misc_feature (61)..(62): /note="This region represents a CpG dinucleotide"
  misc_feature (61)..(61): /note="Nucleotide may be methylated to form 5-methylcytosine"
ctctatggtgttggcacaatgatgaaatcacccaatgacacttttctcagaatgtgtgcccgtcaagtgactcatgactgtagttggatgcaaagctgggaaggaaaggtattccacatagc

SEQ ID NO: 14175 - DNA, 122 bp, Homo sapiens
  misc_feature (61)..(62): /note="This region represents a CpG dinucleotide"
  misc_feature (61)..(61): /note="Nucleotide may be methylated to form 5-methylcytosine"
tcgtttacacaatatggatcctggtggagctttgagggctttattaataatagcatctgacggtttattgaatatgtggtgcccaattactggatttgacagtaaaaggtatatattaatga

SEQ ID NO: 14176 - DNA, 122 bp, Homo sapiens
  misc_feature (61)..(62): /note="This region represents a CpG dinucleotide"
  misc_feature (61)..(61): /note="Nucleotide may be methylated to form 5-methylcytosine"
agccaagacatattaaaagcagaggttccaacagaccaccacagctggcaagaagccaaacgcatgcaaacccgagatggagttttaaagggccattgaaattaattcccttgaagaggaat

SEQ ID NO: 14177 - DNA, 122 bp, Homo sapiens
  misc_feature (61)..(62): /note="This region represents a CpG dinucleotide"
  misc_feature (61)..(61): /note="Nucleotide may be methylated to form 5-methylcytosine"
agcttacctcatggacttgtcattaggcccaaatcagataatataggtgaaagtgctttgcgtaatgtcaagaaccctgccagtgaaaatcatagtgcctccaaggagctacttaagtttct

SEQ ID NO: 14178 - DNA, 122 bp, Homo sapiens
  misc_feature (61)..(62): /note="This region represents a CpG dinucleotide"
  misc_feature (61)..(61): /note="Nucleotide may be methylated to form 5-methylcytosine"
ggctcctgagtatagaaccacttctcctagcacggctcggaattctggctgccggacacacgtgacaaaccagcgagtcacattattccagatccggcgggcaggtgggtctaggacctgga

SEQ ID NO: 14179 - DNA, 122 bp, Homo sapiens
  misc_feature (61)..(62): /note="This region represents a CpG dinucleotide"
  misc_feature (61)..(61): /note="Nucleotide may be methylated to form 5-methylcytosine"
gagatgagccgggaagtacacggacagggagtgtggggcgcggccagggaggttccgcgacgccctcccctgactctcactccagctaccagggtgagggtgaatcaccccgattttagctt

SEQ ID NO: 14180 - DNA, 122 bp, Homo sapiens
  misc_feature (61)..(62): /note="This region represents a CpG dinucleotide"
  misc_feature (61)..(61): /note="Nucleotide may be methylated to form 5-methylcytosine"
cttcaaaagggcaacaaaattagccttaaatagtatttcttggattgcctttaacaatggcgataaggccaaagcttctagtcttgacagaagtggtttcatgacaacttgtttttatcttg

SEQ ID NO: 14181 - DNA, 122 bp, Homo sapiens
  misc_feature (61)..(62): /note="This region represents a CpG dinucleotide"
  misc_feature (61)..(61): /note="Nucleotide may be methylated to form 5-methylcytosine"
agaataaagcctacatttgtgggtggccacaaatcttagctaaaaattggctgaactatacggacgtgacttagagaggttggatttattgaaatgttcacaggctgaggtgtcagaagagt

SEQ ID NO: 14182 - DNA, 122 bp, Homo sapiens
  misc_feature (61)..(62): /note="This region represents a CpG dinucleotide"
  misc_feature (61)..(61): /note="Nucleotide may be methylated to form 5-methylcytosine"
gacttgggcacttagcagagggtgcacgtgcccgtgtgtgtgtgtgtgtgtgtgtgtgcacgcacacctgtctcagggggtacctagcatataccctgagcagatttttaacacctgccctc

SEQ ID NO: 14183 - DNA, 122 bp, Homo sapiens
  misc_feature (61)..(62): /note="This region represents a CpG dinucleotide"
  misc_feature (61)..(61): /note="Nucleotide may be methylated to form 5-methylcytosine"
aacctaataatttgacccttggtcatgtttatttatttatcccgagacagagtctcaccccgtcacccaggccggagtgcaatggtgcaatcttatctcactgcaacctcagcctcccaagt

SEQ ID NO: 14184 - DNA, 122 bp, Homo sapiens
  misc_feature (61)..(62): /note="This region represents a CpG dinucleotide"
  misc_feature (61)..(61): /note="Nucleotide may be methylated to form 5-methylcytosine"
aatcaaattagagttattctatgtctaaattctgcctgaagccaattcgtgctttctttccgtgttatgaaatgtgtgggggtgaagaagaagagggaaaaagccagctaagacatctgaca

SEQ ID NO: 14185 - DNA, 122 bp, Homo sapiens
  misc_feature (61)..(62): /note="This region represents a CpG dinucleotide"
  misc_feature (61)..(61): /note="Nucleotide may be methylated to form 5-methylcytosine"
cctggccaggatggagttcttgtcacaacaaggactcggggcatcttcaggaccagcaagcgtggagatggggtggggtctggcccagacttcagacatggcagaaggctctgaaaacgaag

SEQ ID NO: 14186 - DNA, 122 bp, Homo sapiens
  misc_feature (61)..(62): /note="This region represents a CpG dinucleotide"
  misc_feature (61)..(61): /note="Nucleotide may be methylated to form 5-methylcytosine"
aattgcccagaaggggatgaggacaatcctgaagcccttcctgactgaaggcacgtctctcgctgcagaggcacagctcccagctctggctgcagaagcccagatggatcagggcctagagc

SEQ ID NO: 14187 - DNA, 122 bp, Homo sapiens
  misc_feature (61)..(62): /note="This region represents a CpG dinucleotide"
  misc_feature (61)..(61): /note="Nucleotide may be methylated to form 5-methylcytosine"
tgctgtgtgtctctgtgtctgtctatgtgtgtctctgtgtccgtgtgtccatgtctgtgccgtgtgtctctgtgtctgtgtatgtgtgtctctgtgtctgtgtgtctgtgctgtgtgtccct

SEQ ID NO: 14188 - DNA, 122 bp, Homo sapiens
  misc_feature (61)..(62): /note="This region represents a CpG dinucleotide"
  misc_feature (61)..(61): /note="Nucleotide may be methylated to form 5-methylcytosine"
ggcagcctgcagaggctctccccttctagaaggcccagcaagcgccccgtttcccacagacggttcccacctggggatgttgaaccagtctcaccagatctgcttacacggaggagctgcac

SEQ ID NO: 14189 - DNA, 122 bp, Homo sapiens
  misc_feature (61)..(62): /note="This region represents a CpG dinucleotide"
  misc_feature (61)..(61): /note="Nucleotide may be methylated to form 5-methylcytosine"
gttgtagggattttagctttcactctgataaaaaaagaaaactgcagaataattttgaatcgaagagttacatgattcataacaggatcccttttgttgccaggggcaaagaggcaggagca

SEQ ID NO: 14190 - DNA, 122 bp, Homo sapiens
  misc_feature (61)..(62): /note="This region represents a CpG dinucleotide"
  misc_feature (61)..(61): /note="Nucleotide may be methylated to form 5-methylcytosine"
attgttctgttcttatttctcttcttgttttacattcttgggtgatatcctcatcccatacgacctcaagaaggatctctgtggtgatggttaatcaagaataagcaagatgcttgattcta

SEQ ID NO: 14191 - DNA, 122 bp, Homo sapiens
  misc_feature (61)..(62): /note="This region represents a CpG dinucleotide"
  misc_feature (61)..(61): /note="Nucleotide may be methylated to form 5-methylcytosine"
gactggtgcactcatagtagctggatggcgctgtgggcggtgagcgtatcatcccacccacgtgacctatgcactcacccaccttgtgaggcccagtaattcaggacaccccggtcttgcag

SEQ ID NO: 14192 - DNA, 122 bp, Homo sapiens
  misc_feature (61)..(62): /note="This region represents a CpG dinucleotide"
  misc_feature (61)..(61): /note="Nucleotide may be methylated to form 5-methylcytosine"
ctgtcagaatgcctctccgccttccggcaggcgggagccgcatgcgccccctagtggccgcggccagaagctgtcacatcccatgggcgcaggcgcctcagccccgcaaggggcgggctgga

SEQ ID NO: 14193 - DNA, 122 bp, Homo sapiens
  misc_feature (61)..(62): /note="This region represents a CpG dinucleotide"
  misc_feature (61)..(61): /note="Nucleotide may be methylated to form 5-methylcytosine"
gtgacttgttttctttctctctcagagccctagtgttgaagaacatgtcacaccagcacacgccgccgtcgccagcagcaggaagttgttgatttgcagcatattcacactttctgatgcag

SEQ ID NO: 14194 - DNA, 122 bp, Homo sapiens
  misc_feature (61)..(62): /note="This region represents a CpG dinucleotide"
  misc_feature (61)..(61): /note="Nucleotide may be methylated to form 5-methylcytosine"
acatcatgtttcttcttgtcctttgcatataatgacaaaggagctagctgtgcttctagtcggctctgattctgcattttcagcagcataaagaaaaacatctcattccttttatagaaatg

SEQ ID NO: 14195 - DNA, 122 bp, Homo sapiens
  misc_feature (61)..(62): /note="This region represents a CpG dinucleotide"
  misc_feature (61)..(61): /note="Nucleotide may be methylated to form 5-methylcytosine"
gaggtgataggaggaaatctagtcaggctgatggaacttggtgcacagtatgtgtgcttacgggcaacaggtatcagtgatatccaaaaaagaagttctcgacaagccattggtcaaatggc

SEQ ID NO: 14196 - DNA, 122 bp, Homo sapiens
  misc_feature (61)..(62): /note="This region represents a CpG dinucleotide"
  misc_feature (61)..(61): /note="Nucleotide may be methylated to form 5-methylcytosine"
atttgctaagagaagaaagcatattgtttcttaagtcacctgtagggcgaagtaaatatgcgaggaaatagtctccataattgtttaaaattcattgaagattgcttttctgtacaaaagag

SEQ ID NO: 14197 - DNA, 122 bp, Homo sapiens
  misc_feature (61)..(62): /note="This region represents a CpG dinucleotide"
  misc_feature (61)..(61): /note="Nucleotide may be methylated to form 5-methylcytosine"
tgaattggccttagcttgctcttgcacttgcttacttgcttgcttgcttcttacagagggcggatggaataactcaacattccttccttcctccactgcaacacaagttacataggtgatga

SEQ ID NO: 14198 - DNA, 122 bp, Homo sapiens
  misc_feature (61)..(62): /note="This region represents a CpG dinucleotide"
  misc_feature (61)..(61): /note="Nucleotide may be methylated to form 5-methylcytosine"
actcatgtgcgcagttcagagcagccctctcagcatcactggtgctgactgtgctctgggcggggacccacagagccaagcatccatctcacccgagtagcagaagttcctctgacttgccc

SEQ ID NO: 14199 - DNA, 122 bp, Homo sapiens
  misc_feature (61)..(62): /note="This region represents a CpG dinucleotide"
  misc_feature (61)..(61): /note="Nucleotide may be methylated to form 5-methylcytosine"
catcccttctttaagaggaacaaaacttctaagtcacacatacaggctgcacaggtatgtcgaacttctgaatatgtaatcacaaactgtgccaaaaccacatatagaaaatgaaaggggaa

SEQ ID NO: 14200 - DNA, 122 bp, Homo sapiens
  misc_feature (61)..(62): /note="This region represents a CpG dinucleotide"
  misc_feature (61)..(61): /note="Nucleotide may be methylated to form 5-methylcytosine"
gaaacggtctctaaatctgccctgttcaacacgtagcctctcatggccaggggctactcacgaaggactgtgcagccttgagtgtcacaatcctgtcattctggatgaaatgggtgtcgtgt

SEQ ID NO: 14201 - DNA, 122 bp, Homo sapiens
  misc_feature (61)..(62): /note="This region represents a CpG dinucleotide"
  misc_feature (61)..(61): /note="Nucleotide may be methylated to form 5-methylcytosine"
atctcacattggtgtaatcataccatgtctgtctctttttgaatgtcttattttactcaacgtaatgtttgcaggctttgtctttattgtaagatgagtgacacccactttcatttcctgtt

SEQ ID NO: 14202 - DNA, 122 bp, Homo sapiens
  misc_feature (61)..(62): /note="This region represents a CpG dinucleotide"
  misc_feature (61)..(61): /note="Nucleotide may be methylated to form 5-methylcytosine"
tttctggggaaacgcccctcctcacgtgcctggtgattatctgcctagtcagggccaggacgagggtaaggcaagtgaaacactcactttaggcacaaaatttaagggggataccaaaaaaa

SEQ ID NO: 14203 - DNA, 122 bp, Homo sapiens
  misc_feature (61)..(62): /note="This region represents a CpG dinucleotide"
  misc_feature (61)..(61): /note="Nucleotide may be methylated to form 5-methylcytosine"
tctttctgaaccctaattctcatctttaagaactcagctcaaaagtcaattctaaagagacgtcatccctgaccactttaatatcttcatcatttaccttctttcacatcactgttttattc

SEQ ID NO: 14204 - DNA, 122 bp, Homo sapiens
  misc_feature (61)..(62): /note="This region represents a CpG dinucleotide"
  misc_feature (61)..(61): /note="Nucleotide may be methylated to form 5-methylcytosine"
tttgggcctgtaattcctgcaatctttccccctttcataaagtacatatgaaatagaattcgttttagaggatgctgctaaaaatgttccctgtcctctcctccacacctctgctctatgta

SEQ ID NO: 14205 - DNA, 122 bp, Homo sapiens
  misc_feature (61)..(62): /note="This region represents a CpG dinucleotide"
  misc_feature (61)..(61): /note="Nucleotide may be methylated to form 5-methylcytosine"
aggatcatatgacagaaggaagggctgaagagtgtgagaagctagacctctgcaggttaccgaagtcaagaacctcattaatcggtaacaagaagtgcagagcgggcttttgagtccatgcc

SEQ ID NO: 14206 - DNA, 122 bp, Homo sapiens
  misc_feature (61)..(62): /note="This region represents a CpG dinucleotide"
  misc_feature (61)..(61): /note="Nucleotide may be methylated to form 5-methylcytosine"
ggtggtgcaaataggagttaactcaactccctgggagtcatatttggcaataaccagtcacgtggaaaatgtacatccccaatactgttgcacaatgctggaaacccggagcaggcaatgag

SEQ ID NO: 14207 - DNA, 122 bp, Homo sapiens
  misc_feature (61)..(62): /note="This region represents a CpG dinucleotide"
  misc_feature (61)..(61): /note="Nucleotide may be methylated to form 5-methylcytosine"
ccccaaacgtcacaggggagggcccaagaagtatgtctggaattaggccttagccatggacgattataccaaagcaggaagttgggagctgcccacagatcaggcagacctgagccttgtcc

SEQ ID NO: 14208 - DNA, 122 bp, Homo sapiens
  misc_feature (61)..(62): /note="This region represents a CpG dinucleotide"
  misc_feature (61)..(61): /note="Nucleotide may be methylated to form 5-methylcytosine"
ggtgcaaaatgctttgcctgcacacgcgccctcgtggcccagtcttcctgcaacccccagcgcaccggccatgcatctgtctcccaaccagacgtgggagaagacatccccccttcactctt

SEQ ID NO: 14209 - DNA, 122 bp, Homo sapiens
  misc_feature (61)..(62): /note="This region represents a CpG dinucleotide"
  misc_feature (61)..(61): /note="Nucleotide may be methylated to form 5-methylcytosine"
ctgctgagagcaaaactgatccagtgcacactccaaagtggataatccctgccagcaggtcgcttgtgcctccggaggttgccttttaacacaattaatgatgatgacgatgacggtgataa

SEQ ID NO: 14210 - DNA, 122 bp, Homo sapiens
  misc_feature (61)..(62): /note="This region represents a CpG dinucleotide"
  misc_feature (61)..(61): /note="Nucleotide may be methylated to form 5-methylcytosine"
tatataggagttggcacagggccagtctggggtaagaactcaaacatcagccattgttggcgttgtgcaaaagtacttggaacaccgctggcctaaaggaaggttttcctggccaggtgtgg

SEQ ID NO: 14211 - DNA, 122 bp, Homo sapiens
  misc_feature (61)..(62): /note="This region represents a CpG dinucleotide"
  misc_feature (61)..(61): /note="Nucleotide may be methylated to form 5-methylcytosine"
ataaaaatcttttctgaatgcttccttccatgtacagacaaagaaagctgccatctggaacggccacatcagctggtccacatgtttccagggtagagaagtctgcatgccaggcatggtac

SEQ ID NO: 14212 - DNA, 122 bp, Homo sapiens
  misc_feature (61)..(62): /note="This region represents a CpG dinucleotide"
  misc_feature (61)..(61): /note="Nucleotide may be methylated to form 5-methylcytosine"
aggcacaagcaagggctgccctgaaggaagctccaaagagaaaggagggcaggaagcccacggcccacaggggtgtagcccgagacccacctgcagcccccagcccttgccaggaaaggtaa

SEQ ID NO: 14213 - DNA, 122 bp, Homo sapiens
  misc_feature (61)..(62): /note="This region represents a CpG dinucleotide"
  misc_feature (61)..(61): /note="Nucleotide may be methylated to form 5-methylcytosine"
tgctaagcattgatggccctttctggctctaatgccagagcaaccctgacttctaggtcacggttgtaaaataaattgttgcaatgggatccaaaaaagggggaagtttatactagagagct

SEQ ID NO: 14214 - DNA, 122 bp, Homo sapiens
  misc_feature (61)..(62): /note="This region represents a CpG dinucleotide"
  misc_feature (61)..(61): /note="Nucleotide may be methylated to form 5-methylcytosine"
tgctaactgaagcatgccagtcacacacaaagaagtactgtgtgctacagataacaacaacgtgaatgtatttaatactactggctgtacacttggaaatggttaagacagtaaattttatg

SEQ ID NO: 14215 - DNA, 122 bp, Homo sapiens
  misc_feature (61)..(62): /note="This region represents a CpG dinucleotide"
  misc_feature (61)..(61): /note="Nucleotide may be methylated to form 5-methylcytosine"
cactcgggcgaccctcgcctaccccgccgtaaaagccgcggcctttccacctaggtgctacgggacctacccccgtggcaaggaagagcaaacccgaacttgcgcacacccggcggccctgt

SEQ ID NO: 14216 - DNA, 122 bp, Homo sapiens
  misc_feature (61)..(62): /note="This region represents a CpG dinucleotide"
  misc_feature (61)..(61): /note="Nucleotide may be methylated to form 5-methylcytosine"
catattttcaaaaccataccagatctatatctaaggaacagtttaatatccgagtgagtacgatacaagttgacacaggtacaatcctatgttaaccaaaccaaaaatgcagtaacacagct

SEQ ID NO: 14217 - DNA, 122 bp, Homo sapiens
  misc_feature (61)..(62): /note="This region represents a CpG dinucleotide"
  misc_feature (61)..(61): /note="Nucleotide may be methylated to form 5-methylcytosine"
ttgctatttttaatgtctaatccacattacaatgtacataagtcatgagctgattccaaccgtgttactcatttttgtcatccctgtgttgagttagttctcttatgcagagtttcagcctt

SEQ ID NO: 14218 - DNA, 122 bp, Homo sapiens
  misc_feature (61)..(62): /note="This region represents a CpG dinucleotide"
  misc_feature (61)..(61): /note="Nucleotide may be methylated to form 5-methylcytosine"
gtacaaagtatgactatcaagggtacaagatgcaactaccaacttataggtatattaacacggcagaacagataacatttccaacaatactcaaaatggttttgccaccatttttaaaccgc

SEQ ID NO: 14219 - DNA, 122 bp, Homo sapiens
  misc_feature (61)..(62): /note="This region represents a CpG dinucleotide"
  misc_feature (61)..(61): /note="Nucleotide may be methylated to form 5-methylcytosine"
ctaagatttgtcaaatgttgtaagcaggaagtcagaccaaaagacaaccacagaaaaccacgtggtttgctctgaaattccatgacaacatgggttggtcactgatagagcaggcttcccca

SEQ ID NO: 14220 - DNA, 122 bp, Homo sapiens
  misc_feature (61)..(62): /note="This region represents a CpG dinucleotide"
  misc_feature (61)..(61): /note="Nucleotide may be methylated to form 5-methylcytosine"
ggttggaatcctgactcttcctaactatgggaactacgactagttacttctctggggcctcgatgttttgtagagtcagcatgacagtttctctctcatagggttgttgagaggattaaact

SEQ ID NO: 14221 - DNA, 122 bp, Homo sapiens
  misc_feature (61)..(62): /note="This region represents a CpG dinucleotide"
  misc_feature (61)..(61): /note="Nucleotide may be methylated to form 5-methylcytosine"
ggggcaggtcttagaccactagatgaaattagatacctttcccatgtgaggagtgtttcacgcaggcttatctccagtggcataatgtgtgctgtgtagccaggcctttccgcagcaccaga

SEQ ID NO: 14222 - DNA, 122 bp, Homo sapiens
  misc_feature (61)..(62): /note="This region represents a CpG dinucleotide"
  misc_feature (61)..(61): /note="Nucleotide may be methylated to form 5-methylcytosine"
aagggaagtaacaacacctgagtcacaggagtgtgggactccacagagggtgataatccacgtaaagtgcatcactcagcctggctcacagtcagcactcagtgaggtcactcatgaccatc

SEQ ID NO: 14223 - DNA, 122 bp, Homo sapiens
  misc_feature (61)..(62): /note="This region represents a CpG dinucleotide"
  misc_feature (61)..(61): /note="Nucleotide may be methylated to form 5-methylcytosine"
gtggagcagtcccttgtaaatctctgggaccttttacagcatatacttaagcaagcacatcgcctcctgggaggctttctaagagttttaatgactgtgggctgctgaaagatccaggcctt

SEQ ID NO: 14224 - DNA, 122 bp, Homo sapiens
  misc_feature (61)..(62): /note="This region represents a CpG dinucleotide"
  misc_feature (61)..(61): /note="Nucleotide may be methylated to form 5-methylcytosine"
gtcttaatgggtctgggcctggctggtagggagctgagcagcttgtagaacaccagctcacgcagcatgtgatggggactggccccaggctataggttaataattgatcagacccaaccaca

SEQ ID NO: 14225 - DNA, 122 bp, Homo sapiens
  misc_feature (61)..(62): /note="This region represents a CpG dinucleotide"
  misc_feature (61)..(61): /note="Nucleotide may be methylated to form 5-methylcytosine"
cttgatctcctgacctcctgatctgcctgcctcggcctcccaaagtgctgggattacaggcgtgagccaccacgccctgtgactaactcagttatttaacaattgactgtaatttctcagca

SEQ ID NO: 14226 - DNA, 122 bp, Homo sapiens
  misc_feature (61)..(62): /note="This region represents a CpG dinucleotide"
  misc_feature (61)..(61): /note="Nucleotide may be methylated to form 5-methylcytosine"
tggtcactctttgctgtagtttcctgctccatccatggggtcggaggtcttacctcctgacgttagagtcatttgcagcaggtgggagtgaaagtgggccgggtgccaggtcttctttacct

SEQ ID NO: 14227 - DNA, 122 bp, Homo sapiens
  misc_feature (61)..(62): /note="This region represents a CpG dinucleotide"
  misc_feature (61)..(61): /note="Nucleotide may be methylated to form 5-methylcytosine"
agacacaacataggtaggtaggtaggtaggtaggtagatactgctatccgtactattactcgatcattctatttttagtgcctgaaatctacctgatggtgtccagattttattgcttcttt

SEQ ID NO: 14228 - DNA, 122 bp, Homo sapiens
  misc_feature (61)..(62): /note="This region represents a CpG dinucleotide"
  misc_feature (61)..(61): /note="Nucleotide may be methylated to form 5-methylcytosine"
aggtactcatttatcttcagatgcaaaactggttctattgtccttaaacttctttccctccgcctcataaacctctactaaaaatacagactcacagagaaaagcaaagaactagtgctttt

SEQ ID NO: 14229 - DNA, 122 bp, Homo sapiens
  misc_feature (61)..(62): /note="This region represents a CpG dinucleotide"
  misc_feature (61)..(61): /note="Nucleotide may be methylated to form 5-methylcytosine"
tcttcctcccctggttactcatctgtgaaataattggattaggcagcaggtttcaactcacgtgtcagttctaacccgattgagaacaaatgcctgaagaaggacattgggaaggtccctga

SEQ ID NO: 14230 - DNA, 122 bp, Homo sapiens
  misc_feature (61)..(62): /note="This region represents a CpG dinucleotide"
  misc_feature (61)..(61): /note="Nucleotide may be methylated to form 5-methylcytosine"
ggcggggcccagcatcagtgttttttcaagcccttccaggtgacttcaatgcacaggcagcgagaactcctgcatgaaggcttctggagaagtaggaaggcttagaatgtcgctcactcatc

SEQ ID NO: 14231 - DNA, 122 bp, Homo sapiens
  misc_feature (61)..(62): /note="This region represents a CpG dinucleotide"
  misc_feature (61)..(61): /note="Nucleotide may be methylated to form 5-methylcytosine"
tgtggggccccagaaaccagaaaccggaggtcttgtaaatttttttatctaagagcatcacggaaactgagaacaattttgtttgaaggtacatgagtgcttttttgtagggggaagattca

SEQ ID NO: 14232 - DNA, 122 bp, Homo sapiens
  misc_feature (61)..(62): /note="This region represents a CpG dinucleotide"
  misc_feature (61)..(61): /note="Nucleotide may be methylated to form 5-methylcytosine"
attatcagcttaggaagccaaaaacaaaagccactctgttttcagccctgactgactaaccgttttttaaaccagcaaggacacttcctgaactttgccttcccctccctgggcaacaccag

SEQ ID NO: 14233 - DNA, 122 bp, Homo sapiens
  misc_feature (61)..(62): /note="This region represents a CpG dinucleotide"
  misc_feature (61)..(61): /note="Nucleotide may be methylated to form 5-methylcytosine"
tgcaaaggtggagagcctgccagtgcatgtgttctggtaacaaagaacgagatggttggccggctggagagtggggtgagggagggtggggcctagataaggctggatccgcagacagggct

SEQ ID NO: 14234 - DNA, 122 bp, Homo sapiens
  misc_feature (61)..(62): /note="This region represents a CpG dinucleotide"
  misc_feature (61)..(61): /note="Nucleotide may be methylated to form 5-methylcytosine"
agccccaaaagataatttgcataaaaatacaatcacttgaatgcagagaatagctaaagacgttagtaaaaactgaacatctgggaaaagactgtattaattggcaattttctttctttaat

SEQ ID NO: 14235 - DNA, 122 bp, Homo sapiens
  misc_feature (61)..(62): /note="This region represents a CpG dinucleotide"
  misc_feature (61)..(61): /note="Nucleotide may be methylated to form 5-methylcytosine"
gtgtttccagtagtcatccaggctgtggtggacgaaggagatggtgagtgcgtcctcttccgtcctcctgggcgtgcaggccgtgcagggaggaagcacgtcttgagggaggagtgcttgca

SEQ ID NO: 14236 - DNA, 122 bp, Homo sapiens
  misc_feature (61)..(62): /note="This region represents a CpG dinucleotide"
  misc_feature (61)..(61): /note="Nucleotide may be methylated to form 5-methylcytosine"
tgccagctgatgctggtgacaacctccaccctacaactccagaataactggacagttcctcgagttcggcaagaatgatggatgatgtgcacaagccacatcttatctgcttctcagcaatg

SEQ ID NO: 14237 - DNA, 122 bp, Homo sapiens
  misc_feature (61)..(62): /note="This region represents a CpG dinucleotide"
  misc_feature (61)..(61): /note="Nucleotide may be methylated to form 5-methylcytosine"
ccgaagagaactcggcctctgcgaagggctgtgcggggagatgcggtggagaggaagagccgccggggtgttgagaaacgatgatttcaaaaacttctgctgaaagtgaggaatgcataaga

SEQ ID NO: 14238 - DNA, 122 bp, Homo sapiens
  misc_feature (61)..(62): /note="This region represents a CpG dinucleotide"
  misc_feature (61)..(61): /note="Nucleotide may be methylated to form 5-methylcytosine"
tttctgcagcccctgcaggtcaacccttgactgacctccatttactcatacttagattaccgaaagctctccattttcccctgtaaaacacaaatacggagaatcaaatgtactgctgactc

SEQ ID NO: 14239 - DNA, 122 bp, Homo sapiens
  misc_feature (61)..(62): /note="This region represents a CpG dinucleotide"
  misc_feature (61)..(61): /note="Nucleotide may be methylated to form 5-methylcytosine"
tttctccattccagtacagctatatacaaaatagagacacccatacacatttcctgttgccgtttgccttttagaagggttcatacattttatgctgacctttcattagaagggatcatacg

SEQ ID NO: 14240 - DNA, 122 bp, Homo sapiens
  misc_feature (61)..(62): /note="This region represents a CpG dinucleotide"
  misc_feature (61)..(61): /note="Nucleotide may be methylated to form 5-methylcytosine"
tttttgttactggcttatcactcttagccaatgttcatctatgttgcaagaatttccttccgttttagggctgaataatattgctttgtatgtatatatcacattttgtttatccattcacc

SEQ ID NO: 14241 - DNA, 122 bp, Homo sapiens
  misc_feature (61)..(62): /note="This region represents a CpG dinucleotide"
  misc_feature (61)..(61): /note="Nucleotide may be methylated to form 5-methylcytosine"
tgtgtttatagtccttgttatagcacagatcacatgatattagggctccttgggctcccccgtgagctccaggaaggactgtcttagccacctccagaactccagcacaatgccaagcatat

SEQ ID NO: 14242 - DNA, 122 bp, Homo sapiens
  misc_feature (61)..(62): /note="This region represents a CpG dinucleotide"
  misc_feature (61)..(61): /note="Nucleotide may be methylated to form 5-methylcytosine"
ctccagaagagagagtgaattcaccctcctcccacagttttattctctctaggccctcaacggcttgggtgatgcccacacaccttggtgagagcaaattcctctctactcagactactgat

SEQ ID NO: 14243 - DNA, 122 bp, Homo sapiens
  misc_feature (61)..(62): /note="This region represents a CpG dinucleotide"
  misc_feature (61)..(61): /note="Nucleotide may be methylated to form 5-methylcytosine"
cagcagccatttgttgtccctgtggggagcccagaaaacccagcccggttctcccacctgcggggaagaaatgaagcaatgataatgaagacactcccatgccaagcccatactgccctgag

SEQ ID NO: 14244 - DNA, 122 bp, Homo sapiens
  misc_feature (61)..(62): /note="This region represents a CpG dinucleotide"
  misc_feature (61)..(61): /note="Nucleotide may be methylated to form 5-methylcytosine"
ttgtgtttttatttgatctttaataaagaatattaagactgagctgactgcctgctatgacgctctaaacacagacttacatttgagaggctgaagggaggaaatggcagccccgtggaaag

SEQ ID NO: 14245 - DNA, 122 bp, Homo sapiens
  misc_feature (61)..(62): /note="This region represents a CpG dinucleotide"
  misc_feature (61)..(61): /note="Nucleotide may be methylated to form 5-methylcytosine"
ccgcccgccctgcggtgtgtgccacggaggccgctgggtgggggcgtccaaatgtggaagcgttcctccagcatgcgtggatatcctgaggactcacggacaccgattccctcttccgggcc

SEQ ID NO: 14246 - DNA, 122 bp, Homo sapiens
  misc_feature (61)..(62): /note="This region represents a CpG dinucleotide"
  misc_feature (61)..(61): /note="Nucleotide may be methylated to form 5-methylcytosine"
cagggaagacttcctggggtctgtgggaaatgattcacatacacaatctcttacaatcctcgctcaacaaggtgggtacggttattatcctcatttacagacaaggacacaaagactcaagg

SEQ ID NO: 14247 - DNA, 122 bp, Homo sapiens
  misc_feature (61)..(62): /note="This region represents a CpG dinucleotide"
  misc_feature (61)..(61): /note="Nucleotide may be methylated to form 5-methylcytosine"
agcactcagagccaggctccactcactcaggagctcccaggcaggtgctggggcctggcgcggcacagcggctgtccgtgtgtccccagacaggcaaggcaggacaggggtcctggaaaggc

SEQ ID NO: 14248 - DNA, 122 bp, Homo sapiens
  misc_feature (61)..(62): /note="This region represents a CpG dinucleotide"
  misc_feature (61)..(61): /note="Nucleotide may be methylated to form 5-methylcytosine"
tggtaggccttgggctatgtacctgggatacgatcaatcatgacctaaagtcatggtccccgtcctcttgggactcacagtctagcaggagggacagacaggaatcagatcacaggcagcta

SEQ ID NO: 14249 - DNA, 122 bp, Homo sapiens
  misc_feature (61)..(62): /note="This region represents a CpG dinucleotide"
  misc_feature (61)..(61): /note="Nucleotide may be methylated to form 5-methylcytosine"
cattgccttagcatgtttggatgtttgtcactgatttcccccatcttactcatacctgaacgctttatctggatcttctctgttctatctagtataggtgacttattgactcaatttccata

SEQ ID NO: 14250 - DNA, 122 bp, Homo sapiens
  misc_feature (61)..(62): /note="This region represents a CpG dinucleotide"
  misc_feature (61)..(61): /note="Nucleotide may be methylated to form 5-methylcytosine"
ttttctcaagtttggaaactttctgttctgcaaccagccagcgaaaattttgcttttaaacggctcagctgattgagtcaggcccactggataatctctgtattataggatcaactgacatg

SEQ ID NO: 14251 - DNA, 122 bp, Homo sapiens
  misc_feature (61)..(62): /note="This region represents a CpG dinucleotide"
  misc_feature (61)..(61): /note="Nucleotide may be methylated to form 5-methylcytosine"
tcagtagtggcttgagaaaactaactgttgagtctgacaaagcaaagttctaagatagtgcgaagtataactagggctgctttgaaaaggaaacccagagagcaaggacaggtgtcgcttag

SEQ ID NO: 14252 - DNA, 122 bp, Homo sapiens
  misc_feature (61)..(62): /note="This region represents a CpG dinucleotide"
  misc_feature (61)..(61): /note="Nucleotide may be methylated to form 5-methylcytosine"
tttagagttcctttctaaacagtaaaggaaatttcttcatcactcttcccacatgggcagcggcttgtcctatgtgtaccctcttgctggcagggacaggcaatggttctgccctgtggatc

SEQ ID NO: 14253 - DNA, 122 bp, Homo sapiens
  misc_feature (61)..(62): /note="This region represents a CpG dinucleotide"
  misc_feature (61)..(61): /note="Nucleotide may be methylated to form 5-methylcytosine"
ctttgtggtttgctgtctcatagcatgggggtagtggttcagggctccaagtgcgagtgtcggagtgaaaaggtgatgtcaccttttataactgagccttgggatcacactgtctcatttcc

SEQ ID NO: 14254 - DNA, 122 bp, Homo sapiens
  misc_feature (61)..(62): /note="This region represents a CpG dinucleotide"
  misc_feature (61)..(61): /note="Nucleotide may be methylated to form 5-methylcytosine"
tgatcatactgattataaaattaagtacagtcattcactgcataacagtgtttgagccaacgatggatcatgtattcagcagtggttccataagattataatagagctaaaaaaattccagt

SEQ ID NO: 14255 - DNA, 122 bp, Homo sapiens
  misc_feature (61)..(62): /note="This region represents a CpG dinucleotide"
  misc_feature (61)..(61): /note="Nucleotide may be methylated to form 5-methylcytosine"
aatagagaaacaaggtaaataactgaaattgattgagaaaatgatgagggtgtactctcacgtgtccaaaaccagagctagccttggggaggattccagtgtttgcacactaccagagaatc

SEQ ID NO: 14256 - DNA, 122 bp, Homo sapiens
  misc_feature (61)..(62): /note="This region represents a CpG dinucleotide"
  misc_feature (61)..(61): /note="Nucleotide may be methylated to form 5-methylcytosine"
tgggtactcagggtgcgatgtgtacacagatctgaatgcagacgcacgtgcccatgagcacgcacgtccagagagacgcacgtctgcttatccacaaggtgcacgcgtgtctggatccgcac

SEQ ID NO: 14257 - DNA, 122 bp, Homo sapiens
  misc_feature (61)..(62): /note="This region represents a CpG dinucleotide"
  misc_feature (61)..(61): /note="Nucleotide may be methylated to form 5-methylcytosine"
tgagaaatggatgaaattccctttgctcagtctttttcttctcattgcagtggtgaataacgcaagatgtctcatgctaaccacggccctctcttgatattactaaatacttcctttcttct

SEQ ID NO: 14258 - DNA, 122 bp, Homo sapiens
  misc_feature (61)..(62): /note="This region represents a CpG dinucleotide"
  misc_feature (61)..(61): /note="Nucleotide may be methylated to form 5-methylcytosine"
tttcattccacctgctgacataacagtggaggaatcattttgttgcataagactctgtcacgtcagaggctgaagtgacagcaactaagggaagcaaatcttcccaaagcaggatgtggaga

SEQ ID NO: 14259 - DNA, 122 bp, Homo sapiens
  misc_feature (61)..(62): /note="This region represents a CpG dinucleotide"
  misc_feature (61)..(61): /note="Nucleotide may be methylated to form 5-methylcytosine"
gctttacatacagagcctcatgacctgtactcatagctggaggcatcagtcattgcactacgagaggaagtgggctttgaaataccttggggttgatgtcccaagaacacccttcttccgct

SEQ ID NO: 14260 - DNA, 122 bp, Homo sapiens
  misc_feature (61)..(62): /note="This region represents a CpG dinucleotide"
  misc_feature (61)..(61): /note="Nucleotide may be methylated to form 5-methylcytosine"
atagcatgtgtcatacatatattctctctcactcatacacacatactcgctcttcttgtccggcttttaaaaaggaaggcagccagaaggccaagcccagtgatttgagttgaaaaggctgt

SEQ ID NO: 14261 - DNA, 122 bp, Homo sapiens
  misc_feature (61)..(62): /note="This region represents a CpG dinucleotide"
  misc_feature (61)..(61): /note="Nucleotide may be methylated to form 5-methylcytosine"
gtgatgacaacagtgcccgcctctgcattaaatgtgatggtgtaggtaaagaacctgctccgtttctggcattggaagggtgcttagtcaatgctagctacacttgtatgataacagagttc

SEQ ID NO: 14262 - DNA, 122 bp, Homo sapiens
  misc_feature (61)..(62): /note="This region represents a CpG dinucleotide"
  misc_feature (61)..(61): /note="Nucleotide may be methylated to form 5-methylcytosine"
cctccgagctcctttgagtggtcaggctgggtgttgggggcctgggagtgaactgccacccggacagccagctacagggtgtgctcagaggcttaaggagacaaatgccaaaaactactggg

SEQ ID NO: 14263 - DNA, 122 bp, Homo sapiens
  misc_feature (61)..(62): /note="This region represents a CpG dinucleotide"
  misc_feature (61)..(61): /note="Nucleotide may be methylated to form 5-methylcytosine"
gatggtaaacttgacctgccgctggtactatccgattgccattttttattcccccttcgccgcccccccaggctgagccacgttgagtaaatgcatgtgcacggtcaggtcagaccccggga

SEQ ID NO: 14264 - DNA, 122 bp, Homo sapiens
  misc_feature (61)..(62): /note="This region represents a CpG dinucleotide"
  misc_feature (61)..(61): /note="Nucleotide may be methylated to form 5-methylcytosine"
atcatcacctacagttttattgggcagcgctgccctggtctttattttcccttgttggaacgctcttccacgctgctcccacaccatgtcccctatcaccattattatcctcatttcatctg

SEQ ID NO: 14265 - DNA, 122 bp, Homo sapiens
  misc_feature (61)..(62): /note="This region represents a CpG dinucleotide"
  misc_feature (61)..(61): /note="Nucleotide may be methylated to form 5-methylcytosine"
atgaggatattccccggtttgttttaaatctaaggaagaggaacaggagggaagtaatgacgtgtcagggacagcataacctctatgactaaggataaagagggaaaaccttcttgccctca

SEQ ID NO: 14266 - DNA, 122 bp, Homo sapiens
  misc_feature (61)..(62): /note="This region represents a CpG dinucleotide"
  misc_feature (61)..(61): /note="Nucleotide may be methylated to form 5-methylcytosine"
actaatgagtatgttcgaagagtagttgtgatcaatgacctctgtttacggggagcaagacgccaatcagaacaggcaacaacacagggaagctgagtgccaactactaggacatcactttg

SEQ ID NO: 14267 - DNA, 122 bp, Homo sapiens
  misc_feature (61)..(62): /note="This region represents a CpG dinucleotide"
  misc_feature (61)..(61): /note="Nucleotide may be methylated to form 5-methylcytosine"
cttttttttttttttttttgagacggagtctcactctgtcgccaggctggagtgcagtggcgcgatctcatgattatttgagggagccttccttggagctcagcacatgtaagggcagaccc

SEQ ID NO: 14268 - DNA, 122 bp, Homo sapiens
  misc_feature (61)..(62): /note="This region represents a CpG dinucleotide"
  misc_feature (61)..(61): /note="Nucleotide may be methylated to form 5-methylcytosine"
ttcagaagtgatggtgatctttgaggaagtgaatttatagcagtgattaacagctgtgggcgattttgcccccaggggacacatgtcaatgtcaggacacattttggttttcacaaatgaag

SEQ ID NO: 14269 - DNA, 122 bp, Homo sapiens
  misc_feature (61)..(62): /note="This region represents a CpG dinucleotide"
  misc_feature (61)..(61): /note="Nucleotide may be methylated to form 5-methylcytosine"
ccctgctagggtgcgtctgcatctggaaaagcagctctgccccagcaaggcctggggcagcgggatcctgggggcctggggcaggatgggtggggctggtgctgagggcatcttcctgtctc

SEQ ID NO: 14270 - DNA, 122 bp, Homo sapiens
  misc_feature (61)..(62): /note="This region represents a CpG dinucleotide"
  misc_feature (61)..(61): /note="Nucleotide may be methylated to form 5-methylcytosine"
cagtgacagacatcactaatcaatcttgacattctttcaggctgagtctgtcatagcctccgaatccttttcaatgaaatactgcagggagccaccacgatcaattggagttggtgcctgaa

SEQ ID NO: 14271 - DNA, 122 bp, Homo sapiens
  misc_feature (61)..(62): /note="This region represents a CpG dinucleotide"
  misc_feature (61)..(61): /note="Nucleotide may be methylated to form 5-methylcytosine"
attcagaccttattaggtgtattacatcaaaatccctgtcaccttttcactaccaccccccgcccccgccgacccagccccaaatcccctatccaaccccaaatccccgatccaacccccaa

SEQ ID NO: 14272 - DNA, 122 bp, Homo sapiens
  misc_feature (61)..(62): /note="This region represents a CpG dinucleotide"
  misc_feature (61)..(61): /note="Nucleotide may be methylated to form 5-methylcytosine"
ttggaataccagcccttggtgattttatttatcctattcctcatttccctatttactctacgtttcagccatatcaagttacatttccagacatccctgaacatattgtgcactctctcatg

SEQ ID NO: 14273 - DNA, 122 bp, Homo sapiens
  misc_feature (61)..(62): /note="This region represents a CpG dinucleotide"
  misc_feature (61)..(61): /note="Nucleotide may be methylated to form 5-methylcytosine"
ggcgaggttgcttggctggtacttacagagcccctgctgtaagcttttgatctgtctgctcgcctcttcgtcatgctgatagtcagtccagagcccagaaatggaagctgaggtctctcatc

SEQ ID NO: 14274 - DNA, 122 bp, Homo sapiens
  misc_feature (61)..(62): /note="This region represents a CpG dinucleotide"
  misc_feature (61)..(61): /note="Nucleotide may be methylated to form 5-methylcytosine"
cctgctccactattttctctccagttgctcaagccacagttcctagatgacctttgacaccgttctctcctacacacccttgcacatattcagagcttagtcacatctcattgtctacactg

SEQ ID NO: 14275 - DNA, 122 bp, Homo sapiens
  misc_feature (61)..(62): /note="This region represents a CpG dinucleotide"
  misc_feature (61)..(61): /note="Nucleotide may be methylated to form 5-methylcytosine"
acctgccctcttttctgtcacggtacatacaaggaaatacattccacaaaaccacatagtcgctgtcatttatcacaagtgtttccccaaattacaaagtcttaatacttctttgtctccta

SEQ ID NO: 14276 - DNA, 122 bp, Homo sapiens
  misc_feature (61)..(62): /note="This region represents a CpG dinucleotide"
  misc_feature (61)..(61): /note="Nucleotide may be methylated to form 5-methylcytosine"
gtccttgggccaggccctttattgtgtccaggacattatccaaacaggtttggcacagggcgtctcaatgagtgggcttagagcaagcagacacgagtttcagaaggtcatgctgtgactag

SEQ ID NO: 14277 - DNA, 122 bp, Homo sapiens
  misc_feature (61)..(62): /note="This region represents a CpG dinucleotide"
  misc_feature (61)..(61): /note="Nucleotide may be methylated to form 5-methylcytosine"
gtcacccccagctcactggggaatctaggccatgccagtggcaagctggccccagtcccccggcttgctggagtagcaggaaagggcaagaacaaaacccagaccccagctggttctggaaa

SEQ ID NO: 14278 - DNA, 122 bp, Homo sapiens
  misc_feature (61)..(62): /note="This region represents a CpG dinucleotide"
  misc_feature (61)..(61): /note="Nucleotide may be methylated to form 5-methylcytosine"
attattattcttcccttacgtccccccagcccccacctggggcagtcgctctcccggctgcgtcccttttcgtccatgtcctagcagagactacagagcagtacagaggctctcgctgaaac

SEQ ID NO: 14279 - DNA, 122 bp, Homo sapiens
  misc_feature (61)..(62): /note="This region represents a CpG dinucleotide"
  misc_feature (61)..(61): /note="Nucleotide may be methylated to form 5-methylcytosine"
tgtgttttgtgtttccttcctcttagcagcctaagagaaatgtgcagtgtagctttttgtcgacatgagctgcaaggtaatgacacttctgcttctttggtagttacatccttgtaataacc

SEQ ID NO: 14280 - DNA, 122 bp, Homo sapiens
  misc_feature (61)..(62): /note="This region represents a CpG dinucleotide"
  misc_feature (61)..(61): /note="Nucleotide may be methylated to form 5-methylcytosine"
gccgtgtgctgctgggcctgggtggcgcactacgggccttgtgctgctgggcgtgggtggcgtgcagcaggccgtgtgctgctgggcgtgggtggcgcgctatgggccgtgtgctgagggct

SEQ ID NO: 14281 - DNA, 122 bp, Homo sapiens
  misc_feature (61)..(62): /note="This region represents a CpG dinucleotide"
  misc_feature (61)..(61): /note="Nucleotide may be methylated to form 5-methylcytosine"
ggccacttctctccctgttcccttctctgccctccacaggtgagaacaagtgtccggggccgccccgtggggccccaggctgcccgccctgaaactgcctcgctgtgtgcccttgggcaacc

SEQ ID NO: 14282 - DNA, 122 bp, Homo sapiens
  misc_feature (61)..(62): /note="This region represents a CpG dinucleotide"
  misc_feature (61)..(61): /note="Nucleotide may be methylated to form 5-methylcytosine"
gactcatatggggagagaaaactgtccaaatgtccagggccttacacaactctacattttcgatcttggcaaatcctaatgattcacacttggcttaaaaatataagcacatagaagatttc

SEQ ID NO: 14283 - DNA, 122 bp, Homo sapiens
  misc_feature (61)..(62): /note="This region represents a CpG dinucleotide"
  misc_feature (61)..(61): /note="Nucleotide may be methylated to form 5-methylcytosine"
cagagagaagctgtgtcacttggcagtacagtaggccaggagaagattgtggtggccccacgtggctctgtggtatttatataggatcctgcagctgctgagtctctggtgcggagcagccc

SEQ ID NO: 14284 - DNA, 122 bp, Homo sapiens
  misc_feature (61)..(62): /note="This region represents a CpG dinucleotide"
  misc_feature (61)..(61): /note="Nucleotide may be methylated to form 5-methylcytosine"
attgcgtctggccctttatagatgttttctctagctgagacagccaattcgaataccctgcgctctccctagcttccttgtgcctctaggaactgcttctcccctgtttcgtgaccttcatc

SEQ ID NO: 14285 - DNA, 122 bp, Homo sapiens
  misc_feature (61)..(62): /note="This region represents a CpG dinucleotide"
  misc_feature (61)..(61): /note="Nucleotide may be methylated to form 5-methylcytosine"
acacttagctatgacacagctgcaggctaaaggcgtggtaagtggtcagtgaaaatctggcgaggccatagttgtcatgcctgaagttatctggacccaggaaatgcagggaagagtagctg

SEQ ID NO: 14286 - DNA, 122 bp, Homo sapiens
  misc_feature (61)..(62): /note="This region represents a CpG dinucleotide"
  misc_feature (61)..(61): /note="Nucleotide may be methylated to form 5-methylcytosine"
aggcggagcccccttggagtttggctccctcccagaagcagtcgaggggggtgaggatcacgcacggaaacagcttctcaatcatctgccagggataccccgggccacgtcagtcctgcccc

SEQ ID NO: 14287 - DNA, 122 bp, Homo sapiens
  misc_feature (61)..(62): /note="This region represents a CpG dinucleotide"
  misc_feature (61)..(61): /note="Nucleotide may be methylated to form 5-methylcytosine"
ggagtcgaggagcgtttttgtcattcataagccatggtgacaaatccttgacatcattcgcggttcctatcgatcagctccgtccgcggcaccagaggacaaatagaaatcatttgtctgtc

SEQ ID NO: 14288 - DNA, 122 bp, Homo sapiens
  misc_feature (61)..(62): /note="This region represents a CpG dinucleotide"
  misc_feature (61)..(61): /note="Nucleotide may be methylated to form 5-methylcytosine"
ggattacaggcgtagccaccacgcccagccctgttgttatatcattttctattctctgtgcgtatgaaataatccacagggggccaggcatggtggctcatgcctgtaatcccagcactttg

SEQ ID NO: 14289 - DNA, 122 bp, Homo sapiens
  misc_feature (61)..(62): /note="This region represents a CpG dinucleotide"
  misc_feature (61)..(61): /note="Nucleotide may be methylated to form 5-methylcytosine"
ctaatatgtcagagacactcagcaaacagtagctgcgagaatgattctttttcccagaaacgtttaaaggggatttgggcaggggcaggcaaaacatagctggctattgtccataaaacaaa

SEQ ID NO: 14290 - DNA, 122 bp, Homo sapiens
  misc_feature (61)..(62): /note="This region represents a CpG dinucleotide"
  misc_feature (61)..(61): /note="Nucleotide may be methylated to form 5-methylcytosine"
caagctgcagctgtgactgcacagcctggtgatgctggctgcaaagacttgacacagatgcgtggaaaatcaaagaagtcacttgtgatacgaacctcgtgatgctggctgcaaagactcga

SEQ ID NO: 14291 - DNA, 122 bp, Homo sapiens
  misc_feature (61)..(62): /note="This region represents a CpG dinucleotide"
  misc_feature (61)..(61): /note="Nucleotide may be methylated to form 5-methylcytosine"
gttgtagctgagatgaatcactttcacagtaaccggatctatgattacaacagtgtcatccgcctgtacctggagcagcaagtgcaattttacgaaacggtgagtgggcgtccacgtgcctt

SEQ ID NO: 14292 - DNA, 122 bp, Homo sapiens
  misc_feature (61)..(62): /note="This region represents a CpG dinucleotide"
  misc_feature (61)..(61): /note="Nucleotide may be methylated to form 5-methylcytosine"
cggccctgcatcttctgctgtgggccagcctctccaaattagtcactgcttcagagcttgcgtcccatccagggcagtatggcaacttctgggtgtgtctcccagctgcctctgtaacttca

SEQ ID NO: 14293 - DNA, 122 bp, Homo sapiens
  misc_feature (61)..(62): /note="This region represents a CpG dinucleotide"
  misc_feature (61)..(61): /note="Nucleotide may be methylated to form 5-methylcytosine"
caacatggcctgctgtatgtcacagagaggactgtattatatttgtaagagtattagtgacgtgtgagaggctatacataatgcctgtgaacaaacaaaagtcaccttggttattgactcat

SEQ ID NO: 14294 - DNA, 122 bp, Homo sapiens
  misc_feature (61)..(62): /note="This region represents a CpG dinucleotide"
  misc_feature (61)..(61): /note="Nucleotide may be methylated to form 5-methylcytosine"
agaactgctgtgaggcactcctcctagtaacagaccacagggaaggccacgcccaggatgcgcctgcaggccttgcagaggccaccactgaccagagagactggcaactttgatcaaagaac

SEQ ID NO: 14295 - DNA, 122 bp, Homo sapiens
  misc_feature (61)..(62): /note="This region represents a CpG dinucleotide"
  misc_feature (61)..(61): /note="Nucleotide may be methylated to form 5-methylcytosine"
acagggaggtgagaggagaggggaccacggaaacaaggaagtgaaaagagctggaacctacgacagttaagaatttacaatttcagagacaggcagtcttgggggaaaaggcctgtattaaa

SEQ ID NO: 14296 - DNA, 122 bp, Homo sapiens
  misc_feature (61)..(62): /note="This region represents a CpG dinucleotide"
  misc_feature (61)..(61): /note="Nucleotide may be methylated to form 5-methylcytosine"
acgataagctgtgtggactcagaggtcctgggtgtgtaataacacaagatttcctccccacggcacacagctgcttgtgctcaagtcctgccagttgacagaaagctcccttgtcttgtgac

SEQ ID NO: 14297 - DNA, 122 bp, Homo sapiens
  misc_feature (61)..(62): /note="This region represents a CpG dinucleotide"
  misc_feature (61)..(61): /note="Nucleotide may be methylated to form 5-methylcytosine"
ttgtatctctacttttaagtggaatttcccaaagtcaattaattaccaagcccttttctccgtgtctagacatctccctaacagtgggagcaagcagatatgagtttagaggtacactttgg

SEQ ID NO: 14298 - DNA, 122 bp, Homo sapiens
  misc_feature (61)..(62): /note="This region represents a CpG dinucleotide"
  misc_feature (61)..(61): /note="Nucleotide may be methylated to form 5-methylcytosine"
tttatataatcacacctacagaacacaaggtgaagtggatatttaacaatttcccagttacgtaagtattcacaggtaaactggctaatgcgagacagaagagctttagtttgtactgaatt

SEQ ID NO: 14299 - DNA, 122 bp, Homo sapiens
  misc_feature (61)..(62): /note="This region represents a CpG dinucleotide"
  misc_feature (61)..(61): /note="Nucleotide may be methylated to form 5-methylcytosine"
acggaacgggaactgcagatccaggcactccattatggcaacccagcaagcagttcagcacggacttaatgagctcttggaaggaaacaggaagtctataaagtaatttaaataacttccag

SEQ ID NO: 14300 - DNA, 122 bp, Homo sapiens
  misc_feature (61)..(62): /note="This region represents a CpG dinucleotide"
  misc_feature (61)..(61): /note="Nucleotide may be methylated to form 5-methylcytosine"
ctgctctaataactagtacattgactctaggcttagattattcaccactgaataaataaacgtatttattcagcagtggggaacttacagcaatgatggggacagatacagtccctgatgtc

SEQ ID NO: 14301 - DNA, 122 bp, Homo sapiens
  misc_feature (61)..(62): /note="This region represents a CpG dinucleotide"
  misc_feature (61)..(61): /note="Nucleotide may be methylated to form 5-methylcytosine"
gccttgggcacattaccttatgtttttgtttgtgcactcttatcggtgatatcaggccaacggcacataccttctgagttggggtgattggtaagctgtctaaacttcccagttggtaggtg

SEQ ID NO: 14302 - DNA, 122 bp, Homo sapiens
  misc_feature (61)..(62): /note="This region represents a CpG dinucleotide"
  misc_feature (61)..(61): /note="Nucleotide may be methylated to form 5-methylcytosine"
agaggcaagatgagtaagtagctgtggattcatttagtttctgcatccctccagcatgaccgtgagtagcacagccgtggtgccagcctcctgagtttaccatctcatcagaggctagctac

SEQ ID NO: 14303 - DNA, 122 bp, Homo sapiens
  misc_feature (61)..(62): /note="This region represents a CpG dinucleotide"
  misc_feature (61)..(61): /note="Nucleotide may be methylated to form 5-methylcytosine"
gatcaaaggagccagcagctcctgaatttcacagctgccaaactcctgccacagtctcagcgccctaaatcccagagctaagggactgtcagtgccaggtttccaggtttccagatgatctg

SEQ ID NO: 14304 - DNA, 122 bp, Homo sapiens
  misc_feature (61)..(62): /note="This region represents a CpG dinucleotide"
  misc_feature (61)..(61): /note="Nucleotide may be methylated to form 5-methylcytosine"
cgattcgcctcagttgctgctgtaataaaagtctactttttgctaaaagcgtcgtgtgttcgcgcctttcccgccagggggagcgggcccggggcggaggcggggcccaggtgggaggggga

SEQ ID NO: 14305 - DNA, 122 bp, Homo sapiens
  misc_feature (61)..(62): /note="This region represents a CpG dinucleotide"
  misc_feature (61)..(61): /note="Nucleotide may be methylated to form 5-methylcytosine"
cacgctgcttactcaggaacccttcacaatctggaactggaaagagatttctagcccccacgaggaacaaagcttgacgatgaggaaatgacaacctcccttgtttgctaactattctcagg

SEQ ID NO: 14306 - DNA, 122 bp, Homo sapiens
  misc_feature (61)..(62): /note="This region represents a CpG dinucleotide"
  misc_feature (61)..(61): /note="Nucleotide may be methylated to form 5-methylcytosine"
agccccagtgtcctcactgaaaaacaggaaaggtgataacagtgctttctctgttgtcatcggaggattaaataaattactatatatgtaaggtgcctaggcaagtgtcagtcgtgtactac

SEQ ID NO: 14307 - DNA, 122 bp, Homo sapiens
  misc_feature (61)..(62): /note="This region represents a CpG dinucleotide"
  misc_feature (61)..(61): /note="Nucleotide may be methylated to form 5-methylcytosine"
tgcatttgggagacacagaaaaccagtgttgattcatgctcgcatgatctaaagggaaggcgatgtgtcacaggcagcttggatggcttcacaggttacttgcacatttccaggcaaagtgt

SEQ ID NO: 14308 - DNA, 122 bp, Homo sapiens
  misc_feature (61)..(62): /note="This region represents a CpG dinucleotide"
  misc_feature (61)..(61): /note="Nucleotide may be methylated to form 5-methylcytosine"
atacatctaggacacaaactgaaacctgctcatctgactcatcacagagcctgatgagtacgtaagaggtacataagtctttgttaaattaatttgatgagccataacaaaatcaataaagt

SEQ ID NO: 14309 - DNA, 122 bp, Homo sapiens
  misc_feature (61)..(62): /note="This region represents a CpG dinucleotide"
  misc_feature (61)..(61): /note="Nucleotide may be methylated to form 5-methylcytosine"
acatctcgggaaggtttgaagcactccctcgtgggaactctcttgccgctgcttttggggcgattccagcctcgggttcgaaagaacaaagtaactgcacattttgtgcgcgtatacttgca

SEQ ID NO: 14310 - DNA, 122 bp, Homo sapiens
  misc_feature (61)..(62): /note="This region represents a CpG dinucleotide"
  misc_feature (61)..(61): /note="Nucleotide may be methylated to form 5-methylcytosine"
tctgcactcactataggctgggagctacactagggcctggggacatgaagacaggcgacacggtccctgggctcaagatgccagacagatgtgcaaacaagtgaaatctgatgtgatatgtg

SEQ ID NO: 14311 - DNA, 122 bp, Homo sapiens
  misc_feature (61)..(62): /note="This region represents a CpG dinucleotide"
  misc_feature (61)..(61): /note="Nucleotide may be methylated to form 5-methylcytosine"
tggacaaatagatcaaactacctcaaaactttacggtgacaatcaagccaaggtaaaacacgctaaaatcaccacctgtgcacccacctcttcctatttttccgcgggtgagtgccagagga

SEQ ID NO: 14312 - DNA, 122 bp, Homo sapiens
  misc_feature (61)..(62): /note="This region represents a CpG dinucleotide"
  misc_feature (61)..(61): /note="Nucleotide may be methylated to form 5-methylcytosine"
gcagcttgttctctgccctctacaaggatctgggatttatttagcctgtttccctggcagcgctggttacagtggcagcatctgcttccccaggaggctgagtgagtcacagccacctacgc

SEQ ID NO: 14313 - DNA, 122 bp, Homo sapiens
  misc_feature (61)..(62): /note="This region represents a CpG dinucleotide"
  misc_feature (61)..(61): /note="Nucleotide may be methylated to form 5-methylcytosine"
tggaatcagcatggtgacctccctatgcctatgctgagctggtttattgagtatgagctacgcggcaggccccacaacccagctgcctcactaagagagaattaaggagctatcctgaaggt

SEQ ID NO: 14314 - DNA, 122 bp, Homo sapiens
  misc_feature (61)..(62): /note="This region represents a CpG dinucleotide"
  misc_feature (61)..(61): /note="Nucleotide may be methylated to form 5-methylcytosine"
ctctgtgtgcccacctttcatggaagcagggcatgtacagccgtgtggcggcagcaacagcgtaagatggttccgacaggctccagagcacaggagacgggcctggctctgggccgcatgcg

SEQ ID NO: 14315 - DNA, 122 bp, Homo sapiens
  misc_feature (61)..(62): /note="This region represents a CpG dinucleotide"
  misc_feature (61)..(61): /note="Nucleotide may be methylated to form 5-methylcytosine"
caggaggatctaaagcaacgcagcctgcccacatgcctttcttaatcctgtgcaattatacgcaccctgggtgatgacactcgcagaggttattcttaaggcaagattactttcctcaccct

SEQ ID NO: 14316 - DNA, 122 bp, Homo sapiens
  misc_feature (61)..(62): /note="This region represents a CpG dinucleotide"
  misc_feature (61)..(61): /note="Nucleotide may be methylated to form 5-methylcytosine"
gcacacagcatgtcgtccttgatgagccgctcaaaccgctcagtgtggttggaaggaaagcggcggcgacaggtctggttacagaggacgttgctcctgaccttcaccgtcgcctcccacaa

SEQ ID NO: 14317 - DNA, 122 bp, Homo sapiens
  misc_feature (61)..(62): /note="This region represents a CpG dinucleotide"
  misc_feature (61)..(61): /note="Nucleotide may be methylated to form 5-methylcytosine"
aatcggttttaacaagctctccgagtgatattgacgcatgttcaagtttaggaaccaccacgctgtaaagtatagcacttcatgggcttataatgagcacttactaattcctacagtaagac

SEQ ID NO: 14318 - DNA, 122 bp, Homo sapiens
  misc_feature (61)..(62): /note="This region represents a CpG dinucleotide"
  misc_feature (61)..(61): /note="Nucleotide may be methylated to form 5-methylcytosine"
cctttttatcagaggatgtgttgaagtgcagccagtatgcaatcacttgactgtccccagcgtcatcaattataaagagcaagggggaagctaggaaatgtgaatctgaggcttggcagcag

SEQ ID NO: 14319 - DNA, 122 bp, Homo sapiens
  misc_feature (61)..(62): /note="This region represents a CpG dinucleotide"
  misc_feature (61)..(61): /note="Nucleotide may be methylated to form 5-methylcytosine"
aatgcctaggcaaatgtcagggtttatttgcaccccagttttatgttcagcctgatgctccgtgtattcaatgtctggagtgttgtggaatgtttgcaccccagacgtttgtgatgcattct

SEQ ID NO: 14320 - DNA, 122 bp, Homo sapiens
  misc_feature (61)..(62): /note="This region represents a CpG dinucleotide"
  misc_feature (61)..(61): /note="Nucleotide may be methylated to form 5-methylcytosine"
caattgtccattcttcctcaaatctaagcatacagacagacggtttgcactgggtgtttgcgtcttcatttccgaaagcttccatgtcacataagaatttgattacatagatttgttgtttt

SEQ ID NO: 14321 - DNA, 122 bp, Homo sapiens
  misc_feature (61)..(62): /note="This region represents a CpG dinucleotide"
  misc_feature (61)..(61): /note="Nucleotide may be methylated to form 5-methylcytosine"
ccatcccagggatgtaaaagaactcaacagttgctcagaataccccttttaccatctcaacgacatgggcaatcaaggactgccttgcttcctgccgggttcctgagtgaatcagtgggcat

SEQ ID NO: 14322 - DNA, 122 bp, Homo sapiens
  misc_feature (61)..(62): /note="This region represents a CpG dinucleotide"
  misc_feature (61)..(61): /note="Nucleotide may be methylated to form 5-methylcytosine"
tttgaggttacagcatggaaggaaagagctgagcttcaaaggccgcagaagaagaacaggcggagttaacaggaaaaaccacagtcaggccctctgggagaggctggggttgcatggagggc

SEQ ID NO: 14323 - DNA, 122 bp, Homo sapiens
  misc_feature (61)..(62): /note="This region represents a CpG dinucleotide"
  misc_feature (61)..(61): /note="Nucleotide may be methylated to form 5-methylcytosine"
agagcagaggctccaggttcaaatccatcctggctttactatttagtagctgagaggcctcgtgtaagttacttaaccactctgttcttcagtttccttagctgtaaactgagggtggcaat

SEQ ID NO: 14324 - DNA, 122 bp, Homo sapiens
  misc_feature (61)..(62): /note="This region represents a CpG dinucleotide"
  misc_feature (61)..(61): /note="Nucleotide may be methylated to form 5-methylcytosine"
gcccctgggcccgcggggccaggccggggagggacggggaggggacccgagcccaccgcgcgccctccggggactccccacgcacagggcaggtgctagccaggcgcccacgggagacgccc

SEQ ID NO: 14325 - DNA, 122 bp, Homo sapiens
  misc_feature (61)..(62): /note="This region represents a CpG dinucleotide"
  misc_feature (61)..(61): /note="Nucleotide may be methylated to form 5-methylcytosine"
ggctaagatctgctcaaagctaacatgtaaggtctcagtttctttcactacaaaatgagacggctgaattaagttatctctaaggtccacttcaactgaaaaaaacaaaaacaaaaaaacct

SEQ ID NO: 14326 - DNA, 122 bp, Homo sapiens
  misc_feature (61)..(62): /note="This region represents a CpG dinucleotide"
  misc_feature (61)..(61): /note="Nucleotide may be methylated to form 5-methylcytosine"
tttatgagacacttagggcaaaaaggcaatcatcctcaaaaaagaaactgacaactgcagcggctacctgcttttgtaagtaaagttttattggcaccagggccaggattaaagggaggcaa

SEQ ID NO: 14327 - DNA, 122 bp, Homo sapiens
  misc_feature (61)..(62): /note="This region represents a CpG dinucleotide"
  misc_feature (61)..(61): /note="Nucleotide may be methylated to form 5-methylcytosine"
agtctgatctggggaggtggcccaggctttgtctttggtttccctcctcagctcttgtcacggacccctactgacctcaccactaatgggtctacagtatatagaaggagtcttcagtgtgg

SEQ ID NO: 14328 - DNA, 122 bp, Homo sapiens
  misc_feature (61)..(62): /note="This region represents a CpG dinucleotide"
  misc_feature (61)..(61): /note="Nucleotide may be methylated to form 5-methylcytosine"
ttcccagcccttctcgtattcctcccaaatattccgggaggtggtcctagggggctgactcgtgtgcttcccaagttcatcttctgtggcaccgggtgttctccctggctttagtgcacagc

SEQ ID NO: 14329 - DNA, 122 bp, Homo sapiens
  misc_feature (61)..(62): /note="This region represents a CpG dinucleotide"
  misc_feature (61)..(61): /note="Nucleotide may be methylated to form 5-methylcytosine"
aatgccagatactgagaaaatggagtgcatgggaggtgtgggatttgcagtttaggctctcgtcatcaaagcgatgtgatccctgggatgaggcatggggttaacaacaaggcacaggagat

SEQ ID NO: 14330 - DNA, 122 bp, Homo sapiens
  misc_feature (61)..(62): /note="This region represents a CpG dinucleotide"
  misc_feature (61)..(61): /note="Nucleotide may be methylated to form 5-methylcytosine"
acaaaggcgtttgttaacagctccatctcctttttcaaagctcagttttcagtctggcaacgttacaaagctcaagaaaagaagtgttgttagcagatgccaaccacttgtcagaggaaaaa

SEQ ID NO: 14331 - DNA, 122 bp, Homo sapiens
  misc_feature (61)..(62): /note="This region represents a CpG dinucleotide"
  misc_feature (61)..(61): /note="Nucleotide may be methylated to form 5-methylcytosine"
aacaagtagttccactcctaggtatgtacacagatatgcacacaggaatgtattcatatacgtccacacaaaacttgtccatgaatgttcacagcagcagcattcataaaagacaaaatgta

SEQ ID NO: 14332 - DNA, 122 bp, Homo sapiens
  misc_feature (61)..(62): /note="This region represents a CpG dinucleotide"
  misc_feature (61)..(61): /note="Nucleotide may be methylated to form 5-methylcytosine"
ctggggctgactcctggggccaaggtggagacccctggtcttcagggggccctgccaggacgccccgcattcatgttgggcggggcctgccacctgctatcagatctcgggtggggctgcca

SEQ ID NO: 14333 - DNA, 122 bp, Homo sapiens
  misc_feature (61)..(62): /note="This region represents a CpG dinucleotide"
  misc_feature (61)..(61): /note="Nucleotide may be methylated to form 5-methylcytosine"
gggggcttagtgactgaggagctctgaggtgcggggcgtgggaggacctgtagccggcttcggctgaagggcctgggagagcagggtgcagaatgttctggcacctgtccagggtactctgt

SEQ ID NO: 14334 - DNA, 122 bp, Homo sapiens
  misc_feature (61)..(62): /note="This region represents a CpG dinucleotide"
  misc_feature (61)..(61): /note="Nucleotide may be methylated to form 5-methylcytosine"
ggctctcagtattttaatctgcaaaacagggatgaccggtaaggtgatctctaagaggaccgtacagctcccaaatgctttaatcctgctagatcctcagaatacttgagtatgaaatcttc

SEQ ID NO: 14335 - DNA, 122 bp, Homo sapiens
  misc_feature (61)..(62): /note="This region represents a CpG dinucleotide"
  misc_feature (61)..(61): /note="Nucleotide may be methylated to form 5-methylcytosine"
atgctttttcaccattgagtatgatgttagctatggacttatcttttgtggtttgtattacgttaagttccttctatgcctaatttgttgagagttttttttggtcacgaaaggtaccgaat

SEQ ID NO: 14336 - DNA, 122 bp, Homo sapiens
  misc_feature (61)..(62): /note="This region represents a CpG dinucleotide"
  misc_feature (61)..(61): /note="Nucleotide may be methylated to form 5-methylcytosine"
ggcagaggaatatctaattgtgagtgtgagtgcgtgtgtgactgtgagtgtgagccagcccgtcagtgtgaatgtttgagagagcctctctgtatgtgcctgggggagggtgtgaggtgtgg

SEQ ID NO: 14337 - DNA, 122 bp, Homo sapiens
  misc_feature (61)..(62): /note="This region represents a CpG dinucleotide"
  misc_feature (61)..(61): /note="Nucleotide may be methylated to form 5-methylcytosine"
tacgagggtttggtgtacgaccaaggttaagtcaacctgcttgtttcactgcctggtcatcgtgtttgggttcatgtcagggatataagccaagtctgtgcaatcagaacaatgaggcacaa

SEQ ID NO: 14338 - DNA, 122 bp, Homo sapiens
  misc_feature (61)..(62): /note="This region represents a CpG dinucleotide"
  misc_feature (61)..(61): /note="Nucleotide may be methylated to form 5-methylcytosine"
aatgttaaatacaacagttatggcttggctctgatggcaatgaaaagaaagctgtataaacgatgtacacttgtggacaagaacagataggaatgtagaaaccttaaaaatggtttgatctg

SEQ ID NO: 14339 - DNA, 122 bp, Homo sapiens
  misc_feature (61)..(62): /note="This region represents a CpG dinucleotide"
  misc_feature (61)..(61): /note="Nucleotide may be methylated to form 5-methylcytosine"
gtgccgcgcatgcacatttcaaatacaatcttccagcttgctgcctgttctcacacctcccggttacttctcctcttcccagggacccagacggggagagggtgctgggcgccggcaagcca

SEQ ID NO: 14340 - DNA, 122 bp, Homo sapiens
  misc_feature (61)..(62): /note="This region represents a CpG dinucleotide"
  misc_feature (61)..(61): /note="Nucleotide may be methylated to form 5-methylcytosine"
cccgcctcggctggggccgcgggcggcccggagctataaaaggcctgggtggggcgggcgcggcggcaggacagccgagttcaggtgagcggttgctcgtcgtcggggcggccggcagcggc

SEQ ID NO: 14341 - DNA, 122 bp, Homo sapiens
  misc_feature (61)..(62): /note="This region represents a CpG dinucleotide"
  misc_feature (61)..(61): /note="Nucleotide may be methylated to form 5-methylcytosine"
tactggatatagagggttgaaaataaatctgcacttaaaaaaacactcctcctataaaggcgtgggtttgcattctttctcctgaaactgggcaggtgttttcactatatttcccaacagtg

SEQ ID NO: 14342 - DNA, 122 bp, Homo sapiens
  misc_feature (61)..(62): /note="This region represents a CpG dinucleotide"
  misc_feature (61)..(61): /note="Nucleotide may be methylated to form 5-methylcytosine"
agcccaccaggcacctgcatcacagcatcgcctgggtcatagcctgagtttgagaaccatcgccctgcatggcctgaccagccgaggctagtggcagctctgtgcaacgtgtctacttcctc

SEQ ID NO: 14343 - DNA, 122 bp, Homo sapiens
  misc_feature (61)..(62): /note="This region represents a CpG dinucleotide"
  misc_feature (61)..(61): /note="Nucleotide may be methylated to form 5-methylcytosine"
gacaagccagctctctgtagaacatgctggactccaagttccctgatcaggctgtggtcacgcaggcctttgtacctttgctctagcttctgtctgggtttggaatgtactctcccctcctt

SEQ ID NO: 14344 - DNA, 122 bp, Homo sapiens
  misc_feature (61)..(62): /note="This region represents a CpG dinucleotide"
  misc_feature (61)..(61): /note="Nucleotide may be methylated to form 5-methylcytosine"
cgttcaggcagaagttataccactgttggctgtgagttcagtgttaatgagtcaacaaaacgacacatgcagaaaaaggaagaggaaatttgccaatctgaacatgagttcactcaagtaag

SEQ ID NO: 14345 - DNA, 122 bp, Homo sapiens
  misc_feature (61)..(62): /note="This region represents a CpG dinucleotide"
  misc_feature (61)..(61): /note="Nucleotide may be methylated to form 5-methylcytosine"
cccagtgcagtgtaaatattcacacatccaggcacaaccccaccccaccccccacatgtacgcataaaatatgaatctgtctgtagtgaggaagcacagtacagtgttcattgctgtggatt

SEQ ID NO: 14346 - DNA, 122 bp, Homo sapiens
  misc_feature (61)..(62): /note="This region represents a CpG dinucleotide"
  misc_feature (61)..(61): /note="Nucleotide may be methylated to form 5-methylcytosine"
gtaactttgggttcagaagtctatggcctgctggtgctcccaaatctctcatagtgcttgcgttctggcctgtatgattatggcttcctcaccctactggcagagggcacagaggaggcctt

SEQ ID NO: 14347 - DNA, 122 bp, Homo sapiens
  misc_feature (61)..(62): /note="This region represents a CpG dinucleotide"
  misc_feature (61)..(61): /note="Nucleotide may be methylated to form 5-methylcytosine"
tcattatcgttatcggatctgattgttgcaataggctagtgcggagtcacctgaactatccgagcaaaataagaataccgcagatgccccaccatcagccagaagcgggtagagccgtcacg

SEQ ID NO: 14348 - DNA, 122 bp, Homo sapiens
  misc_feature (61)..(62): /note="This region represents a CpG dinucleotide"
  misc_feature (61)..(61): /note="Nucleotide may be methylated to form 5-methylcytosine"
ctcccaggttcaagcgattctcctgcctcagcctcccgagtagctgggactacaggcgagcgccagcacgccaagctaattttattttcagtagagatgggggtttcaccatgttggccagg

SEQ ID NO: 14349 - DNA, 122 bp, Homo sapiens
  misc_feature (61)..(62): /note="This region represents a CpG dinucleotide"
  misc_feature (61)..(61): /note="Nucleotide may be methylated to form 5-methylcytosine"
tgactgtatttggagataaggtatttagaaggtaattaaggttaaatgaggttgtaaaggcggagtctaatccaacaggattagtggccttgtaagacgatgaagaaatctctctctctctt

SEQ ID NO: 14350 - DNA, 122 bp, Homo sapiens
  misc_feature (61)..(62): /note="This region represents a CpG dinucleotide"
  misc_feature (61)..(61): /note="Nucleotide may be methylated to form 5-methylcytosine"
tcctgaagttgacctggtgattcatggttctcctcctcaggatgttgagtctatatccatcgttctggacgcacaggtagagctggacagacagggatttgtatatgtttttatcaaccaag

SEQ ID NO: 14351 - DNA, 122 bp, Homo sapiens
  misc_feature (61)..(62): /note="This region represents a CpG dinucleotide"
  misc_feature (61)..(61): /note="Nucleotide may be methylated to form 5-methylcytosine"
tgcatagtccatgtaagtagaagttagttatcaatgaagtgtgtgatgcttcctgccctgcgattggtagatttctatttggttcaaggattgggtaacttttcaagacctttcctgtttgt

SEQ ID NO: 14352 - DNA, 122 bp, Homo sapiens
  misc_feature (61)..(62): /note="This region represents a CpG dinucleotide"
  misc_feature (61)..(61): /note="Nucleotide may be methylated to form 5-methylcytosine"
aatgcactgactgaagaaacagcacacttactgctggcaagactctgaaataatgggtatcgtggcatggtttgggaaagttgcttgccatggaatgtgtggttcaggcaaatcgtttatca

SEQ ID NO: 14353 - DNA, 122 bp, Homo sapiens
  misc_feature (61)..(62): /note="This region represents a CpG dinucleotide"
  misc_feature (61)..(61): /note="Nucleotide may be methylated to form 5-methylcytosine"
ggattaaataaaacagcgtatttaaaattcctgaagttacttagttcctagcacaccccacgtccttatcctgtgtgtatcttttatatttaattatttgggttctgctacctgtgtttttt

SEQ ID NO: 14354 - DNA, 122 bp, Homo sapiens
  misc_feature (61)..(62): /note="This region represents a CpG dinucleotide"
  misc_feature (61)..(61): /note="Nucleotide may be methylated to form 5-methylcytosine"
ccccacctcctcacacacacccctcgcgtgtacacacacacacacacacacacacgcacacgcaccccttccgccaatgggagccggcgggtgtccctgcgcctatccccggagagatctaa

SEQ ID NO: 14355 - DNA, 122 bp, Homo sapiens
  misc_feature (61)..(62): /note="This region represents a CpG dinucleotide"
  misc_feature (61)..(61): /note="Nucleotide may be methylated to form 5-methylcytosine"
cagtgaatggaatgttcagtcaatgttgggcactgctgcacagagcaatgacatcactaccgtcatcatcatcatcatgatctctgaagcattcttaaatgccgaaagatgtactcacaaaa

SEQ ID NO: 14356 - DNA, 122 bp, Homo sapiens
  misc_feature (61)..(62): /note="This region represents a CpG dinucleotide"
  misc_feature (61)..(61): /note="Nucleotide may be methylated to form 5-methylcytosine"
cccacacgtgaggagacatccctttttaagtccatcctgtgaccaaagcttggaatgcagcgctggcttttggaaataagcaaaggcagattaaggaagaaagatcctttactgtgagttct

SEQ ID NO: 14357 - DNA, 122 bp, Homo sapiens
  misc_feature (61)..(62): /note="This region represents a CpG dinucleotide"
  misc_feature (61)..(61): /note="Nucleotide may be methylated to form 5-methylcytosine"
aggacctcctttctgtggactgggtttttgcctcctcaccaagagactgggctccctgggcgagcagaggctgctgggtaagagagatttagttctgtttcaacaagctgtggggccttcga

SEQ ID NO: 14358 - DNA, 122 bp, Homo sapiens
  misc_feature (61)..(62): /note="This region represents a CpG dinucleotide"
  misc_feature (61)..(61): /note="Nucleotide may be methylated to form 5-methylcytosine"
actgaatgatttatgtaaagagaacagctcagctgtgtaactagaaactaggtcaagaaacgtaagattgctaggactccaggagctcctgttgtgtccacttgaaatcattgtcccctcac

SEQ ID NO: 14359 - DNA, 122 bp, Homo sapiens
  misc_feature (61)..(62): /note="This region represents a CpG dinucleotide"
  misc_feature (61)..(61): /note="Nucleotide may be methylated to form 5-methylcytosine"
ctgctgctgaggaggccaacttgcggttttccattttcacggtgaaccgcattgtctcagcgttcgctggtattcacaaaatcagaaagaaaggaaggtggtggtgggagggcgcacttttc

SEQ ID NO: 14360 - DNA, 122 bp, Homo sapiens
  misc_feature (61)..(62): /note="This region represents a CpG dinucleotide"
  misc_feature (61)..(61): /note="Nucleotide may be methylated to form 5-methylcytosine"
ggttgtgattgtggctggggctgtggttgtggttggggctgcagcttaggcgggggtgctcgggtgaagaggggggacccagggagcatggcgcggctggccccgtgctcccagaaggcgtt

SEQ ID NO: 14361 - DNA, 122 bp, Homo sapiens
  misc_feature (61)..(62): /note="This region represents a CpG dinucleotide"
  misc_feature (61)..(61): /note="Nucleotide may be methylated to form 5-methylcytosine"
aaattaacctgttgatgaacagccatgtatccagaaacagaatgtatcacttaaccacagcgaacagtgttttgtttgcaataagatggttgagtgctttttggcagtgtttacctgagtgt

SEQ ID NO: 14362 - DNA, 122 bp, Homo sapiens
  misc_feature (61)..(62): /note="This region represents a CpG dinucleotide"
  misc_feature (61)..(61): /note="Nucleotide may be methylated to form 5-methylcytosine"
tatttttaaagcctttgattatttttctaaaaatgtttttgcatgcttatagcctgatgccgtaaatgttttatgagtttaatgtacagcacctctaggtgctatttaaaattgttttttct

SEQ ID NO: 14363 - DNA, 122 bp, Homo sapiens
  misc_feature (61)..(62): /note="This region represents a CpG dinucleotide"
  misc_feature (61)..(61): /note="Nucleotide may be methylated to form 5-methylcytosine"
aaggagatgccactaattacaaagataaatccaacagcgcccctctggagctctgattttcgtccatcaccatgctcagaatcgcaggtctgtatgcacagaaaaacagctcagccattccc

SEQ ID NO: 14364 - DNA, 122 bp, Homo sapiens
  misc_feature (61)..(62): /note="This region represents a CpG dinucleotide"
  misc_feature (61)..(61): /note="Nucleotide may be methylated to form 5-methylcytosine"
atggtcctgaggcagtttctggaaaacccattattgaagccataggctgtggtctaagtacgcatagccagtgggataatgttatattgcagagttatttgagtagttcaatttaaggaagg

SEQ ID NO: 14365 - DNA, 122 bp, Homo sapiens
  misc_feature (61)..(62): /note="This region represents a CpG dinucleotide"
  misc_feature (61)..(61): /note="Nucleotide may be methylated to form 5-methylcytosine"
ccgcgtcgccaagggcagtcattggcggccgcagacggaggaggacggcgttggccgggacgcggacagcgcagggcagcggcgggggcgcgggccggggccacgggcgcaggggccggagc

SEQ ID NO: 14366 - DNA, 122 bp, Homo sapiens
  misc_feature (61)..(62): /note="This region represents a CpG dinucleotide"
  misc_feature (61)..(61): /note="Nucleotide may be methylated to form 5-methylcytosine"
gataatgactcagttaatttcttttgaggtttcagttcatcaattcagaagtacaacttccgggggtttgggcacaagtaaaagcaaggctgtgcaccctctctgtttcatttcacagtctt

SEQ ID NO: 14367 - DNA, 122 bp, Homo sapiens
  misc_feature (61)..(62): /note="This region represents a CpG dinucleotide"
  misc_feature (61)..(61): /note="Nucleotide may be methylated to form 5-methylcytosine"
cagcctcagggaggaggagaaagcctgattgcttcaggagagcatgtttcccaacggtagcgttggtttgcccagtgctcacagctagctctgaaggatgcatagtccatacctgactgccc

SEQ ID NO: 14368 - DNA, 122 bp, Homo sapiens
  misc_feature (61)..(62): /note="This region represents a CpG dinucleotide"
  misc_feature (61)..(61): /note="Nucleotide may be methylated to form 5-methylcytosine"
agagccccctggcatgttgggagtggggtgaggcagggagttatcgaagaggaagagaagcggagaaataaggaagcccagtgtcaaagcttaaaatgcccgtttctacaccctgcaccagc

SEQ ID NO: 14369 - DNA, 122 bp, Homo sapiens
  misc_feature (61)..(62): /note="This region represents a CpG dinucleotide"
  misc_feature (61)..(61): /note="Nucleotide may be methylated to form 5-methylcytosine"
ccacccacaggcagcatcggcacagaaggtcacaaagaagacaccaggaaaccccataagcgagaaactggaaaccgcgcactctggtcacgatgaaaagataatgagaatttatcaacagt

SEQ ID NO: 14370 - DNA, 122 bp, Homo sapiens
  misc_feature (61)..(62): /note="This region represents a CpG dinucleotide"
  misc_feature (61)..(61): /note="Nucleotide may be methylated to form 5-methylcytosine"
agtttttaaagggtaacctgaaaagcaacgacaattagttattttttatttattcagaaacgaggaaatacagactccaaataagtggagtcagtgctcccagttactttcttttgaattca

SEQ ID NO: 14371 - DNA, 122 bp, Homo sapiens
  misc_feature (61)..(62): /note="This region represents a CpG dinucleotide"
  misc_feature (61)..(61): /note="Nucleotide may be methylated to form 5-methylcytosine"
ctaaaatgtcttaatatttctctctaaaatcatcaggcagctacaatcaggtggacaagtcgttccttaaaatttaatatcatttaataattaataattgcacaatagcatatatgcgtagt

SEQ ID NO: 14372 - DNA, 122 bp, Homo sapiens
  misc_feature (61)..(62): /note="This region represents a CpG dinucleotide"
  misc_feature (61)..(61): /note="Nucleotide may be methylated to form 5-methylcytosine"
ttaggactacagagtcttcacatactttattggctttaaatctgtatctcctttctccaacgccgaaaaattgctagttcttaatgtagtagattctattaaagctgtgggtgacctgccca

SEQ ID NO: 14373 - DNA, 122 bp, Homo sapiens
  misc_feature (61)..(62): /note="This region represents a CpG dinucleotide"
  misc_feature (61)..(61): /note="Nucleotide may be methylated to form 5-methylcytosine"
aggctatctatgctgatatacatcttggaaggacatgagttcccagaggggtatgtgtgccgtcagctgaagatgcctacgtaaggtcaccttgactttgacaatgattgagatcctgctcc

SEQ ID NO: 14374 - DNA, 122 bp, Homo sapiens
  misc_feature (61)..(62): /note="This region represents a CpG dinucleotide"
  misc_feature (61)..(61): /note="Nucleotide may be methylated to form 5-methylcytosine"
ggacatgtacttggttccctcctacgtaggcacccaaatatggggtacgacttcgaatcacgtgcttttgttgtccagtcgtaaatcctgcctgatgacctctagaggtaaactcgtgcact

SEQ ID NO: 14375 - DNA, 122 bp, Homo sapiens
  misc_feature (61)..(62): /note="This region represents a CpG dinucleotide"
  misc_feature (61)..(61): /note="Nucleotide may be methylated to form 5-methylcytosine"
gtatcagccttggtgacatacccctcaggttattacagcactatttgggagtggctctcccgccttcagaagaacaaaaagcaaggcctccaaaattatttctaggctctcagctaataact

SEQ ID NO: 14376 - DNA, 122 bp, Homo sapiens
  misc_feature (61)..(62): /note="This region represents a CpG dinucleotide"
  misc_feature (61)..(61): /note="Nucleotide may be methylated to form 5-methylcytosine"
caggggagggtccacagggctcctcttctgggactctcaggctgtcggcttctcctagagcgcaccctagtctcccttcccttgccagcttccctggtgaccagccaggacccaaatcacct

SEQ ID NO: 14377 - DNA, 122 bp, Homo sapiens
  misc_feature (61)..(62): /note="This region represents a CpG dinucleotide"
  misc_feature (61)..(61): /note="Nucleotide may be methylated to form 5-methylcytosine"
tctaaactgacgtagaggagagaagagaaagatttcactctgacccataagtggctggagcggaaagatggcttcggacatttcccgtgtttcagacgctgctcctcctcctcctcctcctc

SEQ ID NO: 14378 - DNA, 122 bp, Homo sapiens
  misc_feature (61)..(62): /note="This region represents a CpG dinucleotide"
  misc_feature (61)..(61): /note="Nucleotide may be methylated to form 5-methylcytosine"
acagttgtgagccaccacacctggcttgaatgtagattttaataattgaatttattctgccgtgttgatagaataactgaatatcagtaaattgtgtaacagtggtggatactgttgcataa

SEQ ID NO: 14379 - DNA, 122 bp, Homo sapiens
  misc_feature (61)..(62): /note="This region represents a CpG dinucleotide"
  misc_feature (61)..(61): /note="Nucleotide may be methylated to form 5-methylcytosine"
aagacaggtctttgtgttctctcagcagcccgtggtgacatgagtgagtgcctctgtacacgctgcactgtctctctggttatcatctgacagtcagccttcccatcgctcttcctgtcttt

SEQ ID NO: 14380 - DNA, 122 bp, Homo sapiens
  misc_feature (61)..(62): /note="This region represents a CpG dinucleotide"
  misc_feature (61)..(61): /note="Nucleotide may be methylated to form 5-methylcytosine"
ccctaaagagataaatgctgggagaacccagctctctttgcaggtgattggtgctgaggacgagcctaggaggctgattactgtcagcagaacacccacagaaaaaagaggctgcacccaag

SEQ ID NO: 14381 - DNA, 122 bp, Homo sapiens
  misc_feature (61)..(62): /note="This region represents a CpG dinucleotide"
  misc_feature (61)..(61): /note="Nucleotide may be methylated to form 5-methylcytosine"
ccagcgcccagccgaatgcctgactcgctccagttctcagaaagtgtttactaagtgaaccgcactgccaggtttcggtttcttcagtcacatccacagtgaggatgttaccactgagatga

SEQ ID NO: 14382 - DNA, 122 bp, Homo sapiens
  misc_feature (61)..(62): /note="This region represents a CpG dinucleotide"
  misc_feature (61)..(61): /note="Nucleotide may be methylated to form 5-methylcytosine"
tgccctgaatcagcaccagccagggtgagacttaggatgataaagagcactggaggcgagcgagacaccaccctgcctgtctgcaaagatgccgaggagtccaaagagatggcattcaggcg

SEQ ID NO: 14383 - DNA, 122 bp, Homo sapiens
  misc_feature (61)..(62): /note="This region represents a CpG dinucleotide"
  misc_feature (61)..(61): /note="Nucleotide may be methylated to form 5-methylcytosine"
gaggaggaaagggcttgaaagaatcccgagcttctaaagatcatccctctctgggccaggcgtggtggctcatgcctgtaatcccagcactttgggaagccgaggtggatgaatcatttagg

SEQ ID NO: 14384 - DNA, 122 bp, Homo sapiens
  misc_feature (61)..(62): /note="This region represents a CpG dinucleotide"
  misc_feature (61)..(61): /note="Nucleotide may be methylated to form 5-methylcytosine"
ccatctctgtggtttctttgtcttctggtgatccatacctttggggtgtcatatttcacccgcagtgtttcatcaaattaaatttcccaacaaaaacagttcctttcccaagaggaattcca

SEQ ID NO: 14385 - DNA, 122 bp, Homo sapiens
  misc_feature (61)..(62): /note="This region represents a CpG dinucleotide"
  misc_feature (61)..(61): /note="Nucleotide may be methylated to form 5-methylcytosine"
cttgagtgagctgctctggtttcacagtcatcctgtggttttaaatacagctgagcagcacgtatctgcagttctgtgcagcatctgcaaaagttttcacatagtgatagatgctataatcg

SEQ ID NO: 14386 - DNA, 122 bp, Homo sapiens
  misc_feature (61)..(62): /note="This region represents a CpG dinucleotide"
  misc_feature (61)..(61): /note="Nucleotide may be methylated to form 5-methylcytosine"
atcgttgtgagagatagaagagaattataaatacgagattggattgtgtggctagtagagcgggctataatttagcctgtgcagttcagccataagtgcaacgcgaagaatgttcctatact

SEQ ID NO: 14387 - DNA, 122 bp, Homo sapiens
  misc_feature (61)..(62): /note="This region represents a CpG dinucleotide"
  misc_feature (61)..(61): /note="Nucleotide may be methylated to form 5-methylcytosine"
tggtgaggatctgtgggggtcaggctgctgggtgggatggctgagtgttggggccttgaccgttagtgaagagcccgtagtggagggcggggcccaggcagggagaccagctggggtggggc

SEQ ID NO: 14388 - DNA, 122 bp, Homo sapiens
  misc_feature (61)..(62): /note="This region represents a CpG dinucleotide"
  misc_feature (61)..(61): /note="Nucleotide may be methylated to form 5-methylcytosine"
atcgacctactaagtatgaagctgggcacagaagaatgggtgacatggctcctggcttggcggaggccagtaaaagcttccaggtaaaacacccttgaggagcatgggctcaagggtgccag

SEQ ID NO: 14389 - DNA, 122 bp, Homo sapiens
  misc_feature (61)..(62): /note="This region represents a CpG dinucleotide"
  misc_feature (61)..(61): /note="Nucleotide may be methylated to form 5-methylcytosine"
gagaggtccaagttaaatcagaaagtttattttgccaaggtggaggatgtggccatgacacggtctcagaaagtccttgacaacatgtccccaagatggtcggggcacagcttggtttgtaa

SEQ ID NO: 14390 - DNA, 122 bp, Homo sapiens
  misc_feature (61)..(62): /note="This region represents a CpG dinucleotide"
  misc_feature (61)..(61): /note="Nucleotide may be methylated to form 5-methylcytosine"
tgtgtcaccctgtagtgatgccaggtggcctggccatcttggttcatccagggtggaacacgttgttcctggtgagctgtgtcgtgcccatcactccctcagagatgccagagcctgtcctg

SEQ ID NO: 14391 - DNA, 122 bp, Homo sapiens
  misc_feature (61)..(62): /note="This region represents a CpG dinucleotide"
  misc_feature (61)..(61): /note="Nucleotide may be methylated to form 5-methylcytosine"
gctacagaactcccgcagcgctgcaaatcatatgccaatcctgcatatgaggtacaagaacggcattgggtcagcattttctgagtgtgtttgtaacctgctgtttggtgtatggttacaca

SEQ ID NO: 14392 - DNA, 122 bp, Homo sapiens
  misc_feature (61)..(62): /note="This region represents a CpG dinucleotide"
  misc_feature (61)..(61): /note="Nucleotide may be methylated to form 5-methylcytosine"
gattgctggctaattgtgaaaggagactcaggcttttaacactgcaggaatttcaaactgcggtctcagtggccagagtgtcttaccagggagcagacctaatgtatccagtttaaaagggc

SEQ ID NO: 14393 - DNA, 122 bp, Homo sapiens
  misc_feature (61)..(62): /note="This region represents a CpG dinucleotide"
  misc_feature (61)..(61): /note="Nucleotide may be methylated to form 5-methylcytosine"
tatacagaaaagctggagttccttggcaagttcaaacaccctgagaacagttttgcatcacgtaggattacaaaaattgttgaggtcatggtaacagctgccttgagcaagatttctaacac

SEQ ID NO: 14394 - DNA, 122 bp, Homo sapiens
  misc_feature (61)..(62): /note="This region represents a CpG dinucleotide"
  misc_feature (61)..(61): /note="Nucleotide may be methylated to form 5-methylcytosine"
ataccttctgtcatcagaaagtcacacgccccttagtggagaggtcaggttacctcttaacgacacaaaagacatctgtgatccggtgaaaccccgtctctactaaaaatacaaaaacttag

SEQ ID NO: 14395 - DNA, 122 bp, Homo sapiens
  misc_feature (61)..(62): /note="This region represents a CpG dinucleotide"
  misc_feature (61)..(61): /note="Nucleotide may be methylated to form 5-methylcytosine"
ctaggcacagactcaacagaaatgcctgcatatagtcaccaaaaggcatgttcatagtagcgttattcatggtagtcaaaaactgaaaacaacccgaatgtccattaaaaaaggatggatga

SEQ ID NO: 14396 - DNA, 122 bp, Homo sapiens
  misc_feature (61)..(62): /note="This region represents a CpG dinucleotide"
  misc_feature (61)..(61): /note="Nucleotide may be methylated to form 5-methylcytosine"
ctaaaaagaggctttgcactccaaacccctcctaacagaggtgagccaagagaggctgaacgacttgcctggcatcatgcagcaagaagggaggttcccgaacccagactatcctacgacca

SEQ ID NO: 14397 - DNA, 122 bp, Homo sapiens
  misc_feature (61)..(62): /note="This region represents a CpG dinucleotide"
  misc_feature (61)..(61): /note="Nucleotide may be methylated to form 5-methylcytosine"
ggtagagagaagggcaatgcacatcctgacaatatgagaaatgacaatttgcagatacagcggaaaataggagccctttccattgcaaagttggcaaggtattagagtataaggacttggtg

SEQ ID NO: 14398 - DNA, 122 bp, Homo sapiens
  misc_feature (61)..(62): /note="This region represents a CpG dinucleotide"
  misc_feature (61)..(61): /note="Nucleotide may be methylated to form 5-methylcytosine"
gaaggccagaggggtggcagagggccgtcctcagacaacattctttccaaaggcagggtgcgtggacagggaagggcttggatgcctgacccagggcaaggctcagtgtacacagttggagc

SEQ ID NO: 14399 - DNA, 122 bp, Homo sapiens
  misc_feature (61)..(62): /note="This region represents a CpG dinucleotide"
  misc_feature (61)..(61): /note="Nucleotide may be methylated to form 5-methylcytosine"
gatcattatgagaagtcagtcagcaagttctcagatagtaaatggttaaggagttactggcggtggttaaaaccacagattggtgggttttagaaatgtctgacatgtaataccagatctga

SEQ ID NO: 14400 - DNA, 122 bp, Homo sapiens
  misc_feature (61)..(62): /note="This region represents a CpG dinucleotide"
  misc_feature (61)..(61): /note="Nucleotide may be methylated to form 5-methylcytosine"
gatgaataggtgtgcaggacgagagtctaagcagagatgacaccccaatgaatattcgctcgcagccctgctgcggggagctggcttgcacaacaacagacgattgttaaaaagctaagggg

SEQ ID NO: 14401 - DNA, 122 bp, Homo sapiens
  misc_feature (61)..(62): /note="This region represents a CpG dinucleotide"
  misc_feature (61)..(61): /note="Nucleotide may be methylated to form 5-methylcytosine"
aaccagcttatagcagacccaggctagttgagaacttcaagaaaagacagatcgtgggggcggggttggggagtgtccatgtgaagccattggaaagctaccaaaacagccaggactggaga

SEQ ID NO: 14402 - DNA, 122 bp, Homo sapiens
  misc_feature (61)..(62): /note="This region represents a CpG dinucleotide"
  misc_feature (61)..(61): /note="Nucleotide may be methylated to form 5-methylcytosine"
atgggcccctcccaagagcctgaacctgaatacttcttataaaaaggttctctggctggacgctgctcaatccactgcctagcaggtggcccattccagttggagaacgtagtgagtctttc

SEQ ID NO: 14403 - DNA, 122 bp, Homo sapiens
  misc_feature (61)..(62): /note="This region represents a CpG dinucleotide"
  misc_feature (61)..(61): /note="Nucleotide may be methylated to form 5-methylcytosine"
ctagatttaagaggaggggacacagaggccatctctcaatgggaggagtccctgcaaccacgagccacacgtgctttttggctgatacttgaaagaatgagcaatgcaggctgggcgcagtg

SEQ ID NO: 14404 - DNA, 122 bp, Homo sapiens
  misc_feature (61)..(62): /note="This region represents a CpG dinucleotide"
  misc_feature (61)..(61): /note="Nucleotide may be methylated to form 5-methylcytosine"
gcggacacaggcacattcaagcttgaggcagagtggagcacaggaaagaacatatgggtgcgttcatcccagccttgtggattcctaatgccagctttgtcactcagtagtatgtgacttta

SEQ ID NO: 14405 - DNA, 122 bp, Homo sapiens
  misc_feature (61)..(62): /note="This region represents a CpG dinucleotide"
  misc_feature (61)..(61): /note="Nucleotide may be methylated to form 5-methylcytosine"
gtccctacttacttgctgttttagggcattttcagcgacttcactctcttctacctcaaacgccatccacttttggagacaggtaccactgcccctaggcagggacttgggagaggacctta

SEQ ID NO: 14406 - DNA, 122 bp, Homo sapiens
  misc_feature (61)..(62): /note="This region represents a CpG dinucleotide"
  misc_feature (61)..(61): /note="Nucleotide may be methylated to form 5-methylcytosine"
ggcccatatttgtacaagtgtaataagctgtctctagtggcagcctaggtacacataaaacgatggcatcccacaagcagaaaattgacaggagttcaacatacactgggaaacagaagaag

SEQ ID NO: 14407 - DNA, 122 bp, Homo sapiens
  misc_feature (61)..(62): /note="This region represents a CpG dinucleotide"
  misc_feature (61)..(61): /note="Nucleotide may be methylated to form 5-methylcytosine"
atgtagttattgatttacaccttgtaaatttctcagtacacgatgtacaagtggccactccgtactgtctgttcttgtttattcagaccaatagtaagagtaatcatgagaatatgccaggc

SEQ ID NO: 14408 - DNA, 122 bp, Homo sapiens
  misc_feature (61)..(62): /note="This region represents a CpG dinucleotide"
  misc_feature (61)..(61): /note="Nucleotide may be methylated to form 5-methylcytosine"
catccatcacatagtaacatggattaatgtcacctattactcttattctagttattgccacgttctcccactggctttccaaatttataatatctgtgaaggtcaatgaaactaatgaggcc

SEQ ID NO: 14409 - DNA, 122 bp, Homo sapiens
  misc_feature (61)..(62): /note="This region represents a CpG dinucleotide"
  misc_feature (61)..(61): /note="Nucleotide may be methylated to form 5-methylcytosine"
ataaaacacaaaaaattcttaatctttatttaactgactcacaagattaaccaatatcctcggcttcctgagtaaaattaatagatgactttggcacattaaatattctgactagtagttta

SEQ ID NO: 14410 - DNA, 122 bp, Homo sapiens
  misc_feature (61)..(62): /note="This region represents a CpG dinucleotide"
  misc_feature (61)..(61): /note="Nucleotide may be methylated to form 5-methylcytosine"
cagtgtaagaatggtctaatacagcagcctatgaatgaccctgtaaaacaagtcaaagaacggtggcatcattctaagagaaggggatccacagaagaatttaaagccaattttgagaagca

SEQ ID NO: 14411 - DNA, 122 bp, Homo sapiens
  misc_feature (61)..(62): /note="This region represents a CpG dinucleotide"
  misc_feature (61)..(61): /note="Nucleotide may be methylated to form 5-methylcytosine"
tctagccttctctaatgtagccaggaatgattaacaaagttgtcatggtaatttgttcatcggtgttatgacacttatttgtgtgtcttatgatatgactcatatttgtgtgtattcccttt

SEQ ID NO: 14412 - DNA, 122 bp, Homo sapiens
  misc_feature (61)..(62): /note="This region represents a CpG dinucleotide"
  misc_feature (61)..(61): /note="Nucleotide may be methylated to form 5-methylcytosine"
aaaattttcagtccagttcagcaaacctctgccaggcatctcctggggaagcagacccagcgtgggtaaggaagcatcaactgagaaacagaaatagccctgaaccacaagctgcttaccaa

SEQ ID NO: 14413 - DNA, 122 bp, Homo sapiens
  misc_feature (61)..(62): /note="This region represents a CpG dinucleotide"
  misc_feature (61)..(61): /note="Nucleotide may be methylated to form 5-methylcytosine"
aagattgactatcaatgttgtccttgtttgcaagggtacacttccctacttttttgcaaacgacccatccaaatgtatataatttttttgggcagagatggagtttcatcatgttgcccagg

SEQ ID NO: 14414 - DNA, 122 bp, Homo sapiens
  misc_feature (61)..(62): /note="This region represents a CpG dinucleotide"
  misc_feature (61)..(61): /note="Nucleotide may be methylated to form 5-methylcytosine"
aggcatccatgagcacgagctattactgttctcattgctgctgattacaacaccaagcaccgcagcaaacagtgactcacagttctgttgggcccatcactgacccattctacagccgagga

SEQ ID NO: 14415 - DNA, 122 bp, Homo sapiens
  misc_feature (61)..(62): /note="This region represents a CpG dinucleotide"
  misc_feature (61)..(61): /note="Nucleotide may be methylated to form 5-methylcytosine"
aaaaaaaaaattaagagtcttagtagctataacctgctacacacacatctgcaactcggccgcccagcaactggggccagagccactgagtcacagtaatgccaggaacaaggtagctgggc

SEQ ID NO: 14416 - DNA, 122 bp, Homo sapiens
  misc_feature (61)..(62): /note="This region represents a CpG dinucleotide"
  misc_feature (61)..(61): /note="Nucleotide may be methylated to form 5-methylcytosine"
ctgagaaaatgggtaaaaccagttggtggactctcaaagtggacaattgcaccctacacccgtgtgacccaggggagcacagggaccccatgaactactcccccatgggaatgagtagtatc

SEQ ID NO: 14417 - DNA, 122 bp, Homo sapiens
  misc_feature (61)..(62): /note="This region represents a CpG dinucleotide"
  misc_feature (61)..(61): /note="Nucleotide may be methylated to form 5-methylcytosine"
ctgggccttcacctgctgctccaggtcccacaacttcctcgtcatgaaggccatcagctccgagtcatgggatgcagggactgccaagcacacaaagtctttagagcccagacctagagccg

SEQ ID NO: 14418 - DNA, 122 bp, Homo sapiens
  misc_feature (61)..(62): /note="This region represents a CpG dinucleotide"
  misc_feature (61)..(61): /note="Nucleotide may be methylated to form 5-methylcytosine"
taccaaaacgaagtcaattaacatattaattacctcacataatagctttttgtgcgcatgcgtgggataagaatacttaaccccatccccagtgactgcagagtggcccttccagctgttcc

SEQ ID NO: 14419 - DNA, 122 bp, Homo sapiens
  misc_feature (61)..(62): /note="This region represents a CpG dinucleotide"
  misc_feature (61)..(61): /note="Nucleotide may be methylated to form 5-methylcytosine"
tgaggaggagtcagggtcagggacaggtgaaagagtaaaaacctcccttactgtcccccacgactggctctctcagcccctggggattgaattcattgccatgaattcaaggcaatactcac

SEQ ID NO: 14420 - DNA, 122 bp, Homo sapiens
  misc_feature (61)..(62): /note="This region represents a CpG dinucleotide"
  misc_feature (61)..(61): /note="Nucleotide may be methylated to form 5-methylcytosine"
ggtgtgcttttgcattctaggtttccccctagacttttccttgggtgacttttaaagccacgtaacctcattctgagcttcctgttccttattagaggtaaggaataacagtgcccctccta

SEQ ID NO: 14421 - DNA, 122 bp, Homo sapiens
  misc_feature (61)..(62): /note="This region represents a CpG dinucleotide"
  misc_feature (61)..(61): /note="Nucleotide may be methylated to form 5-methylcytosine"
ccttgccatgctcctagcattggaagcactcagcactttcctgatggtgccaggatgctgcgctatgaacatgagtcctcttcctaggcctgcctctcacctcttcccacctgctagccctg

SEQ ID NO: 14422 - DNA, 122 bp, Homo sapiens
  misc_feature (61)..(62): /note="This region represents a CpG dinucleotide"
  misc_feature (61)..(61): /note="Nucleotide may be methylated to form 5-methylcytosine"
tttaataaagttaatcctcaaattgctgtatagccgggagactcaagttcattgtaactacgcagcaatactgggctctatgatgctgatataccatggcccttcagccgtgtacaaggata

SEQ ID NO: 14423 - DNA, 122 bp, Homo sapiens
  misc_feature (61)..(62): /note="This region represents a CpG dinucleotide"
  misc_feature (61)..(61): /note="Nucleotide may be methylated to form 5-methylcytosine"
tgtccgctagggaactctaggctaaatagtcattcagacaagtaagacctgatcaggtcgcgcttggcatcatattgacatagaaggatattgcgcaggaaacagcatgccagcagagcaat

SEQ ID NO: 14424 - DNA, 122 bp, Homo sapiens
  misc_feature (61)..(62): /note="This region represents a CpG dinucleotide"
  misc_feature (61)..(61): /note="Nucleotide may be methylated to form 5-methylcytosine"
agagctcccgcccgtagggacacctgcagctggcgggagaggggtaggggagctgtaagccggcggcacagggcggagtatgccacagccccaacccacccctccaggtcctccccgcgatg

SEQ ID NO: 14425 - DNA, 122 bp, Homo sapiens
  misc_feature (61)..(62): /note="This region represents a CpG dinucleotide"
  misc_feature (61)..(61): /note="Nucleotide may be methylated to form 5-methylcytosine"
tcgggttcagagcagatccttaaagccttccagtccagctccctggttaggctcatgagacggccacgatgtgtctgcccagtgacaaccagcacaaaccggaaggtccacccctctctgcc

SEQ ID NO: 14426 - DNA, 122 bp, Homo sapiens
  misc_feature (61)..(62): /note="This region represents a CpG dinucleotide"
  misc_feature (61)..(61): /note="Nucleotide may be methylated to form 5-methylcytosine"
actgtataagttttctgaaccaaacttccttcattgtgacatggttttgccacagctggtcgttctctttactctttgatcctggttgaacgattcatgtagattctatctctctttaaatg

SEQ ID NO: 14427 - DNA, 122 bp, Homo sapiens
  misc_feature (61)..(62): /note="This region represents a CpG dinucleotide"
  misc_feature (61)..(61): /note="Nucleotide may be methylated to form 5-methylcytosine"
aagtcccccaaacttgctcctgcttttaccatgtgacacgcaagttcctgcttcgccttccgctgtgaataatagcttcctgaggccttcccagaagctgagcaatgttgatgttatgcttc

SEQ ID NO: 14428 - DNA, 122 bp, Homo sapiens
  misc_feature (61)..(62): /note="This region represents a CpG dinucleotide"
  misc_feature (61)..(61): /note="Nucleotide may be methylated to form 5-methylcytosine"
aacccagacacattacttaatctctctgagcctcagttttctcgtctataaaacctcgcacggatattgtcgagagtaaagaaaattacacatgccgggcacttcatggacctacacccagc

SEQ ID NO: 14429 - DNA, 122 bp, Homo sapiens
  misc_feature (61)..(62): /note="This region represents a CpG dinucleotide"
  misc_feature (61)..(61): /note="Nucleotide may be methylated to form 5-methylcytosine"
cggggtatctgggcttaatcttgtgtaagaaccaggattgggaaaggctgcttggtgatgcgtcctctgttagggggctgatggggtcctcaaaggtccatagtaaggcccctaacctagtc

SEQ ID NO: 14430 - DNA, 122 bp, Homo sapiens
  misc_feature (61)..(62): /note="This region represents a CpG dinucleotide"
  misc_feature (61)..(61): /note="Nucleotide may be methylated to form 5-methylcytosine"
gtggctcggggcatttgggaaatcgcaaaagaccttcccagcctggacagtctggggctgcgtgctctagaccgggggctccctaagggcaaatacctgaccctgtgagtcctgccaggtac

SEQ ID NO: 14431 - DNA, 122 bp, Homo sapiens
  misc_feature (61)..(62): /note="This region represents a CpG dinucleotide"
  misc_feature (61)..(61): /note="Nucleotide may be methylated to form 5-methylcytosine"
acagactcagccctcttagaagcatgtcaatggaggcatgtcaacactcaatgaacaggacggccaaaagccaggaaggtgaactcacctttggaactgataagagtcattgtttagctttc

SEQ ID NO: 14432 - DNA, 122 bp, Homo sapiens
  misc_feature (61)..(62): /note="This region represents a CpG dinucleotide"
  misc_feature (61)..(61): /note="Nucleotide may be methylated to form 5-methylcytosine"
ccaatggcttactgcatgaatttggtctgttgagagcacagggccaggtgggagcctgcacgtacagattataaccttgactgaaacccaagtagggaaggtgataaatgcaattgccatta

SEQ ID NO: 14433 - DNA, 122 bp, Homo sapiens
  misc_feature (61)..(62): /note="This region represents a CpG dinucleotide"
  misc_feature (61)..(61): /note="Nucleotide may be methylated to form 5-methylcytosine"
tatcagaccaaaggattacaaataaatcccctagtattgttgatgtggcatttttccttccgaagagcaatggtttttcttttcacttgcttttggtattggtttaactccacattggggtt

SEQ ID NO: 14434 - DNA, 122 bp, Homo sapiens
  misc_feature (61)..(62): /note="This region represents a CpG dinucleotide"
  misc_feature (61)..(61): /note="Nucleotide may be methylated to form 5-methylcytosine"
aaaaaagaaaggagtctttcagaagccacacaggcccaattttccatagtataatgaagtcgcaatgtcactgccatttctccacttctgcaggggaagccaagactgctttttgctcactg

SEQ ID NO: 14435 - DNA, 122 bp, Homo sapiens
  misc_feature (61)..(62): /note="This region represents a CpG dinucleotide"
  misc_feature (61)..(61): /note="Nucleotide may be methylated to form 5-methylcytosine"
gtctaacttgaagtaactctggactgcctctcttggccctcaaatagtcccactctgacacgacttgtccatggagagggcaaaaggagctaaaaagtttgtttgctctcctccttgaactc

SEQ ID NO: 14436 - DNA, 122 bp, Homo sapiens
  misc_feature (61)..(62): /note="This region represents a CpG dinucleotide"
  misc_feature (61)..(61): /note="Nucleotide may be methylated to form 5-methylcytosine"
ccactgagccagtgcgtacgttgaaataaacatcctcctgttctctcatattggtctctccgttcctcagtttcccacaacaggactacaggtgtgcaccaccaagctcagctaatttttat

SEQ ID NO: 14437 - DNA, 122 bp, Homo sapiens
  misc_feature (61)..(62): /note="This region represents a CpG dinucleotide"
  misc_feature (61)..(61): /note="Nucleotide may be methylated to form 5-methylcytosine"
tagttgttactatctgagataccacagcaatcccttaatcttctttggctttccaacacacgtgtatctagttccttttattcaattccctttgtttgcaattcctagcatggattctgctt

SEQ ID NO: 14438 - DNA, 122 bp, Homo sapiens
  misc_feature (61)..(62): /note="This region represents a CpG dinucleotide"
  misc_feature (61)..(61): /note="Nucleotide may be methylated to form 5-methylcytosine"
gaaaagtattcttagttagaagaatttggctttgctacagagtttcaaaggttatgtgtgcgcatattgtcttcagtagatgacaagttgattttagttttattgttttatctggcattttc

SEQ ID NO: 14439 - DNA, 122 bp, Homo sapiens
  misc_feature (61)..(62): /note="This region represents a CpG dinucleotide"
  misc_feature (61)..(61): /note="Nucleotide may be methylated to form 5-methylcytosine"
cccaagagggggatgaccaggcttctggaagtgatatatccagaatgtgacccagacgttcgtacttccttccatttgacaggaaatagaaggagagagagaagcaagttacacgaaatcac

SEQ ID NO: 14440 - DNA, 122 bp, Homo sapiens
  misc_feature (61)..(62): /note="This region represents a CpG dinucleotide"
  misc_feature (61)..(61): /note="Nucleotide may be methylated to form 5-methylcytosine"
gtgagatgtagtagagtggacagtctggggaaatatgtgttcagtgcagccagtagaccacgctgacagattggtgtggcaggttaaggaaaagaacaatatgaaactcagccttctggctt

SEQ ID NO: 14441 - DNA, 122 bp, Homo sapiens
  misc_feature (61)..(62): /note="This region represents a CpG dinucleotide"
  misc_feature (61)..(61): /note="Nucleotide may be methylated to form 5-methylcytosine"
ctgtccttcacctttttcaaatcctctgagattcctggctgtaaagaggcagtctgcctccggcctctgacaaaaaataaaaagtaaagccttatattctatagtgattaacagtttacaaa

SEQ ID NO: 14442 - DNA, 122 bp, Homo sapiens
  misc_feature (61)..(62): /note="This region represents a CpG dinucleotide"
  misc_feature (61)..(61): /note="Nucleotide may be methylated to form 5-methylcytosine"
gattaggaaatggaggcacggagggattaaatgcttagtcagggtcacactactaatgagcggcagagccaggatgttgactcagatggtcagactccaaaccttgagttcctaatcactat

SEQ ID NO: 14443 - DNA, 122 bp, Homo sapiens
  misc_feature (61)..(62): /note="This region represents a CpG dinucleotide"
  misc_feature (61)..(61): /note="Nucleotide may be methylated to form 5-methylcytosine"
ctctacaaaaatttaaaaattagtcagatgtggtggcgtgcacctgtgctcccagcttctcgggaggctgaagtgggaggatggcttgagcctgggaggtagaggctgaagctaaatgtgtt

SEQ ID NO: 14444 - DNA, 122 bp, Homo sapiens
  misc_feature (61)..(62): /note="This region represents a CpG dinucleotide"
  misc_feature (61)..(61): /note="Nucleotide may be methylated to form 5-methylcytosine"
aggaagtattaataagaccttaaatcatttaataactatcatctagtactgaaaaaaaaacgcgtgctatgcaaacataaggtttcaaatgtggtcagtcaggattttgaaaactagaattt

SEQ ID NO: 14445 - DNA, 122 bp, Homo sapiens
  misc_feature (61)..(62): /note="This region represents a CpG dinucleotide"
  misc_feature (61)..(61): /note="Nucleotide may be methylated to form 5-methylcytosine"
tatgatttagtaccttagttcctttctcacttgagtattaatcagtgtggttttctgcaccgtcgttctttcctcctctggtttaatgacagagatttcttctttaggtgccacaaccaccc

SEQ ID NO: 14446 - DNA, 122 bp, Homo sapiens
  misc_feature (61)..(62): /note="This region represents a CpG dinucleotide"
  misc_feature (61)..(61): /note="Nucleotide may be methylated to form 5-methylcytosine"
tggtgtcaatgggatcaaggttctttctgcttgtcatttgaagactccaagacacattaacggtattcacaaataagagattttaagcttcaaattagaagaaggtttaacaatatggggaa

SEQ ID NO: 14447 - DNA, 122 bp, Homo sapiens
  misc_feature (61)..(62): /note="This region represents a CpG dinucleotide"
  misc_feature (61)..(61): /note="Nucleotide may be methylated to form 5-methylcytosine"
aagcactggattatttctctctaatttcacctattggctttttaaccaagttcacccttccgcattaaaatattaagtctttgtaaatgccttaaagataaaaaggcctttacagagttgag

SEQ ID NO: 14448 - DNA, 122 bp, Homo sapiens
  misc_feature (61)..(62): /note="This region represents a CpG dinucleotide"
  misc_feature (61)..(61): /note="Nucleotide may be methylated to form 5-methylcytosine"
gctgctttaatggtgtaaccttagtggataggagcttgtgggggggtgggggggtgggggcgtgtagtgattcacagccctctcagcacaaagttggggccagcagatctggggctagaggt

SEQ ID NO: 14449 - DNA, 122 bp, Homo sapiens
  misc_feature (61)..(62): /note="This region represents a CpG dinucleotide"
  misc_feature (61)..(61): /note="Nucleotide may be methylated to form 5-methylcytosine"
gcctgctccccgtcccacccctccctgagcacgccaccccgccctctccctctctgagagcgagatacccggccagacaccctcacctgcggtgcccagctgcccaggctgaggcaagagaa

SEQ ID NO: 14450 - DNA, 122 bp, Homo sapiens
  misc_feature (61)..(62): /note="This region represents a CpG dinucleotide"
  misc_feature (61)..(61): /note="Nucleotide may be methylated to form 5-methylcytosine"
ccagcctgatttcttatttaattatcacacaagcctgccaagaggtatcaatccatatttcgtaaatgagggaactatcagagaagttttgttgcttacccagcattacacagtaagaaagt

SEQ ID NO: 14451 - DNA, 122 bp, Homo sapiens
  misc_feature (61)..(62): /note="This region represents a CpG dinucleotide"
  misc_feature (61)..(61): /note="Nucleotide may be methylated to form 5-methylcytosine"
gccaattcctaacccaaagttttcccaacagaaccttagtagaacaaaatgctttaagcacgtagtgtacaccctcattgcatgtcaaaaagaactggtattatttcaggaagaacaactca

SEQ ID NO: 14452 - DNA, 122 bp, Homo sapiens
  misc_feature (61)..(62): /note="This region represents a CpG dinucleotide"
  misc_feature (61)..(61): /note="Nucleotide may be methylated to form 5-methylcytosine"
tccgcttcaaccaggagcaggagtcagaggtgttgaacaggcgctcgtcgacgagcgggtcgttggagactacgtcatccaaggacatccgccagatgtctcaacagcaagacttgctcagt

SEQ ID NO: 14453 - DNA, 122 bp, Homo sapiens
  misc_feature (61)..(62): /note="This region represents a CpG dinucleotide"
  misc_feature (61)..(61): /note="Nucleotide may be methylated to form 5-methylcytosine"
ctgcagggtttcagcttggcagccaggctctgaactgcagtgctgtcaggcaggtgaacccgctggcaccacaatccagaaaacatatctcctgattcctcaggtgttctacacgtttgaat

SEQ ID NO: 14454 - DNA, 122 bp, Homo sapiens
  misc_feature (61)..(62): /note="This region represents a CpG dinucleotide"
  misc_feature (61)..(61): /note="Nucleotide may be methylated to form 5-methylcytosine"
gattatgatacacttctattttaagtatgtcacatgtggatttaacagcaaacaagcaagcgaagtcagtgaattacaacataaaaacaattcctcaaactagaaagtctagtgtatcagtg

SEQ ID NO: 14455 - DNA, 122 bp, Homo sapiens
  misc_feature (61)..(62): /note="This region represents a CpG dinucleotide"
  misc_feature (61)..(61): /note="Nucleotide may be methylated to form 5-methylcytosine"
caacctgccccagacacagcatattttgaaatcacatgccccatgacctgtagtcacccacgatgacaaacaaaactgtacaaatggtgttagttttaacctggacaagttcacattggttc

SEQ ID NO: 14456 - DNA, 122 bp, Homo sapiens
  misc_feature (61)..(62): /note="This region represents a CpG dinucleotide"
  misc_feature (61)..(61): /note="Nucleotide may be methylated to form 5-methylcytosine"
aacaatgcatttcttagaccgtatccctgtccttaactgacacatgactaagtttttgcccgtatacaatttttgtactgatttaattcatgtctgctttaatgtccaccacttggtttcca

SEQ ID NO: 14457 - DNA, 122 bp, Homo sapiens
  misc_feature (61)..(62): /note="This region represents a CpG dinucleotide"
  misc_feature (61)..(61): /note="Nucleotide may be methylated to form 5-methylcytosine"
caggtttcagaaatgtttgctgcatgcgctcattgtctgaatcattgtttcaggttgctccggttgctaagaagactatgaacaagtcagagaacctgctgtttgctggttcatcattagca

SEQ ID NO: 14458 - DNA, 122 bp, Homo sapiens
  misc_feature (61)..(62): /note="This region represents a CpG dinucleotide"
  misc_feature (61)..(61): /note="Nucleotide may be methylated to form 5-methylcytosine"
tttgtatcctatttgctgttagatagctctggtcttattatgcaaaaggtgcctttcccccgtcttgccctgaattgtattacaaagcttcctcaaattaggaaacattaaaaggtgcccag

SEQ ID NO: 14459 - DNA, 122 bp, Homo sapiens
  misc_feature (61)..(62): /note="This region represents a CpG dinucleotide"
  misc_feature (61)..(61): /note="Nucleotide may be methylated to form 5-methylcytosine"
aagatctcaccaaggctttcctagttcttccactcaagtctgatttagtgctcagctgggcgcttaacgaattcatgcctgttgtgaaagccctaatccaggatttcattgtacctaaatga

SEQ ID NO: 14460 - DNA, 122 bp, Homo sapiens
  misc_feature (61)..(62): /note="This region represents a CpG dinucleotide"
  misc_feature (61)..(61): /note="Nucleotide may be methylated to form 5-methylcytosine"
tggaagatgatgggagcctcagaaggtgtcgtgggacagggtcagggagagggctctatgcggccaggatctggatgcagattgttgagactgaaatttggctcagatcccttctagttgtg

SEQ ID NO: 14461 - DNA, 122 bp, Homo sapiens
  misc_feature (61)..(62): /note="This region represents a CpG dinucleotide"
  misc_feature (61)..(61): /note="Nucleotide may be methylated to form 5-methylcytosine"
agagggaggagatgtaggtctgggcttccacagggacctggtattttaggatcagggtaccgctggcctgaggcttggatcattcagagcctgggggtggaatggctggcagcctgtggccc

SEQ ID NO: 14462 - DNA, 122 bp, Homo sapiens
  misc_feature (61)..(62): /note="This region represents a CpG dinucleotide"
  misc_feature (61)..(61): /note="Nucleotide may be methylated to form 5-methylcytosine"
tcgggaaaacctctctgaccctgtgtttcctcatcagtgaaatgggaatgatgatcctcacgggaatggccttaaggcatttggcagaatgcctgctacactgtggccactcaaccaaaaga

SEQ ID NO: 14463 - DNA, 122 bp, Homo sapiens
  misc_feature (61)..(62): /note="This region represents a CpG dinucleotide"
  misc_feature (61)..(61): /note="Nucleotide may be methylated to form 5-methylcytosine"
ctagatttcttggttaaagcaggtcttcgcattccaatgtccagggcaggtctttgatgacgtgataagcccagcctccaaagcagcagcagaagcaaagcctgactttatgtttagctttt

SEQ ID NO: 14464 - DNA, 122 bp, Homo sapiens
  misc_feature (61)..(62): /note="This region represents a CpG dinucleotide"
  misc_feature (61)..(61): /note="Nucleotide may be methylated to form 5-methylcytosine"
cttcttttcaagtttgagggggttgtggaccatgtgaggctggacggctcacatgtcagccgccaggctcttagttacagacatggcaaacttccatcatttaagcagtggcacagatgttg

SEQ ID NO: 14465 - DNA, 122 bp, Homo sapiens
  misc_feature (61)..(62): /note="This region represents a CpG dinucleotide"
  misc_feature (61)..(61): /note="Nucleotide may be methylated to form 5-methylcytosine"
cagaggttggggaacaggatgcagggcagggccaaaggtcatggtggttgctacctacaccggctcatcctgagtacaaagggttctcagcacagagggaaccccaaatctccccctccatg

SEQ ID NO: 14466 - DNA, 122 bp, Homo sapiens
  misc_feature (61)..(62): /note="This region represents a CpG dinucleotide"
  misc_feature (61)..(61): /note="Nucleotide may be methylated to form 5-methylcytosine"
tccagacaggactaaccagttctaagcacaccgaggccatgttgtagtctagaccagagacgtttgcttcccttaattgtgggccaagattgtgttcattttatgtatcatgtatcaaccac

SEQ ID NO: 14467 - DNA, 122 bp, Homo sapiens
  misc_feature (61)..(62): /note="This region represents a CpG dinucleotide"
  misc_feature (61)..(61): /note="Nucleotide may be methylated to form 5-methylcytosine"
gcatgtgctccggattaatgctgcctgagttctaatcctcgctctgccacttagtagtcacgttaccataggcaagtcatttaagccacttagtcactcgaagcctcatttttcccatctgc

SEQ ID NO: 14468 - DNA, 122 bp, Homo sapiens
  misc_feature (61)..(62): /note="This region represents a CpG dinucleotide"
  misc_feature (61)..(61): /note="Nucleotide may be methylated to form 5-methylcytosine"
ctcaagtgatcctcctgcttcagcctgccaaagtgcttgggctacaggcatgagccagcacgcccagcagcactactgactttttatatgcattctgaaataaacattttatttgaaatggc

SEQ ID NO: 14469 - DNA, 122 bp, Homo sapiens
  misc_feature (61)..(62): /note="This region represents a CpG dinucleotide"
  misc_feature (61)..(61): /note="Nucleotide may be methylated to form 5-methylcytosine"
ggcgctggaaagcttgttctataattacttcttgatccgcttctaggcgtgctgtgcatgcgtccgaccatgtgtgtttgcgttagcttgcgccgtcgacaagagccagagaacgtgggtct

SEQ ID NO: 14470 - DNA, 122 bp, Homo sapiens
  misc_feature (61)..(62): /note="This region represents a CpG dinucleotide"
  misc_feature (61)..(61): /note="Nucleotide may be methylated to form 5-methylcytosine"
tggaggaatttgactccttttaaagaatcgcgtgtgctttttctactttcatggttgtgtcgttttgccggggagattttgaaagagaagactcatatcttgtcttccccataccgaggggt

SEQ ID NO: 14471 - DNA, 122 bp, Homo sapiens
  misc_feature (61)..(62): /note="This region represents a CpG dinucleotide"
  misc_feature (61)..(61): /note="Nucleotide may be methylated to form 5-methylcytosine"
ggccttcataagtataaaaagtttcactgttatattattttgatcacggctgataacagacggccatcacaaacaccctctgacagaagtggaggaggaagtgtgaaactaaggttcaggag

SEQ ID NO: 14472 - DNA, 122 bp, Homo sapiens
  misc_feature (61)..(62): /note="This region represents a CpG dinucleotide"
  misc_feature (61)..(61): /note="Nucleotide may be methylated to form 5-methylcytosine"
gtccaattagttgtggcaccttatgttccaacctgcagcacagctgctaggaccttggttcgtttcctgtcttacttagaaatgaaagtagaggaacaacgacttttgaaacaatgaacagg

SEQ ID NO: 14473 - DNA, 122 bp, Homo sapiens
  misc_feature (61)..(62): /note="This region represents a CpG dinucleotide"
  misc_feature (61)..(61): /note="Nucleotide may be methylated to form 5-methylcytosine"
ttcctgccactctgctgctccctcaggctgctctgtagttattcacaaatacttgctaagcgcaaccatgcatagggcaacacttccgacaataaggctggggaggggaagtgaacaaagca

SEQ ID NO: 14474 - DNA, 122 bp, Homo sapiens
  misc_feature (61)..(62): /note="This region represents a CpG dinucleotide"
  misc_feature (61)..(61): /note="Nucleotide may be methylated to form 5-methylcytosine"
cgcagatctcattttacagatgagaaaactgaggctcaagatttatagcttaggcaagggcgcctatctagtaagtggtaaaggtatgagtcaaagcccatagtatgaaccatattatgcta

SEQ ID NO: 14475 - DNA, 122 bp, Homo sapiens
  misc_feature (61)..(62): /note="This region represents a CpG dinucleotide"
  misc_feature (61)..(61): /note="Nucleotide may be methylated to form 5-methylcytosine"
aaaaaagtgccagttcctttcccacatgtgctgagttggaaacagcttggtgccagagcacgtccacaaggatatgtctgcctgttgtgccgtctgctgtatcctcaaaacctgccttgggg

SEQ ID NO: 14476 - DNA, 122 bp, Homo sapiens
  misc_feature (61)..(62): /note="This region represents a CpG dinucleotide"
  misc_feature (61)..(61): /note="Nucleotide may be methylated to form 5-methylcytosine"
tcctgatattgcattttgcccatgctccactgaagagctgctctactgtactttccccagcggagcatgttctccaccctgtgtggtgctgtttgctccacatggttgctcctttggttgtt

SEQ ID NO: 14477 - DNA, 122 bp, Homo sapiens
  misc_feature (61)..(62): /note="This region represents a CpG dinucleotide"
  misc_feature (61)..(61): /note="Nucleotide may be methylated to form 5-methylcytosine"
ggatccctcgtgaagccgtcaagtgctgaagctgtgaaagctggggccggcggatcgggtcgggactgccgctgtgatcacttttaggccagcgtcagcagaagcctgtgtgattgcaggca

SEQ ID NO: 14478 - DNA, 122 bp, Homo sapiens
  misc_feature (61)..(62): /note="This region represents a CpG dinucleotide"
  misc_feature (61)..(61): /note="Nucleotide may be methylated to form 5-methylcytosine"
accccatcagaatattaccacatgtgtcaatcacacaccttgtggtgaaagcgagctgaacgcactgatacatgaagacatttctgactcctccctgaccttcagcctgctgggagagagac

SEQ ID NO: 14479 - DNA, 122 bp, Homo sapiens
  misc_feature (61)..(62): /note="This region represents a CpG dinucleotide"
  misc_feature (61)..(61): /note="Nucleotide may be methylated to form 5-methylcytosine"
gatacagcagcaaacaaaaccgaccatccctgccctcatggagcaaattttgcagtgaagcgagacaggcaataaacaaggaaaatataagtgttgcggaggtaaatgataaactagtaaaa

SEQ ID NO: 14480 - DNA, 122 bp, Homo sapiens
  misc_feature (61)..(62): /note="This region represents a CpG dinucleotide"
  misc_feature (61)..(61): /note="Nucleotide may be methylated to form 5-methylcytosine"
ccgccaagctgggcgagaggccggggccccccttccatcacgaggttcctgccctcggctcggcctagtttccctagccaggagaagtcctgttttcaacgttctagaaatatccccgcccg

SEQ ID NO: 14481 - DNA, 122 bp, Homo sapiens
  misc_feature (61)..(62): /note="This region represents a CpG dinucleotide"
  misc_feature (61)..(61): /note="Nucleotide may be methylated to form 5-methylcytosine"
gagtcagaatgattgaaaatataattcctgaataataggcacacaccaccaagttcggcacgagtgaagggtgttcactgagagtatctggaagccaaaataaaaagactcagcaggcccgt

SEQ ID NO: 14482 - DNA, 122 bp, Homo sapiens
  misc_feature (61)..(62): /note="This region represents a CpG dinucleotide"
  misc_feature (61)..(61): /note="Nucleotide may be methylated to form 5-methylcytosine"
gcagcagtgttggcagaagcactttattctctttcctccatttcctatgtgtactggagacgcaaagtaaaccaggttgtctgccaaacttgaaggaagccagagagtccagaaaactgtag

SEQ ID NO: 14483 - DNA, 122 bp, Homo sapiens
  misc_feature (61)..(62): /note="This region represents a CpG dinucleotide"
  misc_feature (61)..(61): /note="Nucleotide may be methylated to form 5-methylcytosine"
tccactctgctgctgacaaacatggggactgtttccaacttcaggcgttcgtgcacgaagcggcgctgttctgccgtgtctcccagcgcccaccatgggcccctgcgtggggcactcctcgg

SEQ ID NO: 14484 - DNA, 122 bp, Homo sapiens
  misc_feature (61)..(62): /note="This region represents a CpG dinucleotide"
  misc_feature (61)..(61): /note="Nucleotide may be methylated to form 5-methylcytosine"
agaggtctgacctatttataccccagccaggccctgcccatagcaggggacaggggagagcggatactgccttcctgctgtgggctgatgcggtaagtgccacagcaccctccaccagccca

SEQ ID NO: 14485 - DNA, 122 bp, Homo sapiens
  misc_feature (61)..(62): /note="This region represents a CpG dinucleotide"
  misc_feature (61)..(61): /note="Nucleotide may be methylated to form 5-methylcytosine"
actaatgagaccaatgaataggaaatgcttcacagatgtggtgacgaatcagctgcatctcgatggatgaatcaatatttctcaatgaaacaaagaatgggaatggaatgtcaggtagaagg

SEQ ID NO: 14486 - DNA, 122 bp, Homo sapiens
  misc_feature (61)..(62): /note="This region represents a CpG dinucleotide"
  misc_feature (61)..(61): /note="Nucleotide may be methylated to form 5-methylcytosine"
gagagcttggatgacaggcaacagcttttagcagctgtgctaatgatctcatccatcaaacgaccctctcttcaccttactgttgtcagttatatccacgtctttgatgagaagtggatatg

SEQ ID NO: 14487 - DNA, 122 bp, Homo sapiens
  misc_feature (61)..(62): /note="This region represents a CpG dinucleotide"
  misc_feature (61)..(61): /note="Nucleotide may be methylated to form 5-methylcytosine"
caaggctattaacttgaaccttcaaataccaacagtcacaagttgtccctttgatatattcgcatctgttctgtgttgaattgaaaaaggttttcttgctacaaaatgtgtaaaggagaaaa

SEQ ID NO: 14488 - DNA, 122 bp, Homo sapiens
  misc_feature (61)..(62): /note="This region represents a CpG dinucleotide"
  misc_feature (61)..(61): /note="Nucleotide may be methylated to form 5-methylcytosine"
ctgggctacagagccgagccccacaccatcagacgccagggacagctcccacgtgccccgcggcctctggcacacggccagacgcccgccaggctgagcccccaccaggccctacctggcga

SEQ ID NO: 14489 - DNA, 122 bp, Homo sapiens
  misc_feature (61)..(62): /note="This region represents a CpG dinucleotide"
  misc_feature (61)..(61): /note="Nucleotide may be methylated to form 5-methylcytosine"
caagattttgcttccccagacctttatgtttgcaatggccatagaagtagttcaggttcacgtactgatatatacagacaggcccaagccatacttcaataaacgtaccatagatgtgaaat

SEQ ID NO: 14490 - DNA, 122 bp, Homo sapiens
  misc_feature (61)..(62): /note="This region represents a CpG dinucleotide"
  misc_feature (61)..(61): /note="Nucleotide may be methylated to form 5-methylcytosine"
cagaagacgcaggcctcctggctcctcactcatttgaaattttaattatctgccagagcacgattcccacagccacccccactaggggtgggtgtgaaagaagctaaatagctccaaaatgc

SEQ ID NO: 14491 - DNA, 122 bp, Homo sapiens
  misc_feature (61)..(62): /note="This region represents a CpG dinucleotide"
  misc_feature (61)..(61): /note="Nucleotide may be methylated to form 5-methylcytosine"
gtcttcaaagattacagcaatgatgccacacttgcctgtgagctctctgacataaaatcacgtccacacctcatgtgtggaccacatcattcagcaaagcttccttaactgtgagctattag

SEQ ID NO: 14492 - DNA, 122 bp, Homo sapiens
  misc_feature (61)..(62): /note="This region represents a CpG dinucleotide"
  misc_feature (61)..(61): /note="Nucleotide may be methylated to form 5-methylcytosine"
gggaggcctcaggaaacttacaatcatgatggaaggcaaaggggaagcgggcacctcttacgtggcctgagcaggaggaagaaagggagttgcctacacacttttaaaaaaaacagatctcg

SEQ ID NO: 14493 - DNA, 122 bp, Homo sapiens
  misc_feature (61)..(62): /note="This region represents a CpG dinucleotide"
  misc_feature (61)..(61): /note="Nucleotide may be methylated to form 5-methylcytosine"
gtctgggagtgaaggggacagccaagaagagccaggccatgaccttgtcatcagctgatgcgtaacccagcaaggaactcatcttccgggagggtggaatttgggctaggggcctctgaaag

SEQ ID NO: 14494 - DNA, 122 bp, Homo sapiens
  misc_feature (61)..(62): /note="This region represents a CpG dinucleotide"
  misc_feature (61)..(61): /note="Nucleotide may be methylated to form 5-methylcytosine"
ccagacacaaagaggaaacagcaagcttctctactccatcgtgattgtttcctgggcaagcgtgtttcccagctgcaatcatagatgccccaaaatgatgccagtgtcagaccctgccgtgc

SEQ ID NO: 14495 - DNA, 122 bp, Homo sapiens
  misc_feature (61)..(62): /note="This region represents a CpG dinucleotide"
  misc_feature (61)..(61): /note="Nucleotide may be methylated to form 5-methylcytosine"
atctgggaaatgtagtctgactggaaggtgactcatacagctaaaattcagggaagaaggcgagaatggataatggaaaacaaataggaatctctgtcacagtcagaagtcgaactgggatt

SEQ ID NO: 14496 - DNA, 122 bp, Homo sapiens
  misc_feature (61)..(62): /note="This region represents a CpG dinucleotide"
  misc_feature (61)..(61): /note="Nucleotide may be methylated to form 5-methylcytosine"
ttttttaaaaaaagttcccttctccacaagcaaacttgaatgtctgagttattcttagggcgtttttggacagacactacaaccctcagttacacatcacttggcttcatgaaaaggtaaca

SEQ ID NO: 14497 - DNA, 122 bp, Homo sapiens
  misc_feature (61)..(62): /note="This region represents a CpG dinucleotide"
  misc_feature (61)..(61): /note="Nucleotide may be methylated to form 5-methylcytosine"
cctctgacagttccataataacctgtgtacactttctggcacccttgcttctccaggtcacgccttccaatggaaggggaagcagtgacaaaggtgaaaatcatggcggtaacagaagtcat

SEQ ID NO: 14498 - DNA, 122 bp, Homo sapiens
  misc_feature (61)..(62): /note="This region represents a CpG dinucleotide"
  misc_feature (61)..(61): /note="Nucleotide may be methylated to form 5-methylcytosine"
tttacttccgctggctgagctgttgttcctgaggtcagaccccagccagtcttttgtgtacgtgcaggaccatggtggctttagtttctaccccacccttcctaggaactctacttgtggca

SEQ ID NO: 14499 - DNA, 122 bp, Homo sapiens
  misc_feature (61)..(62): /note="This region represents a CpG dinucleotide"
  misc_feature (61)..(61): /note="Nucleotide may be methylated to form 5-methylcytosine"
acagccttttctttccagtgacacagtgggaggaaagttctcccctgtacacatctatcccgtgctgagaatgtaatccccatgatgaatatcaagtgagtgatacatgctagaatctcaaa

SEQ ID NO: 14500 - DNA, 122 bp, Homo sapiens
  misc_feature (61)..(62): /note="This region represents a CpG dinucleotide"
  misc_feature (61)..(61): /note="Nucleotide may be methylated to form 5-methylcytosine"
catgagaattaaggcagagcccagcggagtgcattgtaaggatccatgagtgtgaaccttcgtttttactactgcatatgaggatcctgccaacaaacctggcggcttcaagcatccttgcc

SEQ ID NO: 14501 - DNA, 122 bp, Homo sapiens
  misc_feature (61)..(62): /note="This region represents a CpG dinucleotide"
  misc_feature (61)..(61): /note="Nucleotide may be methylated to form 5-methylcytosine"
tgataacatattggcagcacattaaatgctatctatgtgtgtcttctagctgcttgctgacgtggctttcttccccagtgtataataagcaatctgaggacaggaaattagtcttactcatc

SEQ ID NO: 14502 - DNA, 122 bp, Homo sapiens
  misc_feature (61)..(62): /note="This region represents a CpG dinucleotide"
  misc_feature (61)..(61): /note="Nucleotide may be methylated to form 5-methylcytosine"
acaagatccctattcaacagatctcctggactctcattttgagaatcacgtttctctccgcgtgagttgcaccaaaccattcagctattattaagtgtctcattgtctgtctgtttacctat

SEQ ID NO: 14503 - DNA, 122 bp, Homo sapiens
  misc_feature (61)..(62): /note="This region represents a CpG dinucleotide"
  misc_feature (61)..(61): /note="Nucleotide may be methylated to form 5-methylcytosine"
tgtatcccaagagttaaggaaagctgaccttttgagggctatttcagccaaatcagggtgcggtctactgaatcatctccaccttacagcagggcacgtctatgtgaaaacaaatttcacac

SEQ ID NO: 14504 - DNA, 122 bp, Homo sapiens
  misc_feature (61)..(62): /note="This region represents a CpG dinucleotide"
  misc_feature (61)..(61): /note="Nucleotide may be methylated to form 5-methylcytosine"
aagtatgactgcctctcctaggctaacctgcaaaagccagaggctgggtttctgtggcaccgtgctcactgaagcagtattttcctagtcatagcagccacctcccatctgccacctcgtct

SEQ ID NO: 14505 - DNA, 122 bp, Homo sapiens
  misc_feature (61)..(62): /note="This region represents a CpG dinucleotide"
  misc_feature (61)..(61): /note="Nucleotide may be methylated to form 5-methylcytosine"
ggtggtgccagactggggttcagatccctgccacatttacatgggctttgtgacacacgacgggtcatctaatgtctctgaactgcagcttctgcctatgtagaatgggagcagtaacacag

SEQ ID NO: 14506 - DNA, 122 bp, Homo sapiens
  misc_feature (61)..(62): /note="This region represents a CpG dinucleotide"
  misc_feature (61)..(61): /note="Nucleotide may be methylated to form 5-methylcytosine"
tcagtcagttactgtttgtgggcagagatctgagaggaacattctcatggacacctgtggcgactttgtaatgtgtcaactcaagctagtctaaagtacatttctcaagactcccttaccca

SEQ ID NO: 14507 - DNA, 122 bp, Homo sapiens
  misc_feature (61)..(62): /note="This region represents a CpG dinucleotide"
  misc_feature (61)..(61): /note="Nucleotide may be methylated to form 5-methylcytosine"
ctctttttttttttttttcgtgtctgcttctatctcttcctgttttctaagggttgctaccgtgacgttaggtaatgtataggaaataatttacttcctatttctgggccataccaagtttt

SEQ ID NO: 14508 - DNA, 122 bp, Homo sapiens
  misc_feature (61)..(62): /note="This region represents a CpG dinucleotide"
  misc_feature (61)..(61): /note="Nucleotide may be methylated to form 5-methylcytosine"
attttagttccttttctcattaaggaaatatttttaatagctgcatgtggcatgaatccacgaacagtacagctctgtctaggtccaggaatgtctttattaagggttcgttactaagcacc

SEQ ID NO: 14509 - DNA, 122 bp, Homo sapiens
  misc_feature (61)..(62): /note="This region represents a CpG dinucleotide"
  misc_feature (61)..(61): /note="Nucleotide may be methylated to form 5-methylcytosine"
taactacaattccagtttttctctctctgagaatggattgctttggctggggattactcacggtgaacttgctttgcggggagagttgccgactgtcttaattacattttggtaatctcctt

SEQ ID NO: 14510 - DNA, 122 bp, Homo sapiens
  misc_feature (61)..(62): /note="This region represents a CpG dinucleotide"
  misc_feature (61)..(61): /note="Nucleotide may be methylated to form 5-methylcytosine"
cgcagcctcataggaaatgttacctgtcaggtgcctgtccgggaagccatgtggtgatgccgccttggcttctccgattcgcggaggccaaaaccctcagaaacacctgctggggagccaca

SEQ ID NO: 14511 - DNA, 122 bp, Homo sapiens
  misc_feature (61)..(62): /note="This region represents a CpG dinucleotide"
  misc_feature (61)..(61): /note="Nucleotide may be methylated to form 5-methylcytosine"
cacaggatttccttgtgattgatcctgaataaaatcaagctgagtatctgctgtgcccaacggacaatgaattgctggttatgcccagtccctaacctggagcaggctttcagccagttcca

SEQ ID NO: 14512 - DNA, 122 bp, Homo sapiens
  misc_feature (61)..(62): /note="This region represents a CpG dinucleotide"
  misc_feature (61)..(61): /note="Nucleotide may be methylated to form 5-methylcytosine"
ttcctggagctgggtttcggacacttgccagactggggtgtctcccttctctgggctacacgtaattttggttcttttaaagtaaacagcgagatggaaatgtctggtcaccaagagacagg

SEQ ID NO: 14513 - DNA, 122 bp, Homo sapiens
  misc_feature (61)..(62): /note="This region represents a CpG dinucleotide"
  misc_feature (61)..(61): /note="Nucleotide may be methylated to form 5-methylcytosine"
ccatgaaggaagtttgcttttgtgtctgacttcctcattccaaccccagagaaggaacttcgaaagacagatgaagatgaagcccacatgtcagtcctctgcatattctcaattcttctatc

SEQ ID NO: 14514 - DNA, 122 bp, Homo sapiens
  misc_feature (61)..(62): /note="This region represents a CpG dinucleotide"
  misc_feature (61)..(61): /note="Nucleotide may be methylated to form 5-methylcytosine"
cagctgtgtgagtcaatgtcaagggcttaccttggatcagagcctgggatgcaatggccacgtcaatatcctgtccccagggggctctgtgtgaactaaggtcatcttccctgggggtatct

SEQ ID NO: 14515 - DNA, 122 bp, Homo sapiens
  misc_feature (61)..(62): /note="This region represents a CpG dinucleotide"
  misc_feature (61)..(61): /note="Nucleotide may be methylated to form 5-methylcytosine"
agaggctaaatgatgtggctatgatgtcacagctaggaactggccgagccaagataagaacgtaggcagcatgactctgaagcctatggtcttaacttgtatgctatatttcctcttgtgta

SEQ ID NO: 14516 - DNA, 122 bp, Homo sapiens
  misc_feature (61)..(62): /note="This region represents a CpG dinucleotide"
  misc_feature (61)..(61): /note="Nucleotide may be methylated to form 5-methylcytosine"
gccttggccacccaaagtcctgggattacaggtgtgagccaccgcacccagccaggattacggtctctggctgactgagcctgggtcatgccaaagcagcccttgcacatctcccatgcctc

SEQ ID NO: 14517 - DNA, 122 bp, Homo sapiens
  misc_feature (61)..(62): /note="This region represents a CpG dinucleotide"
  misc_feature (61)..(61): /note="Nucleotide may be methylated to form 5-methylcytosine"
gaaggaagtgagtgccctcataaaagaaagaatgtgtcgcaccaaaaggctcttcaacaacgacagctcctggaaacctaccctgttcgagccacactggagtgaattcgaactgggcaatg

SEQ ID NO: 14518 - DNA, 122 bp, Homo sapiens
  misc_feature (61)..(62): /note="This region represents a CpG dinucleotide"
  misc_feature (61)..(61): /note="Nucleotide may be methylated to form 5-methylcytosine"
ttctcgaagtgctgtccactcagagaagatctggctgaggaaacagacacacagaggccacgcagccagaaccacagcccaaatcagcccataggaacaaggtggggagaccaccactactg

SEQ ID NO: 14519 - DNA, 122 bp, Homo sapiens
  misc_feature (61)..(62): /note="This region represents a CpG dinucleotide"
  misc_feature (61)..(61): /note="Nucleotide may be methylated to form 5-methylcytosine"
cccggggttattttgcaaacccaactgtttcaaagtgaccaccagccacacccacagaagcggccttgagctgcccagttctttttctttggcggggggagagggggcggataagatcatta

SEQ ID NO: 14520 - DNA, 122 bp, Homo sapiens
  misc_feature (61)..(62): /note="This region represents a CpG dinucleotide"
  misc_feature (61)..(61): /note="Nucleotide may be methylated to form 5-methylcytosine"
tgatgaggcccattcccacagggctggtaaacagcaatctaggacaattgagggagacagcggtagcactgcaaacacaggtgtcagagttttaatcccagctctgtgcctaatttgctatt

SEQ ID NO: 14521 - DNA, 122 bp, Homo sapiens
  misc_feature (61)..(62): /note="This region represents a CpG dinucleotide"
  misc_feature (61)..(61): /note="Nucleotide may be methylated to form 5-methylcytosine"
tgccggcttatgctgttggaatcacatcttagtagttacataatgccatcaggaccagtacgagactggtttggtgattgagcccatttcctgggatttgttcctatgtattgcagacagat

SEQ ID NO: 14522 - DNA, 122 bp, Homo sapiens
  misc_feature (61)..(62): /note="This region represents a CpG dinucleotide"
  misc_feature (61)..(61): /note="Nucleotide may be methylated to form 5-methylcytosine"
ctggctggcagcttaagcctgagtcagtcttcttcgccttttgtaattgtcttaagtaggcgtggctacgtggctacaagtgcgtcgtcaaaacggggaatttacagggaagaattcagttt

SEQ ID NO: 14523 - DNA, 122 bp, Homo sapiens
  misc_feature (61)..(62): /note="This region represents a CpG dinucleotide"
  misc_feature (61)..(61): /note="Nucleotide may be methylated to form 5-methylcytosine"
ttttatcaaatgcctactaagcatcattttttaaatgccatagtggattaatccttgtcccgcctgtatcaaagtacacttagactggcactcagtgacagtttgggaagaagccagagctg

SEQ ID NO: 14524 - DNA, 122 bp, Homo sapiens
  misc_feature (61)..(62): /note="This region represents a CpG dinucleotide"
  misc_feature (61)..(61): /note="Nucleotide may be methylated to form 5-methylcytosine"
acaaagttattaggactccaggtacacttgtctcataaactgaagtcatccgtggtttgccgtgaggtctcctgagtttattggagcctttattgcgtctatgacagagagagagaaagtgc

SEQ ID NO: 14525 - DNA, 122 bp, Homo sapiens
  misc_feature (61)..(62): /note="This region represents a CpG dinucleotide"
  misc_feature (61)..(61): /note="Nucleotide may be methylated to form 5-methylcytosine"
gtcttaaggaattatcagataaggtcggtcatctgatgagcagaaaagacttgctttttacgcagataaacaggaagtttgaaaacacaagagaagtctgagtcagaaatgttcatttaata

SEQ ID NO: 14526 - DNA, 122 bp, Homo sapiens
  misc_feature (61)..(62): /note="This region represents a CpG dinucleotide"
  misc_feature (61)..(61): /note="Nucleotide may be methylated to form 5-methylcytosine"
atattttagaaaaatgtccaagcaatgcacgacattgaaaactgcttatttccaaccattcgttgctcagtcaccaagtgctggccattgcctagatcctgggagaagcggaatgtttgttg

SEQ ID NO: 14527 - DNA, 122 bp, Homo sapiens
  misc_feature (61)..(62): /note="This region represents a CpG dinucleotide"
  misc_feature (61)..(61): /note="Nucleotide may be methylated to form 5-methylcytosine"
aggctctgagctccagcctctcactccaccaccagacaagtttacaatggaactagctcacgccccaatgacatggaagggagaatgagcccttggtaaatatgaaaagccacctcctccct

SEQ ID NO: 14528 - DNA, 122 bp, Homo sapiens
  misc_feature (61)..(62): /note="This region represents a CpG dinucleotide"
  misc_feature (61)..(61): /note="Nucleotide may be methylated to form 5-methylcytosine"
gctggggcctggtctgtgttcccgtgctcccataaactccctgatgtcactaggaaaatacgcatcaaaaccacagtgagatatgacttcacaccttctggaatggctgtattttttttttt

SEQ ID NO: 14529 - DNA, 122 bp, Homo sapiens
  misc_feature (61)..(62): /note="This region represents a CpG dinucleotide"
  misc_feature (61)..(61): /note="Nucleotide may be methylated to form 5-methylcytosine"
aatgatttttaaaatgagggagcaagacaaagcaccaggaacagaaaacacaagactgaacgtgcatgcttaaaacacagaaagaccagtgtggctggagctcaagggaagaagcagaggtg

SEQ ID NO: 14530 - DNA, 122 bp, Homo sapiens
  misc_feature (61)..(62): /note="This region represents a CpG dinucleotide"
  misc_feature (61)..(61): /note="Nucleotide may be methylated to form 5-methylcytosine"
ccaatgcaaatgagtcagaggatttgcttcagacactgagataattgtgtaactctacagcggaaaatgccattggagagtacttgctgacctcacagttgaaaaaaactatttaaaagatg

SEQ ID NO: 14531 - DNA, 122 bp, Homo sapiens
  misc_feature (61)..(62): /note="This region represents a CpG dinucleotide"
  misc_feature (61)..(61): /note="Nucleotide may be methylated to form 5-methylcytosine"
gatcaagcccctccccaacttgtctcttctcacaaacacattgtattttactgtggggggcggggggatagggggcggtggtagcaaaatgttacaggcatacctggttttattgcacttca

SEQ ID NO: 14532 - DNA, 122 bp, Homo sapiens
  misc_feature (61)..(62): /note="This region represents a CpG dinucleotide"
  misc_feature (61)..(61): /note="Nucleotide may be methylated to form 5-methylcytosine"
tcccttcatggcttgattgctcatttctttttagcactgaataatacttcattgttgggacgtactacagttaatccaatcctgcagcatctgcttcctccatattcctttgtctgttgttt

SEQ ID NO: 14533 - DNA, 122 bp, Homo sapiens
  misc_feature (61)..(62): /note="This region represents a CpG dinucleotide"
  misc_feature (61)..(61): /note="Nucleotide may be methylated to form 5-methylcytosine"
ccatggctcaatctgattagatcatggcttataccatgtatctacttcttaattctgttccggttctttggtctgagcatttaggttgcgcctgtggttgcatgcttggttcttctgggcac

SEQ ID NO: 14534 - DNA, 122 bp, Homo sapiens
  misc_feature (61)..(62): /note="This region represents a CpG dinucleotide"
  misc_feature (61)..(61): /note="Nucleotide may be methylated to form 5-methylcytosine"
aagagaagtgcagcacacttcctagtttcagctggcactaaaacaagagaatgagttgtgcgttttttggtggaggtgcctcctgatcgagtctacacactggcttgtgaacatgttgtctg

SEQ ID NO: 14535 - DNA, 122 bp, Homo sapiens
  misc_feature (61)..(62): /note="This region represents a CpG dinucleotide"
  misc_feature (61)..(61): /note="Nucleotide may be methylated to form 5-methylcytosine"
tatgactcgtgttttacatcctgtacttgagcaaacaatcttactgtgaatctctcaaatcgtatcatgagttcctcagactgttgatgtactaattaatacgtaaactactgacactgaaa

SEQ ID NO: 14536 - DNA, 122 bp, Homo sapiens
  misc_feature (61)..(62): /note="This region represents a CpG dinucleotide"
  misc_feature (61)..(61): /note="Nucleotide may be methylated to form 5-methylcytosine"
tggacgaggactgactgcggcaaattcactccagggctgggcgtccacgtccagccagaacgcagaacttgccgggttgcgctgctcacacaggccccgccgtccccgccgtccccgccgtc

SEQ ID NO: 14537 - DNA, 122 bp, Homo sapiens
  misc_feature (61)..(62): /note="This region represents a CpG dinucleotide"
  misc_feature (61)..(61): /note="Nucleotide may be methylated to form 5-methylcytosine"
gagtctgaggggacaaggtcagaggggtgatgggggcacgttatgtggggcccactgagacgggctgaggatgaggactttggtcttattactaagtgagaaaagaaccatgagagggttaa

SEQ ID NO: 14538 - DNA, 122 bp, Homo sapiens
  misc_feature (61)..(62): /note="This region represents a CpG dinucleotide"
  misc_feature (61)..(61): /note="Nucleotide may be methylated to form 5-methylcytosine"
aactggcatagattttaacagggcctccagcacaaagcataagttaaaaactgacagtgccgggcatatataagcagttgtggtgaccataggcaataaatctgtcctcttggtttgaagtt

SEQ ID NO: 14539 - DNA, 122 bp, Homo sapiens
  misc_feature (61)..(62): /note="This region represents a CpG dinucleotide"
  misc_feature (61)..(61): /note="Nucleotide may be methylated to form 5-methylcytosine"
tggatggtccacaaatctcaatgtgattcctaacatgagttaagctgtccaaccctgtgacgttatcaggggatttgtgattaatacatagtgacaccatttaactgtggcagaggttctta

SEQ ID NO: 14540 - DNA, 122 bp, Homo sapiens
  misc_feature (61)..(62): /note="This region represents a CpG dinucleotide"
  misc_feature (61)..(61): /note="Nucleotide may be methylated to form 5-methylcytosine"
tgtgtgcatcagtgagtcatgtttcagtcatctaatgccgtgtaataaactaccccaagacgtaatggcatttaaaccctcaatgatcattttagtgtctcttagggttcggggggttacct

SEQ ID NO: 14541 - DNA, 122 bp, Homo sapiens
  misc_feature (61)..(62): /note="This region represents a CpG dinucleotide"
  misc_feature (61)..(61): /note="Nucleotide may be methylated to form 5-methylcytosine"
gggtgtggtcttcccactggagcatggaaactgcaaagccaccagcttgagggaggggcacgtggttaaggaagcaaagaaaaagctgacatgagaactgtttccaggaacaaaccatgaat

SEQ ID NO: 14542 - DNA, 122 bp, Homo sapiens
  misc_feature (61)..(62): /note="This region represents a CpG dinucleotide"
  misc_feature (61)..(61): /note="Nucleotide may be methylated to form 5-methylcytosine"
ctcttctgtaaaatcttagaaggcaatgagaagctgtgagctcatctagttttggagagacgagcttaggcagatctgagttcagatccctgttctgccactttctgatcatgtgaccctgg

SEQ ID NO: 14543 - DNA, 122 bp, Homo sapiens
  misc_feature (61)..(62): /note="This region represents a CpG dinucleotide"
  misc_feature (61)..(61): /note="Nucleotide may be methylated to form 5-methylcytosine"
tcttgctcttgcgggtactgtgcaggtctctgtgtgtgccaggttctgttgctgttttaacgtcctacgtaaataaacaaaacaccctagaatgaaaagtaacaagtcacctccttccctgt

SEQ ID NO: 14544 - DNA, 122 bp, Homo sapiens
  misc_feature (61)..(62): /note="This region represents a CpG dinucleotide"
  misc_feature (61)..(61): /note="Nucleotide may be methylated to form 5-methylcytosine"
tttttccctcttgccttggctgtgtagcaaggccttggtgaatcgcagtgcactgcctggcgtggagcagcagatggcagcaaaaccaaggctcttggagcagaagcagcacagttcacggc

SEQ ID NO: 14545 - DNA, 122 bp, Homo sapiens
  misc_feature (61)..(62): /note="This region represents a CpG dinucleotide"
  misc_feature (61)..(61): /note="Nucleotide may be methylated to form 5-methylcytosine"
catcaggtgtgacaggacacacagaaatggtgattgtgtgcaaaccacaatgaacacaaccgttgaaagaatgaaaagttcagcacaaacttcagcatggaagaaatataatcccagaacag

SEQ ID NO: 14546 - DNA, 122 bp, Homo sapiens
  misc_feature (61)..(62): /note="This region represents a CpG dinucleotide"
  misc_feature (61)..(61): /note="Nucleotide may be methylated to form 5-methylcytosine"
gccagggtttgccactggcaagttggattttgtgttacgtgcctaaccaggagttgtcaccgcttgaggcttaacctggttctgggcggctcggtgtgtgtgtcccaaggccatgccacaca

SEQ ID NO: 14547 - DNA, 122 bp, Homo sapiens
  misc_feature (61)..(62): /note="This region represents a CpG dinucleotide"
  misc_feature (61)..(61): /note="Nucleotide may be methylated to form 5-methylcytosine"
tctggctccggcgggaagcggaaaacgggaggcggctctcgaagcttcccgaccttcctgcgccatcaacttctcaggagtggctggagaaagatgcatgtgccaagcgagacaacaacccc

SEQ ID NO: 14548 - DNA, 122 bp, Homo sapiens
  misc_feature (61)..(62): /note="This region represents a CpG dinucleotide"
  misc_feature (61)..(61): /note="Nucleotide may be methylated to form 5-methylcytosine"
agcagtatagaagggtcattcagaagtccaaagtgaaaccatcttaagcaaccatgtttacgcgagatgaaaagctagtggctttaacctgtgggaaaatgtaccacaccctgccaatgcaa

SEQ ID NO: 14549 - DNA, 122 bp, Homo sapiens
  misc_feature (61)..(62): /note="This region represents a CpG dinucleotide"
  misc_feature (61)..(61): /note="Nucleotide may be methylated to form 5-methylcytosine"
tcatcatgtctgtctctagctcacaagggtgatgtgatcatcttacgtgtaaaagaaaaccgaatttcacttctggtggtgactattgtctgattcatcattacagtaaccacccaaggaaa

SEQ ID NO: 14550 - DNA, 122 bp, Homo sapiens
  misc_feature (61)..(62): /note="This region represents a CpG dinucleotide"
  misc_feature (61)..(61): /note="Nucleotide may be methylated to form 5-methylcytosine"
cttatttaattattgtaatcgcacatgatcttaggctcattgtacatattctgagcaatacgcaattccccagagtgactagtagaataattcaaaccagaacccacgcacttactttctct

SEQ ID NO: 14551 - DNA, 122 bp, Homo sapiens
  misc_feature (61)..(62): /note="This region represents a CpG dinucleotide"
  misc_feature (61)..(61): /note="Nucleotide may be methylated to form 5-methylcytosine"
atattttttaatatatctagtgaatttgtaaaaccaagaaaggtatagatgtgttgaatacggaacaattcctggaaagctaggactataggcccgcattgtatttactgaaagaagcataa

SEQ ID NO: 14552 - DNA, 122 bp, Homo sapiens
  misc_feature (61)..(62): /note="This region represents a CpG dinucleotide"
  misc_feature (61)..(61): /note="Nucleotide may be methylated to form 5-methylcytosine"
ttcaagggattttcctgcctcagcctgctgagcagctgggattacaggcatgagccaccgcgcccagcctgcatgggctcattctcttatctgacatggagagagaaaagggtgcagacatc

SEQ ID NO: 14553 - DNA, 122 bp, Homo sapiens
  misc_feature (61)..(62): /note="This region represents a CpG dinucleotide"
  misc_feature (61)..(61): /note="Nucleotide may be methylated to form 5-methylcytosine"
gtggaaggagcttgctggagctgctggtcagtgcagcagcatggggaactgggcccacagcgtggtgcttcatgaaccttgcatgcttcctggccactctcgcagaatagtcagactctgtg

SEQ ID NO: 14554 - DNA, 122 bp, Homo sapiens
  misc_feature (61)..(62): /note="This region represents a CpG dinucleotide"
  misc_feature (61)..(61): /note="Nucleotide may be methylated to form 5-methylcytosine"
taattgatctataagtagataagcacactcagccttattaacaccacattctaaccattacgttacatgatatgtggaaaattggtgcctttatcactatggaaccagctgcatgttgaact

SEQ ID NO: 14555 - DNA, 122 bp, Homo sapiens
  misc_feature (61)..(62): /note="This region represents a CpG dinucleotide"
  misc_feature (61)..(61): /note="Nucleotide may be methylated to form 5-methylcytosine"
agtagggatttactttacatgggtacagtaggatatactgatatgattcctggttacttccgtgagtaggtaagttatgaataatggatcatcccttcacccaatgtgctgactcacttagc

SEQ ID NO: 14556 - DNA, 122 bp, Homo sapiens
  misc_feature (61)..(62): /note="This region represents a CpG dinucleotide"
  misc_feature (61)..(61): /note="Nucleotide may be methylated to form 5-methylcytosine"
gggttttcctttccaaatggctctaggaagtcagtgtgaaacggccttaggttccctgctcgcagaccctgttctcctgcctaactactagagtacagtgtgcacttcctaaaaacggaagc

SEQ ID NO: 14557 - DNA, 122 bp, Homo sapiens
  misc_feature (61)..(62): /note="This region represents a CpG dinucleotide"
  misc_feature (61)..(61): /note="Nucleotide may be methylated to form 5-methylcytosine"
gaaaggaaaggaaggaaggaaagaaggccagcctcagcctcccaaagtgctgggattacacgtgtgagtcaccacgccaggcaaggcatggatgttttccaaaaactccctaggggatcttg

SEQ ID NO: 14558 - DNA, 122 bp, Homo sapiens
  misc_feature (61)..(62): /note="This region represents a CpG dinucleotide"
  misc_feature (61)..(61): /note="Nucleotide may be methylated to form 5-methylcytosine"
gtaaggacaccttctgagtctgcacccctttaattgacacataggggatgtgacccctgacgtttctgcttcccttattctttctgcaactaagcaaacatagaatgtggattttcccatgc

SEQ ID NO: 14559 - DNA, 122 bp, Homo sapiens
  misc_feature (61)..(62): /note="This region represents a CpG dinucleotide"
  misc_feature (61)..(61): /note="Nucleotide may be methylated to form 5-methylcytosine"
tggtaacctgtttctgagaacacctgaaatcaatggctatacattccaaaccaatctaaacgctatttccttttggtgtgggtttggttttgttcattttgaaatacacttttgaacactga

SEQ ID NO: 14560 - DNA, 122 bp, Homo sapiens
  misc_feature (61)..(62): /note="This region represents a CpG dinucleotide"
  misc_feature (61)..(61): /note="Nucleotide may be methylated to form 5-methylcytosine"
gcaggaaggactcggcagaataatgagctgtcaaacagattctagccaggcatagggtgacgctccaggctgatgagctctgtgccagaaggctggtgacaccagctggccacaaaaggcca

SEQ ID NO: 14561 - DNA, 122 bp, Homo sapiens
  misc_feature (61)..(62): /note="This region represents a CpG dinucleotide"
  misc_feature (61)..(61): /note="Nucleotide may be methylated to form 5-methylcytosine"
ccacacatgcagagtcacatgatataaaccattcattcatctgacaaatagggcacctcacgtatgtcacactctgtcctggcgtggagaatacaatggtgaaatagaaacaacacaagtct

SEQ ID NO: 14562 - DNA, 122 bp, Homo sapiens
  misc_feature (61)..(62): /note="This region represents a CpG dinucleotide"
  misc_feature (61)..(61): /note="Nucleotide may be methylated to form 5-methylcytosine"
ctgattcaaaaaaaaaaaagaaaaaatattaggcagtttatctatttaatctgtggtgtgcggagaccaggaactatcagatttatcattatttgagcaaatggttttattggatcacaatc

SEQ ID NO: 14563 - DNA, 122 bp, Homo sapiens
  misc_feature (61)..(62): /note="This region represents a CpG dinucleotide"
  misc_feature (61)..(61): /note="Nucleotide may be methylated to form 5-methylcytosine"
atccctgaaactctccacatgccatattaacctgagctgcccacctgcaggttgctttcacgtgagagggaaatagattgctatcttctgtaagatactgtattggggataaggaggttcta

SEQ ID NO: 14564 - DNA, 122 bp, Homo sapiens
  misc_feature (61)..(62): /note="This region represents a CpG dinucleotide"
  misc_feature (61)..(61): /note="Nucleotide may be methylated to form 5-methylcytosine"
acctcaggtgatccgcccaccttggcctcccaaagtgctgggattacaggcgtgagccaccgtgcccagccaagctggcttgtttttagtggaaagtgccgtgagtgtgttagggaacaggc

SEQ ID NO: 14565 - DNA, 122 bp, Homo sapiens
  misc_feature (61)..(62): /note="This region represents a CpG dinucleotide"
  misc_feature (61)..(61): /note="Nucleotide may be methylated to form 5-methylcytosine"
aacctccccaggccttggggaccagccagctgctgtgatcccagtcaggcttccatgaggcggccagcctcagggccatgagttcaatagcactgatgttcacaaggccaaagtcatcacct

SEQ ID NO: 14566 - DNA, 122 bp, Homo sapiens
  misc_feature (61)..(62): /note="This region represents a CpG dinucleotide"
  misc_feature (61)..(61): /note="Nucleotide may be methylated to form 5-methylcytosine"
atcatcacattgaggattaggtttcaacattcagaccataccctagagcgattcagagtgcgggctttggagccaggcaggttcagtcccaccacttagatataatcctggacacgtttgat

SEQ ID NO: 14567 - DNA, 122 bp, Homo sapiens
  misc_feature (61)..(62): /note="This region represents a CpG dinucleotide"
  misc_feature (61)..(61): /note="Nucleotide may be methylated to form 5-methylcytosine"
cgatgtctgcatggagctggcatttgactggcaattgcccatcttgagcagggttttcatcgagggctcggagctttagaggtgcagcgtcactcaggttcaaggtgctcagcaactctgtg

SEQ ID NO: 14568 - DNA, 122 bp, Homo sapiens
  misc_feature (61)..(62): /note="This region represents a CpG dinucleotide"
  misc_feature (61)..(61): /note="Nucleotide may be methylated to form 5-methylcytosine"
ccgcccagaatcttccttctgggatgccgactttttcaacacgtgccaggagcccttcctcggcccggaatccccagagtgcccacagtggacagggcacctggatacaccccagactaacc

SEQ ID NO: 14569 - DNA, 122 bp, Homo sapiens
  misc_feature (61)..(62): /note="This region represents a CpG dinucleotide"
  misc_feature (61)..(61): /note="Nucleotide may be methylated to form 5-methylcytosine"
gttgtgactggcatcgctgaggctgtttctttgtgtataaaatcgaataaggacacatcacgtgctagcaatccaccagcatagggcgaaggctcagcaaagagaagttctctcctcctctg

SEQ ID NO: 14570 - DNA, 122 bp, Homo sapiens
  misc_feature (61)..(62): /note="This region represents a CpG dinucleotide"
  misc_feature (61)..(61): /note="Nucleotide may be methylated to form 5-methylcytosine"
gggagctggtgcacagtatacaatgggtcctcatctttaggaatacaaacaaaaagaacacgtacagaatgtttacatgagcataggctatgtctggaaagacatacacaaggagccagtag

SEQ ID NO: 14571 - DNA, 122 bp, Homo sapiens
  misc_feature (61)..(62): /note="This region represents a CpG dinucleotide"
  misc_feature (61)..(61): /note="Nucleotide may be methylated to form 5-methylcytosine"
ggaattccagtaatgcgttatctttcattcaatccatatttacttggtggctggctctaacgcttcagtgcagagtcccttgactctccttttgcctctaatttcctccctcacctaagatt

SEQ ID NO: 14572 - DNA, 122 bp, Homo sapiens
  misc_feature (61)..(62): /note="This region represents a CpG dinucleotide"
  misc_feature (61)..(61): /note="Nucleotide may be methylated to form 5-methylcytosine"
gcgccgtccacctgtcattggatctcaagcacacctgggacactgccacattaataacagcgatgatactgtgtgtgcaggcctggcctaaatcccaggcttgagttaactgacttagcact

SEQ ID NO: 14573 - DNA, 122 bp, Homo sapiens
  misc_feature (61)..(62): /note="This region represents a CpG dinucleotide"
  misc_feature (61)..(61): /note="Nucleotide may be methylated to form 5-methylcytosine"
tgggtcccgtggaagtgacaggctgccgtaaggaagttccagcttacaggtggctatgttcgggccagcaaaatgactaatccaatgcaacagcatcagctggcttctgggctaggccctgt

SEQ ID NO: 14574 - DNA, 122 bp, Homo sapiens
  misc_feature (61)..(62): /note="This region represents a CpG dinucleotide"
  misc_feature (61)..(61): /note="Nucleotide may be methylated to form 5-methylcytosine"
gtccatgaaatgcctcatccgtaagctcagtgacttaaaacaagcaagtgtgtggacttgcgtctgaagcaggtgtggagacaggaaaaatgtgagtcagttacggtgagatattgtggcta

SEQ ID NO: 14575 - DNA, 122 bp, Homo sapiens
  misc_feature (61)..(62): /note="This region represents a CpG dinucleotide"
  misc_feature (61)..(61): /note="Nucleotide may be methylated to form 5-methylcytosine"
ttacaggcatgagccacctcgctggcctaagtctcttttagtacaggcagggtttcatcacgttggccaggctggttttgaactcctgacctcaagcgatccacctgcctcggcctcccaaa

SEQ ID NO: 14576 - DNA, 122 bp, Homo sapiens
  misc_feature (61)..(62): /note="This region represents a CpG dinucleotide"
  misc_feature (61)..(61): /note="Nucleotide may be methylated to form 5-methylcytosine"
cctagagttaagtcatagtctaacccagccaggagtgtgttcagcctggaaaaaggtggacggtgactgcacagctgcatgacctagtcaacatttaccagaaggagctggaagagcacaca

SEQ ID NO: 14577 - DNA, 122 bp, Homo sapiens
  misc_feature (61)..(62): /note="This region represents a CpG dinucleotide"
  misc_feature (61)..(61): /note="Nucleotide may be methylated to form 5-methylcytosine"
gggaacggctccaccatggcaccctggtggccctgaacatatccacacaggctacagaggcgaaagctcaaactgaggctcatctgagtcatgacaggacactttgtgatcctccagagagt

SEQ ID NO: 14578 - DNA, 122 bp, Homo sapiens
  misc_feature (61)..(62): /note="This region represents a CpG dinucleotide"
  misc_feature (61)..(61): /note="Nucleotide may be methylated to form 5-methylcytosine"
gggagcaggggaagagacaccctcctgacctccagcctcctgcctgtacctcacatttgccggacacaaaaggaagctagaggcaaaggaagctggtgattcagctcctagcactcagcccc

SEQ ID NO: 14579 - DNA, 122 bp, Homo sapiens
  misc_feature (61)..(62): /note="This region represents a CpG dinucleotide"
  misc_feature (61)..(61): /note="Nucleotide may be methylated to form 5-methylcytosine"
gaagtttaatacacccaattgttatgtttgtgaacatcctggctcagtgcttcctgtgtgcgctgcatggaatgagaatggtttcgggtgtgagagactattgaaaagatttcttcatcagt

SEQ ID NO: 14580 - DNA, 122 bp, Homo sapiens
  misc_feature (61)..(62): /note="This region represents a CpG dinucleotide"
  misc_feature (61)..(61): /note="Nucleotide may be methylated to form 5-methylcytosine"
cctcaaaggatgagcaggacttaaagggaccaaggaaaaggacaatccaagcagtgacaacggaatgagaagacaagtaataggccttcagagtgacaaggtcctttggctgaatgcaggct

SEQ ID NO: 14581 - DNA, 122 bp, Homo sapiens
  misc_feature (61)..(62): /note="This region represents a CpG dinucleotide"
  misc_feature (61)..(61): /note="Nucleotide may be methylated to form 5-methylcytosine"
atgaactcacttatgcaacgagggtatgtgagctttgcaacaccagctaacactcacttgcgtccagaagctgttcccccttttacgatattctgtggtattgccaaggttacaaaatgtaa

SEQ ID NO: 14582 - DNA, 122 bp, Homo sapiens
  misc_feature (61)..(62): /note="This region represents a CpG dinucleotide"
  misc_feature (61)..(61): /note="Nucleotide may be methylated to form 5-methylcytosine"
gaatttgctcatgcaagagctatctctatctccagcttatcaaaagactcagatataaatcgctccagaaagttgggaatgttgccacctcagttgctaagctcttgtgtaatgttgttcta

SEQ ID NO: 14583 - DNA, 122 bp, Homo sapiens
  misc_feature (61)..(62): /note="This region represents a CpG dinucleotide"
  misc_feature (61)..(61): /note="Nucleotide may be methylated to form 5-methylcytosine"
gttccgtttgtaaagagcaaggctgcacagacctgtctgctccgttgagacagtgaaggccgtctcacaaccgcaccttgggactcgcttccacataacacctcttctgttcctctcacggt

SEQ ID NO: 14584 - DNA, 122 bp, Homo sapiens
  misc_feature (61)..(62): /note="This region represents a CpG dinucleotide"
  misc_feature (61)..(61): /note="Nucleotide may be methylated to form 5-methylcytosine"
gtagtccatgagaacagattttcccatcttgagcagactctgcagagccacaaacaatgccgccttatgagctctggtcagtctggtcatgggatacctgtggggatttctttcctgtcgga

SEQ ID NO: 14585 - DNA, 122 bp, Homo sapiens
  misc_feature (61)..(62): /note="This region represents a CpG dinucleotide"
  misc_feature (61)..(61): /note="Nucleotide may be methylated to form 5-methylcytosine"
acctattttattccaaaatgaggtaggagtgctgagctaaactggtgcccttaagggttacgtcctagagactaaagatgcattcactgaaagtcattcatgagcaatgattgggaagactc

SEQ ID NO: 14586 - DNA, 122 bp, Homo sapiens
  misc_feature (61)..(62): /note="This region represents a CpG dinucleotide"
  misc_feature (61)..(61): /note="Nucleotide may be methylated to form 5-methylcytosine"
aggactggcattcgctcactcattcaacaaatattaattgagtgaacgtgtgactttccacgtagataacatggagatctgcaaagtgactaataggcatctgaaggctaacgtagttgaag

SEQ ID NO: 14587 - DNA, 122 bp, Homo sapiens
  misc_feature (61)..(62): /note="This region represents a CpG dinucleotide"
  misc_feature (61)..(61): /note="Nucleotide may be methylated to form 5-methylcytosine"
attattaattgcctaacatttggtcttctcatttgcctggggatcagagagaatccaggtcgtcaaggcaggaggaagctgttggctaatagctgcagagatttcactctctaagccttcta

SEQ ID NO: 14588 - DNA, 122 bp, Homo sapiens
  misc_feature (61)..(62): /note="This region represents a CpG dinucleotide"
  misc_feature (61)..(61): /note="Nucleotide may be methylated to form 5-methylcytosine"
gaaggacctgaggcttgaaaccagaggtgtcttttagccatgagggaaagttcagagatgcggacacagcaactcagcctcatgtggctgctaaatcaacccccaaactgcccttcctgact

SEQ ID NO: 14589 - DNA, 122 bp, Homo sapiens
  misc_feature (61)..(62): /note="This region represents a CpG dinucleotide"
  misc_feature (61)..(61): /note="Nucleotide may be methylated to form 5-methylcytosine"
tgctgcccacaaggaccagtttgaatgtcacttcctccctaacagctttccaagccactacgtgagaattaattgcttcctcctctgggatctcctagtagtttgtatctgatcctatgact

SEQ ID NO: 14590 - DNA, 122 bp, Homo sapiens
  misc_feature (61)..(62): /note="This region represents a CpG dinucleotide"
  misc_feature (61)..(61): /note="Nucleotide may be methylated to form 5-methylcytosine"
agtgagccactgcataggcccctctagtcctgagtgctccactctctcccagtgacctcacggcagtaactagggagattttatcaactaacatctcagagcaaaaagggaaaattcctcac

SEQ ID NO: 14591 - DNA, 122 bp, Homo sapiens
  misc_feature (61)..(62): /note="This region represents a CpG dinucleotide"
  misc_feature (61)..(61): /note="Nucleotide may be methylated to form 5-methylcytosine"
gcctcagatgtctcatctctaaatgaagaatgacctcatagggatgataagaggaatacacgaagtcatagctgtaaacttcttagtacagtgtctaacagaaatggttcactagcactcaa

SEQ ID NO: 14592 - DNA, 122 bp, Homo sapiens
  misc_feature (61)..(62): /note="This region represents a CpG dinucleotide"
  misc_feature (61)..(61): /note="Nucleotide may be methylated to form 5-methylcytosine"
atttctaagcactctgaagatgtaagggaagcgggctgttcctctccatcctgcccgccacgtcgcaagcccaaatggacagagggtgctcagaacccttcagtttgaagcatgtcctaaga

SEQ ID NO: 14593 - DNA, 122 bp, Homo sapiens
  misc_feature (61)..(62): /note="This region represents a CpG dinucleotide"
  misc_feature (61)..(61): /note="Nucleotide may be methylated to form 5-methylcytosine"
aagaaatatagaaaacacctaacattgctggaaactgaagaggtgttcaactcatttatccgaccttgaagccagtagagtgcaggagacatctgagtgttgtcaaggatcaacaaatctgg

SEQ ID NO: 14594 - DNA, 122 bp, Homo sapiens
  misc_feature (61)..(62): /note="This region represents a CpG dinucleotide"
  misc_feature (61)..(61): /note="Nucleotide may be methylated to form 5-methylcytosine"
agcacatatgggagctggtcactctgcattttgggccctcctggaggtgtttagaccttccgagagagaaactgagacacatgagagggaagaaatgactcagtggtgagaccctgtggagt

SEQ ID NO: 14595 - DNA, 122 bp, Homo sapiens
  misc_feature (61)..(62): /note="This region represents a CpG dinucleotide"
  misc_feature (61)..(61): /note="Nucleotide may be methylated to form 5-methylcytosine"
ccacgccctggcacgcagccccaccggctgtgccgcctctcgttcctgtcctcctggcaccgccggccacccctcagcccagccctcatggttctctaagccgccgcctcctcaggaagcct

SEQ ID NO: 14596 - DNA, 122 bp, Homo sapiens
  misc_feature (61)..(62): /note="This region represents a CpG dinucleotide"
  misc_feature (61)..(61): /note="Nucleotide may be methylated to form 5-methylcytosine"
aaatcaatctgctcaccctccagactgtgacacagcactatacaaggacaatcataggaccgtgagtcaaggagaagcagggtgagccttgtcagggcagtggcctcctcagcccacccaga

SEQ ID NO: 14597 - DNA, 122 bp, Homo sapiens
  misc_feature (61)..(62): /note="This region represents a CpG dinucleotide"
  misc_feature (61)..(61): /note="Nucleotide may be methylated to form 5-methylcytosine"
tttctgtgtcgcagaagcatggtcagcattgatgctatttagcattttatcagctgagcacgagaggagacaggagctctttgagcgccgggcgaaggccctgtggctgatgctgacccccg

SEQ ID NO: 14598 - DNA, 122 bp, Homo sapiens
  misc_feature (61)..(62): /note="This region represents a CpG dinucleotide"
  misc_feature (61)..(61): /note="Nucleotide may be methylated to form 5-methylcytosine"
aggtcactcaagaaactctatggagaggtccacgtggcaaggaactgagccctcctgctacgagccagtgaggaactgaaccctccaactaccaaccacgtggggcagccatcttggaaaca

SEQ ID NO: 14599 - DNA, 122 bp, Homo sapiens
  misc_feature (61)..(62): /note="This region represents a CpG dinucleotide"
  misc_feature (61)..(61): /note="Nucleotide may be methylated to form 5-methylcytosine"
tggccctttggatggttctgcctcatgcagcttgaggctaggagagctgagaccaggctacggtttggcttctgcctctttatttcggggaatggcatgaagatcaaagtgctcagctgctg

SEQ ID NO: 14600 - DNA, 122 bp, Homo sapiens
  misc_feature (61)..(62): /note="This region represents a CpG dinucleotide"
  misc_feature (61)..(61): /note="Nucleotide may be methylated to form 5-methylcytosine"
gaaacaggcttaggttatatggctttcccaaggtcatcctggtcacagagctagtaaggacgacttggaattgacccatggtgtagcatgtctgaagtccaaggtcttacctccctctgcta

SEQ ID NO: 14601 - DNA, 122 bp, Homo sapiens
  misc_feature (61)..(62): /note="This region represents a CpG dinucleotide"
  misc_feature (61)..(61): /note="Nucleotide may be methylated to form 5-methylcytosine"
tgttactcatgtggttttcccgacatccctcctctctcaggtaatgattcattggtgtggcgcaagacaagtcaaagcaccagtgtttcaactaagaaagaagatgagacaatcacaaggcc

SEQ ID NO: 14602 - DNA, 122 bp, Homo sapiens
  misc_feature (61)..(62): /note="This region represents a CpG dinucleotide"
  misc_feature (61)..(61): /note="Nucleotide may be methylated to form 5-methylcytosine"
caaacaaaactgaatgaagttgcttgaaaagaaaattttgcttataggtaagtctctgtacggagagagccaatgcatccagattcaactgctaatcagaaaatctgggttttggcccctgc

SEQ ID NO: 14603 - DNA, 122 bp, Homo sapiens
  misc_feature (61)..(62): /note="This region represents a CpG dinucleotide"
  misc_feature (61)..(61): /note="Nucleotide may be methylated to form 5-methylcytosine"
gtgagacagtgagcatggggtcggaaatatgtcagctccatagcttactacctttgagaccgtgaataagttaatgagccttgctaagcctcagtttcctcaaatgtaaaatggaatagtac

SEQ ID NO: 14604 - DNA, 122 bp, Homo sapiens
  misc_feature (61)..(62): /note="This region represents a CpG dinucleotide"
  misc_feature (61)..(61): /note="Nucleotide may be methylated to form 5-methylcytosine"
agggaaggcagtctggatggtcataagtaaaactactgggacatcatgaccctgcattaacgtagaatgagtctggttatcaatgggcagcttaagaaaaacagaatggcaaatctacttgt

SEQ ID NO: 14605 - DNA, 122 bp, Homo sapiens
  misc_feature (61)..(62): /note="This region represents a CpG dinucleotide"
  misc_feature (61)..(61): /note="Nucleotide may be methylated to form 5-methylcytosine"
tgaatggggtacgatattctatcgcaataacaacagctgacatttattgactagttcctacgttagtccataaaggacatgattaatgtcatttaaccctcataacaactctatggagttga

SEQ ID NO: 14606 - DNA, 122 bp, Homo sapiens
  misc_feature (61)..(62): /note="This region represents a CpG dinucleotide"
  misc_feature (61)..(61): /note="Nucleotide may be methylated to form 5-methylcytosine"
gattacaggcgtgagccaccgcgcctggccaactacacaattgttgagagcctacccactcgaggctgatcaacagccaaggctaggacagttctgctgggacaaccagtcccacgtcttcc

SEQ ID NO: 14607 - DNA, 122 bp, Homo sapiens
  misc_feature (61)..(62): /note="This region represents a CpG dinucleotide"
  misc_feature (61)..(61): /note="Nucleotide may be methylated to form 5-methylcytosine"
atgggatcacctaaggaatagtctagacagagaaaacattcaagtactaaaccctgaggacgccccaacatttaaaggctggaaattgaggagaaaccagtaaagaaaactgagtagccagt

SEQ ID NO: 14608 - DNA, 122 bp, Homo sapiens
  misc_feature (61)..(62): /note="This region represents a CpG dinucleotide"
  misc_feature (61)..(61): /note="Nucleotide may be methylated to form 5-methylcytosine"
ggaccagcctcaacaccacccgtagggtactcaaagtccggtggcgacgaaggaatgagacgagacaggttaagagtgcataaagattgggggccagggggccaattgcaaaatggaggctg

SEQ ID NO: 14609 - DNA, 122 bp, Homo sapiens
  misc_feature (61)..(62): /note="This region represents a CpG dinucleotide"
  misc_feature (61)..(61): /note="Nucleotide may be methylated to form 5-methylcytosine"
ttggatgtgctgttcccatctagtactgaataactcataaaactgtgtgtctaggttgggcgtggagcaaacaaaagacctgcaccagatccagattgagaagcaagcagccaggctatgcg

SEQ ID NO: 14610 - DNA, 122 bp, Homo sapiens
  misc_feature (61)..(62): /note="This region represents a CpG dinucleotide"
  misc_feature (61)..(61): /note="Nucleotide may be methylated to form 5-methylcytosine"
ccctaattctctgaagttttacacaatagagtttgtcttccatttcatgaagtctcagcccgtgactgtgacctttacctttttacttttgctagaaatattttttcatgagggtattttaa

SEQ ID NO: 14611 - DNA, 122 bp, Homo sapiens
  misc_feature (61)..(62): /note="This region represents a CpG dinucleotide"
  misc_feature (61)..(61): /note="Nucleotide may be methylated to form 5-methylcytosine"
aagcaggaagatagaggatgaccaactgctctgagaagcaggctgctgtgaagttgattacgtttgcaggacagcctctaagatgtcttcgaggccaggacacagaccctctagaagccagc

SEQ ID NO: 14612 - DNA, 122 bp, Homo sapiens
  misc_feature (61)..(62): /note="This region represents a CpG dinucleotide"
  misc_feature (61)..(61): /note="Nucleotide may be methylated to form 5-methylcytosine"
ataaccactttagctctactggcttccccccccaaaaaaaacctagcttccgacctgctccgaatgacttgaggtgaaaatctacagaggctaaagagatgtccttgcaaaaatgctacttc

SEQ ID NO: 14613 - DNA, 122 bp, Homo sapiens
  misc_feature (61)..(62): /note="This region represents a CpG dinucleotide"
  misc_feature (61)..(61): /note="Nucleotide may be methylated to form 5-methylcytosine"
cccctacctgcaattaatatattctcattctcatcctgtttttaaagataaacaaaggaacgtgaaactccacaaggccagaagcagccacttgttacaggtgcttcctgctgaaagaagcc

SEQ ID NO: 14614 - DNA, 122 bp, Homo sapiens
  misc_feature (61)..(62): /note="This region represents a CpG dinucleotide"
  misc_feature (61)..(61): /note="Nucleotide may be methylated to form 5-methylcytosine"
aaaaccctgaagttaaatgtcactttactaggggttgggggtaataggaggggatcaaaccgaggccagagaggggaggccaggttgtaaagggtctatgaactacttgaggaaatttaaat

SEQ ID NO: 14615 - DNA, 122 bp, Homo sapiens
  misc_feature (61)..(62): /note="This region represents a CpG dinucleotide"
  misc_feature (61)..(61): /note="Nucleotide may be methylated to form 5-methylcytosine"
ggggaatagggaaatggaagttgttgtgtaatgagtacagagctacagtcattaagtcagcgtaacatccatttgcaacatgaaaagagttctggagatgagtgtttgcacaacagtgtgaa

SEQ ID NO: 14616 - DNA, 122 bp, Homo sapiens
  misc_feature (61)..(62): /note="This region represents a CpG dinucleotide"
  misc_feature (61)..(61): /note="Nucleotide may be methylated to form 5-methylcytosine"
tgcgctttttctctgggtttgccggttctggacctctcgtgggaacagagttgctccatgcgctatccttccatctggctccttccacttcacgtcatggctttgagactcctccacgtggt

SEQ ID NO: 14617 - DNA, 122 bp, Homo sapiens
  misc_feature (61)..(62): /note="This region represents a CpG dinucleotide"
  misc_feature (61)..(61): /note="Nucleotide may be methylated to form 5-methylcytosine"
catgatccgcctgcctcggcctcccaaagtgttgggattacaggtgtgagccaccgcacccggcctctgagaaatatttagattgtacgcctcaaatgggcagggactgtgtcttacacttt

SEQ ID NO: 14618 - DNA, 122 bp, Homo sapiens
  misc_feature (61)..(62): /note="This region represents a CpG dinucleotide"
  misc_feature (61)..(61): /note="Nucleotide may be methylated to form 5-methylcytosine"
tccttcaatgttgctcattgagacaggcactgagcaagagtctataatctcaggactgcccgcatcttctgcttcccccaatgattttggcccagcccctacagccgatgcctgttgctcct

SEQ ID NO: 14619 - DNA, 122 bp, Homo sapiens
  misc_feature (61)..(62): /note="This region represents a CpG dinucleotide"
  misc_feature (61)..(61): /note="Nucleotide may be methylated to form 5-methylcytosine"
gaacctagttattcaactaaacactaatctaggtgttgctgtgaagttattatgttgatgcggttaggttagcacgtctacagttgcttgactttaaaaacaggacatgaccctcaaggatg

SEQ ID NO: 14620 - DNA, 122 bp, Homo sapiens
  misc_feature (61)..(62): /note="This region represents a CpG dinucleotide"
  misc_feature (61)..(61): /note="Nucleotide may be methylated to form 5-methylcytosine"
gtcactggcagacaaacgaagcaagggccagaaaaatgctcatgaataattcactgatcacgaacgggatttgtttgttgcacactcagtgagcagtcttgccataatcttttagatccatt

SEQ ID NO: 14621 - DNA, 122 bp, Homo sapiens
  misc_feature (61)..(62): /note="This region represents a CpG dinucleotide"
  misc_feature (61)..(61): /note="Nucleotide may be methylated to form 5-methylcytosine"
tctgaagttttatcaccaacacagcagtaataagtgctggccagaaagacttctgctcttcggcaactcctgcagtttaagcctgtaaagttaggggtcattcagaggtcagtgccagctgg

SEQ ID NO: 14622 - DNA, 122 bp, Homo sapiens
  misc_feature (61)..(62): /note="This region represents a CpG dinucleotide"
  misc_feature (61)..(61): /note="Nucleotide may be methylated to form 5-methylcytosine"
gcgacgtcttctggggcgcctggtatccgtaggagtcaaagccgccgatgaagtcaactgcggaagaggggcggcgcatgttagggatcggcggcgggggcgaggagagggagactgggtcc

SEQ ID NO: 14623 - DNA, 122 bp, Homo sapiens
  misc_feature (61)..(62): /note="This region represents a CpG dinucleotide"
  misc_feature (61)..(61): /note="Nucleotide may be methylated to form 5-methylcytosine"
ctatggctgctcctgcaggaggtaccaaatgcttcaacatgagtcaacagagagccacaccggggatgctgtggccactgcggatgacatcaggtctgattttcattgtgtaatgaaaatat

SEQ ID NO: 14624 - DNA, 122 bp, Homo sapiens
  misc_feature (61)..(62): /note="This region represents a CpG dinucleotide"
  misc_feature (61)..(61): /note="Nucleotide may be methylated to form 5-methylcytosine"
tttttcttctgttgcacaaacatagtgtttcccagcttctcttgcagttttgcatgaccacgtaactgagttctggacaatgcacatgtaagaggaaatgacatggcacttcagggccatgg

SEQ ID NO: 14625 - DNA, 122 bp, Homo sapiens
  misc_feature (61)..(62): /note="This region represents a CpG dinucleotide"
  misc_feature (61)..(61): /note="Nucleotide may be methylated to form 5-methylcytosine"
ccagccagggtccaggcccctccgtaaggcatctgttctgataggtcagtgcttgtgccacgttggttgacaaatacttgcacatcacccctgcttgactgaatttatggtaactggagttt

SEQ ID NO: 14626 - DNA, 122 bp, Homo sapiens
  misc_feature (61)..(62): /note="This region represents a CpG dinucleotide"
  misc_feature (61)..(61): /note="Nucleotide may be methylated to form 5-methylcytosine"
gagtgatacaaattgttgacgtactgattaatgtaagacctactgacaaagaacaaaggacgcagatttatttctgagtcatgaggttttactgattgtcacacaggtagacattttagcac

SEQ ID NO: 14627 - DNA, 122 bp, Homo sapiens
  misc_feature (61)..(62): /note="This region represents a CpG dinucleotide"
  misc_feature (61)..(61): /note="Nucleotide may be methylated to form 5-methylcytosine"
ggcacaggctcaggatgtgatgaggatgaagaatgctctcctcccttcctccaccagccccggcctttcctaattgagactcatcgagccgtagccggctcctcagtacagtgacttgcaca

SEQ ID NO: 14628 - DNA, 122 bp, Homo sapiens
  misc_feature (61)..(62): /note="This region represents a CpG dinucleotide"
  misc_feature (61)..(61): /note="Nucleotide may be methylated to form 5-methylcytosine"
cagtctcctgtcatccccagcagggagctcagagtcaagcccaaagtgtctgtgtgcactcgtggcttccagagatcagcttgaagccaggagttactttgttagcaaagtttagatgtaac

SEQ ID NO: 14629 - DNA, 122 bp, Homo sapiens
  misc_feature (61)..(62): /note="This region represents a CpG dinucleotide"
  misc_feature (61)..(61): /note="Nucleotide may be methylated to form 5-methylcytosine"
aattctatcatgggcggttaggagtgtacctgccacggagctgtcatgaaggttaaatcacgcgagttgtataaagcacagagcagaatccctggcacactcttaagggctcttacacgcat

SEQ ID NO: 14630 - DNA, 122 bp, Homo sapiens
  misc_feature (61)..(62): /note="This region represents a CpG dinucleotide"
  misc_feature (61)..(61): /note="Nucleotide may be methylated to form 5-methylcytosine"
agcttctctgctagtggccacaggcagagcctgcctttgatgaggttacagaggcagccacgcctgtgctctttggactctggtgggtggggaggcttcctggtcactaaccgctcaacatc

SEQ ID NO: 14631 - DNA, 122 bp, Homo sapiens
  misc_feature (61)..(62): /note="This region represents a CpG dinucleotide"
  misc_feature (61)..(61): /note="Nucleotide may be methylated to form 5-methylcytosine"
ctatattcacacagttgtgactgtggacacgcaaaatgcctgaggccctgcgtccaatcccggaagcacagttcctgggaggagtcacttctataatagccgtatcttccctcctcgaggct

SEQ ID NO: 14632 - DNA, 122 bp, Homo sapiens
  misc_feature (61)..(62): /note="This region represents a CpG dinucleotide"
  misc_feature (61)..(61): /note="Nucleotide may be methylated to form 5-methylcytosine"
ctatcctgcccctgtctgcctagccactccttttctaggtagagtggaccttgctgttcacgtcatagatggccattccgtgtacctagactcctttttattcctttgccaacaagtaattg

SEQ ID NO: 14633 - DNA, 122 bp, Homo sapiens
  misc_feature (61)..(62): /note="This region represents a CpG dinucleotide"
  misc_feature (61)..(61): /note="Nucleotide may be methylated to form 5-methylcytosine"
ggatgtgtaggagtttgggaggattttcagcatctagcttgtcttggttatctcttttgccggttgggcctctgagggcagtaggaggtccctggggaagaggccctggttattgcaggtca

SEQ ID NO: 14634 - DNA, 122 bp, Homo sapiens
  misc_feature (61)..(62): /note="This region represents a CpG dinucleotide"
  misc_feature (61)..(61): /note="Nucleotide may be methylated to form 5-methylcytosine"
tgattgccaaattgacgcccagaaaaggtatacctgtttctgctcctaccagtggccctacgaatgctcctttccccacattcacacccccaccgagttttatcattcttttaaatctttat

SEQ ID NO: 14635 - DNA, 122 bp, Homo sapiens
  misc_feature (61)..(62): /note="This region represents a CpG dinucleotide"
  misc_feature (61)..(61): /note="Nucleotide may be methylated to form 5-methylcytosine"
aacaaggaggaacgggtttgccagcagttctggtgtggcagctgtggcggcaatgccaaccggtttgaaaccaaggaagaatgtgaggcttggtgtgtcccaatacagtaacagtacaagca

SEQ ID NO: 14636 - DNA, 122 bp, Homo sapiens
  misc_feature (61)..(62): /note="This region represents a CpG dinucleotide"
  misc_feature (61)..(61): /note="Nucleotide may be methylated to form 5-methylcytosine"
gctagctgtgaacagataaaatgtatatccatcgattaactaagccttggaaatgaaacacgtcctgtctcttgaatgctgtacacagagccaagagaaatagacggatcatcaggctttac

SEQ ID NO: 14637 - DNA, 122 bp, Homo sapiens
  misc_feature (61)..(62): /note="This region represents a CpG dinucleotide"
  misc_feature (61)..(61): /note="Nucleotide may be methylated to form 5-methylcytosine"
cctcgtgacttccttctctagcccctttccctagggactcctggaaaatgtacttgtactcgtaactgaggaattagggagaggacggagatgcttgaaaagcacttgctaattaataaaga

SEQ ID NO: 14638 - DNA, 122 bp, Homo sapiens
  misc_feature (61)..(62): /note="This region represents a CpG dinucleotide"
  misc_feature (61)..(61): /note="Nucleotide may be methylated to form 5-methylcytosine"
gggagggggggtggcagcaagtgaggacaaagctgccaagggctagcagtaaccagtcaacgggtcctaccatctgagttcctatgacaagttccccacctacatggtgaggtgttttagag

SEQ ID NO: 14639 - DNA, 122 bp, Homo sapiens
  misc_feature (61)..(62): /note="This region represents a CpG dinucleotide"
  misc_feature (61)..(61): /note="Nucleotide may be methylated to form 5-methylcytosine"
tgaattgcacatctgggcacatgtatttgatatcttgttaaccactgggcaaagcaaagtcgaaaacattacggccattcttagaatcccaaaaagctaattcctcttttttaaatctccat

SEQ ID NO: 14640 - DNA, 122 bp, Homo sapiens
  misc_feature (61)..(62): /note="This region represents a CpG dinucleotide"
  misc_feature (61)..(61): /note="Nucleotide may be methylated to form 5-methylcytosine"
gcacaggtgtgaccagaatggactaatcacccagaatgcagcttgttaaggggcttagcacgcaggcctggtcacacttggttcattccagggccttactcatcagggaggaacctggggga

SEQ ID NO: 14641 - DNA, 122 bp, Homo sapiens
  misc_feature (61)..(62): /note="This region represents a CpG dinucleotide"
  misc_feature (61)..(61): /note="Nucleotide may be methylated to form 5-methylcytosine"
gcttggggctttctaactgcccactcagtaacccaatacaggactataaaatggtgcagacgctttggaagactctctgacagttcttcaaacgattaaacgtggttgccatataacccagc

SEQ ID NO: 14642 - DNA, 122 bp, Homo sapiens
  misc_feature (61)..(62): /note="This region represents a CpG dinucleotide"
  misc_feature (61)..(61): /note="Nucleotide may be methylated to form 5-methylcytosine"
atatacccagtttgattctggacctcagctcttcaacaaagctgaggtccagaatcaaaccgggatcccctccatttctaaagcccaagttctttcatctaagatatgctgcctcagagaaa

SEQ ID NO: 14643 - DNA, 122 bp, Homo sapiens
  misc_feature (61)..(62): /note="This region represents a CpG dinucleotide"
  misc_feature (61)..(61): /note="Nucleotide may be methylated to form 5-methylcytosine"
gacagcctgatttaagccctagcaaaacctcctaccttgagcatgtctgctatattgattcgcctatggaagagttgccacgtttcaccctctacctcctaaggtggttctgccttccttaa

SEQ ID NO: 14644 - DNA, 122 bp, Homo sapiens
  misc_feature (61)..(62): /note="This region represents a CpG dinucleotide"
  misc_feature (61)..(61): /note="Nucleotide may be methylated to form 5-methylcytosine"
agcgagactgcagtggggcagacactattaaatttgctggcacagctctgagtaccccctcgcttccaccctgacttcatcccgcagtagctctcagccctcccagcccctgcagggccacg

SEQ ID NO: 14645 - DNA, 122 bp, Homo sapiens
  misc_feature (61)..(62): /note="This region represents a CpG dinucleotide"
  misc_feature (61)..(61): /note="Nucleotide may be methylated to form 5-methylcytosine"
cgccccatcccctccctctccgcaggttacctgctcaactggtgcctcctgcaggcaggacgcaacctcagtgctggccccgggcatgcgggcctcgagagggcaggtggcagggccagccg

SEQ ID NO: 14646 - DNA, 122 bp, Homo sapiens
  misc_feature (61)..(62): /note="This region represents a CpG dinucleotide"
  misc_feature (61)..(61): /note="Nucleotide may be methylated to form 5-methylcytosine"
tagaagagagactgtgctgtccaaattattcatgaagcttgtaaaatcttgttagtataacgggcaaggatagtacacaaaaagattaaaacacaatcttgtgagcataggtgaagtcaaag

SEQ ID NO: 14647 - DNA, 122 bp, Homo sapiens
  misc_feature (61)..(62): /note="This region represents a CpG dinucleotide"
  misc_feature (61)..(61): /note="Nucleotide may be methylated to form 5-methylcytosine"
caagtttgtcatttctgcaacccccaggtctgaccagtttggaacctgggctttctgagccggtctagtgggttggttgagagatgggggtttttctggtaactgcatttggtgctagccag

SEQ ID NO: 14648 - DNA, 122 bp, Homo sapiens
  misc_feature (61)..(62): /note="This region represents a CpG dinucleotide"
  misc_feature (61)..(61): /note="Nucleotide may be methylated to form 5-methylcytosine"
atgctaagtactaaggagacagatccagctccaactggttggccaagccccacacttccacgtgtgtttagagaaaagtccacagaagcgatacttacgaacggtgtcattactggaatccc

SEQ ID NO: 14649 - DNA, 122 bp, Homo sapiens
  misc_feature (61)..(62): /note="This region represents a CpG dinucleotide"
  misc_feature (61)..(61): /note="Nucleotide may be methylated to form 5-methylcytosine"
gcagaggaaacaggcaggatgaatggagagtggagaggcaggagtggaccctcctagtaacggctggtatttactgaaggtttaccatgagaaggatgcctcataaccctccccaccaagga

SEQ ID NO: 14650 - DNA, 122 bp, Homo sapiens
  misc_feature (61)..(62): /note="This region represents a CpG dinucleotide"
  misc_feature (61)..(61): /note="Nucleotide may be methylated to form 5-methylcytosine"
aaaatcacagactcctgagccggctgcctgcagatgggtcaagaaagaggcagaccacaacgtgaactcccttctggcagccagccaccgtcctccccaggcaccagaccccaagcccacct

SEQ ID NO: 14651 - DNA, 122 bp, Homo sapiens
  misc_feature (61)..(62): /note="This region represents a CpG dinucleotide"
  misc_feature (61)..(61): /note="Nucleotide may be methylated to form 5-methylcytosine"
tgaccccgcatggcatgtggtgacctccctccctgtgagcagttgtgactaataaactgccgccaatttcatctgtccagtgtgtcatgccatgtgtctagttatctcctactatttaatgg

SEQ ID NO: 14652 - DNA, 122 bp, Homo sapiens
  misc_feature (61)..(62): /note="This region represents a CpG dinucleotide"
  misc_feature (61)..(61): /note="Nucleotide may be methylated to form 5-methylcytosine"
aacacctctgatagtcttgctctgtcacccaggctggagtgttgttggttcactggaacacgagtatttatgttttatttcttaagcttagtgatgtgtgtcagacctctgagcccaagcaa

SEQ ID NO: 14653 - DNA, 122 bp, Homo sapiens
  misc_feature (61)..(62): /note="This region represents a CpG dinucleotide"
  misc_feature (61)..(61): /note="Nucleotide may be methylated to form 5-methylcytosine"
ctagctgtactgccgtctgacttccttcattagtgttcagggtggcaacattagatcacacgtcggtaggcttaagtggggagtgaattactcacaaatttcatcacagaggttatgcactg

SEQ ID NO: 14654 - DNA, 122 bp, Homo sapiens
  misc_feature (61)..(62): /note="This region represents a CpG dinucleotide"
  misc_feature (61)..(61): /note="Nucleotide may be methylated to form 5-methylcytosine"
tggggaagaggaattctggtttctgtgaatcacctcagaggagaaagactggtggaaaaccgaaggatgggagaggtcagagagccccgccttctgagaccttccagtctccttcagtttaa

SEQ ID NO: 14655 - DNA, 122 bp, Homo sapiens
  misc_feature (61)..(62): /note="This region represents a CpG dinucleotide"
  misc_feature (61)..(61): /note="Nucleotide may be methylated to form 5-methylcytosine"
tccaggaagagcctgacttgggactgaaccatttctgctacagagccattgaatgtctgccgtagattagaagtcagtcatgcacggagtgagaaggtcatccttgcggtcacaggaaaacc

SEQ ID NO: 14656 - DNA, 122 bp, Homo sapiens
  misc_feature (61)..(62): /note="This region represents a CpG dinucleotide"
  misc_feature (61)..(61): /note="Nucleotide may be methylated to form 5-methylcytosine"
ttcttggtcattcttaaggccatggcaggagcacagttcaaaatccaattcacaaggcaacgtctggaagaaagaatcaagtatgtgtgtagtgcatgatgtacctcagctactgtagtgaa

SEQ ID NO: 14657 - DNA, 122 bp, Homo sapiens
  misc_feature (61)..(62): /note="This region represents a CpG dinucleotide"
  misc_feature (61)..(61): /note="Nucleotide may be methylated to form 5-methylcytosine"
acattttttcccaatgaagttcttcctccctctgcagcgtccccagcctccagccagcttcgctagccagggacacaattggattgcaatttctagcacttcctggagatcaggtccctgaa

SEQ ID NO: 14658 - DNA, 122 bp, Homo sapiens
  misc_feature (61)..(62): /note="This region represents a CpG dinucleotide"
  misc_feature (61)..(61): /note="Nucleotide may be methylated to form 5-methylcytosine"
aggccaaggtgtttgtggtgctcgtgggaaacttagaagcacagatcccccaacctgctccggatcctcatgagcacagactggcttgcacatcattgttctcattgccttcccagacacca

SEQ ID NO: 14659 - DNA, 122 bp, Homo sapiens
  misc_feature (61)..(62): /note="This region represents a CpG dinucleotide"
  misc_feature (61)..(61): /note="Nucleotide may be methylated to form 5-methylcytosine"
gggtgtgtgttattgtgctggaagtcaaggctgatgtgagcgtattggtgggggaagtagcgtgaggacccatctgcaaatgttgcttgcatcttgcaaaccacacagaactgtggggcttg

SEQ ID NO: 14660 - DNA, 122 bp, Homo sapiens
  misc_feature (61)..(62): /note="This region represents a CpG dinucleotide"
  misc_feature (61)..(61): /note="Nucleotide may be methylated to form 5-methylcytosine"
ggacgtggtgcaaagcacagctctttagtttccaaatgaatgaaaatgacatattgaaagcggggctggccacagtatctagctagaaaacaataatgactcacaggaaagacaaagactga

SEQ ID NO: 14661 - DNA, 122 bp, Homo sapiens
  misc_feature (61)..(62): /note="This region represents a CpG dinucleotide"
  misc_feature (61)..(61): /note="Nucleotide may be methylated to form 5-methylcytosine"
cagaatggctcttaccctcttgggacccttagtgtgttctacctcaacaaaacaaggcttcgttttcataccttgtttatcagttaggttctatgctccttcaagaatctaggtcagatctc

SEQ ID NO: 14662 - DNA, 122 bp, Homo sapiens
  misc_feature (61)..(62): /note="This region represents a CpG dinucleotide"
  misc_feature (61)..(61): /note="Nucleotide may be methylated to form 5-methylcytosine"
tggttaagaaagaaaccctataaccagagttgaattcccttggtgaacgctacccaaaggcgtgcttcagggaggtgtaaccacagctatgtctgatatttaaactagccacgcattgctaa

SEQ ID NO: 14663 - DNA, 122 bp, Homo sapiens
  misc_feature (61)..(62): /note="This region represents a CpG dinucleotide"
  misc_feature (61)..(61): /note="Nucleotide may be methylated to form 5-methylcytosine"
atcaaactccaataatttacctcaaaccacaacttatcattccagcttttactccatcaccgtaccatacttgttagcctcataaaaagttatattccagtgattgcttcattctcttccaa

SEQ ID NO: 14664 - DNA, 122 bp, Homo sapiens
  misc_feature (61)..(62): /note="This region represents a CpG dinucleotide"
  misc_feature (61)..(61): /note="Nucleotide may be methylated to form 5-methylcytosine"
aaaacaagggtgaggccgggcacagtggttcacacctgctatcccaggactttggtaggccgaggcaggatgattgcttgagcccaggagcttgagaccagcctgagcaacatagggacacc

SEQ ID NO: 14665 - DNA, 122 bp, Homo sapiens
  misc_feature (61)..(62): /note="This region represents a CpG dinucleotide"
  misc_feature (61)..(61): /note="Nucleotide may be methylated to form 5-methylcytosine"
caaacctaatcctctccattacatagctctgcaggctaagttttcaggagacagcacagacggaaaagctccataaagctgttctgatcctcttagcactttgtgcaaggagcacagataag

SEQ ID NO: 14666 - DNA, 122 bp, Homo sapiens
  misc_feature (61)..(62): /note="This region represents a CpG dinucleotide"
  misc_feature (61)..(61): /note="Nucleotide may be methylated to form 5-methylcytosine"
cacggccgggactccgtccgactgcacacactgtgtttaacaagctttataaggagccatcgggctttattatggctctgcctgactccaacaaaaactgagcctggaggcccggggacacg

SEQ ID NO: 14667 - DNA, 122 bp, Homo sapiens
  misc_feature (61)..(62): /note="This region represents a CpG dinucleotide"
  misc_feature (61)..(61): /note="Nucleotide may be methylated to form 5-methylcytosine"
gacccctccctctaactctgcagttggcttactttcatacagagcttggcccgtgcagggcgttcagtaagcgtgtgttgagcagatgagcagatgagtgagtcaatgcatgccatgttctt

SEQ ID NO: 14668 - DNA, 122 bp, Homo sapiens
  misc_feature (61)..(62): /note="This region represents a CpG dinucleotide"
  misc_feature (61)..(61): /note="Nucleotide may be methylated to form 5-methylcytosine"
gtgagatccaacatggtcaaaacccctgtgaactctagagccctggcctcagactcttaccgccaccacagctgtcagggcagagaccatggagcttggcagcagaggaggggggctgcatg

SEQ ID NO: 14669 - DNA, 122 bp, Homo sapiens
  misc_feature (61)..(62): /note="This region represents a CpG dinucleotide"
  misc_feature (61)..(61): /note="Nucleotide may be methylated to form 5-methylcytosine"
acctagtcatccatgctacatgattacaaaacatctgcaaaacatgcatcacacaatctgcgcacaacagttaaacaatactagaattaaatgttttaagggcataagaagccaaatacctg

SEQ ID NO: 14670 - DNA, 122 bp, Homo sapiens
  misc_feature (61)..(62): /note="This region represents a CpG dinucleotide"
  misc_feature (61)..(61): /note="Nucleotide may be methylated to form 5-methylcytosine"
tctaatatgcattccagtggttaaagaacaggaaataatcctgaaatcaaagcttggagacgggttatttgcccttgagttccaggactcctgtgtgtttggaattgttttacataaatcca

SEQ ID NO: 14671 - DNA, 122 bp, Homo sapiens
  misc_feature (61)..(62): /note="This region represents a CpG dinucleotide"
  misc_feature (61)..(61): /note="Nucleotide may be methylated to form 5-methylcytosine"
acattttccacattgctgctggagtgatcttttaaaaatgcaactccgatgttgcctgtccgtcgggtacattcttcaatagctcttctttgccttcagtcttgctgtcatcctgttctccc

SEQ ID NO: 14672 - DNA, 122 bp, Homo sapiens
  misc_feature (61)..(62): /note="This region represents a CpG dinucleotide"
  misc_feature (61)..(61): /note="Nucleotide may be methylated to form 5-methylcytosine"
cccaatctaaccagtacaagatcagctaacccactctccctaatgccacaggtggtaacacgtcattttcagcaactgtctacagagacatccatgacacctcccctccctcactcttcata

SEQ ID NO: 14673 - DNA, 122 bp, Homo sapiens
  misc_feature (61)..(62): /note="This region represents a CpG dinucleotide"
  misc_feature (61)..(61): /note="Nucleotide may be methylated to form 5-methylcytosine"
tttgtcctcgatgtccaccccagtgcctttcgggtagtcactgctcagttaacgtggaggcgtggactaacacacagaaccttgtaggatcgcatgcaagattcaaacagttttcctcaggc

SEQ ID NO: 14674 - DNA, 122 bp, Homo sapiens
  misc_feature (61)..(62): /note="This region represents a CpG dinucleotide"
  misc_feature (61)..(61): /note="Nucleotide may be methylated to form 5-methylcytosine"
agacgtttttctgccctgcagggacaacaacggggtggacctcgctgcacagatctacgtcgttattacagcaacacaagacacggcgaggtgcgctcccggcacggaaaggtgtaaacagt

SEQ ID NO: 14675 - DNA, 122 bp, Homo sapiens
  misc_feature (61)..(62): /note="This region represents a CpG dinucleotide"
  misc_feature (61)..(61): /note="Nucleotide may be methylated to form 5-methylcytosine"
tacacatgtttgtacaaatcaatcaacattcccatctctactgactcacatggcctggaacgcaagttcacataccaaagagaactgagaagggggatgggggaaataactctccaatttat

SEQ ID NO: 14676 - DNA, 122 bp, Homo sapiens
  misc_feature (61)..(62): /note="This region represents a CpG dinucleotide"
  misc_feature (61)..(61): /note="Nucleotide may be methylated to form 5-methylcytosine"
tgctctatcgacttctcatggtatatgaaagtaattaggcttctctgaaagccagagctgcgttgagaactatatttgagtaaacacaaaagaaaagcattttgagtgttacttttaatgtt

SEQ ID NO: 14677 - DNA, 122 bp, Homo sapiens
  misc_feature (61)..(62): /note="This region represents a CpG dinucleotide"
  misc_feature (61)..(61): /note="Nucleotide may be methylated to form 5-methylcytosine"
aaagtgtccctccccattttacattgttctcagaaatgcatgggggatgtagtttctacacgccactgctgtctgattttttgataatagccatctagtgggtgtgaagtggtatcacactg

SEQ ID NO: 14678 - DNA, 122 bp, Homo sapiens
  misc_feature (61)..(62): /note="This region represents a CpG dinucleotide"
  misc_feature (61)..(61): /note="Nucleotide may be methylated to form 5-methylcytosine"
atctgcctctgccatgttgggcaactcaggccgagcatttacatgagagggcaatggcctcgttacctcactcttgctccatccctctctccagctgacaatggcatacaccagggccacac

SEQ ID NO: 14679 - DNA, 122 bp, Homo sapiens
  misc_feature (61)..(62): /note="This region represents a CpG dinucleotide"
  misc_feature (61)..(61): /note="Nucleotide may be methylated to form 5-methylcytosine"
ggactcagtgtggcagctgcttagcaagtggggagcaccaagctttggcagcccaggatgcgatcagcagcggatccttctcaggatgtctgcaggaaggaactccactctccccagagaca

SEQ ID NO: 14680 - DNA, 122 bp, Homo sapiens
  misc_feature (61)..(62): /note="This region represents a CpG dinucleotide"
  misc_feature (61)..(61): /note="Nucleotide may be methylated to form 5-methylcytosine"
ttggattaactagtttagcactgattgtttgtgatgctaagattcttccttccctctcaccgagatgtgtgtgcttggatgacaaggaaagatggagtccccagcagttgttgaaacacagc

SEQ ID NO: 14681 - DNA, 122 bp, Homo sapiens
  misc_feature (61)..(62): /note="This region represents a CpG dinucleotide"
  misc_feature (61)..(61): /note="Nucleotide may be methylated to form 5-methylcytosine"
gggaaatgctcgtttacatttagtgaatggtcctggtagttttgacaaggaaatatattacgaactaatggagaacctgctttggagatctgtgccacatgtgttccattaagcccacttct

SEQ ID NO: 14682 - DNA, 122 bp, Homo sapiens
  misc_feature (61)..(62): /note="This region represents a CpG dinucleotide"
  misc_feature (61)..(61): /note="Nucleotide may be methylated to form 5-methylcytosine"
gggagaaggaggagtactagatttggagtctggagacaccagctcaagtcctgactgccacgtccttgctgaataatcctgggcaggtcactccccacctctgagcctcagcgtcgtcatct

SEQ ID NO: 14683 - DNA, 122 bp, Homo sapiens
  misc_feature (61)..(62): /note="This region represents a CpG dinucleotide"
  misc_feature (61)..(61): /note="Nucleotide may be methylated to form 5-methylcytosine"
atctatatttagggtatgccgtctgccaacccctttggaattcaagacataaggattatacgtttcaggaagtagagacatcattaattataaagtgttcctttatgtgatcgtaattgcac

SEQ ID NO: 14684 - DNA, 122 bp, Homo sapiens
  misc_feature (61)..(62): /note="This region represents a CpG dinucleotide"
  misc_feature (61)..(61): /note="Nucleotide may be methylated to form 5-methylcytosine"
tcagcggaaaggggtgggctcttccccatgcattgtggatattcactcagaacagagacccgccccccaagagacatacagacaagtgcacacacgtacacacacacaaagccacatacagt

SEQ ID NO: 14685 - DNA, 122 bp, Homo sapiens
  misc_feature (61)..(62): /note="This region represents a CpG dinucleotide"
  misc_feature (61)..(61): /note="Nucleotide may be methylated to form 5-methylcytosine"
ttcttgaaaatagcttggatcttcttcattagtcttggtttaaaaaaaaaaaagacactacggaacacgtactggatcagaaaggcctttcattcccaaaagagattaggatatcatgttaa

SEQ ID NO: 14686 - DNA, 122 bp, Homo sapiens
  misc_feature (61)..(62): /note="This region represents a CpG dinucleotide"
  misc_feature (61)..(61): /note="Nucleotide may be methylated to form 5-methylcytosine"
tctgcccagtgagtcactgctataccaaatagaattacattttgttttcagctggaatcacgcctttaagaatcagatcacaacactgcaaggccaggcaaagaatcgagcaaatccgaatc

SEQ ID NO: 14687 - DNA, 122 bp, Homo sapiens
  misc_feature (61)..(62): /note="This region represents a CpG dinucleotide"
  misc_feature (61)..(61): /note="Nucleotide may be methylated to form 5-methylcytosine"
tcagtgccttgtgtactgcattaagtacttgctcagaggtcaagaggaggaactgactcacgcagcattagtggatgttcactaagccttctgttgattgtaacgttagtataggggaaggg

SEQ ID NO: 14688 - DNA, 122 bp, Homo sapiens
  misc_feature (61)..(62): /note="This region represents a CpG dinucleotide"
  misc_feature (61)..(61): /note="Nucleotide may be methylated to form 5-methylcytosine"
tacaagtataaaactcctaagaggcagtgcacaatacagatgtagttctgagctatcacacggccaccagcagcaccctactaaatagctgtgggaaagagacaggtctgacacataaatgg

SEQ ID NO: 14689 - DNA, 122 bp, Homo sapiens
  misc_feature (61)..(62): /note="This region represents a CpG dinucleotide"
  misc_feature (61)..(61): /note="Nucleotide may be methylated to form 5-methylcytosine"
ggttgggtggggcttgcaagtctggtggttgaatcctctgaacaagggtgtccaggggcacggcccatgattttctagtctgcaagtgtgaggatgagtgaaaagaatgttagatgaagcag

SEQ ID NO: 14690 - DNA, 122 bp, Homo sapiens
  misc_feature (61)..(62): /note="This region represents a CpG dinucleotide"
  misc_feature (61)..(61): /note="Nucleotide may be methylated to form 5-methylcytosine"
tgcccttatcagattgaggaagttcacttctattgctgctccactgagttgccctttctgcgtctgttgagataatcatgtggttttcctcccttattctattaatatggtgaattacatca

SEQ ID NO: 14691 - DNA, 122 bp, Homo sapiens
  misc_feature (61)..(62): /note="This region represents a CpG dinucleotide"
  misc_feature (61)..(61): /note="Nucleotide may be methylated to form 5-methylcytosine"
tttagaatgaccttgaaatgccttctagctgagcagtcagttgtaacacattcccagtcacgcctcccacacttctttcctgacagtatgtcatgaaaccctactgcatggaatcctgcctc

SEQ ID NO: 14692 - DNA, 122 bp, Homo sapiens
  misc_feature (61)..(62): /note="This region represents a CpG dinucleotide"
  misc_feature (61)..(61): /note="Nucleotide may be methylated to form 5-methylcytosine"
ttgttaagtcataacctaattaaggcttgttggtttcacctgtgaggtcactttttgtaacgttcaaaagctgaaaatcttaacagcttggtgtggctaaagttgagtaacaagggatttaa

SEQ ID NO: 14693 - DNA, 122 bp, Homo sapiens
  misc_feature (61)..(62): /note="This region represents a CpG dinucleotide"
  misc_feature (61)..(61): /note="Nucleotide may be methylated to form 5-methylcytosine"
cgcctttctgggttttccgctgaggtttgttgaaaagacgcctcccagactcttcactcacgaagtgtgttacaaaaactctcccggcaactgtcctgaccctcaccaatcacgctacagcc

SEQ ID NO: 14694 - DNA, 122 bp, Homo sapiens
  misc_feature (61)..(62): /note="This region represents a CpG dinucleotide"
  misc_feature (61)..(61): /note="Nucleotide may be methylated to form 5-methylcytosine"
ttccatttagcgccacaaacgcagcctcttaagagaatgggaagtttgggagtcacagaacggaagctaccattggccttaatggatgtcaaccattaaggtaagcttgggagtcggagaac

SEQ ID NO: 14695 - DNA, 122 bp, Homo sapiens
  misc_feature (61)..(62): /note="This region represents a CpG dinucleotide"
  misc_feature (61)..(61): /note="Nucleotide may be methylated to form 5-methylcytosine"
atgccctctgagggtgagattggaaaccagtctgactgaaagccagactctcaactgtgccgcagagctcaccccactgggatactgccatatgtgatgctcaccacctggctcggctgtgt

SEQ ID NO: 14696 - DNA, 122 bp, Homo sapiens
  misc_feature (61)..(62): /note="This region represents a CpG dinucleotide"
  misc_feature (61)..(61): /note="Nucleotide may be methylated to form 5-methylcytosine"
agatgcctcaccttacaggaaggagaaatcttcataaaaaatgaataatatatataacaacgaagaggataaaggtcctattgagatgaacaaatcagggaagtacaataggaactagagca

SEQ ID NO: 14697 - DNA, 122 bp, Homo sapiens
  misc_feature (61)..(62): /note="This region represents a CpG dinucleotide"
  misc_feature (61)..(61): /note="Nucleotide may be methylated to form 5-methylcytosine"
ctcacaagaagacagtatctttagattgcttaataatagttctcctccttctcaaaagcccgtcacctccccacaattacatattgccctagcttctttcctgcctcctccttttccttcct

SEQ ID NO: 14698 - DNA, 122 bp, Homo sapiens
  misc_feature (61)..(62): /note="This region represents a CpG dinucleotide"
  misc_feature (61)..(61): /note="Nucleotide may be methylated to form 5-methylcytosine"
ccttcaggtgacaacacctagggtaaaaggatgggacatcaggctgcagacgtgcgtatgcgtgtgtgcacacgcgtgcagtcttgactaggtgtggaaaaaaggtccgaagagattccaaa

SEQ ID NO: 14699 - DNA, 122 bp, Homo sapiens
  misc_feature (61)..(62): /note="This region represents a CpG dinucleotide"
  misc_feature (61)..(61): /note="Nucleotide may be methylated to form 5-methylcytosine"
gagatgggggctgcggtgactcgcgggatcaggaatttcaacctagagaacccagcggaacgggaaatcagcaagatgaagccctctcccactcccggttacccctctaccaacagcctcct

SEQ ID NO: 14700 - DNA, 122 bp, Homo sapiens
  misc_feature (61)..(62): /note="This region represents a CpG dinucleotide"
  misc_feature (61)..(61): /note="Nucleotide may be methylated to form 5-methylcytosine"
gattttacaatgagtcaggccactgtgaagggacatgctctgccggtcctgtgtttgagccgctggagaacaattaggagaactgtctatgtctgcgctcctccctggctctccatatccac

SEQ ID NO: 14701 - DNA, 122 bp, Homo sapiens
  misc_feature (61)..(62): /note="This region represents a CpG dinucleotide"
  misc_feature (61)..(61): /note="Nucleotide may be methylated to form 5-methylcytosine"
catttaagcactgtggcttagtgattaagaacacaactcatgaccgggtgcagtggcttacgcctgtaatcccagcactttgggaggctgaggcgggtggatcacctgaggacaggagttcg

SEQ ID NO: 14702 - DNA, 122 bp, Homo sapiens
  misc_feature (61)..(62): /note="This region represents a CpG dinucleotide"
  misc_feature (61)..(61): /note="Nucleotide may be methylated to form 5-methylcytosine"
accactcagatgtcgatgaagcgagctatgttgtgtaaataactcagttatcttctctatcgttactagtccttttcctcttatacgtagctttttttttttttttcatcctggtgaactta

SEQ ID NO: 14703 - DNA, 122 bp, Homo sapiens
  misc_feature (61)..(62): /note="This region represents a CpG dinucleotide"
  misc_feature (61)..(61): /note="Nucleotide may be methylated to form 5-methylcytosine"
gtcccagtagggccccagactcatacagcccagagctcctgacacaactcacagtgcatgcggacatacacacactggcattcatgcggcaaagatgtgttgacacgtacagaccagaagac

SEQ ID NO: 14704 - DNA, 122 bp, Homo sapiens
  misc_feature (61)..(62): /note="This region represents a CpG dinucleotide"
  misc_feature (61)..(61): /note="Nucleotide may be methylated to form 5-methylcytosine"
cccccaccccccctttaattgaaactgtgtgcatgcagtgagcgcaggattctagtaatccgacgggaggatccacttaaaagactaaaatccagaaaccccaggaaaaaagaataggaccg

SEQ ID NO: 14705 - DNA, 122 bp, Homo sapiens
  misc_feature (61)..(62): /note="This region represents a CpG dinucleotide"
  misc_feature (61)..(61): /note="Nucleotide may be methylated to form 5-methylcytosine"
tgaattaaagtacagacagatccacattgactttaaatgaatacatgcacggtcagaaaacggtaaccctgggcaggaatctttaagttttcagggctcattagacagtgagcaggtgaggc

SEQ ID NO: 14706 - DNA, 122 bp, Homo sapiens
  misc_feature (61)..(62): /note="This region represents a CpG dinucleotide"
  misc_feature (61)..(61): /note="Nucleotide may be methylated to form 5-methylcytosine"
agggctgcttgcgccaatctcattcccacaggatgcaagtacagaagcagagcggacgcccggaaggggtcacagagagacaggcggggcggttgaccagctgactggactcactttggaga

SEQ ID NO: 14707 - DNA, 122 bp, Homo sapiens
  misc_feature (61)..(62): /note="This region represents a CpG dinucleotide"
  misc_feature (61)..(61): /note="Nucleotide may be methylated to form 5-methylcytosine"
aaaataagtgcctcccacacaccctccctcccacctccagagtccccacattcccaggagcgggctggtctcattccatgatcctgcagggcctgctgggcgtgacatcaccagtcaccatg

SEQ ID NO: 14708 - DNA, 122 bp, Homo sapiens
  misc_feature (61)..(62): /note="This region represents a CpG dinucleotide"
  misc_feature (61)..(61): /note="Nucleotide may be methylated to form 5-methylcytosine"
caggaaactaaaaaaccacaacacttaaaagacaacttcctgtgggatttttggtgtctgcggctcagaatgaaaaaagcattatgtgtgcaaaatctttacacattttagatagaactact

SEQ ID NO: 14709 - DNA, 122 bp, Homo sapiens
  misc_feature (61)..(62): /note="This region represents a CpG dinucleotide"
  misc_feature (61)..(61): /note="Nucleotide may be methylated to form 5-methylcytosine"
tccagtgtgtgcataaacactgccctgggtgttggtggttttgctgccaggattcccctccgcttctggaaatggcacctgaattttcctgcgggaagcggggtttgccctctcctcaacca

SEQ ID NO: 14710 - DNA, 122 bp, Homo sapiens
  misc_feature (61)..(62): /note="This region represents a CpG dinucleotide"
  misc_feature (61)..(61): /note="Nucleotide may be methylated to form 5-methylcytosine"
cctgccaagctacatcaatgtggtcaagtcatgtagtgtctctactccgcagtttccccacgagtgcaaaggagggtatcattatgctaattacagagaagttgacaggatgaaaaccattt

SEQ ID NO: 14711 - DNA, 122 bp, Homo sapiens
  misc_feature (61)..(62): /note="This region represents a CpG dinucleotide"
  misc_feature (61)..(61): /note="Nucleotide may be methylated to form 5-methylcytosine"
ctccatctcaaaaaaaaaaaaaaaaagtataagaacaaaactacaaattttcagatgttacgcaactgagagaacgcagagagagttgatctcaaaaaccttaccacttcagccggaaacca

SEQ ID NO: 14712 - DNA, 122 bp, Homo sapiens
  misc_feature (61)..(62): /note="This region represents a CpG dinucleotide"
  misc_feature (61)..(61): /note="Nucleotide may be methylated to form 5-methylcytosine"
gaattcgtacccacatatttaccaattcagatccatctgtctctgaaagaatttctcctccgctgaattgcaagaacataccctagggtgtgcagtattgcaacttgggcatttcacattag

SEQ ID NO: 14713 - DNA, 122 bp, Homo sapiens
  misc_feature (61)..(62): /note="This region represents a CpG dinucleotide"
  misc_feature (61)..(61): /note="Nucleotide may be methylated to form 5-methylcytosine"
caccattgctgggaactgtgggtacccccagagtgaagcaataccatggctcagctgactcggcttctcccagtaaaggaagaatgggctggctgagcccggtgccaggactctgtagatgc

SEQ ID NO: 14714 - DNA, 122 bp, Homo sapiens
  misc_feature (61)..(62): /note="This region represents a CpG dinucleotide"
  misc_feature (61)..(61): /note="Nucleotide may be methylated to form 5-methylcytosine"
agccctgggattacagatgtgagccactgtacttggccctgcatctgctttttaatttaacgtgagatttttctcatgttactctacactttacaccaaaaccatctcttgcggtgcacagt

SEQ ID NO: 14715 - DNA, 122 bp, Homo sapiens
  misc_feature (61)..(62): /note="This region represents a CpG dinucleotide"
  misc_feature (61)..(61): /note="Nucleotide may be methylated to form 5-methylcytosine"
gacatactctactgctggaagggtcttcatcagctaagcatccagttcctaacacgacaacgtcttcctggaggcctgaatgggtccttggaacctggaatcctgtcctccaatctcaagac

SEQ ID NO: 14716 - DNA, 122 bp, Homo sapiens
  misc_feature (61)..(62): /note="This region represents a CpG dinucleotide"
  misc_feature (61)..(61): /note="Nucleotide may be methylated to form 5-methylcytosine"
tgcacatacccgtttaggttcctggtagcttttcagttgtcttttggcccaagagccccccgcttcccttaagctgactttctaaaacgcttagtcatagtctaaactattcttgcttccaa

SEQ ID NO: 14717 - DNA, 122 bp, Homo sapiens
  misc_feature (61)..(62): /note="This region represents a CpG dinucleotide"
  misc_feature (61)..(61): /note="Nucleotide may be methylated to form 5-methylcytosine"
tataaaagaggaacagcagatgctggaaaccctaattgtggttattgggcaatgttgtctcgtccctagctcaagactttgatacttactgactttaacagagttgtgcaattcatggacat

SEQ ID NO: 14718 - DNA, 122 bp, Homo sapiens
  misc_feature (61)..(62): /note="This region represents a CpG dinucleotide"
  misc_feature (61)..(61): /note="Nucleotide may be methylated to form 5-methylcytosine"
gtgaatacaaagatgagtaaggcactgtccttgcccttaaggaatttaaagtctggtagacgagagccatagacacggacaatgataatacaacctgctaagtgctaggacacttagcaggt

SEQ ID NO: 14719 - DNA, 122 bp, Homo sapiens
  misc_feature (61)..(62): /note="This region represents a CpG dinucleotide"
  misc_feature (61)..(61): /note="Nucleotide may be methylated to form 5-methylcytosine"
tggttttgaactcctgatccgcccacctcagctgggattataggtgtgagccaccgcgcccggccaggtgttcttcatcagactgcagggacacctccagcaattgctgcatggttcctggg

SEQ ID NO: 14720 - DNA, 122 bp, Homo sapiens
  misc_feature (61)..(62): /note="This region represents a CpG dinucleotide"
  misc_feature (61)..(61): /note="Nucleotide may be methylated to form 5-methylcytosine"
ccccagtcctggctagcttcccttagggctaaaatgatcactatctcaacctgcctgagacgcattccccgcacactacctctgatctacatcattccaggctgagttgagtctagtcagct

SEQ ID NO: 14721 - DNA, 122 bp, Homo sapiens
  misc_feature (61)..(62): /note="This region represents a CpG dinucleotide"
  misc_feature (61)..(61): /note="Nucleotide may be methylated to form 5-methylcytosine"
gaatccaacagcctcgcccggaactgtggctgcaaggggatctgtaaaacacagtattgccgcatttgtattttaggttctaaaatacaggaaaataaacaaaaggaggtgagaatggaagc

SEQ ID NO: 14722 - DNA, 122 bp, Homo sapiens
  misc_feature (61)..(62): /note="This region represents a CpG dinucleotide"
  misc_feature (61)..(61): /note="Nucleotide may be methylated to form 5-methylcytosine"
ctgcctcgggatcccaggcagggctggcggggcgagcgcggtcagcatggtggggccggacgccgtgcactatctccctcgcattcgcctccgctggtggcgccggcactgtccccgccccg

SEQ ID NO: 14723 - DNA, 122 bp, Homo sapiens
  misc_feature (61)..(62): /note="This region represents a CpG dinucleotide"
  misc_feature (61)..(61): /note="Nucleotide may be methylated to form 5-methylcytosine"
agcagagctgggtcacttgactccacccaatatccctaaatgcaaacatcccctacagaccgaggctggcaccttagagctggagtccatgcccgctctgaccaggagaagccaacctggtc

SEQ ID NO: 14724 - DNA, 122 bp, Homo sapiens
  misc_feature (61)..(62): /note="This region represents a CpG dinucleotide"
  misc_feature (61)..(61): /note="Nucleotide may be methylated to form 5-methylcytosine"
ttgctattgctgtgttctacatgagaaagctgagggtctgaggattgagtcactaagtgacggctacttaagtggcaagcctggatggaaactcatgcctgtctgaattgtggctcagacat

SEQ ID NO: 14725 - DNA, 122 bp, Homo sapiens
  misc_feature (61)..(62): /note="This region represents a CpG dinucleotide"
  misc_feature (61)..(61): /note="Nucleotide may be methylated to form 5-methylcytosine"
gcttctgactgctttctgtctcaacccagagtgactctgtgggcaaatcaatacaagtatcgtctaaataagctatgactaaataataaaatatgataaacttttattatttattttgagac

SEQ ID NO: 14726 - DNA, 122 bp, Homo sapiens
  misc_feature (61)..(62): /note="This region represents a CpG dinucleotide"
  misc_feature (61)..(61): /note="Nucleotide may be methylated to form 5-methylcytosine"
acgagcttttggctattgacttcattactttgacagctgaaataacatgttcatgccttacgtctgtcttgactgtttggggttagaaaaagaatgccaggttatgcatggtattttctaaa

SEQ ID NO: 14727 - DNA, 122 bp, Homo sapiens
  misc_feature (61)..(62): /note="This region represents a CpG dinucleotide"
  misc_feature (61)..(61): /note="Nucleotide may be methylated to form 5-methylcytosine"
tcaggaataggcagaggcagacatcctggccagagtgactcagcaagtttagcacacaggcgcataactccacttgttaaatagcctgtttgtgtaagcttgtacttggctcagagccacta

SEQ ID NO: 14728 - DNA, 122 bp, Homo sapiens
  misc_feature (61)..(62): /note="This region represents a CpG dinucleotide"
  misc_feature (61)..(61): /note="Nucleotide may be methylated to form 5-methylcytosine"
cagcattggcgggagggagtgcggtgcacggagccagggcgcttggggatcttgcgccagcgtctcttgtcccagcggcaaagcagcagcaggcgaaaggtgtcccggaaggctttgttgca

SEQ ID NO: 14729 - DNA, 122 bp, Homo sapiens
  misc_feature (61)..(62): /note="This region represents a CpG dinucleotide"
  misc_feature (61)..(61): /note="Nucleotide may be methylated to form 5-methylcytosine"
gccaccacgcccagcctgcccttatttaacttatgaaacctttcagcatttcttagtctccgtactgagactaagcaggtactgtactgcctcccaggggttcagcgaggaggaaactgtgg

SEQ ID NO: 14730 - DNA, 122 bp, Homo sapiens
  misc_feature (61)..(62): /note="This region represents a CpG dinucleotide"
  misc_feature (61)..(61): /note="Nucleotide may be methylated to form 5-methylcytosine"
agcctctttgcttagaattgcacaattttccagtaatgtatgaaacagctggcagccttgcgcaggaaaactggatagaggtgagtccctgagggagtatgtttgtcctgggtaaaagcaag

SEQ ID NO: 14731 - DNA, 122 bp, Homo sapiens
  misc_feature (61)..(62): /note="This region represents a CpG dinucleotide"
  misc_feature (61)..(61): /note="Nucleotide may be methylated to form 5-methylcytosine"
ccagcccaggattgcagatttccccgtgcactgtgtttgtccttagatcggtgtagtgcgcggtcattacattcaacaaggaaacaatttattccaatgatcatttccctctccctgtattt

SEQ ID NO: 14732 - DNA, 122 bp, Homo sapiens
  misc_feature (61)..(62): /note="This region represents a CpG dinucleotide"
  misc_feature (61)..(61): /note="Nucleotide may be methylated to form 5-methylcytosine"
cttaggctcagggaattgaccagggaactccaggatcagaatgcacaaggcactgtccaacgtccagcagcagggcatatgtgggtccttggggccatattcctttaacctgtggacacttc

SEQ ID NO: 14733 - DNA, 122 bp, Homo sapiens
  misc_feature (61)..(62): /note="This region represents a CpG dinucleotide"
  misc_feature (61)..(61): /note="Nucleotide may be methylated to form 5-methylcytosine"
cgggctgaaagaggtgatcccgagggtgctgtgcttgtgtgacgaagtgtttgtctcctgcgatcctcagcagacgctgctccggtgacccggagatccggacgcctcgacccctccctcag

SEQ ID NO: 14734 - DNA, 122 bp, Homo sapiens
  misc_feature (61)..(62): /note="This region represents a CpG dinucleotide"
  misc_feature (61)..(61): /note="Nucleotide may be methylated to form 5-methylcytosine"
gggcagacgtgcacaggagtggtgggcagccttccaaggggcccagtgtgtgtatttctccgacttgcttctccttttgggtgctctgggttcaggaatatgtagatatgttttgtctcttc

SEQ ID NO: 14735 - DNA, 122 bp, Homo sapiens
  misc_feature (61)..(62): /note="This region represents a CpG dinucleotide"
  misc_feature (61)..(61): /note="Nucleotide may be methylated to form 5-methylcytosine"
caggcagcaacatcagcctagtcccaaacaggaggagaaagggcaatgttacttagcttccggtgcctagaggatctgcgtgttctctgtccagtcccaatgttaccgggccttggtttact

SEQ ID NO: 14736 - DNA, 122 bp, Homo sapiens
  misc_feature (61)..(62): /note="This region represents a CpG dinucleotide"
  misc_feature (61)..(61): /note="Nucleotide may be methylated to form 5-methylcytosine"
gaacaatttgggcatccataccgtttgatggagcaactttatccctaatttatagcgcaacgtgtgcaaaacaagcacatggatagaatagtcaatgtggcagcatctgtaagtcgaagatt

SEQ ID NO: 14737 - DNA, 122 bp, Homo sapiens
  misc_feature (61)..(62): /note="This region represents a CpG dinucleotide"
  misc_feature (61)..(61): /note="Nucleotide may be methylated to form 5-methylcytosine"
tccaaagtgttgggattataagcatgagccaccatgcccagcccccatgtcctttctaatcgtcagagatcagatgactcagagatatacaaaggagaacaaaagcaaataaatcaccaggc

SEQ ID NO: 14738 - DNA, 122 bp, Homo sapiens
  misc_feature (61)..(62): /note="This region represents a CpG dinucleotide"
  misc_feature (61)..(61): /note="Nucleotide may be methylated to form 5-methylcytosine"
gagtgtgcgtgggacctgtgacttgcttctaaccaataggatatggtaaagattatgagacgtcactcatttaattaggttatattacatgacagaggtgtgggatgtcactcctgtaatta

SEQ ID NO: 14739 - DNA, 122 bp, Homo sapiens
  misc_feature (61)..(62): /note="This region represents a CpG dinucleotide"
  misc_feature (61)..(61): /note="Nucleotide may be methylated to form 5-methylcytosine"
cctctccccctgactcaccgtagcagcgcgtggaggacaattttggctgtgacaacgtcacgcccgctgcggggagttgatctgcaagccacaaacgtcattcattcctctccacctccagg

SEQ ID NO: 14740 - DNA, 122 bp, Homo sapiens
  misc_feature (61)..(62): /note="This region represents a CpG dinucleotide"
  misc_feature (61)..(61): /note="Nucleotide may be methylated to form 5-methylcytosine"
atattccttacgtctattttcccagggactgactccttttaaataagcatctcaggcgggcgcggtggctcacacctgtaatcccagcactttgcagggcggaggtgggcggatcacctgag

SEQ ID NO: 14741 - DNA, 122 bp, Homo sapiens
  misc_feature (61)..(62): /note="This region represents a CpG dinucleotide"
  misc_feature (61)..(61): /note="Nucleotide may be methylated to form 5-methylcytosine"
ccactgggcctaggatagaaaggctcattccagatcattcaccagcaaacaatgtcaacacgataccagtagggctgagtcagtatgggctcagggcctgggcaggaggaagggagggaaag

SEQ ID NO: 14742 - DNA, 122 bp, Homo sapiens
  misc_feature (61)..(62): /note="This region represents a CpG dinucleotide"
  misc_feature (61)..(61): /note="Nucleotide may be methylated to form 5-methylcytosine"
gtgttctcacagccctctgggggcctctattcttgtactgaaatggtccatttctgtggccgtctcctccatttctctgcaagcttttcaaagacaggagctgtattcccagggcactcatg

SEQ ID NO: 14743 - DNA, 122 bp, Homo sapiens
  misc_feature (61)..(62): /note="This region represents a CpG dinucleotide"
  misc_feature (61)..(61): /note="Nucleotide may be methylated to form 5-methylcytosine"
gtggtcagaaatgggacaaaattggcagtaagggtgccagaggccaggacacaggtgcaccgctgagacacacacacgtcctaaaatctgcatatgtctgagtcacatctaactctacagac

SEQ ID NO: 14744 - DNA, 122 bp, Homo sapiens
  misc_feature (61)..(62): /note="This region represents a CpG dinucleotide"
  misc_feature (61)..(61): /note="Nucleotide may be methylated to form 5-methylcytosine"
tgagaaatacacccaggcagggccagatactgcgtagcaggcggggcacagaggagggaacgcttgtgtctaactgatgctcctaatgcggaagcccctgaaaggcggttgtggtgcaaagg

SEQ ID NO: 14745 - DNA, 122 bp, Homo sapiens
  misc_feature (61)..(62): /note="This region represents a CpG dinucleotide"
  misc_feature (61)..(61): /note="Nucleotide may be methylated to form 5-methylcytosine"
ttgttttggttccttcagcccacgctggagtccatgggttttttccttcactcatcatctcgcctcctgctgcttcagccgagaatgaagtaataattcagcaagctgttcaggacttccca

SEQ ID NO: 14746 - DNA, 122 bp, Homo sapiens
  misc_feature (61)..(62): /note="This region represents a CpG dinucleotide"
  misc_feature (61)..(61): /note="Nucleotide may be methylated to form 5-methylcytosine"
aggtttacgacttcgcctacttgctgcaggtcagtgactggctttgaggttggtacattccgcattatacccatgttgagacagtctaaaatcccacgtgcttagggtgtgtctcagtccat

SEQ ID NO: 14747 - DNA, 122 bp, Homo sapiens
  misc_feature (61)..(62): /note="This region represents a CpG dinucleotide"
  misc_feature (61)..(61): /note="Nucleotide may be methylated to form 5-methylcytosine"
agaaggggaggatgtaggctccactgggtcttcactccatcctggcccaaactgagtcaccgtccccatgcaggaagagaagtgttagtcacatctttcagaggctgtgatctaaaacagcg

SEQ ID NO: 14748 - DNA, 122 bp, Homo sapiens
  misc_feature (61)..(62): /note="This region represents a CpG dinucleotide"
  misc_feature (61)..(61): /note="Nucleotide may be methylated to form 5-methylcytosine"
atcacctctttcttgagcaagtactgagtgccagatgctactgtaagccttgagaatacccgctgtgaggcaggacgaggacctcccttttaagtcagtgcaggaagacagtgagtggatta

SEQ ID NO: 14749 - DNA, 122 bp, Homo sapiens
  misc_feature (61)..(62): /note="This region represents a CpG dinucleotide"
  misc_feature (61)..(61): /note="Nucleotide may be methylated to form 5-methylcytosine"
cgggatcaggcatgctcttcaaactcagtcagccagtgctggatgcctgctggatgcagacgccatgccggcaggtggcatgctgcagggagcacccgagaagacgaggcgctcagcctgcc

SEQ ID NO: 14750 - DNA, 122 bp, Homo sapiens
  misc_feature (61)..(62): /note="This region represents a CpG dinucleotide"
  misc_feature (61)..(61): /note="Nucleotide may be methylated to form 5-methylcytosine"
gttgccaagatctactccatcaatgtcaccaatgttatgaatggtgtggcctcctactgccgtccctgtgccctagaagcctctgatgtgggctcctcctgcacctcttgtcctgctggtta

SEQ ID NO: 14751 - DNA, 122 bp, Homo sapiens
  misc_feature (61)..(62): /note="This region represents a CpG dinucleotide"
  misc_feature (61)..(61): /note="Nucleotide may be methylated to form 5-methylcytosine"
caattcaaccaaaggaggaactaactgtgggaactgtctggagctggacagcggggagaacgtgcctgtcactggagtacacaggtaattagtcaaactgggacttgacatggttcttgcag

SEQ ID NO: 14752 - DNA, 122 bp, Homo sapiens
  misc_feature (61)..(62): /note="This region represents a CpG dinucleotide"
  misc_feature (61)..(61): /note="Nucleotide may be methylated to form 5-methylcytosine"
ttgaaatgctggacccgctcaatgaattagcaggaagtgacacatactgagtcgtggacacgcattcacatgctagaagacattattaatgcctcaggaatggtggaaaattctttcttcta

SEQ ID NO: 14753 - DNA, 122 bp, Homo sapiens
  misc_feature (61)..(62): /note="This region represents a CpG dinucleotide"
  misc_feature (61)..(61): /note="Nucleotide may be methylated to form 5-methylcytosine"
ggaactttgacccacagaaacctggcatttgacttgcttcggtgagtccaacctgtgtcacgagtgcctgtttcaagggtaataaaggacctggctgtttgcttacagcaaatggaggtggt

SEQ ID NO: 14754 - DNA, 122 bp, Homo sapiens
  misc_feature (61)..(62): /note="This region represents a CpG dinucleotide"
  misc_feature (61)..(61): /note="Nucleotide may be methylated to form 5-methylcytosine"
caaaggcaatgcaaggatatgcatgaatcagagtctccttcctcctttatgcaatgagatcgggaagaatgaaaatagttaaggagatagtctctagggctttgatctcaaatagcactaaa

SEQ ID NO: 14755 - DNA, 122 bp, Homo sapiens
  misc_feature (61)..(62): /note="This region represents a CpG dinucleotide"
  misc_feature (61)..(61): /note="Nucleotide may be methylated to form 5-methylcytosine"
ctgtgttcctccccaaacacatcggctttgctaaagtatcccaaacaagaaggttgcattcgagggctataaagaaaggaggcaccaaaggggagagtgtcatttttcaaatctagtcttgg

SEQ ID NO: 14756 - DNA, 122 bp, Homo sapiens
  misc_feature (61)..(62): /note="This region represents a CpG dinucleotide"
  misc_feature (61)..(61): /note="Nucleotide may be methylated to form 5-methylcytosine"
actgaagcaggaaaccatagagaagacactcacaaacaaaacactggctgctgcaatgagcgcctgcagtagctggccaaacaaacagctctggtcacagtgcacagcatagctgctgccca

SEQ ID NO: 14757 - DNA, 122 bp, Homo sapiens
  misc_feature (61)..(62): /note="This region represents a CpG dinucleotide"
  misc_feature (61)..(61): /note="Nucleotide may be methylated to form 5-methylcytosine"
gtcacattaaagctaaactaaaagaagcttttataataaaaatagcaaggccatcagtaacgaaacaaaaaccacagccagtgggcaacactgatgaagtcgtagccatgagcccttccgga

SEQ ID NO: 14758 - DNA, 122 bp, Homo sapiens
  misc_feature (61)..(62): /note="This region represents a CpG dinucleotide"
  misc_feature (61)..(61): /note="Nucleotide may be methylated to form 5-methylcytosine"
agaagctggactctctcagtgggctgtttgcctgcccctcccttcatttcccataggcttcggtagaagcgtggcctgcagaatcaggaaacagtgctggttaatctgtaagtatgcaacat

SEQ ID NO: 14759 - DNA, 122 bp, Homo sapiens
  misc_feature (61)..(62): /note="This region represents a CpG dinucleotide"
  misc_feature (61)..(61): /note="Nucleotide may be methylated to form 5-methylcytosine"
tagaagtggaaatgcccagccctggttttcacatgcagttaaaagtttaccgaagagtttcgctgtaaagccaacatctggctgctcctgggctgtttccagggaattttatcaattcagcc

SEQ ID NO: 14760 - DNA, 122 bp, Homo sapiens
  misc_feature (61)..(62): /note="This region represents a CpG dinucleotide"
  misc_feature (61)..(61): /note="Nucleotide may be methylated to form 5-methylcytosine"
tctgtctttaaacttcaggaagtcacagtagaatcacaatgtcagacacagtctacgaaacgcttcgtatatgttacctcatttgatctttgtaatcaacccatgaggcaggtggggtgtgg

SEQ ID NO: 14761 - DNA, 122 bp, Homo sapiens
  misc_feature (61)..(62): /note="This region represents a CpG dinucleotide"
  misc_feature (61)..(61): /note="Nucleotide may be methylated to form 5-methylcytosine"
tagtgaacagaatactctgaccttgggtcatcagtatgaacaagagttattgcatcagctcgtagtatgcatcatggccttaggaggtatgcaggaactgttaaacacaaattaacccagga

SEQ ID NO: 14762 - DNA, 122 bp, Homo sapiens
  misc_feature (61)..(62): /note="This region represents a CpG dinucleotide"
  misc_feature (61)..(61): /note="Nucleotide may be methylated to form 5-methylcytosine"
ccagcccattttaaccattttaagtgtacaattcagtagcatgaaattcattcaccatgtcgtgcatgcatgcatcaccactatgactcaaacctgtaatcccagcacaaaaacggtaggtt

SEQ ID NO: 14763 - DNA, 122 bp, Homo sapiens
  misc_feature (61)..(62): /note="This region represents a CpG dinucleotide"
  misc_feature (61)..(61): /note="Nucleotide may be methylated to form 5-methylcytosine"
atttggtttattacattagtctcaccagaccagtacttgcaaaaccctgatggtgctgatcgtagcaggtgatgcatcaccaccaagcatttcaaaaactatttcagccattctaggctaga

SEQ ID NO: 14764 - DNA, 122 bp, Homo sapiens
  misc_feature (61)..(62): /note="This region represents a CpG dinucleotide"
  misc_feature (61)..(61): /note="Nucleotide may be methylated to form 5-methylcytosine"
agagccttaattatggatgactcttggtaattccaagaagattatccagtatgtgtgtcacgtgggtcccttgccttttacctattgaccatttcaccacttgaaagtactttatatcctca

SEQ ID NO: 14765 - DNA, 122 bp, Homo sapiens
  misc_feature (61)..(62): /note="This region represents a CpG dinucleotide"
  misc_feature (61)..(61): /note="Nucleotide may be methylated to form 5-methylcytosine"
cccgcagttgggaatcgctgccctgcaaatgaaaaaggagactaaacaagagcagggaggcggtgcaggcccccgacagcgcagaagccgctggacctgcagctgactgaagcccacaaaat

SEQ ID NO: 14766 - DNA, 122 bp, Homo sapiens
  misc_feature (61)..(62): /note="This region represents a CpG dinucleotide"
  misc_feature (61)..(61): /note="Nucleotide may be methylated to form 5-methylcytosine"
gtgtttacaaatcttaaattacatgatcaagaaccagggaccagacaaccagaacctagccgtcaccaattaagaagtcaggattaaggactcgtggactgacggtagatgccagtggaaac

SEQ ID NO: 14767 - DNA, 122 bp, Homo sapiens
  misc_feature (61)..(62): /note="This region represents a CpG dinucleotide"
  misc_feature (61)..(61): /note="Nucleotide may be methylated to form 5-methylcytosine"
gcaccagaggccccgacaacttgggctgcaggacatgagcgcagggacgggctcctcgggcgagcccagggctgagccgccaaccaggacacacggcagcagaggcaatggcaagaagcggc

SEQ ID NO: 14768 - DNA, 122 bp, Homo sapiens
  misc_feature (61)..(62): /note="This region represents a CpG dinucleotide"
  misc_feature (61)..(61): /note="Nucleotide may be methylated to form 5-methylcytosine"
ctgcccactagaaactgagggattgccacagctcccgtgaggttcagcaattccctgggacgacacagaactcagggagacactttactgttagaagattattgtaaagaacacaactcggt

SEQ ID NO: 14769 - DNA, 122 bp, Homo sapiens
  misc_feature (61)..(62): /note="This region represents a CpG dinucleotide"
  misc_feature (61)..(61): /note="Nucleotide may be methylated to form 5-methylcytosine"
tggccccacattatgagtctcctgtcttggctacttttgagttaagcaatcctgggctcccgggactgattcctccatttcctgaggcaagctgctggggtttgggtggaatatgtgattaa

SEQ ID NO: 14770 - DNA, 122 bp, Homo sapiens
  misc_feature (61)..(62): /note="This region represents a CpG dinucleotide"
  misc_feature (61)..(61): /note="Nucleotide may be methylated to form 5-methylcytosine"
aagttacatttatgccaaagctgttcagaggttgtgcctcagaagacacacagcaggaaccgtgtgggctctgatcaaagcaagaatgtcatcccagagttgctccagtattgcttcacaaa

SEQ ID NO: 14771 - DNA, 122 bp, Homo sapiens
  misc_feature (61)..(62): /note="This region represents a CpG dinucleotide"
  misc_feature (61)..(61): /note="Nucleotide may be methylated to form 5-methylcytosine"
cacatatgttttaaggggtgtgtgtgtgtgttttcttttttccaagaacaatacagacatcgttttcttgccaagtcacaaatcaattgatgggttatttttatagtgaaaagttcaggact

SEQ ID NO: 14772 - DNA, 122 bp, Homo sapiens
  misc_feature (61)..(62): /note="This region represents a CpG dinucleotide"
  misc_feature (61)..(61): /note="Nucleotide may be methylated to form 5-methylcytosine"
cactgcagtcactgtctggaagatgactcatcacatcccctcagacccctgtgtagttttcgatctttctatctagttcccaacgagactttgagcactttcttgacaagtccaattcatct

SEQ ID NO: 14773 - DNA, 122 bp, Homo sapiens
  misc_feature (61)..(62): /note="This region represents a CpG dinucleotide"
  misc_feature (61)..(61): /note="Nucleotide may be methylated to form 5-methylcytosine"
gcaggcttgagcagcctctgagtcacctttctatggatgtccaattgctctagccccaagcgttgtgtgttttactattggctcccctcctccccaccaggattttggctttccagtaattc

SEQ ID NO: 14774 - DNA, 122 bp, Homo sapiens
  misc_feature (61)..(62): /note="This region represents a CpG dinucleotide"
  misc_feature (61)..(61): /note="Nucleotide may be methylated to form 5-methylcytosine"
ttcgaaggcagccccagacaggggctgggggctggaggctcctcatgcagctgctggccgcgggatccatctgctgtccgctgcacgcctcggtcctttcaaagatttgattctttatactt

SEQ ID NO: 14775 - DNA, 122 bp, Homo sapiens
  misc_feature (61)..(62): /note="This region represents a CpG dinucleotide"
  misc_feature (61)..(61): /note="Nucleotide may be methylated to form 5-methylcytosine"
aaggcatattttataaacagaatataaatattcagcatcctggccttggacccacgactgcgttcctgtggcgggaggcagccagcagctcaggggcccgtgcagcacttccccctgccgcc

SEQ ID NO: 14776 - DNA, 122 bp, Homo sapiens
  misc_feature (61)..(62): /note="This region represents a CpG dinucleotide"
  misc_feature (61)..(61): /note="Nucleotide may be methylated to form 5-methylcytosine"
tagcctataaggtaggtatgattaatgtccccatcttgcagatgaggaaggtgaggcacacgggaattaagtatcctgccccaagtcacttagtgagtggcagagtgagtattcaacacaga

SEQ ID NO: 14777 - DNA, 122 bp, Homo sapiens
  misc_feature (61)..(62): /note="This region represents a CpG dinucleotide"
  misc_feature (61)..(61): /note="Nucleotide may be methylated to form 5-methylcytosine"
acttaaataacaattgctaacattttaatctctatgttccaagaacttttctaacctcttcgtagaatattaactcatttaatcacaactaccttctgtggtaagcagagatttttgtctgg

SEQ ID NO: 14778 - DNA, 122 bp, Homo sapiens
  misc_feature (61)..(62): /note="This region represents a CpG dinucleotide"
  misc_feature (61)..(61): /note="Nucleotide may be methylated to form 5-methylcytosine"
tgagcactttagacagaatgctcattttaaaagtactgtacagccaggtgtagtgactcacgcctgtaatcctaatgctttgggaggccgaggcagatgagtcatttgagcccaggagtttg

SEQ ID NO: 14779 - DNA, 122 bp, Homo sapiens
  misc_feature (61)..(62): /note="This region represents a CpG dinucleotide"
  misc_feature (61)..(61): /note="Nucleotide may be methylated to form 5-methylcytosine"
tggggccttggcgacaaccgcggggcccagcggttcctgtgggtgctgacaggagcctggcggtgagtgatggaggaggcggttgtaaaataggttaccgtcgggcgcccggggttcactct

SEQ ID NO: 14780 - DNA, 122 bp, Homo sapiens
  misc_feature (61)..(62): /note="This region represents a CpG dinucleotide"
  misc_feature (61)..(61): /note="Nucleotide may be methylated to form 5-methylcytosine"
cacattagatcaaacaattcaaaggcaaaccaaaagattgccaagcaaaatggcaaacatcgcaaaacttgtaggatttcataaggctaacagtaatgttgaaaaacgtgttggatcacaca

SEQ ID NO: 14781 - DNA, 122 bp, Homo sapiens
  misc_feature (61)..(62): /note="This region represents a CpG dinucleotide"
  misc_feature (61)..(61): /note="Nucleotide may be methylated to form 5-methylcytosine"
gcttacaagcacttgaaacatttacttttggttaggtaaaatttaatgtgaatgtgatggcggtggattttagtttcaaatgaggtaaaaagctgaattgttaaagagttgcatctattctt

SEQ ID NO: 14782 - DNA, 122 bp, Homo sapiens
  misc_feature (61)..(62): /note="This region represents a CpG dinucleotide"
  misc_feature (61)..(61): /note="Nucleotide may be methylated to form 5-methylcytosine"
ccgcgcctctcctccaccgcgccacaccacggcccgtggctctcgtccaccacagcacaccgcagcccatgcttcttgtccaccgtgccacaccgcggtccactgcgccacactgcagcctg

SEQ ID NO: 14783 - DNA, 122 bp, Homo sapiens
  misc_feature (61)..(62): /note="This region represents a CpG dinucleotide"
  misc_feature (61)..(61): /note="Nucleotide may be methylated to form 5-methylcytosine"
ccttgtttaatccactctcacatcaactttgagctcagccatgtggctttcgttggccaacgggacaccagcagatgtgatgcaagccagagatttctaaatgcttgcacactgaggtttgc

SEQ ID NO: 14784 - DNA, 122 bp, Homo sapiens
  misc_feature (61)..(62): /note="This region represents a CpG dinucleotide"
  misc_feature (61)..(61): /note="Nucleotide may be methylated to form 5-methylcytosine"
gaatatgaaaaaaagaaaatgttttgctctgaagctgagttaagaagaagatagccaagacgtgggttgatggggactgtattttaaggctgaacagttttgtttactattgtttattattt

SEQ ID NO: 14785 - DNA, 122 bp, Homo sapiens
  misc_feature (61)..(62): /note="This region represents a CpG dinucleotide"
  misc_feature (61)..(61): /note="Nucleotide may be methylated to form 5-methylcytosine"
accagaccacagttactcatgagttggctgagcaaggagcccgggaaagcaagtgaaactcgggggtttgacctgttctcagactgcaacaatggttaaccttaacagagcacttattaagt

SEQ ID NO: 14786 - DNA, 122 bp, Homo sapiens
  misc_feature (61)..(62): /note="This region represents a CpG dinucleotide"
  misc_feature (61)..(61): /note="Nucleotide may be methylated to form 5-methylcytosine"
ctcccattgcctcttgctggcctgtggtttctctcgtcctctaagaacactcctgttggacgagtgggaagaatgactaacatcggtcacaatctttgagcacttaatgctgtgcatgtcac

SEQ ID NO: 14787 - DNA, 122 bp, Homo sapiens
  misc_feature (61)..(62): /note="This region represents a CpG dinucleotide"
  misc_feature (61)..(61): /note="Nucleotide may be methylated to form 5-methylcytosine"
aatactgcaaaggcaattgcagaatggggtctggattatgttgtcctgacatctgtggatcgagatggttagtgtgtcatcatggcctctaccagaaactggctctaaatgatgacatcatc

SEQ ID NO: 14788 - DNA, 122 bp, Homo sapiens
  misc_feature (61)..(62): /note="This region represents a CpG dinucleotide"
  misc_feature (61)..(61): /note="Nucleotide may be methylated to form 5-methylcytosine"
acagtggaaccagggattagcaccagggatgtctagggcagcggctactacaatgggatccggaggaaatacacatccctctttcagtgaccagcagccaccagcctgaccgtgcagagagc

SEQ ID NO: 14789 - DNA, 122 bp, Homo sapiens
  misc_feature (61)..(62): /note="This region represents a CpG dinucleotide"
  misc_feature (61)..(61): /note="Nucleotide may be methylated to form 5-methylcytosine"
atccccacaggagaaagtcccataaaagacctctagaaaggacaagtcattacctaatcacgcaaggccttcagcgactggcttgcccacacttgagtctgaaaatcaggggccattgaagg

SEQ ID NO: 14790 - DNA, 122 bp, Homo sapiens
  misc_feature (61)..(62): /note="This region represents a CpG dinucleotide"
  misc_feature (61)..(61): /note="Nucleotide may be methylated to form 5-methylcytosine"
gggtcttgctatgttgccaaggctggtcttgactcctgggctcaagagatcctcccacctcggcctactgagtagccaggagtacaggcaggtggcagcacacatctcacctcattgttttt

SEQ ID NO: 14791 - DNA, 122 bp, Homo sapiens
  misc_feature (61)..(62): /note="This region represents a CpG dinucleotide"
  misc_feature (61)..(61): /note="Nucleotide may be methylated to form 5-methylcytosine"
gcacttggaaaaaccacaatgaacaaaacacaaaagtccctgcatcatgaaggctatgatcgcggagtgtttcagactgccatgctcctccagagagaaagaacaccttatcatgtgcctgt

SEQ ID NO: 14792 - DNA, 122 bp, Homo sapiens
  misc_feature (61)..(62): /note="This region represents a CpG dinucleotide"
  misc_feature (61)..(61): /note="Nucleotide may be methylated to form 5-methylcytosine"
gccagcacactgtaagtgcccgcccctctgactaccactcacacgactggaccagtcatacgtcgactccacactgctagatgtgggccagccatccacatgtagctagtccacatatggaa

SEQ ID NO: 14793 - DNA, 122 bp, Homo sapiens
  misc_feature (61)..(62): /note="This region represents a CpG dinucleotide"
  misc_feature (61)..(61): /note="Nucleotide may be methylated to form 5-methylcytosine"
gatgtgtaacaagataaaacctgggaagtggtggactctgattgattttctgatttgccccgctgcatggcacagtcaacaattagattggttgtttcaaagccttttatttcaccattacg

SEQ ID NO: 14794 - DNA, 122 bp, Homo sapiens
  misc_feature (61)..(62): /note="This region represents a CpG dinucleotide"
  misc_feature (61)..(61): /note="Nucleotide may be methylated to form 5-methylcytosine"
ccttactgcatgtgttgtcacatatgtgcaatgccatgctcctgagcctttgattgcagacgtgtgggaagtgggccccgtccccacccccagtgccaccctgctctgcttctcttcccttg

SEQ ID NO: 14795 - DNA, 122 bp, Homo sapiens
  misc_feature (61)..(62): /note="This region represents a CpG dinucleotide"
  misc_feature (61)..(61): /note="Nucleotide may be methylated to form 5-methylcytosine"
ttaaaaacggctgaatgtaaacgggtatgtatgtgtctgcctttttaatgaatgcctgaacgctgaatggtaaagcaccattcagaagtgatttgtgataatcacacgggggagaaatcctt

SEQ ID NO: 14796 - DNA, 122 bp, Homo sapiens
  misc_feature (61)..(62): /note="This region represents a CpG dinucleotide"
  misc_feature (61)..(61): /note="Nucleotide may be methylated to form 5-methylcytosine"
ttagcatggggaagcctaaatatttactgacagggaagagagaaactgtggtatgtgcaacggagcaatagggggtggttaaaacaaacggactgggctcacctaaggtcaggagtttgaga

SEQ ID NO: 14797 - DNA, 122 bp, Homo sapiens
  misc_feature (61)..(62): /note="This region represents a CpG dinucleotide"
  misc_feature (61)..(61): /note="Nucleotide may be methylated to form 5-methylcytosine"
gcttggataaaaataaccatggaaatcaccattcagcaaaatacaggcatagtggccaggcgtggtggctcacgcctgcaatcccagcactctgggaggcccaggcaggaagatcacctgag

SEQ ID NO: 14798 - DNA, 122 bp, Homo sapiens
  misc_feature (61)..(62): /note="This region represents a CpG dinucleotide"
  misc_feature (61)..(61): /note="Nucleotide may be methylated to form 5-methylcytosine"
aattcaacgaatgtttactgagcgcttagtccagtggtgcaggtttaaggctggaggcagcggaaaaggaaaacaaggttcctggtctcgggaagcttaccatgggggtgtctgtacgcgtg

SEQ ID NO: 14799 - DNA, 122 bp, Homo sapiens
  misc_feature (61)..(62): /note="This region represents a CpG dinucleotide"
  misc_feature (61)..(61): /note="Nucleotide may be methylated to form 5-methylcytosine"
tgtgaagccctggaagggaaatgtgatttctgatggtatctcagcttgaaacacatgaagcggaaccagaggtcacgctcataacctatcaggaattaaaggaagtgattctacttgaaaga

SEQ ID NO: 14800 - DNA, 122 bp, Homo sapiens
  misc_feature (61)..(62): /note="This region represents a CpG dinucleotide"
  misc_feature (61)..(61): /note="Nucleotide may be methylated to form 5-methylcytosine"
tcttttaaactgaccgcccattcagatgcctccatcacctctccttctagtgaaatggtacgaggaattatatgcaatgaccttcaaaagatactctatgaactaacaagaacaaaaatgtc

SEQ ID NO: 14801 - DNA, 122 bp, Homo sapiens
  misc_feature (61)..(62): /note="This region represents a CpG dinucleotide"
  misc_feature (61)..(61): /note="Nucleotide may be methylated to form 5-methylcytosine"
tgtcttacagaccccaaaactccaagattggttaaccaggatgctcagattatcttaacgcgtttaagggaactcagcctgtgcctcacaaaattcaagaagtgatttgttttttcagagct

SEQ ID NO: 14802 - DNA, 122 bp, Homo sapiens
  misc_feature (61)..(62): /note="This region represents a CpG dinucleotide"
  misc_feature (61)..(61): /note="Nucleotide may be methylated to form 5-methylcytosine"
actaacttcttcagtctcagaactcccaccattccccacatatcggagcacagacagatacggtatcgctgcaggagaaacgtcaaccatcaggaaataagagtgacacatgcccatttcct

SEQ ID NO: 14803 - DNA, 122 bp, Homo sapiens
  misc_feature (61)..(62): /note="This region represents a CpG dinucleotide"
  misc_feature (61)..(61): /note="Nucleotide may be methylated to form 5-methylcytosine"
aacacagtcaaaacttctcatggtagcctaacaatcccttcctgatctggatcgtgagtacgtatgtgtcctcatctcctaatctacaaccccctgctcactctgctctgagtacaatggcc

SEQ ID NO: 14804 - DNA, 122 bp, Homo sapiens
  misc_feature (61)..(62): /note="This region represents a CpG dinucleotide"
  misc_feature (61)..(61): /note="Nucleotide may be methylated to form 5-methylcytosine"
gctacctggcacgactgatgtaactggcgtaaaattttttgaagctttccatattcctctcgttctaaatataattttccaagctgcaagaaagcaaatttattaaaatcaagatttcaaca

SEQ ID NO: 14805 - DNA, 122 bp, Homo sapiens
  misc_feature (61)..(62): /note="This region represents a CpG dinucleotide"
  misc_feature (61)..(61): /note="Nucleotide may be methylated to form 5-methylcytosine"
gagcaggaacttattcatcttatttaccacttcatgccttgtgcctaaaacagtgactaacggagtgggcagtccaaactaacagctgttcactgagtaagtgagcataatattgcattatt

SEQ ID NO: 14806 - DNA, 122 bp, Homo sapiens
  misc_feature (61)..(62): /note="This region represents a CpG dinucleotide"
  misc_feature (61)..(61): /note="Nucleotide may be methylated to form 5-methylcytosine"
ttaactcaggcatcctaccaaggcaatactctgagtcagaaatgacagtgctccctgatacgccctagaagtatgtcaatgatctcatgaaacatacttacacatatatacagaaacatact

SEQ ID NO: 14807 - DNA, 122 bp, Homo sapiens
  misc_feature (61)..(62): /note="This region represents a CpG dinucleotide"
  misc_feature (61)..(61): /note="Nucleotide may be methylated to form 5-methylcytosine"
cacagagcctgagtgcttgggcccctgtgaacctggaactagcgtcaaccttgaaggcatcgtgtggcaggaaacagaagatggtaagtgtgatatgtggctttcccctcccttctcaacct

SEQ ID NO: 14808 - DNA, 122 bp, Homo sapiens
  misc_feature (61)..(62): /note="This region represents a CpG dinucleotide"
  misc_feature (61)..(61): /note="Nucleotide may be methylated to form 5-methylcytosine"
ccccgcgatatggggagtaatatcaccgccctctcccccctcagatattagcaaccacatcgcagaggggtgaacactttctgagaactggggagtaatatcacccccctctccctccctgg

SEQ ID NO: 14809 - DNA, 122 bp, Homo sapiens
  misc_feature (61)..(62): /note="This region represents a CpG dinucleotide"
  misc_feature (61)..(61): /note="Nucleotide may be methylated to form 5-methylcytosine"
ctctctctctagctgttttccttcactaatatttccaaaacacacaacaacagttggcatcgctcgcatataaacagctcttccatgtcactgagaaaacgagcaagatccagggaggaaaa

SEQ ID NO: 14810 - DNA, 122 bp, Homo sapiens
  misc_feature (61)..(62): /note="This region represents a CpG dinucleotide"
  misc_feature (61)..(61): /note="Nucleotide may be methylated to form 5-methylcytosine"
aactgtgttcttttccaccatccacaaggactttaatgtttcatataattaaccctttaacgtactgatgtggccgagaggaaaaatgcaatggctgaaaaattttggagaagttaggtagt

SEQ ID NO: 14811 - DNA, 122 bp, Homo sapiens
  misc_feature (61)..(62): /note="This region represents a CpG dinucleotide"
  misc_feature (61)..(61): /note="Nucleotide may be methylated to form 5-methylcytosine"
tctggccaaggcctgcctgagctgtccaagaggaagtctgcacagcctgtcctgtgggtgcgtgtatgtgtgtgtgtgtgtgtgtgtgtgtgtgtgtgtgtggtgactgattagactcattt

SEQ ID NO: 14812 - DNA, 122 bp, Homo sapiens
  misc_feature (61)..(62): /note="This region represents a CpG dinucleotide"
  misc_feature (61)..(61): /note="Nucleotide may be methylated to form 5-methylcytosine"
tcttcccaaatacctgaggcttttcacctttcatggggatctggctaatgcacagctgttcgtttggaagagggtattgcaatgactgaactccagggcttaatctccacacttgcctaagt

SEQ ID NO: 14813 - DNA, 122 bp, Homo sapiens
  misc_feature (61)..(62): /note="This region represents a CpG dinucleotide"
  misc_feature (61)..(61): /note="Nucleotide may be methylated to form 5-methylcytosine"
tggtccccgccagaacactcaaccagcctgtggactggcaggatctgaactcaggcctgccgggtcccacctgcagctctctctggcccctgccattgagctacgcaccaccctgtccccac

SEQ ID NO: 14814 - DNA, 122 bp, Homo sapiens
  misc_feature (61)..(62): /note="This region represents a CpG dinucleotide"
  misc_feature (61)..(61): /note="Nucleotide may be methylated to form 5-methylcytosine"
tggctctggtgagctgaccagagcttcacatggacttcttccaggtctttctctatttcacgtcagactgcctgctttccttggcattcctctgagacttcctcgcattctcctttttttct

SEQ ID NO: 14815 - DNA, 122 bp, Homo sapiens
  misc_feature (61)..(62): /note="This region represents a CpG dinucleotide"
  misc_feature (61)..(61): /note="Nucleotide may be methylated to form 5-methylcytosine"
ctagctcaagctttactgaaagcaatgccatgcagtcagtgaatcaaatgcataggccaacgtttcagtcaataccagaaaaagaaaagaagaaaaagaatgtggtaggctaattttccttc

SEQ ID NO: 14816 - DNA, 122 bp, Homo sapiens
  misc_feature (61)..(62): /note="This region represents a CpG dinucleotide"
  misc_feature (61)..(61): /note="Nucleotide may be methylated to form 5-methylcytosine"
cgtttgaagtccaaactctagttggaattgtgggaccttggaaggttagtctcagggattcgattccttttcaggagaatgaaggaatctgcaaggggttgttgttacacaacttacgtgag

SEQ ID NO: 14817 - DNA, 122 bp, Homo sapiens
  misc_feature (61)..(62): /note="This region represents a CpG dinucleotide"
  misc_feature (61)..(61): /note="Nucleotide may be methylated to form 5-methylcytosine"
atcctcagttgagtctgaccatgcacattcttacttacaagttttagttgtctgagccaccgcttagcttggtttttagttgcatggctgccaaagaattgtttagccagaggccctgcgca

SEQ ID NO: 14818 - DNA, 122 bp, Homo sapiens
  misc_feature (61)..(62): /note="This region represents a CpG dinucleotide"
  misc_feature (61)..(61): /note="Nucleotide may be methylated to form 5-methylcytosine"
gaaaaccgcgaaagtcgtttttttaaaacagcttaaataacagtaacaagaggaacaagacgcctggcacacacatgccatttcagaggcaagaagttcaagaaactggggaaagatgtgat

SEQ ID NO: 14819 - DNA, 122 bp, Homo sapiens
  misc_feature (61)..(62): /note="This region represents a CpG dinucleotide"
  misc_feature (61)..(61): /note="Nucleotide may be methylated to form 5-methylcytosine"
ataggtatcagccattcagcaaacatttgtctagacagtatggcactgtggcgttaaatgcggcctctggagttggtatcaccactcactgtgtgaccttgaactagctattcactgtttct

SEQ ID NO: 14820 - DNA, 122 bp, Homo sapiens
  misc_feature (61)..(62): /note="This region represents a CpG dinucleotide"
  misc_feature (61)..(61): /note="Nucleotide may be methylated to form 5-methylcytosine"
tgattaattttgtgtaaatgattagccacctcagctgactcagagccacaggaagctctacggctgtgctgtccagtgtgatagccattcaccacatgtggctatgtaaatttaaatacaaa

SEQ ID NO: 14821 - DNA, 122 bp, Homo sapiens
  misc_feature (61)..(62): /note="This region represents a CpG dinucleotide"
  misc_feature (61)..(61): /note="Nucleotide may be methylated to form 5-methylcytosine"
aaatgtttatgacctataaaacatctgtgctgtgtaccttccagaagctatgcagtttaacgagcgctggtattgaagaaggtagctagtcatcataacctaactctgaacacagaattacc

SEQ ID NO: 14822 - DNA, 122 bp, Homo sapiens
  misc_feature (61)..(62): /note="This region represents a CpG dinucleotide"
  misc_feature (61)..(61): /note="Nucleotide may be methylated to form 5-methylcytosine"
acccctgagccaagtatcacctcatcagtgaagccttctttgatatccccaggtagagttcgttgttcccagccctacataatactgcattggagagtatgtggtcatttagttgtctgtct

SEQ ID NO: 14823 - DNA, 122 bp, Homo sapiens
  misc_feature (61)..(62): /note="This region represents a CpG dinucleotide"
  misc_feature (61)..(61): /note="Nucleotide may be methylated to form 5-methylcytosine"
acctcatgatctgcccgcctcggcctcccaaagtgctgggattacaggcgtgagccaccacgcccggcctgatttgtttgctttctatctgtgtaatcagaaaagaataaacacagagctct

SEQ ID NO: 14824 - DNA, 122 bp, Homo sapiens
  misc_feature (61)..(62): /note="This region represents a CpG dinucleotide"
  misc_feature (61)..(61): /note="Nucleotide may be methylated to form 5-methylcytosine"
aaaatagatctgtttgggaagtgatgcaggctgggtcattttggaacacagagcacaatacgagtcttggaagcagtggggagagaaagaggagttgttcagccagagggccaagtaaggag

SEQ ID NO: 14825 - DNA, 122 bp, Homo sapiens
  misc_feature (61)..(62): /note="This region represents a CpG dinucleotide"
  misc_feature (61)..(61): /note="Nucleotide may be methylated to form 5-methylcytosine"
tgctttctgcctggagctatcttactaaaactcatgacaacccacttatgatccagctctcgcacctcctgcaagatggattgaggctgcgtcaagacagaatggtagagcttgaattactg

SEQ ID NO: 14826 - DNA, 122 bp, Homo sapiens
  misc_feature (61)..(62): /note="This region represents a CpG dinucleotide"
  misc_feature (61)..(61): /note="Nucleotide may be methylated to form 5-methylcytosine"
atgggcatgttcagacacatccattggatttttttttttttttttttagtctaagaaaggcgaagtgagcccatagtcagtttctaaaagggactatcacttaagaaggataagtagcttta

SEQ ID NO: 14827 - DNA, 122 bp, Homo sapiens
  misc_feature (61)..(62): /note="This region represents a CpG dinucleotide"
  misc_feature (61)..(61): /note="Nucleotide may be methylated to form 5-methylcytosine"
ttggtccatgggaggcaatgggtgggcctgggataagcaccataagttctcactccggtccgtggaactggcagcccagcctccaggcttcaggccatcccaggcttaaaggtagggtttca

SEQ ID NO: 14828 - DNA, 122 bp, Homo sapiens
  misc_feature (61)..(62): /note="This region represents a CpG dinucleotide"
  misc_feature (61)..(61): /note="Nucleotide may be methylated to form 5-methylcytosine"
taattggtacctgaggtagctggagacaatagactgtcagggaaacgggaatctgaaacgcgtctgaactggttagatttgaaggcagtaaagtttctgccagcattgaaggatgagacact

SEQ ID NO: 14829 - DNA, 122 bp, Homo sapiens
  misc_feature (61)..(62): /note="This region represents a CpG dinucleotide"
  misc_feature (61)..(61): /note="Nucleotide may be methylated to form 5-methylcytosine"
gttctagatgcacagcttggcttccttgtttactctgtgatcaagttagttttctaagaccgtttcctcatctttaagatggcaatagtgagcaggacgtggtggcttacgcctgtaatccc

SEQ ID NO: 14830 - DNA, 122 bp, Homo sapiens
  misc_feature (61)..(62): /note="This region represents a CpG dinucleotide"
  misc_feature (61)..(61): /note="Nucleotide may be methylated to form 5-methylcytosine"
atgctaagtgaaagaagccagatacaaaggtcacatatgataaggttctatttatatgaacgatcttggtaaatctgtagagaaagaacacagatttgtggtttggtttctaagatcacagc

SEQ ID NO: 14831 - DNA, 122 bp, Homo sapiens
  misc_feature (61)..(62): /note="This region represents a CpG dinucleotide"
  misc_feature (61)..(61): /note="Nucleotide may be methylated to form 5-methylcytosine"
aagttaatgtcatgccacaatcaaccctgtatgtcagggcccttgagagcagagtagtgtcgggagagtgggtggtatggttgacacaaagacccacaggtatttttatgggttcacttaat

SEQ ID NO: 14832 - DNA, 122 bp, Homo sapiens
  misc_feature (61)..(62): /note="This region represents a CpG dinucleotide"
  misc_feature (61)..(61): /note="Nucleotide may be methylated to form 5-methylcytosine"
tcaaagtgccctgggggacctgtgatagtaaatccatgtatgcacacttccacaccctgacgtgtactgcatgtatccaccactgggcagtgtgcctcacaagtgagactgatgctcacgtg

SEQ ID NO: 14833 - DNA, 122 bp, Homo sapiens
  misc_feature (61)..(62): /note="This region represents a CpG dinucleotide"
  misc_feature (61)..(61): /note="Nucleotide may be methylated to form 5-methylcytosine"
gaaggctcaaagtccagcagggagccattgatcagtccgggacttctgttgggagggtgccggcaaactatctgatgggtccccagggcctcccctggaggaagtggggacttgagcaggag

SEQ ID NO: 14834 - DNA, 122 bp, Homo sapiens
  misc_feature (61)..(62): /note="This region represents a CpG dinucleotide"
  misc_feature (61)..(61): /note="Nucleotide may be methylated to form 5-methylcytosine"
tcaccgggcagctggcaggcctctaccctgcatggggccccgtttcaggctaagtggggccggcctcccagctttatgtcctccttcagaggggaaggaggcagtgatgtcacagaggtctc

SEQ ID NO: 14835 - DNA, 122 bp, Homo sapiens
  misc_feature (61)..(62): /note="This region represents a CpG dinucleotide"
  misc_feature (61)..(61): /note="Nucleotide may be methylated to form 5-methylcytosine"
aaccacatatcacttcaaaatctaaggaatttgcagtttctttgtggatataagaaggtacggacatgccaagctgtgccgcaaagtgtttaaatggcacaggcccagcatctaggacaaag

SEQ ID NO: 14836 - DNA, 122 bp, Homo sapiens
  misc_feature (61)..(62): /note="This region represents a CpG dinucleotide"
  misc_feature (61)..(61): /note="Nucleotide may be methylated to form 5-methylcytosine"
gaagtgacacagccctagaggaggcagtagcagaggtgctagaccatcgacccatcgagccgaaacactgccctccctgccatgtttcagttgagctggtggggtcctgtgctaccctggtg

SEQ ID NO: 14837 - DNA, 122 bp, Homo sapiens
  misc_feature (61)..(62): /note="This region represents a CpG dinucleotide"
  misc_feature (61)..(61): /note="Nucleotide may be methylated to form 5-methylcytosine"
ttgcttggctgtgaggacagactgtgcctgcagccctgccgctggggagaggttctctgccgagtcaaaccagagcccagaccccaggaaagggaccaagggctgcctgctccacctctgtt

SEQ ID NO: 14838 - DNA, 122 bp, Homo sapiens
  misc_feature (61)..(62): /note="This region represents a CpG dinucleotide"
  misc_feature (61)..(61): /note="Nucleotide may be methylated to form 5-methylcytosine"
ccccacaaagctggcgcatggcccaaaagggggtgaagaagcgatgtcctgagacagggacgcagctgtcatgcagggcctcagggctgagacaaagtctggatccatcctgaaaggagggg

SEQ ID NO: 14839 - DNA, 122 bp, Homo sapiens
  misc_feature (61)..(62): /note="This region represents a CpG dinucleotide"
  misc_feature (61)..(61): /note="Nucleotide may be methylated to form 5-methylcytosine"
gacccagaaaccaaactagacagtgaaatcagtagtgaaggcccccccctccaagctgtacgcaagttggaagggacaaaccactaagttacaaataaggaaacaggcttggaaagtctgag

SEQ ID NO: 14840 - DNA, 122 bp, Homo sapiens
  misc_feature (61)..(62): /note="This region represents a CpG dinucleotide"
  misc_feature (61)..(61): /note="Nucleotide may be methylated to form 5-methylcytosine"
ttgtcaataagcatttccattcctatgtttctgttgtttccttcatcgagaatatttcctcgcctctttccaccttcattctgacaatggcactttgtgctatcaatctttattcttctttc

SEQ ID NO: 14841 - DNA, 122 bp, Homo sapiens
  misc_feature (61)..(62): /note="This region represents a CpG dinucleotide"
  misc_feature (61)..(61): /note="Nucleotide may be methylated to form 5-methylcytosine"
tttagaagtgctgcagagagccagcagttgatggttattgagtcagcacctgctgctcagcgcttgtgggaggtaaaagggtgtgatgctgactgctacaattccagtaagttcttctggca

SEQ ID NO: 14842 - DNA, 122 bp, Homo sapiens
  misc_feature (61)..(62): /note="This region represents a CpG dinucleotide"
  misc_feature (61)..(61): /note="Nucleotide may be methylated to form 5-methylcytosine"
agaccctgggctcaattctcagctgaaacctgaactctgcaggatgggtcagtcatctgccgcaggcatttgccaggcctggctcactgagtcataacgaggttagttatgtgactgtcagc

SEQ ID NO: 14843 - DNA, 122 bp, Homo sapiens
  misc_feature (61)..(62): /note="This region represents a CpG dinucleotide"
  misc_feature (61)..(61): /note="Nucleotide may be methylated to form 5-methylcytosine"
tgccaggtctcctttcgtgtcctgcagcctgtgccagctcctcagtctctctttgtctttcgtgaccttgatgttttagataagtactgggcggctgttttgtagaacgtccctcggtttgg

SEQ ID NO: 14844 - DNA, 122 bp, Homo sapiens
  misc_feature (61)..(62): /note="This region represents a CpG dinucleotide"
  misc_feature (61)..(61): /note="Nucleotide may be methylated to form 5-methylcytosine"
cacaaacacacgacaaatatttattttaaggaattggctgacatgattcatgattatgtgcgctagcaagtccaaaaccttgactagggagtcagcaagctagagaccaagggaacagttta

SEQ ID NO: 14845 - DNA, 122 bp, Homo sapiens
  misc_feature (61)..(62): /note="This region represents a CpG dinucleotide"
  misc_feature (61)..(61): /note="Nucleotide may be methylated to form 5-methylcytosine"
aaagtcaattcacatctcttccttcactcagggttctagcccccccttctcctaagtctgcgattcatttaaacaaaggttactggacagcactctgctgcatagaaacatcgtgaagggcc

SEQ ID NO: 14846 - DNA, 122 bp, Homo sapiens
  misc_feature (61)..(62): /note="This region represents a CpG dinucleotide"
  misc_feature (61)..(61): /note="Nucleotide may be methylated to form 5-methylcytosine"
ccctccacatccaccccatcgtgggagggaggctcagtgctctgcaggggcctgagcagtcggggagacaccccctgcccacagccaccctctctgggctatgtgggaggtgcccacgtttc

SEQ ID NO: 14847 - DNA, 122 bp, Homo sapiens
  misc_feature (61)..(62): /note="This region represents a CpG dinucleotide"
  misc_feature (61)..(61): /note="Nucleotide may be methylated to form 5-methylcytosine"
gcccagggggcctggaggactgcctctcacatgtgcacgcacaggacagcctgtcctgtgcggtggcggtcacagcattttctctacctttcttgaaagtgaggcctgcagagactgaaggc

SEQ ID NO: 14848 - DNA, 122 bp, Homo sapiens
  misc_feature (61)..(62): /note="This region represents a CpG dinucleotide"
  misc_feature (61)..(61): /note="Nucleotide may be methylated to form 5-methylcytosine"
ctggaatccacacttacaactgtgtgaccttgggcaagtgtattcacttctctgagactccgtgtaaagtggcgttaggggagacagaaaatccacctcccggctgggcgcggtggctcaca

SEQ ID NO: 14849 - DNA, 122 bp, Homo sapiens
  misc_feature (61)..(62): /note="This region represents a CpG dinucleotide"
  misc_feature (61)..(61): /note="Nucleotide may be methylated to form 5-methylcytosine"
ctgtaagagacggcccttcagcaaacccatacttgccattgggtaattgctggatttgcacgtctcaacgtcttatgggttgtggttgtggttttacactctatttgggggataggccttta

SEQ ID NO: 14850 - DNA, 122 bp, Homo sapiens
  misc_feature (61)..(62): /note="This region represents a CpG dinucleotide"
  misc_feature (61)..(61): /note="Nucleotide may be methylated to form 5-methylcytosine"
aagctccatgtggggcttgggcttggcggacgacttggggctggccggactttgggtggccgccgaggaccattgctaaatatgcccctttcgtcctgaaatagtcacttccccggctggct

SEQ ID NO: 14851 - DNA, 122 bp, Homo sapiens
  misc_feature (61)..(62): /note="This region represents a CpG dinucleotide"
  misc_feature (61)..(61): /note="Nucleotide may be methylated to form 5-methylcytosine"
actctagttgtagggatgctattcaaacctatactcgaatactcatctacctggtgttttcgtgcctgctgttcctggatttgctgtgcatggtgtgacaaggtgacatgatgactatgccc

SEQ ID NO: 14852 - DNA, 122 bp, Homo sapiens
  misc_feature (61)..(62): /note="This region represents a CpG dinucleotide"
  misc_feature (61)..(61): /note="Nucleotide may be methylated to form 5-methylcytosine"
catttaggggccactgagtcaccatgccatgcttggctgctatgctgtaaacagccaccccggaccccacaccctgtgagagttaagtgcatccactgtccagggtcttaattttgaacttc

SEQ ID NO: 14853 - DNA, 122 bp, Homo sapiens
  misc_feature (61)..(62): /note="This region represents a CpG dinucleotide"
  misc_feature (61)..(61): /note="Nucleotide may be methylated to form 5-methylcytosine"
gccgtggccctgggactgcatctctactcccattagtatgcactccctcactctgggccacgtaatctgtttatgcacgtatgatatcaaaaacaggaggcaggtgctgccgtcttgcgttc

SEQ ID NO: 14854 - DNA, 122 bp, Homo sapiens
  misc_feature (61)..(62): /note="This region represents a CpG dinucleotide"
  misc_feature (61)..(61): /note="Nucleotide may be methylated to form 5-methylcytosine"
tctttctaacccaaggctcaaggtaagcctgcattcttgtgactctttctgacagtcaatcgtaacaaatcatgctacctcggctaactgtcttcacttgatgttctacccagaaaagcaca

SEQ ID NO: 14855 - DNA, 122 bp, Homo sapiens
  misc_feature (61)..(62): /note="This region represents a CpG dinucleotide"
  misc_feature (61)..(61): /note="Nucleotide may be methylated to form 5-methylcytosine"
cagataaagtaagagatcatcagagtaatgaaatacctacgtaacaatgcacttgtaccccgaacttaaaaaaagatatatcatgtatagaaaccacagataagcagatgtacgaaaccaag

SEQ ID NO: 14856 - DNA, 122 bp, Homo sapiens
  misc_feature (61)..(62): /note="This region represents a CpG dinucleotide"
  misc_feature (61)..(61): /note="Nucleotide may be methylated to form 5-methylcytosine"
aaaaaaaaaaaaaaaaaaatctaagtttccgcgacccaaatttacattcctaggtcagaacgtgtctgactggaccagctggagttacgtgcctgcccacgatctaatcagctgtggcagac

SEQ ID NO: 14857 - DNA, 122 bp, Homo sapiens
  misc_feature (61)..(62): /note="This region represents a CpG dinucleotide"
  misc_feature (61)..(61): /note="Nucleotide may be methylated to form 5-methylcytosine"
ccgtgtgttaagcacattcatgttgctgtacaacagatctgtggtctctcctctaacacacgagcaccaggacagacggcatagctgtcctcggcgtggtaggtgggtgagtattcagcagc

SEQ ID NO: 14858 - DNA, 122 bp, Homo sapiens
  misc_feature (61)..(62): /note="This region represents a CpG dinucleotide"
  misc_feature (61)..(61): /note="Nucleotide may be methylated to form 5-methylcytosine"
tcccaggaggctttacagtcaccatttagagttctcctttggggttagtgacggcatgaacgcccacagctacgtaccaactgaagtcagagacgtggttttacagtggagccaactgacgt

SEQ ID NO: 14859 - DNA, 122 bp, Homo sapiens
  misc_feature (61)..(62): /note="This region represents a CpG dinucleotide"
  misc_feature (61)..(61): /note="Nucleotide may be methylated to form 5-methylcytosine"
attatgaatcagactttgcttgtaaaagcacagctttggaacttgcagtgtggctatttccgcttttcatttcatcttctaactccagaaggaaaaggaactgtctatgtgagtttcctgct

SEQ ID NO: 14860 - DNA, 122 bp, Homo sapiens
  misc_feature (61)..(62): /note="This region represents a CpG dinucleotide"
  misc_feature (61)..(61): /note="Nucleotide may be methylated to form 5-methylcytosine"
aatcacacaacaaacacatgttcacatgcatactagtacaaattgagttccttcagtcaacgaagtgagttacacctgagggcacttgaagcccagtgtgaagtgacttgatcaagattacc

SEQ ID NO: 14861 - DNA, 122 bp, Homo sapiens
  misc_feature (61)..(62): /note="This region represents a CpG dinucleotide"
  misc_feature (61)..(61): /note="Nucleotide may be methylated to form 5-methylcytosine"
ttaattcccctgtggcaaacttctcaacgcaaacacatgcgaggcaggaagcgtctacagcgctcccgttcctgcgcacgcaggcccgtatgcatgtctgttcatacgcatgtgagcgcctg

SEQ ID NO: 14862 - DNA, 122 bp, Homo sapiens
  misc_feature (61)..(62): /note="This region represents a CpG dinucleotide"
  misc_feature (61)..(61): /note="Nucleotide may be methylated to form 5-methylcytosine"
gaaagaataaatggagagaaaacactcccatcatggcactgcagggagagcaccagccaccgctgagttagttctccttcctgcagtgtgggttggcctggtgattcacttctagtacatag

SEQ ID NO: 14863 - DNA, 122 bp, Homo sapiens
  misc_feature (61)..(62): /note="This region represents a CpG dinucleotide"
  misc_feature (61)..(61): /note="Nucleotide may be methylated to form 5-methylcytosine"
tatcagctcacaagaacggattctacacatctcttcctaactccatgttcagtgacttcacgttggtagctttcaactggcaacagtgggagttgctacatcacggaaatcagggaatagtc

SEQ ID NO: 14864 - DNA, 122 bp, Homo sapiens
  misc_feature (61)..(62): /note="This region represents a CpG dinucleotide"
  misc_feature (61)..(61): /note="Nucleotide may be methylated to form 5-methylcytosine"
gattcagagggtgacactacacacgcagccggtttgctgcggaggaacacggggctggggcgtctgctgcttttagagcaggcctgccctttgtccaggagggaggtatcgctgtatcctcc

SEQ ID NO: 14865 - DNA, 122 bp, Homo sapiens
  misc_feature (61)..(62): /note="This region represents a CpG dinucleotide"
  misc_feature (61)..(61): /note="Nucleotide may be methylated to form 5-methylcytosine"
gattttcagcccacagaactgtgagaaatacatttctgtttaagccgatccatggcagtccgtgctaagaaaggccctagcccaggggccgcatagcctggactctgacagcctcctgtagg

SEQ ID NO: 14866 - DNA, 122 bp, Homo sapiens
  misc_feature (61)..(62): /note="This region represents a CpG dinucleotide"
  misc_feature (61)..(61): /note="Nucleotide may be methylated to form 5-methylcytosine"
aggagtgaggcaacagcagctgagtctgagctttgactcaaaagagccaacaagttgcaccggtattcatcattcattcactctgtgaatgtagtcaggataacaatggcatttgcatccca

SEQ ID NO: 14867 - DNA, 122 bp, Homo sapiens
  misc_feature (61)..(62): /note="This region represents a CpG dinucleotide"
  misc_feature (61)..(61): /note="Nucleotide may be methylated to form 5-methylcytosine"
taagtggaaaaggggggagatgaacatgaacagaccaaccagccaacaaactggggatgtcgtcattcttctcagatcctgcgaaggctgtagcctctgctcagcactgctgcccgtcctgc

SEQ ID NO: 14868 - DNA, 122 bp, Homo sapiens
  misc_feature (61)..(62): /note="This region represents a CpG dinucleotide"
  misc_feature (61)..(61): /note="Nucleotide may be methylated to form 5-methylcytosine"
gggcagagcccgctctaacagtacaacaagggacacaacagcagccttcttccgtgcccgcgcaatcctccaccagtgtctgctctgccgatgaatcagcttttgattctgaagtatttcaa

SEQ ID NO: 14869 - DNA, 122 bp, Homo sapiens
  misc_feature (61)..(62): /note="This region represents a CpG dinucleotide"
  misc_feature (61)..(61): /note="Nucleotide may be methylated to form 5-methylcytosine"
gagtgactcagccagctgatgtcagatagcctctgtcatgggccccattagtgccactctcgaagactggtctagctattgctgctgcaaatgcccaacctgccagaaacagaaactgttac

SEQ ID NO: 14870 - DNA, 122 bp, Homo sapiens
  misc_feature (61)..(62): /note="This region represents a CpG dinucleotide"
  misc_feature (61)..(61): /note="Nucleotide may be methylated to form 5-methylcytosine"
gcctttcaagtgattctgatgcatgctaaaatcaatgaaccactgaactccttcatgtgacggttaatgataggcctagagtatcagtatctatttcacccccaatgtaagagctagttttt

SEQ ID NO: 14871 - DNA, 122 bp, Homo sapiens
  misc_feature (61)..(62): /note="This region represents a CpG dinucleotide"
  misc_feature (61)..(61): /note="Nucleotide may be methylated to form 5-methylcytosine"
aggcagccacgcctgtgctctttggactctggtgggtggggaggcttcctggtcactaaccgctcaacatcaacctggacctgcggcagtgtctgtgctgactggcgtccccagcttagcta

SEQ ID NO: 14872 - DNA, 122 bp, Homo sapiens
  misc_feature (61)..(62): /note="This region represents a CpG dinucleotide"
  misc_feature (61)..(61): /note="Nucleotide may be methylated to form 5-methylcytosine"
gacagttcagcaagatgagctatgagccgggcagtgagacaagggcatgagctcatcttccggccacccacagcctgacccagcctgctgcaggccagagtggtgcaagctcaggctggctt

SEQ ID NO: 14873 - DNA, 122 bp, Homo sapiens
  misc_feature (61)..(62): /note="This region represents a CpG dinucleotide"
  misc_feature (61)..(61): /note="Nucleotide may be methylated to form 5-methylcytosine"
aggcgaatctcagcaggggcaccccgccaacacacccggcctcttctgagctgtccaggtcgtcaaaagcaaaacggcccagcccagaggccccgggagacagacgctgaggaacgcggtcc

SEQ ID NO: 14874 - DNA, 122 bp, Homo sapiens
  misc_feature (61)..(62): /note="This region represents a CpG dinucleotide"
  misc_feature (61)..(61): /note="Nucleotide may be methylated to form 5-methylcytosine"
atgtacattccagtcctatgtcaatatctttagggagaagacattgcaatcatgaaacaacgtcaggacggtttattaaaaagaaatagtcatagagaaaaaagagctcttagaaattaaaa

SEQ ID NO: 14875 - DNA, 122 bp, Homo sapiens
  misc_feature (61)..(62): /note="This region represents a CpG dinucleotide"
  misc_feature (61)..(61): /note="Nucleotide may be methylated to form 5-methylcytosine"
ttttttgtggagacagttttgccacgttgcccaggctgggaatctgattgcttttatccccgtttttcctcaaaaaagctagtgttgcaatctttgtgagttggtcaaggtacctgtgtggg

SEQ ID NO: 14876 - DNA, 122 bp, Homo sapiens
  misc_feature (61)..(62): /note="This region represents a CpG dinucleotide"
  misc_feature (61)..(61): /note="Nucleotide may be methylated to form 5-methylcytosine"
caggagactagaggcaggaaagagagcaatgagctgagggtggctaagctgggaggtgagcgagggtgccctggctgagaccttgaaaaactccacccatgatgatcaccattatactcctc

SEQ ID NO: 14877 - DNA, 122 bp, Homo sapiens
  misc_feature (61)..(62): /note="This region represents a CpG dinucleotide"
  misc_feature (61)..(61): /note="Nucleotide may be methylated to form 5-methylcytosine"
tgcccttgtgcaagttacttaacatctctgagctacagttccctcttctataaaagggatcgtctctataccacatgattggcctgtataataaatatggtagcctagctcagtaccttcct

SEQ ID NO: 14878 - DNA, 122 bp, Homo sapiens
  misc_feature (61)..(62): /note="This region represents a CpG dinucleotide"
  misc_feature (61)..(61): /note="Nucleotide may be methylated to form 5-methylcytosine"
gtgcaagcaaactgctcccggcacacctggttcatgatggagacatcagctgcatgggtccggtaacagtcgtgcacagagacgaaggtcaggcccttcctgtagcagtgcagggtggtgag

SEQ ID NO: 14879 - DNA, 122 bp, Homo sapiens
  misc_feature (61)..(62): /note="This region represents a CpG dinucleotide"
  misc_feature (61)..(61): /note="Nucleotide may be methylated to form 5-methylcytosine"
agaccattctccaacataggacagggctcctcaggcagctccagagctgggtcaggaaaccgcaaggtgagcctgcagcagccggtgcccagaagtgagagtgtgctcaaaatgaacacaag

SEQ ID NO: 14880 - DNA, 122 bp, Homo sapiens
  misc_feature (61)..(62): /note="This region represents a CpG dinucleotide"
  misc_feature (61)..(61): /note="Nucleotide may be methylated to form 5-methylcytosine"
aatgtacgcaaccatgcagaattttgtactcagaatctgtgtctcctgccttctgcctgacgtgctcatgaggaagtttgtttccatgcccgtcacctggaaggatgctaacagttctctgt

SEQ ID NO: 14881 - DNA, 122 bp, Homo sapiens
  misc_feature (61)..(62): /note="This region represents a CpG dinucleotide"
  misc_feature (61)..(61): /note="Nucleotide may be methylated to form 5-methylcytosine"
gatgtttataacatttgtcaagccttcattataaaaagtagtctaacaaagcaatgatgtcgtctaccttcctgtttatgcatgaatatgtattatgtttgcattttaacagtggcagccca

SEQ ID NO: 14882 - DNA, 122 bp, Homo sapiens
  misc_feature (61)..(62): /note="This region represents a CpG dinucleotide"
  misc_feature (61)..(61): /note="Nucleotide may be methylated to form 5-methylcytosine"
gagaaaactgcctcagtttcccaaagacacatttactgggtgttaggcttggtcctaggccgtacagctagcccttggtcaaagatcttacaaccaattggagagagtgttaactaacacag

SEQ ID NO: 14883 - DNA, 122 bp, Homo sapiens
  misc_feature (61)..(62): /note="This region represents a CpG dinucleotide"
  misc_feature (61)..(61): /note="Nucleotide may be methylated to form 5-methylcytosine"
aaaaaggtgaggcttctatttagtggagaggaactgagagagctgcatgggttttaaatacgaaaatgaaagcaatacattttaggccaagtccaggaagcaagcaaggttggatagcaagg

SEQ ID NO: 14884 - DNA, 122 bp, Homo sapiens
  misc_feature (61)..(62): /note="This region represents a CpG dinucleotide"
  misc_feature (61)..(61): /note="Nucleotide may be methylated to form 5-methylcytosine"
taagggggaggccaagttccccatgcctagaaaccagcctttcacctgaatcagacctaccgatcaagccagacccagtgcctaacctggaaacaacccgacaaggcttcttgaagtccctc

SEQ ID NO: 14885 - DNA, 122 bp, Homo sapiens
  misc_feature (61)..(62): /note="This region represents a CpG dinucleotide"
  misc_feature (61)..(61): /note="Nucleotide may be methylated to form 5-methylcytosine"
aaactaatatttttaagtcatgtaatcatttatttcactagtcatttgacataagcaggccgaatcagaggagtgttctcttaattgttcggtgttcggactttcaaagtaaacacatgcat

SEQ ID NO: 14886 - DNA, 122 bp, Homo sapiens
  misc_feature (61)..(62): /note="This region represents a CpG dinucleotide"
  misc_feature (61)..(61): /note="Nucleotide may be methylated to form 5-methylcytosine"
ctttccctctctctctctttctctctttctttctaaggaaccttgctctgtcgcccagaccggagtgcagtggcgcgatctcggttcactgcaacctccacctcccgggttaaagcgattct

SEQ ID NO: 14887 - DNA, 122 bp, Homo sapiens
  misc_feature (61)..(62): /note="This region represents a CpG dinucleotide"
  misc_feature (61)..(61): /note="Nucleotide may be methylated to form 5-methylcytosine"
ttcacctagaaactcccaatgaaaacatgtttggtatctgtggagccttgttttcccttgcggtctatcagtcttagactaatggtgctctggatatgatgaaagattcttacctacttaca

SEQ ID NO: 14888 - DNA, 122 bp, Homo sapiens
  misc_feature (61)..(62): /note="This region represents a CpG dinucleotide"
  misc_feature (61)..(61): /note="Nucleotide may be methylated to form 5-methylcytosine"
tattcatttatccttattctttgacatctactacaaacttctttctgtgcttcattcatccgtgcaactatatttatgaggtgttttgggcggcaggcggcgggggggtcgattaaaataaa

SEQ ID NO: 14889 - DNA, 122 bp, Homo sapiens
  misc_feature (61)..(62): /note="This region represents a CpG dinucleotide"
  misc_feature (61)..(61): /note="Nucleotide may be methylated to form 5-methylcytosine"
tatgatgattaattcagtttacaattcagtaatatttgctaggctaaacactatgatgcacgtgcggggagtggaatgaactcttccaagcaggagactctttttctactccaagtgacaag

SEQ ID NO: 14890 - DNA, 122 bp, Homo sapiens
  misc_feature (61)..(62): /note="This region represents a CpG dinucleotide"
  misc_feature (61)..(61): /note="Nucleotide may be methylated to form 5-methylcytosine"
ggtataaattccagatcgatggacatgatttgcacccagtgtccacatgaagtgttctctcgttttagtacttaagtaagtaagtgttttcaaagtaaacataacttcgggtactttgttac

SEQ ID NO: 14891 - DNA, 122 bp, Homo sapiens
  misc_feature (61)..(62): /note="This region represents a CpG dinucleotide"
  misc_feature (61)..(61): /note="Nucleotide may be methylated to form 5-methylcytosine"
ccaactcccgacctcaggtaatccgcccgcctcggcctcccaaagtgctgggattacaggcgttaagtcacctcgcccagcctttgagaaagggattcttcacatgaattgatgtgagcaca

SEQ ID NO: 14892 - DNA, 122 bp, Homo sapiens
  misc_feature (61)..(62): /note="This region represents a CpG dinucleotide"
  misc_feature (61)..(61): /note="Nucleotide may be methylated to form 5-methylcytosine"
tgcggaggagccggcgcgggcgggccggggagggggcgctgcgggcagacggggcggggccgtgtcgggctccgcccccacctagggacctgggaacccggacacccagagactgggcagtt

SEQ ID NO: 14893 - DNA, 122 bp, Homo sapiens
  misc_feature (61)..(62): /note="This region represents a CpG dinucleotide"
  misc_feature (61)..(61): /note="Nucleotide may be methylated to form 5-methylcytosine"
gtttcctcatttgtaaaacaaggacaatgtgatctctagctcacaggattaaatgaaatacgtaagcaaactgccagcccagtgcttcatgtggaagtttcataggagtttccattttgcaa

SEQ ID NO: 14894 - DNA, 122 bp, Homo sapiens
  misc_feature (61)..(62): /note="This region represents a CpG dinucleotide"
  misc_feature (61)..(61): /note="Nucleotide may be methylated to form 5-methylcytosine"
cagtcatcctaataaagcagcatggtcacaggatgagccagcctgaatctgcagcttcttcgtgcaaaacctgagtttctgtgtctctttaattaaaacgatttgcagctcttcattccttt

SEQ ID NO: 14895 - DNA, 122 bp, Homo sapiens
  misc_feature (61)..(62): /note="This region represents a CpG dinucleotide"
  misc_feature (61)..(61): /note="Nucleotide may be methylated to form 5-methylcytosine"
ccacagggctgggcctgcccctgcgaggcatgttttttttctggaaggaggaagcggcaacgggttacaggctggaggctgtccctgtgctcagatcccacacacgtccccagcaagcccca

SEQ ID NO: 14896 - DNA, 122 bp, Homo sapiens
  misc_feature (61)..(62): /note="This region represents a CpG dinucleotide"
  misc_feature (61)..(61): /note="Nucleotide may be methylated to form 5-methylcytosine"
cagcagcgggacaagctgaggcagtaccagaagaggatcgcccagcagctggagcgcgagcgcgccctggcccggcagctgctgcgggacggcaggaaggagtgagtggggcccgggcagcg

SEQ ID NO: 14897 - DNA, 122 bp, Homo sapiens
  misc_feature (61)..(62): /note="This region represents a CpG dinucleotide"
  misc_feature (61)..(61): /note="Nucleotide may be methylated to form 5-methylcytosine"
gacattttgtgattggcttctttcacttaatgttttcaaagttcatccatatccaggcgccgtggctcacgcctgtaatcccagcactttgggaggccaaggcgggtggatcacctgaggtc

SEQ ID NO: 14898 - DNA, 122 bp, Homo sapiens
  misc_feature (61)..(62): /note="This region represents a CpG dinucleotide"
  misc_feature (61)..(61): /note="Nucleotide may be methylated to form 5-methylcytosine"
caacaacaggaagtacaggtgcagtgtggggacctgggccaggcaggcactccgcaaaggcgagttccagagcccacaggtgcccgagctgcccttgcagtggctggttccacagtcacctt

SEQ ID NO: 14899 - DNA, 122 bp, Homo sapiens
  misc_feature (61)..(62): /note="This region represents a CpG dinucleotide"
  misc_feature (61)..(61): /note="Nucleotide may be methylated to form 5-methylcytosine"
ttgtagtttcttgaccctggctctttatcctaacatcctcatttcaaaatgtttggcttccgtctttcctcagtactgatgtatccctagccctgctctaatgttttcctggcatgactaag

SEQ ID NO: 14900 - DNA, 122 bp, Homo sapiens
  misc_feature (61)..(62): /note="This region represents a CpG dinucleotide"
  misc_feature (61)..(61): /note="Nucleotide may be methylated to form 5-methylcytosine"
tgattcatcccagaacaaaggacgtcttaaaaacctctcattacaggaactctcctcctacgacagagataagtggtaggcctggcagtgaacttaaagagtatcaaacaatcccttgacta

SEQ ID NO: 14901 - DNA, 122 bp, Homo sapiens
  misc_feature (61)..(62): /note="This region represents a CpG dinucleotide"
  misc_feature (61)..(61): /note="Nucleotide may be methylated to form 5-methylcytosine"
tggacttcaaagtgctggctgctgtgctaacgaggagagatttgcataaggccctaatcacgcgcatactgattaagcttcattatggaaactgccagctgcaatctttgtttctattttat

SEQ ID NO: 14902 - DNA, 122 bp, Homo sapiens
  misc_feature (61)..(62): /note="This region represents a CpG dinucleotide"
  misc_feature (61)..(61): /note="Nucleotide may be methylated to form 5-methylcytosine"
gtgcaggcacctgctgcccacaggcctttgggtggtgtgagaacaccagaatcaggttaccgtcactgagttgccaaaccacattctgattctaatgctggccagctgtgtgcccttgggtc

SEQ ID NO: 14903 - DNA, 122 bp, Homo sapiens
  misc_feature (61)..(62): /note="This region represents a CpG dinucleotide"
  misc_feature (61)..(61): /note="Nucleotide may be methylated to form 5-methylcytosine"
aatcgttggttttagcactagtctgtgtaaccaaataccacctgtaccccctataacttacggaaaaaaagtgaaatgtcttttgcactctgttatttcgagtttgttgatttttagcaaca

SEQ ID NO: 14904 - DNA, 122 bp, Homo sapiens
  misc_feature (61)..(62): /note="This region represents a CpG dinucleotide"
  misc_feature (61)..(61): /note="Nucleotide may be methylated to form 5-methylcytosine"
taccttgaactctttctcaatattggccagaactgccagttcattgctaagttctaaagccgtcatgactggatcttcactagacaatgacaggtaagccggacttgccaggcctttatagg

SEQ ID NO: 14905 - DNA, 122 bp, Homo sapiens
  misc_feature (61)..(62): /note="This region represents a CpG dinucleotide"
  misc_feature (61)..(61): /note="Nucleotide may be methylated to form 5-methylcytosine"
caggcttcctttcccctgccgtgaaccttcagaacctgtctgtgcgactcatgcggctgtcgagggcagtaatcctctaaatggttgaactacagtggacttccttgagtagtttttaaaaa

SEQ ID NO: 14906 - DNA, 122 bp, Homo sapiens
  misc_feature (61)..(62): /note="This region represents a CpG dinucleotide"
  misc_feature (61)..(61): /note="Nucleotide may be methylated to form 5-methylcytosine"
tttgctcacaaaggtggtctctggggtaggctcagagaggcccccagcctctgaatttcacgattgagataaagactcattatgtggagtctgatctggttccattagcaaaatgatttctg

SEQ ID NO: 14907 - DNA, 122 bp, Homo sapiens
  misc_feature (61)..(62): /note="This region represents a CpG dinucleotide"
  misc_feature (61)..(61): /note="Nucleotide may be methylated to form 5-methylcytosine"
tcttggcattagctgtatattttgctacttaaaaactgagctgccgggcgtgttggctcacgcctgtaatcccagcactttgggaggctgaggtgggcagatcacaaggtcaggagatcgag

SEQ ID NO: 14908 - DNA, 122 bp, Homo sapiens
  misc_feature (61)..(62): /note="This region represents a CpG dinucleotide"
  misc_feature (61)..(61): /note="Nucleotide may be methylated to form 5-methylcytosine"
tgttcagcatccatccgcccgagctctgcatccgactggagactttacacctgcttcctacgaagagggagctcttgccagcgagcccatgcttacccataatctacgaagagatcttttca

SEQ ID NO: 14909 - DNA, 122 bp, Homo sapiens
  misc_feature (61)..(62): /note="This region represents a CpG dinucleotide"
  misc_feature (61)..(61): /note="Nucleotide may be methylated to form 5-methylcytosine"
tagcactggtgtctacaggctcgattcccagctctcccacaaggacgtggctcagacgcacgtcaccatctcaacccaatgtaggccacccgctgcaggcgagcttccctacccaatccgac

SEQ ID NO: 14910 - DNA, 122 bp, Homo sapiens
  misc_feature (61)..(62): /note="This region represents a CpG dinucleotide"
  misc_feature (61)..(61): /note="Nucleotide may be methylated to form 5-methylcytosine"
ctttgacctagagttgttaggcgtgggtgaagcaatcaattgccaggaattctttcagcacggaggttttctctgcaaactcatcctccttttatcttttttcttaaaacacattcttgtcc

SEQ ID NO: 14911 - DNA, 122 bp, Homo sapiens
  misc_feature (61)..(62): /note="This region represents a CpG dinucleotide"
  misc_feature (61)..(61): /note="Nucleotide may be methylated to form 5-methylcytosine"
ccattcaatgagataatttcacaagtcaccagttatctatcagggaatttccacagacaacgtacaaaataaaaacctgacaaaggtcaaggcatggtgagagagataagagagaggaaaaa

SEQ ID NO: 14912 - DNA, 122 bp, Homo sapiens
  misc_feature (61)..(62): /note="This region represents a CpG dinucleotide"
  misc_feature (61)..(61): /note="Nucleotide may be methylated to form 5-methylcytosine"
atatacatattttcctcattagtgggatggagtaacgctgagctgggcaaaagaaaggtccgaatttgcctggtaatattgccacaacttgaaagtggatgattttcctcctaaagcctcct

SEQ ID NO: 14913 - DNA, 122 bp, Homo sapiens
  misc_feature (61)..(62): /note="This region represents a CpG dinucleotide"
  misc_feature (61)..(61): /note="Nucleotide may be methylated to form 5-methylcytosine"
ttccctgactggaggttctttttgccgggttcctgagtcccctgttctgctgcctggctgcgagcccccagccagcgagcggcaccgtgcggctcggctggcctcccggcgggtgatggatg

SEQ ID NO: 14914 - DNA, 122 bp, Homo sapiens
  misc_feature (61)..(62): /note="This region represents a CpG dinucleotide"
  misc_feature (61)..(61): /note="Nucleotide may be methylated to form 5-methylcytosine"
agcctggcctgttacacacccccaccccagtccctcaaatgaatcattcaaagccttcagcggaggggtgtccaggactgagaaatgagcacgttcccttatccaccacagctgcatgaatc

SEQ ID NO: 14915 - DNA, 122 bp, Homo sapiens
  misc_feature (61)..(62): /note="This region represents a CpG dinucleotide"
  misc_feature (61)..(61): /note="Nucleotide may be methylated to form 5-methylcytosine"
attaggtcatagtagtcacatgaactgaaatgtcaccagttgttacaacaccaaacccaacgccacatgtagactgatgttagagaacacagaacatgagtaagcaggggttctgagataga

SEQ ID NO: 14916 - DNA, 122 bp, Homo sapiens
  misc_feature (61)..(62): /note="This region represents a CpG dinucleotide"
  misc_feature (61)..(61): /note="Nucleotide may be methylated to form 5-methylcytosine"
tgatcagtattaaaatctcacaaagtagttttcatcttcaatgcagtttcagcattccaacgaggtatgtaatattgtctgtaatttctaggaaggagaggagtaatttcaagtcagagaca

SEQ ID NO: 14917 - DNA, 122 bp, Homo sapiens
  misc_feature (61)..(62): /note="This region represents a CpG dinucleotide"
  misc_feature (61)..(61): /note="Nucleotide may be methylated to form 5-methylcytosine"
aagccctgcagctagtaaatgactgaaccaggatttgagcccatagctgatgccaaagcccgtgtgtctaaccatcacaccacactgccacttcctgtgccagttgcttctgtacagctggt

SEQ ID NO: 14918 - DNA, 122 bp, Homo sapiens
  misc_feature (61)..(62): /note="This region represents a CpG dinucleotide"
  misc_feature (61)..(61): /note="Nucleotide may be methylated to form 5-methylcytosine"
agcatcctctatgagtcagctgatttactcattctgtctcactctccttataactaaccccgccaagtagaaactattatgtttccattgtagatcactatactcctaaagaaataagatga

SEQ ID NO: 14919 - DNA, 122 bp, Homo sapiens
  misc_feature (61)..(62): /note="This region represents a CpG dinucleotide"
  misc_feature (61)..(61): /note="Nucleotide may be methylated to form 5-methylcytosine"
gaaaggtacatacagtggtgtgtgttacaggagagaggaacactgaacttgggaaaccaccggtattataacaagctttaagcaagcctacattttgtcacaggaaggaaacattacttcat

SEQ ID NO: 14920 - DNA, 122 bp, Homo sapiens
  misc_feature (61)..(62): /note="This region represents a CpG dinucleotide"
  misc_feature (61)..(61): /note="Nucleotide may be methylated to form 5-methylcytosine"
aagagtagaaataactgccaataattatatgctccctagcatttcttttttcttgttgttcgtttgtttttgttttttttgagacagagtcttgctcttgttgcccaggctggagtacagtg

SEQ ID NO: 14921 - DNA, 122 bp, Homo sapiens
  misc_feature (61)..(62): /note="This region represents a CpG dinucleotide"
  misc_feature (61)..(61): /note="Nucleotide may be methylated to form 5-methylcytosine"
ttctagattaatcattactcttattactcatattatgcttatggtagccaaaaactggaacgtacccaaatgcccaaccatggtagactggatatatgaattgttgtatgtctgcacaaaag

SEQ ID NO: 14922 - DNA, 122 bp, Homo sapiens
  misc_feature (61)..(62): /note="This region represents a CpG dinucleotide"
  misc_feature (61)..(61): /note="Nucleotide may be methylated to form 5-methylcytosine"
ttctgcgaggatctggaggatcatatttttcctttggcatccctgttagtctgcattcagcgcgccaggatccgggcggcggcggcggcggtggcgatggggcggctggtgctggtgctgcg

SEQ ID NO: 14923 - DNA, 122 bp, Homo sapiens
  misc_feature (61)..(62): /note="This region represents a CpG dinucleotide"
  misc_feature (61)..(61): /note="Nucleotide may be methylated to form 5-methylcytosine"
agtgagcagcggaaagagaccgctgaatgggagcagggttttagcttagggtgacagaaacgttttggaactacatgtaggtgatggttgcacaatattgaggatgtacgaaatgccatgac

SEQ ID NO: 14924 - DNA, 122 bp, Homo sapiens
  misc_feature (61)..(62): /note="This region represents a CpG dinucleotide"
  misc_feature (61)..(61): /note="Nucleotide may be methylated to form 5-methylcytosine"
aggggatggcggaggctggctcctgacccaggctgctggcagggagtgtcctggaggctgcgcgctcagccggcacgtccccctcattccgccagccctgcccaccttcctcgcctgcagct

SEQ ID NO: 14925 - DNA, 122 bp, Homo sapiens
  misc_feature (61)..(62): /note="This region represents a CpG dinucleotide"
  misc_feature (61)..(61): /note="Nucleotide may be methylated to form 5-methylcytosine"
ccccggcctgagccttcatagggcacaagactggaatgtcagcaagaccggcacaagtggcgtcaactccaggagaccacctggcaggggctggcaccatgggctaagaatcaggcaactta

SEQ ID NO: 14926 - DNA, 122 bp, Homo sapiens
  misc_feature (61)..(62): /note="This region represents a CpG dinucleotide"
  misc_feature (61)..(61): /note="Nucleotide may be methylated to form 5-methylcytosine"
gaggaatgggcaaccctgatgggaaaggaggacttacacctaaaaagggaagtagtcacacgcagtgttcagagagttgaccacatggtattttatgtccttagctggagtcttagatcatt

SEQ ID NO: 14927 - DNA, 122 bp, Homo sapiens
  misc_feature (61)..(62): /note="This region represents a CpG dinucleotide"
  misc_feature (61)..(61): /note="Nucleotide may be methylated to form 5-methylcytosine"
cgtcaagcagaatgccagccgggcacccccaggcacctcgtagaccacgcccagaatcagcggtggagaagcaccgatcgctaacggcacaaatgggcggtcagaacaccagcaacacacat

SEQ ID NO: 14928 - DNA, 122 bp, Homo sapiens
  misc_feature (61)..(62): /note="This region represents a CpG dinucleotide"
  misc_feature (61)..(61): /note="Nucleotide may be methylated to form 5-methylcytosine"
gaagaatatgcttctcaaatgcaaatccaatcaagttatctccctgcttaaatccaaactcgctcatgtggcccacaaagcctaccttgcctgcctctctctaacctcacccaaaacacact

SEQ ID NO: 14929 - DNA, 122 bp, Homo sapiens
  misc_feature (61)..(62): /note="This region represents a CpG dinucleotide"
  misc_feature (61)..(61): /note="Nucleotide may be methylated to form 5-methylcytosine"
atttctctaccgtcccagggagaataattggaaaagcgagccctgagtactcagcccacccgcccttctcctgctgaactgtcgaacgtagccaccagctagcctgagcttgttctgatgtc

SEQ ID NO: 14930 - DNA, 122 bp, Homo sapiens
  misc_feature (61)..(62): /note="This region represents a CpG dinucleotide"
  misc_feature (61)..(61): /note="Nucleotide may be methylated to form 5-methylcytosine"
gagggcactcactctgccagcaaaagccgattagctattgtctccagagaactgtctgctcgtcacgcggtgccaagggatgactagaaagtgggagtgcagatcgctggggtagggattcg

SEQ ID NO: 14931 - DNA, 122 bp, Homo sapiens
  misc_feature (61)..(62): /note="This region represents a CpG dinucleotide"
  misc_feature (61)..(61): /note="Nucleotide may be methylated to form 5-methylcytosine"
catcacattctccttcaccaggtcatcctaaagcacatacctttgcgctggtgggccatccgcctggatgagtattgtttcatcggataagcttccagagccataaaaggttcagaatttta

SEQ ID NO: 14932 - DNA, 122 bp, Homo sapiens
  misc_feature (61)..(62): /note="This region represents a CpG dinucleotide"
  misc_feature (61)..(61): /note="Nucleotide may be methylated to form 5-methylcytosine"
ctgaggatttatgccagtacattttgttcaggcttatacagccttcatgctgcctctaaacgccccatagtgcttccacactgtcacagctacactatggaatcaatcaaatgactgctttc

SEQ ID NO: 14933 - DNA, 122 bp, Homo sapiens
  misc_feature (61)..(62): /note="This region represents a CpG dinucleotide"
  misc_feature (61)..(61): /note="Nucleotide may be methylated to form 5-methylcytosine"
gttaaatgtgcttttccaagaatagccaagataaatccgaaaaagaaaaacaagcagggacgacttgccctaccagagttcagaacttgtcatgaaactgcagtaatcaagacaatgtgtca

SEQ ID NO: 14934 - DNA, 122 bp, Homo sapiens
  misc_feature (61)..(62): /note="This region represents a CpG dinucleotide"
  misc_feature (61)..(61): /note="Nucleotide may be methylated to form 5-methylcytosine"
gttcatttcttaattccctcctcttcaggctacgactggcaaagatgagggaggctgaagcggcccaggggcaggcaggtaaagaatacacccaccccaccccccaggcccaacacctgaac

SEQ ID NO: 14935 - DNA, 122 bp, Homo sapiens
  misc_feature (61)..(62): /note="This region represents a CpG dinucleotide"
  misc_feature (61)..(61): /note="Nucleotide may be methylated to form 5-methylcytosine"
accaagcatggagcccttctgagcatggggtgctgagcaacctcacaggtcaaacatccacgaacctggccctgtctggtaaccacagtgaaccatcgcaagatacagcactatgtgcccag

SEQ ID NO: 14936 - DNA, 122 bp, Homo sapiens
  misc_feature (61)..(62): /note="This region represents a CpG dinucleotide"
  misc_feature (61)..(61): /note="Nucleotide may be methylated to form 5-methylcytosine"
aaataaataaagcaaagaaataaaatacgtggctgctgttgtcagcactgccagactgggcgcgaagtgttttatctctgatctaagaggaaggacgtgctctgctgaagtgagaagggagg

SEQ ID NO: 14937 - DNA, 122 bp, Homo sapiens
  misc_feature (61)..(62): /note="This region represents a CpG dinucleotide"
  misc_feature (61)..(61): /note="Nucleotide may be methylated to form 5-methylcytosine"
ctaataacagtatcagtgttgatttcctgatttaggttatggtacagtggcaaggtagcacgatgtccttgttcttaggaaatatgcactgaagaaattaggggttaatgtttcaacttatt

SEQ ID NO: 14938 - DNA, 122 bp, Homo sapiens
  misc_feature (61)..(62): /note="This region represents a CpG dinucleotide"
  misc_feature (61)..(61): /note="Nucleotide may be methylated to form 5-methylcytosine"
gaaggggtcagggggctcatttcttctagggaacaagggccctgagcttctataccccttcgtatttactgagtaaaggagatagggagaaaggggtggttgtcagtaagctgcttgactta

SEQ ID NO: 14939 - DNA, 122 bp, Homo sapiens
  misc_feature (61)..(62): /note="This region represents a CpG dinucleotide"
  misc_feature (61)..(61): /note="Nucleotide may be methylated to form 5-methylcytosine"
tgtatatcttacatatgttgatttatggttttggcctgtaacatctgtctctgtaaaatccgtaaaaccaggccgggcatggtgactgttgcctataatcccagcatactcggaggccaagg

SEQ ID NO: 14940 - DNA, 122 bp, Homo sapiens
  misc_feature (61)..(62): /note="This region represents a CpG dinucleotide"
  misc_feature (61)..(61): /note="Nucleotide may be methylated to form 5-methylcytosine"
ttgaccaagcaagatgactgttaggcagatggacagatgctctgaggtgcctatcttgtacgtttttggtgctgccaacggccaccagctcctggcaatcctatgggcagcactcatcgcct

SEQ ID NO: 14941 - DNA, 122 bp, Homo sapiens
  misc_feature (61)..(62): /note="This region represents a CpG dinucleotide"
  misc_feature (61)..(61): /note="Nucleotide may be methylated to form 5-methylcytosine"
cagggcaattgccatattttttttcactttgagtgttttatcttttgcctctaggtggatcggatcattttctgtgtcttcttagaagttgacttcaaaatctacaaaaagaaaatgaatga

SEQ ID NO: 14942 - DNA, 122 bp, Homo sapiens
  misc_feature (61)..(62): /note="This region represents a CpG dinucleotide"
  misc_feature (61)..(61): /note="Nucleotide may be methylated to form 5-methylcytosine"
gcaacacattcttgctccttaaccaaacaggtcggcaacttctttcaagaattcagctaacgtttatgagcttccattgtggacaaaatccaattctaggtgtttcagggcttgggaggttg

SEQ ID NO: 14943 - DNA, 122 bp, Homo sapiens
  misc_feature (61)..(62): /note="This region represents a CpG dinucleotide"
  misc_feature (61)..(61): /note="Nucleotide may be methylated to form 5-methylcytosine"
attgataaggtcaagcaagtcatgtgatcatgggacgggggctcttccctctaaggtagccgaagcagagagggaaggcagcataagtcagcattttcttctatgcacttataagaaagatc

SEQ ID NO: 14944 - DNA, 122 bp, Homo sapiens
  misc_feature (61)..(62): /note="This region represents a CpG dinucleotide"
  misc_feature (61)..(61): /note="Nucleotide may be methylated to form 5-methylcytosine"
aagtaataaaatgcacacaaaacaatggatagaatatgaaaatgtcttggaaatacgacccgtcaggactaggtaggtctcgcccaactgcgacagagcggtcgcccaggacgtggacctgc

SEQ ID NO: 14945 - DNA, 122 bp, Homo sapiens
  misc_feature (61)..(62): /note="This region represents a CpG dinucleotide"
  misc_feature (61)..(61): /note="Nucleotide may be methylated to form 5-methylcytosine"
ttgataacctcggctcttttctcctctgccactcctagggccattgtgacagttgagagacgggatggggtgctcatgcaccatattttacaggtgaaaaaacaggttcagagagggaaagt

SEQ ID NO: 14946 - DNA, 122 bp, Homo sapiens
  misc_feature (61)..(62): /note="This region represents a CpG dinucleotide"
  misc_feature (61)..(61): /note="Nucleotide may be methylated to form 5-methylcytosine"
cctgtccacacggttggctttgtaagccggattgttctccccaaatgtgtggctcagccacgtctcaaagtcatgaggcttgaatgaagattcagcatatgaaggaggatgtatggagacag

SEQ ID NO: 14947 - DNA, 122 bp, Homo sapiens
  misc_feature (61)..(62): /note="This region represents a CpG dinucleotide"
  misc_feature (61)..(61): /note="Nucleotide may be methylated to form 5-methylcytosine"
cttgcaaacagtctccccgccccctggcctcctggtccttcctccccagctggatcctaacgcgcaccttggacagcgccaagcccttagctgctcagcacctgccccgcaggaggaaaccc

SEQ ID NO: 14948 - DNA, 122 bp, Homo sapiens
  misc_feature (61)..(62): /note="This region represents a CpG dinucleotide"
  misc_feature (61)..(61): /note="Nucleotide may be methylated to form 5-methylcytosine"
aactctcccaacactgagtaaccacagcaatctctagacaggttctgggccttatgtttacgatgaaatgcaggaagcagctcaaagcctagaatgttattgtgagcattaatattatgttc

SEQ ID NO: 14949 - DNA, 122 bp, Homo sapiens
  misc_feature (61)..(62): /note="This region represents a CpG dinucleotide"
  misc_feature (61)..(61): /note="Nucleotide may be methylated to form 5-methylcytosine"
ccaaggtgagcttagcaacaaaagatacagggcccaccgcccctgcaatcccacgctaagcggctgctgaacctccagtccctggtccacactgaagcttgccgtctgcaaccacagaatcc

SEQ ID NO: 14950 - DNA, 122 bp, Homo sapiens
  misc_feature (61)..(62): /note="This region represents a CpG dinucleotide"
  misc_feature (61)..(61): /note="Nucleotide may be methylated to form 5-methylcytosine"
gcaagctgcagccgggctcatgcaccaagactggtcaccgtttaagcagccagcatttagcgaggacctcaggcattacctgcttagtttgctctctctgaaatacctctagctgctccacc

SEQ ID NO: 14951 - DNA, 122 bp, Homo sapiens
  misc_feature (61)..(62): /note="This region represents a CpG dinucleotide"
  misc_feature (61)..(61): /note="Nucleotide may be methylated to form 5-methylcytosine"
ttcacgtttgccatcgcctctttattcctctttactttcctccacagtccccacccctgacgtaactgtatttacttgactcctgtcatgagagagcaagctcaggggagcatagactctta

SEQ ID NO: 14952 - DNA, 122 bp, Homo sapiens
  misc_feature (61)..(62): /note="This region represents a CpG dinucleotide"
  misc_feature (61)..(61): /note="Nucleotide may be methylated to form 5-methylcytosine"
cacacaaatgtacatacaattccaggttgctcacagaccccctctaggagatgttactgtcgctcattcgtatttccggttctactcctcttccgggcacactggagaattacacttccttg

SEQ ID NO: 14953 - DNA, 122 bp, Homo sapiens
  misc_feature (61)..(62): /note="This region represents a CpG dinucleotide"
  misc_feature (61)..(61): /note="Nucleotide may be methylated to form 5-methylcytosine"
tcgttctgacttctgagctgcgaggtgagctctgtggtcagctgcactgtggcgtatgctcgctgtcattcagctgacatttcagctgctcccaaagtcaacatttatgagttctgccatgt

SEQ ID NO: 14954 - DNA, 122 bp, Homo sapiens
  misc_feature (61)..(62): /note="This region represents a CpG dinucleotide"
  misc_feature (61)..(61): /note="Nucleotide may be methylated to form 5-methylcytosine"
gacaggctccattgcaaatgtcctgacaaactatgagctgtttctcaatcatgttatcagcggtgcaaaatccagtgtcagcacacagccactgccaggagacagtgtgagcaccaacacac

SEQ ID NO: 14955 - DNA, 122 bp, Homo sapiens
  misc_feature (61)..(62): /note="This region represents a CpG dinucleotide"
  misc_feature (61)..(61): /note="Nucleotide may be methylated to form 5-methylcytosine"
ctggaattgaggatggctttgactggtcgtttggtaagtaaaccatatgactgataatgacggttgagagaggaggggttttgaaaagataattcagaaaaactattaacaataaggaaggt

SEQ ID NO: 14956 - DNA, 122 bp, Homo sapiens
  misc_feature (61)..(62): /note="This region represents a CpG dinucleotide"
  misc_feature (61)..(61): /note="Nucleotide may be methylated to form 5-methylcytosine"
tgttagagatacggttctctcctgaagattgtgactctttaggtgtgttttaatatattacgcaaggttgagaaacactagagtaggaaatgtgagctaactgaaacaaggcagacacagta

SEQ ID NO: 14957 - DNA, 122 bp, Homo sapiens
  misc_feature (61)..(62): /note="This region represents a CpG dinucleotide"
  misc_feature (61)..(61): /note="Nucleotide may be methylated to form 5-methylcytosine"
cctagctgcaggcaaaagccttgaggctgagtcccttctgtggcatggtggacagactctcgctcatcacagccgggcttgtcacgggagctcctcctccacacccctccctaagctgcctg

SEQ ID NO: 14958 - DNA, 122 bp, Homo sapiens
  misc_feature (61)..(62): /note="This region represents a CpG dinucleotide"
  misc_feature (61)..(61): /note="Nucleotide may be methylated to form 5-methylcytosine"
ctcaagcgatccacccgcctcagcctcccaaagtgctgggattacaggagtgagccaccacgcctggccatgattagtatttttaaatatgatttggaccagcaaggttgctgctttttgga

SEQ ID NO: 14959 - DNA, 122 bp, Homo sapiens
  misc_feature (61)..(62): /note="This region represents a CpG dinucleotide"
  misc_feature (61)..(61): /note="Nucleotide may be methylated to form 5-methylcytosine"
acaggcgaggaggccgagctgtataaattgtagtctagacaccaatctaaatatctcaaacgcaaggcagacatagcccagcctgaggttggaggcccggcatgctgtggaatcgagtagag

SEQ ID NO: 14960 - DNA, 122 bp, Homo sapiens
  misc_feature (61)..(62): /note="This region represents a CpG dinucleotide"
  misc_feature (61)..(61): /note="Nucleotide may be methylated to form 5-methylcytosine"
cacacaatcacaaggccccacaataggccgtctgcaggctgaggaacaaggaagccagtccgagtcccaaaacctcaaaagtaaggaagtggacagttcagccttcagtctgtggctgaagg

SEQ ID NO: 14961 - DNA, 122 bp, Homo sapiens
  misc_feature (61)..(62): /note="This region represents a CpG dinucleotide"
  misc_feature (61)..(61): /note="Nucleotide may be methylated to form 5-methylcytosine"
ttgccagcagacctccaataaaggaattctaagttcagagagaaggaaattattttcaaacggaaggtctgagaagctagaaggaatgaagaacaaaaagtgttaaatatgtatgtacatgt

SEQ ID NO: 14962 - DNA, 122 bp, Homo sapiens
  misc_feature (61)..(62): /note="This region represents a CpG dinucleotide"
  misc_feature (61)..(61): /note="Nucleotide may be methylated to form 5-methylcytosine"
cagttcgttctaggcactgagaatattgcagggacaggacagacagagtctctgatttcacgaaccttacagtcagttggaagtcaggctggaaaacaaataaacacactaatcacatgaca

SEQ ID NO: 14963 - DNA, 122 bp, Homo sapiens
  misc_feature (61)..(62): /note="This region represents a CpG dinucleotide"
  misc_feature (61)..(61): /note="Nucleotide may be methylated to form 5-methylcytosine"
ccacagggactgccatcattggcagacaggcagtctacttctctttttcctgccaagagtcggagagagcagtgacttccacaacactggccctgcagactttgtaacctaagttcccaaaa

SEQ ID NO: 14964 - DNA, 122 bp, Homo sapiens
  misc_feature (61)..(62): /note="This region represents a CpG dinucleotide"
  misc_feature (61)..(61): /note="Nucleotide may be methylated to form 5-methylcytosine"
tgttaaaaaacctaacccctcacaaaattagcaagagaaataagtatatcatgttagaaacggtgcatgatgacatacgcaaaagagacaatacaggactgtgagtaatagcacatgctttg

SEQ ID NO: 14965 - DNA, 122 bp, Homo sapiens
  misc_feature (61)..(62): /note="This region represents a CpG dinucleotide"
  misc_feature (61)..(61): /note="Nucleotide may be methylated to form 5-methylcytosine"
cttgtcagcgcttcctctgagacttgtctctttattggatatgctatttcccttccccttcgtacacttccataacactagtaccacaagagaatggggaagctctttacagcattgattta

SEQ ID NO: 14966 - DNA, 122 bp, Homo sapiens
  misc_feature (61)..(62): /note="This region represents a CpG dinucleotide"
  misc_feature (61)..(61): /note="Nucleotide may be methylated to form 5-methylcytosine"
attctgcaactgtaaggaaacagtcaaaagattctccttgaaaccgttgctacttagcagcgatcacctagcctttgatgtcttattatgtgaggggggaaatgctctttatagttaatgtc

SEQ ID NO: 14967 - DNA, 122 bp, Homo sapiens
  misc_feature (61)..(62): /note="This region represents a CpG dinucleotide"
  misc_feature (61)..(61): /note="Nucleotide may be methylated to form 5-methylcytosine"
aatgaggccctccaacagtacgcaaacaatgtgagtttcacagaatcaagcagccctggtcggtcaaaatcatttttagtttactctgggagcaaaaaacacaggataaataattttatgtt

SEQ ID NO: 14968 - DNA, 122 bp, Homo sapiens
  misc_feature (61)..(62): /note="This region represents a CpG dinucleotide"
  misc_feature (61)..(61): /note="Nucleotide may be methylated to form 5-methylcytosine"
cgctaaaatctgttagaatacgtcagcttccaggtttgtctgaggatgcagtggaaaccacgttctgtggccagcatgtcagtagcttttgatgatcagagccttccattttgatactttaa

SEQ ID NO: 14969 - DNA, 122 bp, Homo sapiens
  misc_feature (61)..(62): /note="This region represents a CpG dinucleotide"
  misc_feature (61)..(61): /note="Nucleotide may be methylated to form 5-methylcytosine"
cacaccccctccatctagtagcgtgtgggaagacagggtgctgggctgggactctagggccggctagttggcctctagcctgagctggagtctcactcagcctcatgagtagctgggattac

SEQ ID NO: 14970 - DNA, 122 bp, Homo sapiens
  misc_feature (61)..(62): /note="This region represents a CpG dinucleotide"
  misc_feature (61)..(61): /note="Nucleotide may be methylated to form 5-methylcytosine"
acagaaatctctacagaggccactacaaagattaccaagcccagtgtatgtcctcactgtcggaacaatactcattacagtttgcaaatttggacattaaagaaactgtatcatccttgagt

SEQ ID NO: 14971 - DNA, 122 bp, Homo sapiens
  misc_feature (61)..(62): /note="This region represents a CpG dinucleotide"
  misc_feature (61)..(61): /note="Nucleotide may be methylated to form 5-methylcytosine"
ctgtaaaacatctgtattttaatagtatctgtcaggaaattctattttggcaaccaagtacgggctaatctaaagtagcccatacttgagtgctatgttgataaggctctaatgcatagtta

SEQ ID NO: 14972 - DNA, 122 bp, Homo sapiens
  misc_feature (61)..(62): /note="This region represents a CpG dinucleotide"
  misc_feature (61)..(61): /note="Nucleotide may be methylated to form 5-methylcytosine"
tgtgaaattttaaaaatgttgcatctctgcttctctccctgccccaggagccctcccaggcgctgagtccctgctgctgcagcatccagccaccgacccagctcctgctgaccacgatgtcg

SEQ ID NO: 14973 - DNA, 122 bp, Homo sapiens
  misc_feature (61)..(62): /note="This region represents a CpG dinucleotide"
  misc_feature (61)..(61): /note="Nucleotide may be methylated to form 5-methylcytosine"
tctctcctgctgttttttctatagaaagagaaatatgaaatactttcccagccaccattgcgctaggtgtgaccttatgacacagttctgactaataagacataagaggcctgggcacggtg

SEQ ID NO: 14974 - DNA, 122 bp, Homo sapiens
  misc_feature (61)..(62): /note="This region represents a CpG dinucleotide"
  misc_feature (61)..(61): /note="Nucleotide may be methylated to form 5-methylcytosine"
ttcaaagctcagggcctatctgtctgggctcctcccagcgccacccccagccctgcctggcgagcctggagactccagcagcaaggcttcatgctcccagacgctgcaggtccccctactcc

SEQ ID NO: 14975 - DNA, 122 bp, Homo sapiens
  misc_feature (61)..(62): /note="This region represents a CpG dinucleotide"
  misc_feature (61)..(61): /note="Nucleotide may be methylated to form 5-methylcytosine"
acactgatattagggagtgaatcattagccatgaaatcatgtcgactttcccgactgcagcgttcttgacatgacagcaatcgcaacctgcctttcattagagccccaataagttctttact

SEQ ID NO: 14976 - DNA, 122 bp, Homo sapiens
  misc_feature (61)..(62): /note="This region represents a CpG dinucleotide"
  misc_feature (61)..(61): /note="Nucleotide may be methylated to form 5-methylcytosine"
agtggtattagatggaatgttgatctctttctaatttcaagatgccatgctgtcaaaggacgtcaaagaaaccagctgtggtttctggtaatctcccgaatgttctgcctcactgctttctg

SEQ ID NO: 14977 - DNA, 122 bp, Homo sapiens
  misc_feature (61)..(62): /note="This region represents a CpG dinucleotide"
  misc_feature (61)..(61): /note="Nucleotide may be methylated to form 5-methylcytosine"
acgcaatccacaaaggaaaaggttagccatactgggcaagcaagactttcatgcagggcacgacctgcccaatctcaggtagtggccctgtaaactagatactattgtccagcataatccct

SEQ ID NO: 14978 - DNA, 122 bp, Homo sapiens
  misc_feature (61)..(62): /note="This region represents a CpG dinucleotide"
  misc_feature (61)..(61): /note="Nucleotide may be methylated to form 5-methylcytosine"
agccaaatcctggccttgattctagcaaagtagtgaggctgcgtgtttccttttcttgcccgttcaatcctgcctcgatcctggcctccaaatcaaaccaacccagcaacattgaccgtctc

SEQ ID NO: 14979 - DNA, 122 bp, Homo sapiens
  misc_feature (61)..(62): /note="This region represents a CpG dinucleotide"
  misc_feature (61)..(61): /note="Nucleotide may be methylated to form 5-methylcytosine"
gaagcctataaaagataggtggtgtgcctacaagagcgaggactctggtatgttccgcagcgactcaagaaccacgtgagatgtgctaggtaaaggcaattcactcttgtttcaggttgcac

SEQ ID NO: 14980 - DNA, 122 bp, Homo sapiens
  misc_feature (61)..(62): /note="This region represents a CpG dinucleotide"
  misc_feature (61)..(61): /note="Nucleotide may be methylated to form 5-methylcytosine"
ttctggagctgggagaggccactgtgggctggattgttggggacagcttcagggagagcccgattcaaggcaatagagaactttggctgcaggccgttgcctagaatagggcagctgacaca

SEQ ID NO: 14981 - DNA, 122 bp, Homo sapiens
  misc_feature (61)..(62): /note="This region represents a CpG dinucleotide"
  misc_feature (61)..(61): /note="Nucleotide may be methylated to form 5-methylcytosine"
gtcaccactttgtttaactacctcagtgggtccctaaactttaataaactctgtaagacccgtatgctctgccccacccatctctctggcctccttttaccagtgaaacccagccccagcag

SEQ ID NO: 14982 - DNA, 122 bp, Homo sapiens
  misc_feature (61)..(62): /note="This region represents a CpG dinucleotide"
  misc_feature (61)..(61): /note="Nucleotide may be methylated to form 5-methylcytosine"
gatttctcattgttccacaagagcctgtacagaacagaacaagaattctttagtctctctcgtgcagcattaataatgcctcttatctcttatgacattgacctataaataaatgggagtta

SEQ ID NO: 14983 - DNA, 122 bp, Homo sapiens
  misc_feature (61)..(62): /note="This region represents a CpG dinucleotide"
  misc_feature (61)..(61): /note="Nucleotide may be methylated to form 5-methylcytosine"
ctccctcttcctcctttccttctcttcacacttgggagtgtctgcctccttccgctagaacgaagcacccacaaggccagctcttgacccaaggcaggtgctcaaccagtgtggacagaaca

SEQ ID NO: 14984 - DNA, 122 bp, Homo sapiens
  misc_feature (61)..(62): /note="This region represents a CpG dinucleotide"
  misc_feature (61)..(61): /note="Nucleotide may be methylated to form 5-methylcytosine"
attgtgagtcaaatatggtcacacccatttatgcattgtttggctacagctgcagattggcgtagttgcgacagaatgtatagcacaaaactgaaaatatttagtatctggccctttataga

SEQ ID NO: 14985 - DNA, 122 bp, Homo sapiens
  misc_feature (61)..(62): /note="This region represents a CpG dinucleotide"
  misc_feature (61)..(61): /note="Nucleotide may be methylated to form 5-methylcytosine"
gctgagtctagaaagttgtggagtctcctgttaaaatgcaaccatgcctggattataggacgatgtgatgatgtaacactaagtggaagtaggttccctgtgaaggaggagaggagcagtgc

SEQ ID NO: 14986 - DNA, 122 bp, Homo sapiens
  misc_feature (61)..(62): /note="This region represents a CpG dinucleotide"
  misc_feature (61)..(61): /note="Nucleotide may be methylated to form 5-methylcytosine"
catgcataggtttgatgaagcatggacagccttgtagaaatgtgattggacaaaagggtacgatctagtgtaatccactgagtggcgaaccccagcaagacctgtctgttcagattcttttc

SEQ ID NO: 14987 - DNA, 122 bp, Homo sapiens
  misc_feature (61)..(62): /note="This region represents a CpG dinucleotide"
  misc_feature (61)..(61): /note="Nucleotide may be methylated to form 5-methylcytosine"
aaggcatgggaggtgagtgggtcaccgacgtgaggctgcatgacttagtgccttcagctgcgagtgtcagcaattcttttcaggggatcaggaaaaagaagggaagtatggcccgaactaaa

SEQ ID NO: 14988 - DNA, 122 bp, Homo sapiens
  misc_feature (61)..(62): /note="This region represents a CpG dinucleotide"
  misc_feature (61)..(61): /note="Nucleotide may be methylated to form 5-methylcytosine"
ggcccctggaaccatcagaccccaggccctaggttggctgctcacccaggttgtaataggcgtagaccttgactgctccaggctggataagctctacattaaagtattggtgaactttgaaa

SEQ ID NO: 14989 - DNA, 122 bp, Homo sapiens
  misc_feature (61)..(62): /note="This region represents a CpG dinucleotide"
  misc_feature (61)..(61): /note="Nucleotide may be methylated to form 5-methylcytosine"
tgtgggcacactgcgcaaagctgcgggatccgtccatgtttccactgcccatcactccgacgttggggacttatgttaccgactgtgcactccacctcggggagatgccttttacctgcttc

SEQ ID NO: 14990 - DNA, 122 bp, Homo sapiens
  misc_feature (61)..(62): /note="This region represents a CpG dinucleotide"
  misc_feature (61)..(61): /note="Nucleotide may be methylated to form 5-methylcytosine"
ggagtcctgagtccacctggggctggtcttgggagccctgatacgggctttgtgactcaacgcctatgaccaggaaccaagagtcctcagtgggaagacaccctgtgcttcactgactcatt

SEQ ID NO: 14991 - DNA, 122 bp, Homo sapiens
  misc_feature (61)..(62): /note="This region represents a CpG dinucleotide"
  misc_feature (61)..(61): /note="Nucleotide may be methylated to form 5-methylcytosine"
ggaagtcatgcagggattggaaaccacaaagattctacagaaagtaagaacgtcctgcaccgagatgtttatgattccttttgcttttacttcccttttcttacataggggtaggtgaaaat

SEQ ID NO: 14992 - DNA, 122 bp, Homo sapiens
  misc_feature (61)..(62): /note="This region represents a CpG dinucleotide"
  misc_feature (61)..(61): /note="Nucleotide may be methylated to form 5-methylcytosine"
tagactcggatccagacggggaaggcgcagcatctcttgcagctgcagagagattgccaccgcaaactggagccatgtggttcgaataaagtcaacgtctcccagcttcctttccttaatcg

SEQ ID NO: 14993 - DNA, 122 bp, Homo sapiens
  misc_feature (61)..(62): /note="This region represents a CpG dinucleotide"
  misc_feature (61)..(61): /note="Nucleotide may be methylated to form 5-methylcytosine"
ttggtcggacggtgattctcactcttcctattgacttctactttgtgtcagcaagttcagcgtgggccccgtatgctgccgtggatctgatcagctgaggcctgagacacaggaccaggtac

SEQ ID NO: 14994 - DNA, 122 bp, Homo sapiens
  misc_feature (61)..(62): /note="This region represents a CpG dinucleotide"
  misc_feature (61)..(61): /note="Nucleotide may be methylated to form 5-methylcytosine"
gctcaggcagagttcatgttctctagccatacttcttctttccacaagctttgtaaaggacgtcagaattatttccctcacaggttacattgttcagattactgacctttcctgatctctgt

SEQ ID NO: 14995 - DNA, 122 bp, Homo sapiens
  misc_feature (61)..(62): /note="This region represents a CpG dinucleotide"
  misc_feature (61)..(61): /note="Nucleotide may be methylated to form 5-methylcytosine"
tggcaggttcctgcccttccttgttgtcccggttcatcttctgctccttgagcagggagccgggcaggttggaggcgtacttaaagccagggccacgcttttgcttgtaggccaaaaagaga

SEQ ID NO: 14996 - DNA, 122 bp, Homo sapiens
  misc_feature (61)..(62): /note="This region represents a CpG dinucleotide"
  misc_feature (61)..(61): /note="Nucleotide may be methylated to form 5-methylcytosine"
aagcctaggtttcagaactcagtgtcacttccttcacattatttttatcaaggcaagtcacgtggcatgaggaactagaacccacttttgataagagtaacttgtaaagtattgtggctgtg

SEQ ID NO: 14997 - DNA, 122 bp, Homo sapiens
  misc_feature (61)..(62): /note="This region represents a CpG dinucleotide"
  misc_feature (61)..(61): /note="Nucleotide may be methylated to form 5-methylcytosine"
cctccaccctgctgaaagggtctcctggctgcatcgcagctaacatcccttccttcctgtcgggcagccagagcagctgagttccagataaaaactgtcagacccggcctgtaggctgctcc

SEQ ID NO: 14998 - DNA, 122 bp, Homo sapiens
  misc_feature (61)..(62): /note="This region represents a CpG dinucleotide"
  misc_feature (61)..(61): /note="Nucleotide may be methylated to form 5-methylcytosine"
gaactacaggccctggtggggcctgctccctgtcgccagcaaagttgctgagagagcacacgccagccacggtggtgaagtcatagaaatgctatgcccccacaggccacaggaattgtgga

SEQ ID NO: 14999 - DNA, 122 bp, Homo sapiens
  misc_feature (61)..(62): /note="This region represents a CpG dinucleotide"
  misc_feature (61)..(61): /note="Nucleotide may be methylated to form 5-methylcytosine"
tgagaagcagaacctcccaacacttagtcttttcaaacaaacttttacaggcaattatttcgcaattcctttatgctgggtcaggtgagtggaagaaggagaaactgggaaggggtcacgta

SEQ ID NO: 15000 - DNA, 122 bp, Homo sapiens
  misc_feature (61)..(62): /note="This region represents a CpG dinucleotide"
  misc_feature (61)..(61): /note="Nucleotide may be methylated to form 5-methylcytosine"
atctgcgtgatcttccccagcagacgtgcccctgctcctggagggttctttctgtggccacgtggggcttgtcatgtctcagaactgctttcagagccaagcactcatgccaaatccattaa

SEQ ID NO: 15001 - DNA, 122 bp, Homo sapiens
  misc_feature (61)..(62): /note="This region represents a CpG dinucleotide"
  misc_feature (61)..(61): /note="Nucleotide may be methylated to form 5-methylcytosine"
tacaggaaaccagtacagttaaccaggaaaggcctgagtaaacaggtctgcaaatacctgcggacagagtgtaaatagatctatatcaagcagttttagagttaggctactcagagatttaa

SEQ ID NO: 15002 - DNA, 122 bp, Homo sapiens
  misc_feature (61)..(62): /note="This region represents a CpG dinucleotide"
  misc_feature (61)..(61): /note="Nucleotide may be methylated to form 5-methylcytosine"
atgtttccggcaagaggaaatggtgtctgactaatctctgagagttctttcagaatgggacggaataggttattacagcacatggggaagccaatgaccagaactctggaggttaaagcact

SEQ ID NO: 15003 - DNA, 122 bp, Homo sapiens
  misc_feature (61)..(62): /note="This region represents a CpG dinucleotide"
  misc_feature (61)..(61): /note="Nucleotide may be methylated to form 5-methylcytosine"
attgttattatgattattattcagaggaggagagtatcaggaaaggctgaagagaaatcacgaagtcttagaactggattggacctaggagattatttgggctaaactaccaaacacaggat

SEQ ID NO: 15004 - DNA, 122 bp, Homo sapiens
  misc_feature (61)..(62): /note="This region represents a CpG dinucleotide"
  misc_feature (61)..(61): /note="Nucleotide may be methylated to form 5-methylcytosine"
agggctggatggactcatggagcctcagggcgggttggggaagctggcgaggccgagccccgctttgggcttctgggcgccctgacctcgctcccggaaccctggggactgggaggcgggag

SEQ ID NO: 15005 - DNA, 122 bp, Homo sapiens
  misc_feature (61)..(62): /note="This region represents a CpG dinucleotide"
  misc_feature (61)..(61): /note="Nucleotide may be methylated to form 5-methylcytosine"
gcttccattccccagctgctaggagtgttggctgctcccttctccagagaactgtgttcacgcaaggggccctgccactcctgggaggttacgacatctccattccactcccctgcctagca

SEQ ID NO: 15006 - DNA, 122 bp, Homo sapiens
  misc_feature (61)..(62): /note="This region represents a CpG dinucleotide"
  misc_feature (61)..(61): /note="Nucleotide may be methylated to form 5-methylcytosine"
ctaatccatagggtgccccaaagattaaatgagaaagtgtattagaggcatagcatataacgagtgctcagaaagcccagcagttattttctaaatggacaggtgccaggcaccagtggctt

SEQ ID NO: 15007 - DNA, 122 bp, Homo sapiens
  misc_feature (61)..(62): /note="This region represents a CpG dinucleotide"
  misc_feature (61)..(61): /note="Nucleotide may be methylated to form 5-methylcytosine"
agtatagatgtacttacattctacaaaaatagaacaactaagatagcaaaatcaaaggcccgcagacaacatctaaagcaaaatgaggtgacagaatgtatgtgcataaatcatacatggct

SEQ ID NO: 15008 - DNA, 122 bp, Homo sapiens
  misc_feature (61)..(62): /note="This region represents a CpG dinucleotide"
  misc_feature (61)..(61): /note="Nucleotide may be methylated to form 5-methylcytosine"
agcgttctcatatgggggtttggaatagatggctactgagtccatagagctcactaactacgttgtgaacaatctaggactttgggatggttttactcagtgacatgatcaggtttgtattt

SEQ ID NO: 15009 - DNA, 122 bp, Homo sapiens
  misc_feature (61)..(62): /note="This region represents a CpG dinucleotide"
  misc_feature (61)..(61): /note="Nucleotide may be methylated to form 5-methylcytosine"
gaaggaaagcatggaaaacaaatagcagctttctcttagaatgcaaagaacagaagctgccgacacctgaaaataaaagctatgccctgtgctttgaggaagaccagagtcagctctgaatc

SEQ ID NO: 15010 - DNA, 122 bp, Homo sapiens
  misc_feature (61)..(62): /note="This region represents a CpG dinucleotide"
  misc_feature (61)..(61): /note="Nucleotide may be methylated to form 5-methylcytosine"
agctcagcaggtgacttattcccagtgctgctcttctcacagacacaaaaccaacagttccggtctcttccgatagttctggcagagacggctgcggggagacacgggcggaggcgggtccg

SEQ ID NO: 15011 - DNA, 122 bp, Homo sapiens
  misc_feature (61)..(62): /note="This region represents a CpG dinucleotide"
  misc_feature (61)..(61): /note="Nucleotide may be methylated to form 5-methylcytosine"
aagcgctggacatgtcatttgtgactcattcttttaattcaccgtgctaatcaactgaaccgccacagcctcccaaggtaattgtgtctttataggagttgaaagcagcaggcaaaagggcc

SEQ ID NO: 15012 - DNA, 122 bp, Homo sapiens
  misc_feature (61)..(62): /note="This region represents a CpG dinucleotide"
  misc_feature (61)..(61): /note="Nucleotide may be methylated to form 5-methylcytosine"
cctccatcagaggaaccagaactgctaagtgaaggtgtcttataaaattcatcatctcgacgttggtaaaatagcacataagctgctttagtctgaaatacaagagggggaaagaccattca

SEQ ID NO: 15013 - DNA, 122 bp, Homo sapiens
  misc_feature (61)..(62): /note="This region represents a CpG dinucleotide"
  misc_feature (61)..(61): /note="Nucleotide may be methylated to form 5-methylcytosine"
gtttccataacccctcccccgccgccagggttttatgcttctgtacagacttctccccaccgctagtaccccaatgctcaccgtagtctctggcacatgcagtgtgttcatcaaatgtttgt

SEQ ID NO: 15014 - DNA, 122 bp, Homo sapiens
  misc_feature (61)..(62): /note="This region represents a CpG dinucleotide"
  misc_feature (61)..(61): /note="Nucleotide may be methylated to form 5-methylcytosine"
ccctccgtgacctggggatgccactgtctgcagtcctctccaccgcacacttgcaggcgccgacgctggaccgatggcacagccagtcccaggtgtaagcgcagctccaaccttgctccttc

SEQ ID NO: 15015 - DNA, 122 bp, Homo sapiens
  misc_feature (61)..(62): /note="This region represents a CpG dinucleotide"
  misc_feature (61)..(61): /note="Nucleotide may be methylated to form 5-methylcytosine"
agaggtggggctggagttgctttccctgaaccaacaagacaattctgactcagagcattacgttggccaccaattggatggctccccaaagaggcctctgagaagtatctattctcaggcta

SEQ ID NO: 15016 - DNA, 122 bp, Homo sapiens
  misc_feature (61)..(62): /note="This region represents a CpG dinucleotide"
  misc_feature (61)..(61): /note="Nucleotide may be methylated to form 5-methylcytosine"
atgaaaaacttcaaacacatggcaaagttgagataattttacagtgaacatctgaatacccgtgactgagattctactatttttactatacctgatttatcacatatccatctattcaatcc

SEQ ID NO: 15017 - DNA, 122 bp, Homo sapiens
  misc_feature (61)..(62): /note="This region represents a CpG dinucleotide"
  misc_feature (61)..(61): /note="Nucleotide may be methylated to form 5-methylcytosine"
agaatcaaaggatttagagtacctactaggggtggtaaactaaatgccttcaggagtgcacgcaagtgaaatacttaagaggaagggcgtggcttgtggctaattgaggagtgaatgttctg

SEQ ID NO: 15018 - DNA, 122 bp, Homo sapiens
  misc_feature (61)..(62): /note="This region represents a CpG dinucleotide"
  misc_feature (61)..(61): /note="Nucleotide may be methylated to form 5-methylcytosine"
aaaagatattatcattaattacttttcaaggttgtctgctgcctgcagatttgttagctccgtcatggaatatgtcacaagggagttacttttgaaggagtaacagaagagtgtgaaaaatc

SEQ ID NO: 15019 - DNA, 122 bp, Homo sapiens
  misc_feature (61)..(62): /note="This region represents a CpG dinucleotide"
  misc_feature (61)..(61): /note="Nucleotide may be methylated to form 5-methylcytosine"
atcaacttgtcatttccttcattaggccaggagctcggagggacactgcattgattagggcgcaaaccagctttagctcgtcatcgttgtgtgcttagaggaagttcacctgctttggcctc

SEQ ID NO: 15020 - DNA, 122 bp, Homo sapiens
  misc_feature (61)..(62): /note="This region represents a CpG dinucleotide"
  misc_feature (61)..(61): /note="Nucleotide may be methylated to form 5-methylcytosine"
acctcacatggtgggaaatgagccaggccaaatgacttctctcaaacttctcaaccaaggcgtgccctgtattgaaaaatgagaacccattccctaggtgatgacacagtttgggtgtgtcc

SEQ ID NO: 15021 - DNA, 122 bp, Homo sapiens
  misc_feature (61)..(62): /note="This region represents a CpG dinucleotide"
  misc_feature (61)..(61): /note="Nucleotide may be methylated to form 5-methylcytosine"
ccccttatgacccctcgtcttttcctttttctgtcctacataactagcttattttcaatccgcttgtgggttgacgggcctgattggttaaaaacatcaggctgcagctagagcttaaactc

SEQ ID NO: 15022 - DNA, 122 bp, Homo sapiens
  misc_feature (61)..(62): /note="This region represents a CpG dinucleotide"
  misc_feature (61)..(61): /note="Nucleotide may be methylated to form 5-methylcytosine"
agctgctccatatacccttctgagtccctgctgtgccctgccccttggagcttgagatgacgctgtgcactgcctcctgaagaaacaatgccttggcaaagtggtccaactacccctcccag

SEQ ID NO: 15023 - DNA, 122 bp, Homo sapiens
  misc_feature (61)..(62): /note="This region represents a CpG dinucleotide"
  misc_feature (61)..(61): /note="Nucleotide may be methylated to form 5-methylcytosine"
cccaagtctctagccatgtccagttctccatagaagctaagtgtatgtggcagggcaagccgtccatagctgctgctggaagggtggtgcagatcctacagttggaaagattagtcacctca

SEQ ID NO: 15024 - DNA, 122 bp, Homo sapiens
  misc_feature (61)..(62): /note="This region represents a CpG dinucleotide"
  misc_feature (61)..(61): /note="Nucleotide may be methylated to form 5-methylcytosine"
gtgctatgggtttctgaaatccaggcttcatttgttgatttggggtttagagcccagagacgagactcttgcaatgtcttcatcttacctctgctctctgaaggctgagctgagggctgacc

SEQ ID NO: 15025 - DNA, 122 bp, Homo sapiens
  misc_feature (61)..(62): /note="This region represents a CpG dinucleotide"
  misc_feature (61)..(61): /note="Nucleotide may be methylated to form 5-methylcytosine"
tctatcaatgaggaaggagatttagtctcaggcctgagaaaccccatggaagaaaccaagcgttcaggtggactctcaggaacatcaggcaggagagcaagaacaacagagagaggaggaga

SEQ ID NO: 15026 - DNA, 122 bp, Homo sapiens
  misc_feature (61)..(62): /note="This region represents a CpG dinucleotide"
  misc_feature (61)..(61): /note="Nucleotide may be methylated to form 5-methylcytosine"
aaagtggcggtgagttacatcctgagacaaagcctgcaaccaaagtcgagtctaagcatgcgcttcctgcatcaatctttgctgagatgaccttattgcccatttcccagacagaaaaactg

SEQ ID NO: 15027 - DNA, 122 bp, Homo sapiens
  misc_feature (61)..(62): /note="This region represents a CpG dinucleotide"
  misc_feature (61)..(61): /note="Nucleotide may be methylated to form 5-methylcytosine"
ctagcatttataatctgagttgctccagctgccagaagtagtgtcaataattgactgtttcgtggctgaaggactatagtagttataattgtctgacataagaaatattcagtgacataagg

SEQ ID NO: 15028 - DNA, 122 bp, Homo sapiens
  misc_feature (61)..(62): /note="This region represents a CpG dinucleotide"
  misc_feature (61)..(61): /note="Nucleotide may be methylated to form 5-methylcytosine"
cgagggtggggcagccattccatctttcaatgttgatggaaggcatccttggacagctcccgcccctttcacgctgccccagccagcctgagcatcagtcatgagcaaatcaccaactccca

SEQ ID NO: 15029 - DNA, 122 bp, Homo sapiens
  misc_feature (61)..(62): /note="This region represents a CpG dinucleotide"
  misc_feature (61)..(61): /note="Nucleotide may be methylated to form 5-methylcytosine"
gtatatattcttggaactaaatctttaaatctaaccctgtattttacctttctagcacatcgcagttcagaccagccatattccagctatcctgtagccacacatggccaatagccaccaca

SEQ ID NO: 15030 - DNA, 122 bp, Homo sapiens
  misc_feature (61)..(62): /note="This region represents a CpG dinucleotide"
  misc_feature (61)..(61): /note="Nucleotide may be methylated to form 5-methylcytosine"
ggcagacaaagcgcctccatcccgtgagagcctctgtgcgggcggccccgagaccacagccgtggctgtgcatgctgtcgtggaacctgacagcattgctgagcccaggacactcacctcga

SEQ ID NO: 15031 - DNA, 122 bp, Homo sapiens
  misc_feature (61)..(62): /note="This region represents a CpG dinucleotide"
  misc_feature (61)..(61): /note="Nucleotide may be methylated to form 5-methylcytosine"
tccagggccctagaggaagcctgtaaacctcctggtctgacagacatctgacacactttgcgtgggtctctttctccacagagaagttggaataagatcaagacttaattcgcaggcccagc

SEQ ID NO: 15032 - DNA, 122 bp, Homo sapiens
  misc_feature (61)..(62): /note="This region represents a CpG dinucleotide"
  misc_feature (61)..(61): /note="Nucleotide may be methylated to form 5-methylcytosine"
attcaaacctgggtcagcatggaaaccacacccaggctctcaagccctggccatgggaaacgcagcattgaacaggggctaagggagccctgttgtgaatcccagcaccacccagtaaccat

SEQ ID NO: 15033 - DNA, 122 bp, Homo sapiens
  misc_feature (61)..(62): /note="This region represents a CpG dinucleotide"
  misc_feature (61)..(61): /note="Nucleotide may be methylated to form 5-methylcytosine"
gttcgtttcttccctgcacagtggtagggtgaggcattctccccttccctctgctgcatacgcttccagcctgtgttgctttgagcattcagattgagttgctcttgcatttgtgattcttg

SEQ ID NO: 15034 - DNA, 122 bp, Homo sapiens
  misc_feature (61)..(62): /note="This region represents a CpG dinucleotide"
  misc_feature (61)..(61): /note="Nucleotide may be methylated to form 5-methylcytosine"
tgtgtgtcacccagggtgacatggcatggcgagatcttcagcctccacaatcctcagtatcgtcatctaggcaatggtgataatccaactagctcatggtggcgttgtgaggacaaaagagg

SEQ ID NO: 15035 - DNA, 122 bp, Homo sapiens
  misc_feature (61)..(62): /note="This region represents a CpG dinucleotide"
  misc_feature (61)..(61): /note="Nucleotide may be methylated to form 5-methylcytosine"
aacacagtgtcagatgcatagttggcatgcaataaatatttgctgaaagaatgactgaagcgggtccattgaatttagcaataagcagttactgttactgttgaccttggtgagacagtttc

SEQ ID NO: 15036 - DNA, 122 bp, Homo sapiens
  misc_feature (61)..(62): /note="This region represents a CpG dinucleotide"
  misc_feature (61)..(61): /note="Nucleotide may be methylated to form 5-methylcytosine"
gcacctgaaaaggagaagttgctgaacgctaactgaggaggtttcgatgacctcaccaaccgcaggcgggcagcacgcttcacctccccgcccagggcaggagcttcaggcaggggtttctc

SEQ ID NO: 15037 - DNA, 122 bp, Homo sapiens
  misc_feature (61)..(62): /note="This region represents a CpG dinucleotide"
  misc_feature (61)..(61): /note="Nucleotide may be methylated to form 5-methylcytosine"
tcaggctcttccccctgggacagctgcaaccatgacatttctggtgtgtgcaacttggctcgtgggcagtgctggcaatgtggcggcagaggtgggaatcgtgcctatctggcagaagcaag

SEQ ID NO: 15038 - DNA, 122 bp, Homo sapiens
  misc_feature (61)..(62): /note="This region represents a CpG dinucleotide"
  misc_feature (61)..(61): /note="Nucleotide may be methylated to form 5-methylcytosine"
tgagatcatttgagaatcagagaaactggcagagaaaattatagtgagtcattttatgttcgcaacaaaacttgcataatttcaattccatgagagaatgtggaatgaactaaaatggaaaa

SEQ ID NO: 15039 - DNA, 122 bp, Homo sapiens
  misc_feature (61)..(62): /note="This region represents a CpG dinucleotide"
  misc_feature (61)..(61): /note="Nucleotide may be methylated to form 5-methylcytosine"
gactggtgacacattttgagagtacagctgagataaaaggcttttcctatcatagtgtgacgttaaaggaggagaaaatggaaaggagagaaaagggacactttacctagaagtgtacaata

SEQ ID NO: 15040 - DNA, 122 bp, Homo sapiens
  misc_feature (61)..(62): /note="This region represents a CpG dinucleotide"
  misc_feature (61)..(61): /note="Nucleotide may be methylated to form 5-methylcytosine"
agttcagaacaggaagtcagttttcagcatcaacatttatacaaaagagatccatctgggcgagatgttagctactcacatttgctgtccatgcctaaggacaacaggtgccatgccctgcc

SEQ ID NO: 15041 - DNA, 122 bp, Homo sapiens
  misc_feature (61)..(62): /note="This region represents a CpG dinucleotide"
  misc_feature (61)..(61): /note="Nucleotide may be methylated to form 5-methylcytosine"
gaagcaggaagaggccgctggacctggacgggaggacgacacctggattactgggtgtggcgccttccaccaacagtgctggccacatgtgaacagcacctggtagccttggaggctgtgag

SEQ ID NO: 15042 - DNA, 122 bp, Homo sapiens
  misc_feature (61)..(62): /note="This region represents a CpG dinucleotide"
  misc_feature (61)..(61): /note="Nucleotide may be methylated to form 5-methylcytosine"
gagaggcaagaactggtctagtcacccccgctgccttcaggtctgccttgtacctgacatcgctgcaggaacactgctggaggctggggcttggctgcaaggtggtattctctagcactttc

SEQ ID NO: 15043 - DNA, 122 bp, Homo sapiens
  misc_feature (61)..(62): /note="This region represents a CpG dinucleotide"
  misc_feature (61)..(61): /note="Nucleotide may be methylated to form 5-methylcytosine"
cggactaatacaccaggttcatttgttatcaaagccccagcactttcggcagcaccctagcgcctcaggagcgccctctttggtatctgaaggaaatggacactctttgcctaggttcccat

SEQ ID NO: 15044 - DNA, 122 bp, Homo sapiens
  misc_feature (61)..(62): /note="This region represents a CpG dinucleotide"
  misc_feature (61)..(61): /note="Nucleotide may be methylated to form 5-methylcytosine"
gtaagtaaggatctgtgggggtagcattaggaagcacccacatatgttccataaaatactcgagaagacattatatactgctgtatttatgtcttttcattcaatatggttgtgttaattac

SEQ ID NO: 15045 - DNA, 122 bp, Homo sapiens
  misc_feature (61)..(62): /note="This region represents a CpG dinucleotide"
  misc_feature (61)..(61): /note="Nucleotide may be methylated to form 5-methylcytosine"
ttgagatctatttcacaggcctttgtgaggcttaactgggatctcacatacaaaggacttcgtgcctggcttgtcccctctctctgtgaacaccctagacaacctgatattccaggccttgg

SEQ ID NO: 15046 - DNA, 122 bp, Homo sapiens
  misc_feature (61)..(62): /note="This region represents a CpG dinucleotide"
  misc_feature (61)..(61): /note="Nucleotide may be methylated to form 5-methylcytosine"
tgacctcatgatccgcccgcgtcagcctcctaaagtgctgggattacaggcgtgagccaccgtgcccagcccaggccttgtaattgtagcagaggatttggcttccctcagcctatggatct

SEQ ID NO: 15047 - DNA, 122 bp, Homo sapiens
  misc_feature (61)..(62): /note="This region represents a CpG dinucleotide"
  misc_feature (61)..(61): /note="Nucleotide may be methylated to form 5-methylcytosine"
cctaggtttccacgagcgcgagggccgcccctactgccgccgggacttcctgcagctgttcgccccgcgctgccagggctgccagggccccatcctggataactacatctcggcgctcagcg

SEQ ID NO: 15048 - DNA, 122 bp, Homo sapiens
  misc_feature (61)..(62): /note="This region represents a CpG dinucleotide"
  misc_feature (61)..(61): /note="Nucleotide may be methylated to form 5-methylcytosine"
agacaccctgggaggggcggaagcaggccctaagggactggactccagctccctacagtccggcacctacttccctgtggcctcagagggcagcgagccggccctactgcacagctgggcct

SEQ ID NO: 15049 - DNA, 122 bp, Homo sapiens
  misc_feature (61)..(62): /note="This region represents a CpG dinucleotide"
  misc_feature (61)..(61): /note="Nucleotide may be methylated to form 5-methylcytosine"
attccaacaatgctcactcccactcctgttgcataattcaggtgtgcctctgggaaaagccgttcggatcattgtctttacccacataatccttggtggtgaaggtgtggcctaaggttaat

SEQ ID NO: 15050 - DNA, 122 bp, Homo sapiens
  misc_feature (61)..(62): /note="This region represents a CpG dinucleotide"
  misc_feature (61)..(61): /note="Nucleotide may be methylated to form 5-methylcytosine"
tgaggaaataaggtgccttggcgattctcagactggataatcagctcctggggaatcaggcgctgacttttttttttttcctcctgcttttactcagagatcatcttttcatattttgggat

SEQ ID NO: 15051 - DNA, 122 bp, Homo sapiens
  misc_feature (61)..(62): /note="This region represents a CpG dinucleotide"
  misc_feature (61)..(61): /note="Nucleotide may be methylated to form 5-methylcytosine"
gatgccgtttccctttgtggcctaggtgcagtggaggcttgcctcttgcatcagctgagacgccgtgccgctggcttcctgcgcagtgacaagatggcagccctgttcaccaaggtggggaa

SEQ ID NO: 15052 - DNA, 122 bp, Homo sapiens
  misc_feature (61)..(62): /note="This region represents a CpG dinucleotide"
  misc_feature (61)..(61): /note="Nucleotide may be methylated to form 5-methylcytosine"
aattatttaaatctaagttgttagctgttagatgaaccgtttctaaactaacaaactcaccgttttaacaacagtaacacttaaaatcactactaatgaaaattctaaatatgcaaactgta

SEQ ID NO: 15053 - DNA, 122 bp, Homo sapiens
  misc_feature (61)..(62): /note="This region represents a CpG dinucleotide"
  misc_feature (61)..(61): /note="Nucleotide may be methylated to form 5-methylcytosine"
tttagtagccatgactaagcaactcatctttcagttacagaatagcctatgttggccgggcgcagtggctcaccctccgtaatctcagcactttgggaggccgaggtgggtgaatcacctga

SEQ ID NO: 15054 - DNA, 122 bp, Homo sapiens
  misc_feature (61)..(62): /note="This region represents a CpG dinucleotide"
  misc_feature (61)..(61): /note="Nucleotide may be methylated to form 5-methylcytosine"
aagggatgggctgggaggcagaacttgatggggcctgttagagatgttacaggcccagtgcgggaagctgttttgattaaatttgggagcataattgcagggtttgtgctgcggtctcatta

SEQ ID NO: 15055 - DNA, 122 bp, Homo sapiens
  misc_feature (61)..(62): /note="This region represents a CpG dinucleotide"
  misc_feature (61)..(61): /note="Nucleotide may be methylated to form 5-methylcytosine"
gatgggggttgaagatgcgactcattttggagacgtggtcgttgtcacagtctaggtcctcgtcacctggctccatgctgaacttcctcttgctggggctgattgggggagggccggtgcgg

SEQ ID NO: 15056 - DNA, 122 bp, Homo sapiens
  misc_feature (61)..(62): /note="This region represents a CpG dinucleotide"
  misc_feature (61)..(61): /note="Nucleotide may be methylated to form 5-methylcytosine"
aagatgtcttattcattcctatttcccaatgtcctcatcttcctacaactaagcttcacacgtgactcaatgaatatctgtcagatgaatgaatgaatgaatgaatgaacatcatctcctcc

SEQ ID NO: 15057 - DNA, 122 bp, Homo sapiens
  misc_feature (61)..(62): /note="This region represents a CpG dinucleotide"
  misc_feature (61)..(61): /note="Nucleotide may be methylated to form 5-methylcytosine"
gtttctggctcagcctcactgcctcacaatctcaaatgcaacaaaaacattttacttcttcgtccttcaaagtcattaacttgcgcatgatctcagagtgtgcaaagattttctaaacagaa

SEQ ID NO: 15058 - DNA, 122 bp, Homo sapiens
  misc_feature (61)..(62): /note="This region represents a CpG dinucleotide"
  misc_feature (61)..(61): /note="Nucleotide may be methylated to form 5-methylcytosine"
aggtctccaagaccacccacaggttcactgatttgctagggggacttaaaggactcaatacgtagttgtattctgtgctgtgatttattacagtgaaaagacaccgagcaaaatcagtagag

SEQ ID NO: 15059 - DNA, 122 bp, Homo sapiens
  misc_feature (61)..(62): /note="This region represents a CpG dinucleotide"
  misc_feature (61)..(61): /note="Nucleotide may be methylated to form 5-methylcytosine"
tattataagctactgctcactgtgagctctgtgctgtgctgggtagttctctcctgttatcgcatttgcttaattgcacaactaatgtttactcagtgtttggtacttcttctaaatgcagc

SEQ ID NO: 15060 - DNA, 122 bp, Homo sapiens
  misc_feature (61)..(62): /note="This region represents a CpG dinucleotide"
  misc_feature (61)..(61): /note="Nucleotide may be methylated to form 5-methylcytosine"
cttgattgtgtttcgccactgcaagtccagggtttgtctgttgtggcagctggcattaaacgccctggcacactcagacctcaaagcccaagcctagaagacagtgaagcaacctggtagat

SEQ ID NO: 15061 - DNA, 122 bp, Homo sapiens
  misc_feature (61)..(62): /note="This region represents a CpG dinucleotide"
  misc_feature (61)..(61): /note="Nucleotide may be methylated to form 5-methylcytosine"
tctcttgccctacagtgacatgctctgcctccacatagagtgtaggtgtatgaataaccacgtgcttagccagtcgtgtattcaagcactgaaagcaggttatttttgttgcataatgtcat

SEQ ID NO: 15062 - DNA, 122 bp, Homo sapiens
  misc_feature (61)..(62): /note="This region represents a CpG dinucleotide"
  misc_feature (61)..(61): /note="Nucleotide may be methylated to form 5-methylcytosine"
tttttgaggggtctagggagtagtgataggtcctaggaacaagctctacacgcgagcctgcgtggtgctccagagcatgctcatttgctaggtttttgcacaggagctgtgcaatagcccac

SEQ ID NO: 15063 - DNA, 122 bp, Homo sapiens
  misc_feature (61)..(62): /note="This region represents a CpG dinucleotide"
  misc_feature (61)..(61): /note="Nucleotide may be methylated to form 5-methylcytosine"
cagtggatggaattactgtggttgtactgaagccagctccttccttttgtatattcagttcgtggttggtcatggctggctgccctggctttctccaagactggccttactgggatgggata

SEQ ID NO: 15064 - DNA, 122 bp, Homo sapiens
  misc_feature (61)..(62): /note="This region represents a CpG dinucleotide"
  misc_feature (61)..(61): /note="Nucleotide may be methylated to form 5-methylcytosine"
aagattctctttagggaagatagtactgaccatctcagcacagagccgaaatgcacttagcgctgatgtgttgaccttagtggttgacccataaactgaacatttatacagttggaactctt

SEQ ID NO: 15065 - DNA, 122 bp, Homo sapiens
  misc_feature (61)..(62): /note="This region represents a CpG dinucleotide"
  misc_feature (61)..(61): /note="Nucleotide may be methylated to form 5-methylcytosine"
tttctaaaaatgtatgtggtcactggatcttcaagacagtttcattttccccattgtcaacgaggaagccacagagaggttaggtaacctcaagttcactcagcaaattagaaaaataaata

SEQ ID NO: 15066 - DNA, 122 bp, Homo sapiens
  misc_feature (61)..(62): /note="This region represents a CpG dinucleotide"
  misc_feature (61)..(61): /note="Nucleotide may be methylated to form 5-methylcytosine"
aggtaattctccacaccactgcctttttttttttttttttttttttttccaatgcagttgcgtggtgtgaaggcgataactgcagacactcaggtgtaaacaacccagggaatcaatgggtt

SEQ ID NO: 15067 - DNA, 122 bp, Homo sapiens
  misc_feature (61)..(62): /note="This region represents a CpG dinucleotide"
  misc_feature (61)..(61): /note="Nucleotide may be methylated to form 5-methylcytosine"
gggaaacctgtcttcctaggttctaaattggtggatgactgtctggtgacggagtccaagcgtcattgcacaatgaagatgaaaaacgcatgttggatggctactccagtgaagttgaaaaa

SEQ ID NO: 15068 - DNA, 122 bp, Homo sapiens
  misc_feature (61)..(62): /note="This region represents a CpG dinucleotide"
  misc_feature (61)..(61): /note="Nucleotide may be methylated to form 5-methylcytosine"
accaagggagaggacagccctgtcctctgtgtatagcaggtgttggcagagggtgaaaaacgtagctaagaccagaccaaaccaagaccgaattccagaggggtttgcagaaggtagaccca

SEQ ID NO: 15069 - DNA, 122 bp, Homo sapiens
  misc_feature (61)..(62): /note="This region represents a CpG dinucleotide"
  misc_feature (61)..(61): /note="Nucleotide may be methylated to form 5-methylcytosine"
ctcatcctaagaaatgggttatagtataatccctagttggcagatcaggaaactgaggcacggaaaggtgtcataatttgcctaagtattggtgaagctgggattcaaaaccagaggctgtg

SEQ ID NO: 15070 - DNA, 122 bp, Homo sapiens
  misc_feature (61)..(62): /note="This region represents a CpG dinucleotide"
  misc_feature (61)..(61): /note="Nucleotide may be methylated to form 5-methylcytosine"
ttcctggtcagaaagttcttcctcatgtcaaatctaaatccttcttgctctaaaatcttgcgtaacattaagccggtgtttctcttttgccttaaaaagcatttgagtttttacgctggatg

SEQ ID NO: 15071 - DNA, 122 bp, Homo sapiens
  misc_feature (61)..(62): /note="This region represents a CpG dinucleotide"
  misc_feature (61)..(61): /note="Nucleotide may be methylated to form 5-methylcytosine"
tggtcttgaactcctgaccctgtaatcccagagtgctgggattacagaagtgagccactacgcccggctgactcacttctttgtaacaggaagtcactaacactagatactgaccatcagca

SEQ ID NO: 15072 - DNA, 122 bp, Homo sapiens
  misc_feature (61)..(62): /note="This region represents a CpG dinucleotide"
  misc_feature (61)..(61): /note="Nucleotide may be methylated to form 5-methylcytosine"
aatgccagagtttccagcacgtagcaggcactcagctaaatatagctatattattgaatccgcacaacaacactttgaggttgatggctttatcatcaactgattctttcatgattttgtag

SEQ ID NO: 15073 - DNA, 122 bp, Homo sapiens
  misc_feature (61)..(62): /note="This region represents a CpG dinucleotide"
  misc_feature (61)..(61): /note="Nucleotide may be methylated to form 5-methylcytosine"
ccaggcgcgcggctttccggaggtgctccgtggcgggctccagccggtcctcgtcctcctcgatctgcgccatctccatgtgcacttgacagcggagaagcgtcatgaggctgcgggggtgg

SEQ ID NO: 15074 - DNA, 122 bp, Homo sapiens
  misc_feature (61)..(62): /note="This region represents a CpG dinucleotide"
  misc_feature (61)..(61): /note="Nucleotide may be methylated to form 5-methylcytosine"
catcaggaagtcttagggagcgttcttgggctgggccaccccaaagggactttggctgctcgcgacagacccctgccccaccaagggcaggcacgtcctgtctcctttcatctccccagtgc

SEQ ID NO: 15075 - DNA, 122 bp, Homo sapiens
  misc_feature (61)..(62): /note="This region represents a CpG dinucleotide"
  misc_feature (61)..(61): /note="Nucleotide may be methylated to form 5-methylcytosine"
agaggtgaaaataaaagtatatgactggctgagtgtaacaaaactacatgacaggaattacgactcacatacagcctggagtcacctttctgttacaccctgttcatcagtgatggaaaggc

SEQ ID NO: 15076 - DNA, 122 bp, Homo sapiens
  misc_feature (61)..(62): /note="This region represents a CpG dinucleotide"
  misc_feature (61)..(61): /note="Nucleotide may be methylated to form 5-methylcytosine"
gtttcccattccggacaaatatccacccaagagaaccaatcataacactggatgtattaacgcatgtcaagactctcacttctctgtagaaatgagaaataaatgtcgattgttggttttct

SEQ ID NO: 15077 - DNA, 122 bp, Homo sapiens
  misc_feature (61)..(62): /note="This region represents a CpG dinucleotide"
  misc_feature (61)..(61): /note="Nucleotide may be methylated to form 5-methylcytosine"
tttatatggatcagctctttatacctttgtgtggatttcgcgtctcactcacaaagacaacggagcaagctagcagagttcatactgagatgtgagtggctttataaccagcatgaggaaga

SEQ ID NO: 15078 - DNA, 122 bp, Homo sapiens
  misc_feature (61)..(62): /note="This region represents a CpG dinucleotide"
  misc_feature (61)..(61): /note="Nucleotide may be methylated to form 5-methylcytosine"
tcatccatgagatggaatcactcttagagattgagaggcttaggcggtgtcagtcagagacgggccacacatctcaagccgggacagaggctgccagcaaagccctcttcaacccactggag

SEQ ID NO: 15079 - DNA, 122 bp, Homo sapiens
  misc_feature (61)..(62): /note="This region represents a CpG dinucleotide"
  misc_feature (61)..(61): /note="Nucleotide may be methylated to form 5-methylcytosine"
tcagggtttggtgaggtgtagacacaactgattccattgctgttgggccagtcgcagtcacgtgttcacatgacacttaagcagctgaagccagatgcggccgtaaatcgccaggtgaaata

SEQ ID NO: 15080 - DNA, 122 bp, Homo sapiens
  misc_feature (61)..(62): /note="This region represents a CpG dinucleotide"
  misc_feature (61)..(61): /note="Nucleotide may be methylated to form 5-methylcytosine"
tttcagagatggggcagcaggttctcccaggaggagcctgtcagtcccaatgggcgggcacgtggcaaatgaggtggcagggtgcagggtgagggcagattagagttcagtagttgagtctg

SEQ ID NO: 15081 - DNA, 122 bp, Homo sapiens
  misc_feature (61)..(62): /note="This region represents a CpG dinucleotide"
  misc_feature (61)..(61): /note="Nucleotide may be methylated to form 5-methylcytosine"
gcccagcctctaggactaaattcttggccattgtgctacactacttggcactcacggacacgttcttaagcttgttctccatggccccaactagtccagtgggttcagtagatgagggtgca

SEQ ID NO: 15082 - DNA, 122 bp, Homo sapiens
  misc_feature (61)..(62): /note="This region represents a CpG dinucleotide"
  misc_feature (61)..(61): /note="Nucleotide may be methylated to form 5-methylcytosine"
tctgacttcctacctgcatggaactcaaacatctgctatcaagagattaaactgctctgacgtaggcatcaccctgccctgaggcctggtgctctaaggtgtcctggttacccacagcgctc

SEQ ID NO: 15083 - DNA, 122 bp, Homo sapiens
  misc_feature (61)..(62): /note="This region represents a CpG dinucleotide"
  misc_feature (61)..(61): /note="Nucleotide may be methylated to form 5-methylcytosine"
tgagtatgataggaatgtgacatgtaagcacgaacaacaccaactgggtgatggggagaacgcactagagtgacgtgttcaatgaacacagggatcatttctcagtgccaggcaatgttctc

SEQ ID NO: 15084 - DNA, 122 bp, Homo sapiens
  misc_feature (61)..(62): /note="This region represents a CpG dinucleotide"
  misc_feature (61)..(61): /note="Nucleotide may be methylated to form 5-methylcytosine"
gtggagggggagagagcaggaatcaattcttggtggagaaaataatctatgactagatgacgcttaaaggcacgacaagagattttatgaagttcccctaacggagggaataatgaagtgcc

SEQ ID NO: 15085 - DNA, 122 bp, Homo sapiens
  misc_feature (61)..(62): /note="This region represents a CpG dinucleotide"
  misc_feature (61)..(61): /note="Nucleotide may be methylated to form 5-methylcytosine"
catctgggcacctgtgttgtttcattccatgactaatagctaaaaataaatgagtaataacgcattgttagggtaaggtttgcttcatgccccgaaatgtattctgaaaacactgatcataa

SEQ ID NO: 15086 - DNA, 122 bp, Homo sapiens
  misc_feature (61)..(62): /note="This region represents a CpG dinucleotide"
  misc_feature (61)..(61): /note="Nucleotide may be methylated to form 5-methylcytosine"
aaaaaggtcaaacaaagttacttccctttagggagtcctacaacacttgagggcttgttacgcaatgccccagtgggaggattaaggccacacaggctcctcattgcttcacttccaagctt

SEQ ID NO: 15087 - DNA, 122 bp, Homo sapiens
  misc_feature (61)..(62): /note="This region represents a CpG dinucleotide"
  misc_feature (61)..(61): /note="Nucleotide may be methylated to form 5-methylcytosine"
ttaggtgataaaagtatgtttaattttgcaggaaattgctgaactgtcttctagaacaaccgtaccgtcttgcattcctgtcagcaatcagtgagaattcctgttgctccgcatcctcacca

SEQ ID NO: 15088 - DNA, 122 bp, Homo sapiens
  misc_feature (61)..(62): /note="This region represents a CpG dinucleotide"
  misc_feature (61)..(61): /note="Nucleotide may be methylated to form 5-methylcytosine"
ttgggatcccatggagcccaactcccttgtactaggggcaagaaaactgagtctcagagacggtgagtgatttgtttgagatcacacagcacaactcaagctgcttagccacaatgagacaa

SEQ ID NO: 15089 - DNA, 122 bp, Homo sapiens
  misc_feature (61)..(62): /note="This region represents a CpG dinucleotide"
  misc_feature (61)..(61): /note="Nucleotide may be methylated to form 5-methylcytosine"
attttgaactcctgggctcaagcgattcgccccacccaaggtgttgggattacaggtgtgcgtcaccgcgcctggccagggaacaccaatttatagcaaatcaatcagaagcacaggtcaca

SEQ ID NO: 15090 - DNA, 122 bp, Homo sapiens
  misc_feature (61)..(62): /note="This region represents a CpG dinucleotide"
  misc_feature (61)..(61): /note="Nucleotide may be methylated to form 5-methylcytosine"
ggggaggtgtagggaggtggtggcagtttcctttgccctcagcctagtcctgaaacatcccgaggtggaagggtccgcttcaccagcatggcttctcttgcagcctttaaacggcactcgcc

SEQ ID NO: 15091 - DNA, 122 bp, Homo sapiens
  misc_feature (61)..(62): /note="This region represents a CpG dinucleotide"
  misc_feature (61)..(61): /note="Nucleotide may be methylated to form 5-methylcytosine"
tgttaatatctgttgggataaaggtatttctcactgaggattcaccctcaccaagcttcccggcatgtaaaaaacatcactgtcactgcaggcagatgtaaggaataagaaaacacccacac

SEQ ID NO: 15092 - DNA, 122 bp, Homo sapiens
  misc_feature (61)..(62): /note="This region represents a CpG dinucleotide"
  misc_feature (61)..(61): /note="Nucleotide may be methylated to form 5-methylcytosine"
ctccacatccttgcaaatacttgtaattgttcatctttttattccagccatcccagtggccgtgaggaggtatctcattgtgtgtgggtgttttctttttgagacagaatttcactcttgtc

SEQ ID NO: 15093 - DNA, 122 bp, Homo sapiens
  misc_feature (61)..(62): /note="This region represents a CpG dinucleotide"
  misc_feature (61)..(61): /note="Nucleotide may be methylated to form 5-methylcytosine"
cagggctgactagctccagggtccatgcactgaacctcagccagtcccagccagtccccgcggaaaaggaatttattgatgtgagacctgaacaatcaggaggagataaccaggcagaccag

SEQ ID NO: 15094 - DNA, 122 bp, Homo sapiens
  misc_feature (61)..(62): /note="This region represents a CpG dinucleotide"
  misc_feature (61)..(61): /note="Nucleotide may be methylated to form 5-methylcytosine"
gggagtcgcagattcatggcttcttttggagaaacagtaggtattggtaccccaggccctcgtggccaaatagactgggccttttaaatagagtgaatgactcacaagtttgcactttccac

SEQ ID NO: 15095 - DNA, 122 bp, Homo sapiens
  misc_feature (61)..(62): /note="This region represents a CpG dinucleotide"
  misc_feature (61)..(61): /note="Nucleotide may be methylated to form 5-methylcytosine"
caaaaaataccagggcactcagaaattgcctacgttgaactgcctgggtgagaagtgtggcgtggccatttcccgtcagatgtctgctatctactcatctgtcctctgttgttcctaattgg

SEQ ID NO: 15096 - DNA, 122 bp, Homo sapiens
  misc_feature (61)..(62): /note="This region represents a CpG dinucleotide"
  misc_feature (61)..(61): /note="Nucleotide may be methylated to form 5-methylcytosine"
catcctggctaacatggtgaaacctcgtctctactaaaaatactctacaaattagcccggcgtggtggcaggcacctgtagtcccagctactcgggaggctgaggcaggagaatggcgtgaa

SEQ ID NO: 15097 - DNA, 122 bp, Homo sapiens
  misc_feature (61)..(62): /note="This region represents a CpG dinucleotide"
  misc_feature (61)..(61): /note="Nucleotide may be methylated to form 5-methylcytosine"
gccattagggaagatagcactgagcctattatctcaagcacaaaagttctaggcacctgacggactcatgtcggcttggattaggtgaggaatcaaggataacatgattgacatcctctatt

SEQ ID NO: 15098 - DNA, 122 bp, Homo sapiens
  misc_feature (61)..(62): /note="This region represents a CpG dinucleotide"
  misc_feature (61)..(61): /note="Nucleotide may be methylated to form 5-methylcytosine"
cagttctctgccctgcaggtctcacctgtggttctctagcttctgaacctggagttaaaccgcaggagggcaggtctcagccacagggttcctgcttggctgtcagtgccttgtcctgtaca

SEQ ID NO: 15099 - DNA, 122 bp, Homo sapiens
  misc_feature (61)..(62): /note="This region represents a CpG dinucleotide"
  misc_feature (61)..(61): /note="Nucleotide may be methylated to form 5-methylcytosine"
tacaagcatgagccacggtgcccagcctgtttggtattcttccatctcatatgtagatggcgctataacataaatttgtaccatctacttggtacaggaatcccaaaccgaagaacatacat

SEQ ID NO: 15100 - DNA, 122 bp, Homo sapiens
  misc_feature (61)..(62): /note="This region represents a CpG dinucleotide"
  misc_feature (61)..(61): /note="Nucleotide may be methylated to form 5-methylcytosine"
ggacagctaaggctgtggctccattctcagctggacttttccttggttggtcttcattcacgttgcctattatgaggatggcttcctcgtgaactccaagcagctccaaacaggaaacctgg

SEQ ID NO: 15101 - DNA, 122 bp, Homo sapiens
  misc_feature (61)..(62): /note="This region represents a CpG dinucleotide"
  misc_feature (61)..(61): /note="Nucleotide may be methylated to form 5-methylcytosine"
tgtcttttaaaacagtacattttaataagggtgacacactaaagtgtctctgctggtgggcgtctagaaggctgaagggtcctgaatcttataattcagatggaattgaaataaactggaat

SEQ ID NO: 15102 - DNA, 122 bp, Homo sapiens
  misc_feature (61)..(62): /note="This region represents a CpG dinucleotide"
  misc_feature (61)..(61): /note="Nucleotide may be methylated to form 5-methylcytosine"
gagagtgctgagaagggatcaagatatcctaggagtataaagcatcacaagagagtcatacggatcagtgatcctccaagtgtggtccctagatcaggagcatcgcatcacatgaaaacttg

SEQ ID NO: 15103 - DNA, 122 bp, Homo sapiens
  misc_feature (61)..(62): /note="This region represents a CpG dinucleotide"
  misc_feature (61)..(61): /note="Nucleotide may be methylated to form 5-methylcytosine"
aaaaaccttggaaatagttagttcatgtttcttgttttacagatgaagaaacagtgatctcggaatctggaaggacttgtctaaggctccacaattaggaagtctctagacataactctctt

SEQ ID NO: 15104 - DNA, 122 bp, Homo sapiens
  misc_feature (61)..(62): /note="This region represents a CpG dinucleotide"
  misc_feature (61)..(61): /note="Nucleotide may be methylated to form 5-methylcytosine"
aggacccaatgcataatgcatattgactgttaactctctcctctctggaatttcttgcctcgtgagaaagttcagaacttcccacacacttaatatccaaacactttcttcacgcttagctc

SEQ ID NO: 15105 - DNA, 122 bp, Homo sapiens
  misc_feature (61)..(62): /note="This region represents a CpG dinucleotide"
  misc_feature (61)..(61): /note="Nucleotide may be methylated to form 5-methylcytosine"
tgattcagtaggcctggggcgaggcctaagattctgcacttctaagagaggctgatgatgcgtgtccacaggccactcacagaagcaaggctgtaggtgaaagcagataggaaactctaggt

SEQ ID NO: 15106 - DNA, 122 bp, Homo sapiens
  misc_feature (61)..(62): /note="This region represents a CpG dinucleotide"
  misc_feature (61)..(61): /note="Nucleotide may be methylated to form 5-methylcytosine"
tacactcaacaatagagaagaattaccaaaacatgctgaggaaaagaagacagctgtctacgcatacatactgcatgattccactgacagtgctggatctcagccagggacaatttggccgc

SEQ ID NO: 15107 - DNA, 122 bp, Homo sapiens
  misc_feature (61)..(62): /note="This region represents a CpG dinucleotide"
  misc_feature (61)..(61): /note="Nucleotide may be methylated to form 5-methylcytosine"
atgaagcttacgtttgggaaagcaggaaaagtaagatcataaacactataaagcctactacgtctcagacattctgttttcagagggcaaggaagacttcagaaagagttcattcaaagtga

SEQ ID NO: 15108 - DNA, 122 bp, Homo sapiens
  misc_feature (61)..(62): /note="This region represents a CpG dinucleotide"
  misc_feature (61)..(61): /note="Nucleotide may be methylated to form 5-methylcytosine"
tagcctgccccaggagaagctggttcatttgttgattcaaaaatatttgccaccaagaagcgtgttctgaacatatactccagttaacatttcagaggttcactcaggactagtccaaggtt

SEQ ID NO: 15109 - DNA, 122 bp, Homo sapiens
  misc_feature (61)..(62): /note="This region represents a CpG dinucleotide"
  misc_feature (61)..(61): /note="Nucleotide may be methylated to form 5-methylcytosine"
cagcttccagcagtcacacgactccagagggactggaaggtcaagggaagcatgtagaaccgcaggctgttcacgtggcttggaggaggagatgacccacccttaataaaacaccgtctgcc

SEQ ID NO: 15110 - DNA, 122 bp, Homo sapiens
  misc_feature (61)..(62): /note="This region represents a CpG dinucleotide"
  misc_feature (61)..(61): /note="Nucleotide may be methylated to form 5-methylcytosine"
catgtatttacttatgagttcctctcccaacagagccttctactgaaaggtgttcaataccgtgttcatagagtgaaggtatgaataactgactctaattaatccttaaattgctgtgggag

SEQ ID NO: 15111 - DNA, 122 bp, Homo sapiens
  misc_feature (61)..(62): /note="This region represents a CpG dinucleotide"
  misc_feature (61)..(61): /note="Nucleotide may be methylated to form 5-methylcytosine"
atttcccaccccaacactctcgcttggctaattctcaagtctgaagaggaagatactttacgtaagcaggtcagctcaaggcctcttgatgtgtgtctgtttctgatttgtttttgtgttgt

SEQ ID NO: 15112 - DNA, 122 bp, Homo sapiens
  misc_feature (61)..(62): /note="This region represents a CpG dinucleotide"
  misc_feature (61)..(61): /note="Nucleotide may be methylated to form 5-methylcytosine"
gtgctcagtgcggtggggtgaaaggagcaaagcatcatttaccaagtgtggtatggtgggcgagtttctctatcagcctgcactgggatttgagggagcagggccccagcaagtgagagtgc

SEQ ID NO: 15113 - DNA, 122 bp, Homo sapiens
  misc_feature (61)..(62): /note="This region represents a CpG dinucleotide"
  misc_feature (61)..(61): /note="Nucleotide may be methylated to form 5-methylcytosine"
gtatctatgcccaggctgtaaaagattggaatctttgctcatggagcctgggagctgccacgtaagagcctgtattcaaaaagagctggctgagcccagccttcagccatttctgctaaggt

SEQ ID NO: 15114 - DNA, 122 bp, Homo sapiens
  misc_feature (61)..(62): /note="This region represents a CpG dinucleotide"
  misc_feature (61)..(61): /note="Nucleotide may be methylated to form 5-methylcytosine"
tcaacccctttcaaaatagaaaaaaaaaaaacttaggtatatacctaagattttgggtgacgataatgtgtcattgtaggttcattaaatgtaacaagtgttatactctggtggaggatttt

SEQ ID NO: 15115 - DNA, 122 bp, Homo sapiens
  misc_feature (61)..(62): /note="This region represents a CpG dinucleotide"
  misc_feature (61)..(61): /note="Nucleotide may be methylated to form 5-methylcytosine"
aggcagtttctcctgctcttcaggaatagcacatgggctgtatacttgtgtgcaccaccacgctcagctatttttaaaatactttgtagagatggggtcttgctatgttactcaggctggcc

SEQ ID NO: 15116 - DNA, 122 bp, Homo sapiens
  misc_feature (61)..(62): /note="This region represents a CpG dinucleotide"
  misc_feature (61)..(61): /note="Nucleotide may be methylated to form 5-methylcytosine"
gtgcattgagtcctaaaccaggtggcaggtgctctgatacacagaaccaccatgagactacggaaagataaaggcaggagcccagacacaatcaaggcaatgccacaccatctgcaaataaa

SEQ ID NO: 15117 - DNA, 122 bp, Homo sapiens
  misc_feature (61)..(62): /note="This region represents a CpG dinucleotide"
  misc_feature (61)..(61): /note="Nucleotide may be methylated to form 5-methylcytosine"
ttcaagttttataatgagattacagcacttagtcacatcttcaggctccacttctaaatccggctctcttgctactcccatcacatctgcagttacttcctccactgaaaccttgaaactct

SEQ ID NO: 15118 - DNA, 122 bp, Homo sapiens
  misc_feature (61)..(62): /note="This region represents a CpG dinucleotide"
  misc_feature (61)..(61): /note="Nucleotide may be methylated to form 5-methylcytosine"
ttcctattctagcagcagcaacaggctcctatttagtgactctgtatcataatgaatccacgttacatcaagtttactgtctttctgtgtctttgtataattttaaatagatctccctgctt

SEQ ID NO: 15119 - DNA, 122 bp, Homo sapiens
  misc_feature (61)..(62): /note="This region represents a CpG dinucleotide"
  misc_feature (61)..(61): /note="Nucleotide may be methylated to form 5-methylcytosine"
agctaatggaatatccatagaccctactatactaaattttaaactctaggcactgcaaaacgagaatactatccacttcttcacacacatttgtagccacctttacattagaggcaccatct

SEQ ID NO: 15120 - DNA, 122 bp, Homo sapiens
  misc_feature (61)..(62): /note="This region represents a CpG dinucleotide"
  misc_feature (61)..(61): /note="Nucleotide may be methylated to form 5-methylcytosine"
cattcccctctgtatttctttctagtggccacattattctagtttctgcatccatcttcacgttgcacctccttttctgtgtatcttttataaagacacttgtcattggatttagggcctac

SEQ ID NO: 15121 - DNA, 122 bp, Homo sapiens
  misc_feature (61)..(62): /note="This region represents a CpG dinucleotide"
  misc_feature (61)..(61): /note="Nucleotide may be methylated to form 5-methylcytosine"
tgacaacctgagacttcctggttcatagtacagacgtggccttgcccctggacagggctacgctggaggaaagtgtatgctccagaaaggagttaccacttaaggatctaatcagatttatt

SEQ ID NO: 15122 - DNA, 122 bp, Homo sapiens
  misc_feature (61)..(62): /note="This region represents a CpG dinucleotide"
  misc_feature (61)..(61): /note="Nucleotide may be methylated to form 5-methylcytosine"
ctacagcttactggcaggcaggatagctggttgcccaatctgctctttatctccatagcacggcagccaggctggttacataagtgactgcagtcatgcgttgcttaaccatagggttaggt

SEQ ID NO: 15123 - DNA, 122 bp, Homo sapiens
  misc_feature (61)..(62): /note="This region represents a CpG dinucleotide"
  misc_feature (61)..(61): /note="Nucleotide may be methylated to form 5-methylcytosine"
tatgatgaacatttatttttgcttgtgggaaggggttctggtgtctgaatcacccagtgccgcatgcttatgtgagtgacatctaatagaactctagaaaccaaagcttggccgagtttccc

SEQ ID NO: 15124 - DNA, 122 bp, Homo sapiens
  misc_feature (61)..(62): /note="This region represents a CpG dinucleotide"
  misc_feature (61)..(61): /note="Nucleotide may be methylated to form 5-methylcytosine"
tgaactgtccctgcagtggtcatcagctgaggtacccacggaaaaatccctttgtgctcacgatttgactcagactggctgcccgtctgcctgagccagctcagccccatggatgggctctg

SEQ ID NO: 15125 - DNA, 122 bp, Homo sapiens
  misc_feature (61)..(62): /note="This region represents a CpG dinucleotide"
  misc_feature (61)..(61): /note="Nucleotide may be methylated to form 5-methylcytosine"
tgcaagaatacccacttcctactttactggtgacatatttttgcaaagctgttctcactccgcttccccatctcaagcaaattaagatttagaacaatgactttaagttcccttttatgcta

SEQ ID NO: 15126 - DNA, 122 bp, Homo sapiens
  misc_feature (61)..(62): /note="This region represents a CpG dinucleotide"
  misc_feature (61)..(61): /note="Nucleotide may be methylated to form 5-methylcytosine"
gtgaactatcagcaagaactcatcaccaaggggttggtgctaagcccttcaggagggatccgcttgcacagttcaacacctggcactaggtgccgccttcaacattggggatcacattggat

SEQ ID NO: 15127 - DNA, 122 bp, Homo sapiens
  misc_feature (61)..(62): /note="This region represents a CpG dinucleotide"
  misc_feature (61)..(61): /note="Nucleotide may be methylated to form 5-methylcytosine"
ggcttcccttagcacacctttgatctgggatctgtacaaacagaatacacagggccaggccgcaagagtgccagcagctacctgcactttccccacagggaaagtgctttcccactgttgtc

SEQ ID NO: 15128 - DNA, 122 bp, Homo sapiens
  misc_feature (61)..(62): /note="This region represents a CpG dinucleotide"
  misc_feature (61)..(61): /note="Nucleotide may be methylated to form 5-methylcytosine"
tcctccctaccccacttactcaggacacaccaggagggtgcagaaggactggctgcccaacggaaggagattttatcactgatattgcttgaacttactggtgtgtggcaattaaaatggtt

SEQ ID NO: 15129 - DNA, 122 bp, Homo sapiens
  misc_feature (61)..(62): /note="This region represents a CpG dinucleotide"
  misc_feature (61)..(61): /note="Nucleotide may be methylated to form 5-methylcytosine"
gagccaagggaggaagtggtgagtgaccaggtctcagagattaaggggaggacatggggacggtggagagatcaccaggctgagaatgtcccataaaggttttggacttgacaccatagaca

SEQ ID NO: 15130 - DNA, 122 bp, Homo sapiens
  misc_feature (61)..(62): /note="This region represents a CpG dinucleotide"
  misc_feature (61)..(61): /note="Nucleotide may be methylated to form 5-methylcytosine"
tcacttggcccttcctcgtcagtattggctttcagctctcctggcccgacatcctgtggacgctgcagttcagacaaatagcaagatcatcaaagagaggcgcatgaatgaaaaactgcttt

SEQ ID NO: 15131 - DNA, 122 bp, Homo sapiens
  misc_feature (61)..(62): /note="This region represents a CpG dinucleotide"
  misc_feature (61)..(61): /note="Nucleotide may be methylated to form 5-methylcytosine"
tgcaatactcatctgtctaaggcccagctagtgtttcagatttcatcttactttaaaaagcggcagcaagattatatagttacctagtgctaatcccataagaattaaatacatagagcctc

SEQ ID NO: 15132 - DNA, 122 bp, Homo sapiens
  misc_feature (61)..(62): /note="This region represents a CpG dinucleotide"
  misc_feature (61)..(61): /note="Nucleotide may be methylated to form 5-methylcytosine"
tgtatgtccgtatgtaaacacacacactggagtgttttcaccccaacaagtggaaatgaacggaatgcaccactctgcctgcagtacggcgcttgcataaggtgcctgccctcatcagagtt

SEQ ID NO: 15133 - DNA, 122 bp, Homo sapiens
  misc_feature (61)..(62): /note="This region represents a CpG dinucleotide"
  misc_feature (61)..(61): /note="Nucleotide may be methylated to form 5-methylcytosine"
ttataccatacttgctatatgactctgtgtaagtcactgaggctctctaaactgtttcctcgtctgtaaaatagaaatgacataatacctgtaaatgaaataagacttgccaaaacattctg

SEQ ID NO: 15134 - DNA, 122 bp, Homo sapiens
  misc_feature (61)..(62): /note="This region represents a CpG dinucleotide"
  misc_feature (61)..(61): /note="Nucleotide may be methylated to form 5-methylcytosine"
acctccaggtcagcattggcctcctccagggcacgtaccttgtccaggtaggaggccaggcggtcattgaggttctgcatggtaattttctcattgccagagaggagaccaccatcgccacc

SEQ ID NO: 15135 - DNA, 122 bp, Homo sapiens
  misc_feature (61)..(62): /note="This region represents a CpG dinucleotide"
  misc_feature (61)..(61): /note="Nucleotide may be methylated to form 5-methylcytosine"
agaggcactttctcagtgcagctgagcagagcagcccacaggcctggggaaaaggaggcccgaaaggctgcctggcacacctgtttatgagctacctagaaggctgttttcaccagttagaa

SEQ ID NO: 15136 - DNA, 122 bp, Homo sapiens
  misc_feature (61)..(62): /note="This region represents a CpG dinucleotide"
  misc_feature (61)..(61): /note="Nucleotide may be methylated to form 5-methylcytosine"
tgtccagccacagctgtagcttgaaggcttgaagttcaatgggacccacttctgcttccacgctttctttcctttaattttaatttttatttatttgagacagggtctggctctgtcaccaa

SEQ ID NO: 15137 - DNA, 122 bp, Homo sapiens
  misc_feature (61)..(62): /note="This region represents a CpG dinucleotide"
  misc_feature (61)..(61): /note="Nucleotide may be methylated to form 5-methylcytosine"
atcttttttcatttaaatatctctctcccatttcctagtctgtatatctttatttcccttcgttccttattcatgttaggttagttttagtgtttagctgttcttagtattgatacagctga

SEQ ID NO: 15138 - DNA, 122 bp, Homo sapiens
  misc_feature (61)..(62): /note="This region represents a CpG dinucleotide"
  misc_feature (61)..(61): /note="Nucleotide may be methylated to form 5-methylcytosine"
actaatgtgtttttaaccagttactgtagttcccacagtaagcaagttaggtaatgtatacgcatatttgagtgtcagaattaggcccatttcttctctatgtcagtacaagggctatgatg

SEQ ID NO: 15139 - DNA, 122 bp, Homo sapiens
  misc_feature (61)..(62): /note="This region represents a CpG dinucleotide"
  misc_feature (61)..(61): /note="Nucleotide may be methylated to form 5-methylcytosine"
gtctttttgtgatcaaagtgatatttctaaaatgcaaatctgctgtcattcctcttctttcgcaatcattccccattgctttcagggtgaagtccagactccctggcatggcatacagggac

SEQ ID NO: 15140 - DNA, 122 bp, Homo sapiens
  misc_feature (61)..(62): /note="This region represents a CpG dinucleotide"
  misc_feature (61)..(61): /note="Nucleotide may be methylated to form 5-methylcytosine"
tagccaagcaaagaaaggggaaagtggaaatcagggaaatagaacatcaaatgtaaaagacgagagagaaagcacattacctgagaggaagcctaaagtcagtaagagtggattaaagtatg

SEQ ID NO: 15141 - DNA, 122 bp, Homo sapiens
  misc_feature (61)..(62): /note="This region represents a CpG dinucleotide"
  misc_feature (61)..(61): /note="Nucleotide may be methylated to form 5-methylcytosine"
cagtctaatgctgttccctgtttacccagatcagagtccgtggttcctattggaatcattcgctgtattcactccgagctccgacggccatcattctcggttgtattggctgtacaaaatgc

SEQ ID NO: 15142 - DNA, 122 bp, Homo sapiens
  misc_feature (61)..(62): /note="This region represents a CpG dinucleotide"
  misc_feature (61)..(61): /note="Nucleotide may be methylated to form 5-methylcytosine"
ctcctagcccacttcaaagcctgctttagggtgctcactgtcacacctcagtgaggttagcgagtcagattaatgccaagacactaatgctattgttcttggcaaatggaacagcactaaaa

SEQ ID NO: 15143 - DNA, 122 bp, Homo sapiens
  misc_feature (61)..(62): /note="This region represents a CpG dinucleotide"
  misc_feature (61)..(61): /note="Nucleotide may be methylated to form 5-methylcytosine"
gaaggcctccacagcagcccggactgacagagcctgcggtctctggataagccactgggacgggcttgccatccttcacattggcctgttccacggtgacttttacagaatactatcgctgc

SEQ ID NO: 15144 - DNA, 122 bp, Homo sapiens
  misc_feature (61)..(62): /note="This region represents a CpG dinucleotide"
  misc_feature (61)..(61): /note="Nucleotide may be methylated to form 5-methylcytosine"
cctcattttaacccctctaagtaattgtctcttattctgaatctagagattcagaaacagcgccaatgtttacacacgacttttgaaattttcccaggagtctttcgttggagcaatacatc

SEQ ID NO: 15145 - DNA, 122 bp, Homo sapiens
  misc_feature (61)..(62): /note="This region represents a CpG dinucleotide"
  misc_feature (61)..(61): /note="Nucleotide may be methylated to form 5-methylcytosine"
ttatttctgtcatattgtggtgctctgctcttggaagggggcagggacctcaaggattcacgcccatcctggaaagataagctctagttcctggcttaacactgtagtttctgaattaggtg

SEQ ID NO: 15146 - DNA, 122 bp, Homo sapiens
  misc_feature (61)..(62): /note="This region represents a CpG dinucleotide"
  misc_feature (61)..(61): /note="Nucleotide may be methylated to form 5-methylcytosine"
gagccccagcaaggggaagtggttaacccagggtcatgaggggaggtggggacaggggtgcgggaggacccaggtctcctcactgtctgcctcaccactctgacttcctggaggtgactcag

SEQ ID NO: 15147 - DNA, 122 bp, Homo sapiens
  misc_feature (61)..(62): /note="This region represents a CpG dinucleotide"
  misc_feature (61)..(61): /note="Nucleotide may be methylated to form 5-methylcytosine"
gtcacttttctatagcaaagctctctgtgctttactggcttcatttgtagcaggacaagccgtggacaaaacccctcagacaccgggttaaagaaggaagtggctttatttggccaggagtg

SEQ ID NO: 15148 - DNA, 122 bp, Homo sapiens
  misc_feature (61)..(62): /note="This region represents a CpG dinucleotide"
  misc_feature (61)..(61): /note="Nucleotide may be methylated to form 5-methylcytosine"
tacacctctatggagtacttaactatgtatggagctttcaggcctggaagttgctctgagcgagtcagtgagtggtgagtcagtgtaaaggccttggatgttactgtacaatactgtagact

SEQ ID NO: 15149 - DNA, 122 bp, Homo sapiens
  misc_feature (61)..(62): /note="This region represents a CpG dinucleotide"
  misc_feature (61)..(61): /note="Nucleotide may be methylated to form 5-methylcytosine"
cgggaacaccggcccccgggccactgcggagcagaacggatgctcgtcctggcatctccccgtttttgtctcttgccgacttgttcggtatcttggcttcacacactagaaagctcacaata

SEQ ID NO: 15150 - DNA, 122 bp, Homo sapiens
  misc_feature (61)..(62): /note="This region represents a CpG dinucleotide"
  misc_feature (61)..(61): /note="Nucleotide may be methylated to form 5-methylcytosine"
cccctcatcaaaggtggccgagagattttaaagcaggaatgaggctgagttctctgcggccggagcctcagttttcgactcgctacaaagttatgaacacactggcagccaagaagtattta

SEQ ID NO: 15151 - DNA, 122 bp, Homo sapiens
  misc_feature (61)..(62): /note="This region represents a CpG dinucleotide"
  misc_feature (61)..(61): /note="Nucleotide may be methylated to form 5-methylcytosine"
ctgcctttctttccacatcttgctctgggtccattttgcatatccaaactcatcaaggtacgcagcagattcaaagggtttcttatttatgaagagctgctctccatggaaggcaattgtgg

SEQ ID NO: 15152 - DNA, 122 bp, Homo sapiens
  misc_feature (61)..(62): /note="This region represents a CpG dinucleotide"
  misc_feature (61)..(61): /note="Nucleotide may be methylated to form 5-methylcytosine"
ctgagatttgtgagccaggtttaggccagaagcctggggctgaggacactcctgcgggagcgtgaggatagcctctcttcccgccctatttgcaagctcagatgtctgttcattcactagaa

SEQ ID NO: 15153 - DNA, 122 bp, Homo sapiens
  misc_feature (61)..(62): /note="This region represents a CpG dinucleotide"
  misc_feature (61)..(61): /note="Nucleotide may be methylated to form 5-methylcytosine"
accatgattgatgaagacgaaggtgtacccataaatatgggaatgcaccaagatttatagcggttaaaacaatagaaactgccaacaatgtagtaatgctgagagagataagttgcattaac

SEQ ID NO: 15154 - DNA, 122 bp, Homo sapiens
  misc_feature (61)..(62): /note="This region represents a CpG dinucleotide"
  misc_feature (61)..(61): /note="Nucleotide may be methylated to form 5-methylcytosine"
atatattattgtgctcatttgggcacttaagagatagtagctgctgctataaatcctgaccgttactcaatacttagatgtgccacttacttaatcctattactgaagagagaactgaagac

SEQ ID NO: 15155 - DNA, 122 bp, Homo sapiens
  misc_feature (61)..(62): /note="This region represents a CpG dinucleotide"
  misc_feature (61)..(61): /note="Nucleotide may be methylated to form 5-methylcytosine"
caacattgttatttctgaaaagtaaatcacaacaaggcccactctttccctaggacctctcgtagcctggctcatcctgagtttctctggataaatattcctgagccctgtgccttggaagg

SEQ ID NO: 15156 - DNA, 122 bp, Homo sapiens
  misc_feature (61)..(62): /note="This region represents a CpG dinucleotide"
  misc_feature (61)..(61): /note="Nucleotide may be methylated to form 5-methylcytosine"
gatgactcactcatgttacataattagaattcaccttcagactttgctgtcttaccatttcgtctcatagaaacaaggcttcctagcttggcttgttttcttgttactcaggggctgttgct

SEQ ID NO: 15157 - DNA, 122 bp, Homo sapiens
  misc_feature (61)..(62): /note="This region represents a CpG dinucleotide"
  misc_feature (61)..(61): /note="Nucleotide may be methylated to form 5-methylcytosine"
gcattaggacagaagtcctcaaaaggaactaaaatgttgaaacatgctcatctggggaaacgggatcagagaaagaagatgtatcatgctcagtcacagaaagtcaccacatacttttcttc

SEQ ID NO: 15158 - DNA, 122 bp, Homo sapiens
  misc_feature (61)..(62): /note="This region represents a CpG dinucleotide"
  misc_feature (61)..(61): /note="Nucleotide may be methylated to form 5-methylcytosine"
ttcctggctgtccagaagaacaagcctatcagcaagaaggaaatgattcagaggtccaaacggtaagaccaagaaaacaagagtttgtgtacaagtgttaaccaggccaccaagtggtcagg

SEQ ID NO: 15159 - DNA, 122 bp, Homo sapiens
  misc_feature (61)..(62): /note="This region represents a CpG dinucleotide"
  misc_feature (61)..(61): /note="Nucleotide may be methylated to form 5-methylcytosine"
tgaaaataatcaacaggaaggagcagcgggggaggaaaaaggcagagaaacccctggcaacgaggagacaaatgaagttctgggtgcttgaagccatggagacagtaactcaaatggtttga

SEQ ID NO: 15160 - DNA, 122 bp, Homo sapiens
  misc_feature (61)..(62): /note="This region represents a CpG dinucleotide"
  misc_feature (61)..(61): /note="Nucleotide may be methylated to form 5-methylcytosine"
gactcagtaatctatgggtagggcactaggatttgcacttccagcatgtacctcggggaccgccaggacctctttaagaaacccagtaggtaggcagtctgggcacttcctatcacccttca

SEQ ID NO: 15161 - DNA, 122 bp, Homo sapiens
  misc_feature (61)..(62): /note="This region represents a CpG dinucleotide"
  misc_feature (61)..(61): /note="Nucleotide may be methylated to form 5-methylcytosine"
gtttgttgaagagcaggttgcagtaatctggtgagaggtggtgagtggttaaggaagttgcggtagaactacagagattatgcagaaagaagtgtcctgggaggcagtttagcttaaggcat

SEQ ID NO: 15162 - DNA, 122 bp, Homo sapiens
  misc_feature (61)..(62): /note="This region represents a CpG dinucleotide"
  misc_feature (61)..(61): /note="Nucleotide may be methylated to form 5-methylcytosine"
tatatcacctaatcttcagtcctattctgacattctcttggagagctggttttgccttttcgtttatttgccttttataaaactgaaggctcatcaacttctcagcaaacaggaaaatatat

SEQ ID NO: 15163 - DNA, 122 bp, Homo sapiens
  misc_feature (61)..(62): /note="This region represents a CpG dinucleotide"
  misc_feature (61)..(61): /note="Nucleotide may be methylated to form 5-methylcytosine"
tgcagctttggttccaggctgtcctacttccagtgtggaggaaattgcttaacgtttttacgtcatcgcactcttgatttaaaggaaccaagactcagaaagaaagcatctttatgcaatgt

SEQ ID NO: 15164 - DNA, 122 bp, Homo sapiens
  misc_feature (61)..(62): /note="This region represents a CpG dinucleotide"
  misc_feature (61)..(61): /note="Nucleotide may be methylated to form 5-methylcytosine"
tgggtcctgagggcttttaatccagcagcagtgagctgtcacactgtgctctaggaggggcgggaaaggcagcacagccttccagatggacagagtcattccctggcctggaggatgaagaa

SEQ ID NO: 15165 - DNA, 122 bp, Homo sapiens
  misc_feature (61)..(62): /note="This region represents a CpG dinucleotide"
  misc_feature (61)..(61): /note="Nucleotide may be methylated to form 5-methylcytosine"
agggcagagagcctggagccatctcagatgacttctgctcagggcgtgtgtggagccacccggtctctcaggtgtcttggctgtctcccagtctatttgcccacgtctttgggtgtctgggc

SEQ ID NO: 15166 - DNA, 122 bp, Homo sapiens
  misc_feature (61)..(62): /note="This region represents a CpG dinucleotide"
  misc_feature (61)..(61): /note="Nucleotide may be methylated to form 5-methylcytosine"
aagtagctggagttaggtcatttgattttatactctgtactcaagactgctcctctctgccgactacaacaggttggtactttatttcttttcttattctgacttgaatatttttttaagcc

SEQ ID NO: 15167 - DNA, 122 bp, Homo sapiens
  misc_feature (61)..(62): /note="This region represents a CpG dinucleotide"
  misc_feature (61)..(61): /note="Nucleotide may be methylated to form 5-methylcytosine"
aatcctaacgtatatggattatctgtgacacatgggactggtgatttcatcagcaagagacgctgcatctggagaaccaatctgagaagatatctgcttcccgggtgcttgaggctttacgc

SEQ ID NO: 15168 - DNA, 122 bp, Homo sapiens
  misc_feature (61)..(62): /note="This region represents a CpG dinucleotide"
  misc_feature (61)..(61): /note="Nucleotide may be methylated to form 5-methylcytosine"
gtagcgatagggcacccaatctgccacccaccgccggcagtgcaaccccagatagcgcaccgaactcactccctgctgggcagtgcaaccccacatagcatccaacccgcctccccacccag

SEQ ID NO: 15169 - DNA, 122 bp, Homo sapiens
  misc_feature (61)..(62): /note="This region represents a CpG dinucleotide"
  misc_feature (61)..(61): /note="Nucleotide may be methylated to form 5-methylcytosine"
tttgttgatttttcctgctgcttaaaagcatgctcagataacgttttgaaattttccacacgtatcactcttttgaaaaggccttaacagccatgaataacctaattataaaacttttagcc

SEQ ID NO: 15170 - DNA, 122 bp, Homo sapiens
  misc_feature (61)..(62): /note="This region represents a CpG dinucleotide"
  misc_feature (61)..(61): /note="Nucleotide may be methylated to form 5-methylcytosine"
caaatattgttgagtgagcactaggaatgaaccatgcacgagacagagtatctgctctcacggagcttatcttctagtggggaaaccagacaaacatgtcctaccatgccagatgggcatca

SEQ ID NO: 15171 - DNA, 122 bp, Homo sapiens
  misc_feature (61)..(62): /note="This region represents a CpG dinucleotide"
  misc_feature (61)..(61): /note="Nucleotide may be methylated to form 5-methylcytosine"
aatgctgggattaacaggtgtgagccatcataccaggccttgctgacacctcttgttgcacgtggatgaatatactggatattacagagattcagttgtaggggattaatgaactggctgct

SEQ ID NO: 15172 - DNA, 122 bp, Homo sapiens
  misc_feature (61)..(62): /note="This region represents a CpG dinucleotide"
  misc_feature (61)..(61): /note="Nucleotide may be methylated to form 5-methylcytosine"
caggacaagtgttcttaacctttttgaggtgttgggccttttcgagactctgatggaagccgtggaggaatgttctcagtgcgtcactcaaaatgatgcacacaacttcaacccaatttcag

SEQ ID NO: 15173 - DNA, 122 bp, Homo sapiens
  misc_feature (61)..(62): /note="This region represents a CpG dinucleotide"
  misc_feature (61)..(61): /note="Nucleotide may be methylated to form 5-methylcytosine"
taagagaggctcacctatagatcaggaagccaactgactcatttcccgtgagaagtgtcacggctcagtgggtcagcctttcacatcattactgccggtgtctcctttccctggagaaaagc

SEQ ID NO: 15174 - DNA, 122 bp, Homo sapiens
  misc_feature (61)..(62): /note="This region represents a CpG dinucleotide"
  misc_feature (61)..(61): /note="Nucleotide may be methylated to form 5-methylcytosine"
tgtctgatgactcctgtacaatgagatgtgtattctttcactgtgccctgtatgttcaggcgcagtcttactgcctcttttaaacttcctgatgggagctgtcctccaccagcaggacttcc

SEQ ID NO: 15175 - DNA, 122 bp, Homo sapiens
  misc_feature (61)..(62): /note="This region represents a CpG dinucleotide"
  misc_feature (61)..(61): /note="Nucleotide may be methylated to form 5-methylcytosine"
attaattttatttttgaagcataaatatttactataaaaatggttgctggcactgttgaacgctttagagaggcagacagacttctcaggaaatgaaaacaagtgtttcctagagatacttg

SEQ ID NO: 15176 - DNA, 122 bp, Homo sapiens
  misc_feature (61)..(62): /note="This region represents a CpG dinucleotide"
  misc_feature (61)..(61): /note="Nucleotide may be methylated to form 5-methylcytosine"
gcctaacccctcagccccattctgctgagtccttgaggccacctccaccaaaagctactgcgcatggctttatttatcacagattttcaagttcacaagcaaaacacagggaggagttgaaa

SEQ ID NO: 15177 - DNA, 122 bp, Homo sapiens
  misc_feature (61)..(62): /note="This region represents a CpG dinucleotide"
  misc_feature (61)..(61): /note="Nucleotide may be methylated to form 5-methylcytosine"
tgctggactacaagggaaaaaccacaccaaaagaactctccccatatctctcagacttcacgagcaaaaggagagcattccagaaatggcagagccagaaaaaccataaagatacacttttt

SEQ ID NO: 15178 - DNA, 122 bp, Homo sapiens
  misc_feature (61)..(62): /note="This region represents a CpG dinucleotide"
  misc_feature (61)..(61): /note="Nucleotide may be methylated to form 5-methylcytosine"
aggctttggaagtaacaacgacagcatgtggacctcatcacatccttactagaccccaagcggtaaccactgctctaaagttagtaacagctgattcataatcaaataagctgaggttgaaa

SEQ ID NO: 15179 - DNA, 122 bp, Homo sapiens
  misc_feature (61)..(62): /note="This region represents a CpG dinucleotide"
  misc_feature (61)..(61): /note="Nucleotide may be methylated to form 5-methylcytosine"
tattatgaaatgtacatttatctccttaggtcatttcatcacagaatccctattatgaaacgtacattctcccctttgttctagtgaggaggccccaccaatcagagaaaagatctgtttct

SEQ ID NO: 15180 - DNA, 122 bp, Homo sapiens
  misc_feature (61)..(62): /note="This region represents a CpG dinucleotide"
  misc_feature (61)..(61): /note="Nucleotide may be methylated to form 5-methylcytosine"
atggggctttggagaagtgagctctgggtttaacagtaggactggggatggctcagactgcggaccttcagtgagcctctgccacctgccaggcactccgcagagcctttcacagacattcc

SEQ ID NO: 15181 - DNA, 122 bp, Homo sapiens
  misc_feature (61)..(62): /note="This region represents a CpG dinucleotide"
  misc_feature (61)..(61): /note="Nucleotide may be methylated to form 5-methylcytosine"
tgtggcatttattgccctctactaaaatgagctattatctgacactctgctctgtacagacgtgtttctgtttccattttcagttccttctccacatggtctaagtaccagtagtttagtca

SEQ ID NO: 15182 - DNA, 122 bp, Homo sapiens
  misc_feature (61)..(62): /note="This region represents a CpG dinucleotide"
  misc_feature (61)..(61): /note="Nucleotide may be methylated to form 5-methylcytosine"
tttttttattagggtctacaatctgtatttccttttcccctgccactcccattcctatgacgcattactgcagtcacgctgggatctcgaatagtttcccattaggtgaacgcactctaaaa

SEQ ID NO: 15183 - DNA, 122 bp, Homo sapiens
  misc_feature (61)..(62): /note="This region represents a CpG dinucleotide"
  misc_feature (61)..(61): /note="Nucleotide may be methylated to form 5-methylcytosine"
gaattcagtctttccagttccaaaacgccaaaagatcagtgaaggtaatatcttggcctgcgggttatagtttgcgtatagccataaaaccctaaagggcctatattatgccactttagaga

SEQ ID NO: 15184 - DNA, 122 bp, Homo sapiens
  misc_feature (61)..(62): /note="This region represents a CpG dinucleotide"
  misc_feature (61)..(61): /note="Nucleotide may be methylated to form 5-methylcytosine"
ggggctaggctgtttgctcacaggatcttaaaccagaagtaactactagaagcaatattgcgggaactgccacactcaggtctggtccacactgagtcactagggtgaagaaagggagtctg

SEQ ID NO: 15185 - DNA, 122 bp, Homo sapiens
  misc_feature (61)..(62): /note="This region represents a CpG dinucleotide"
  misc_feature (61)..(61): /note="Nucleotide may be methylated to form 5-methylcytosine"
tccatccatccatccatccatccatccatccatccatcttttcattatcaattcattcaacgaaaatttttgagtgcctattatgagccaggcattgtactaggtactgactcatagaaata

SEQ ID NO: 15186 - DNA, 122 bp, Homo sapiens
  misc_feature (61)..(62): /note="This region represents a CpG dinucleotide"
  misc_feature (61)..(61): /note="Nucleotide may be methylated to form 5-methylcytosine"
taatcaacatgactatggggaagataccagggtggcatgctctcacagccacaaagtcaacgcagttcattcaaatatagaaacctcagagatctaagcctattttatccccacctacattg

SEQ ID NO: 15187 - DNA, 122 bp, Homo sapiens
  misc_feature (61)..(62): /note="This region represents a CpG dinucleotide"
  misc_feature (61)..(61): /note="Nucleotide may be methylated to form 5-methylcytosine"
caagggaaggaactgcaggagggaggagccctgtcttattggttctagatccactgaaagcggccacagttctgaggacttgggcaggttccagaaacaatgccaaatctcccttgctagtc

SEQ ID NO: 15188 - DNA, 122 bp, Homo sapiens
  misc_feature (61)..(62): /note="This region represents a CpG dinucleotide"
  misc_feature (61)..(61): /note="Nucleotide may be methylated to form 5-methylcytosine"
agacttctgtggcagagcagcaggtacaggactgggggtctctggcacccgcaccagccacgttcccagaccctgcaccaggaccctaggtgagggcccagggcaagcccctctgggatggc

SEQ ID NO: 15189 - DNA, 122 bp, Homo sapiens
  misc_feature (61)..(62): /note="This region represents a CpG dinucleotide"
  misc_feature (61)..(61): /note="Nucleotide may be methylated to form 5-methylcytosine"
aacaaaagaatgaaaataaaagtaaattacgacagaagaagttctatttagtagtcagtgcggtgcaggtgacattgtgatgtagtcaatatgtgcatgattgttttgttttatttgctagg

SEQ ID NO: 15190 - DNA, 122 bp, Homo sapiens
  misc_feature (61)..(62): /note="This region represents a CpG dinucleotide"
  misc_feature (61)..(61): /note="Nucleotide may be methylated to form 5-methylcytosine"
ccactctcagtgactatgtaactgtgtcagggtgagttggtgcagtcttttgtcttatcacgtgcctccatctcctggaggcagggtgcccaaggagggcagggaggggttcttgtgctcct

SEQ ID NO: 15191 - DNA, 122 bp, Homo sapiens
  misc_feature (61)..(62): /note="This region represents a CpG dinucleotide"
  misc_feature (61)..(61): /note="Nucleotide may be methylated to form 5-methylcytosine"
tcaagcaggttggcagctttccccagccctcccccagtgtccctgccaggcacggaaggacgggtcacagggctgaccctggctggcatttcagacagctttataattacaccatctatttt

SEQ ID NO: 15192 - DNA, 122 bp, Homo sapiens
  misc_feature (61)..(62): /note="This region represents a CpG dinucleotide"
  misc_feature (61)..(61): /note="Nucleotide may be methylated to form 5-methylcytosine"
attattgctctctgtttagaaatgctatgttgatgtattacacctcagaacaactatgaacgtgccatctgcagcaggaaggtttattagactacaaatcaggatacagatgttggagggaa

SEQ ID NO: 15193 - DNA, 122 bp, Homo sapiens
  misc_feature (61)..(62): /note="This region represents a CpG dinucleotide"
  misc_feature (61)..(61): /note="Nucleotide may be methylated to form 5-methylcytosine"
tgggtccaaacccagcatttgctgccaatttctgcaaaggatatactctagagactcacgcgtcctcctaccttgtacagctggacgtcgtagcatttaaagagctggcacacgtcaggcaa

SEQ ID NO: 15194 - DNA, 122 bp, Homo sapiens
  misc_feature (61)..(62): /note="This region represents a CpG dinucleotide"
  misc_feature (61)..(61): /note="Nucleotide may be methylated to form 5-methylcytosine"
tggctctagagtcatgtttactgagtttggacttccatctttaccacttactatgagtcgcgtgatcctgggaacgtattcaacttccttacacttcacttttcacgtctgtaaggtgaaga

SEQ ID NO: 15195 - DNA, 122 bp, Homo sapiens
  misc_feature (61)..(62): /note="This region represents a CpG dinucleotide"
  misc_feature (61)..(61): /note="Nucleotide may be methylated to form 5-methylcytosine"
tagacacagccaaagtaagttcattttgaattaataatccagtatttcatagtgctggttcgaggtacagatctaggccttgtgtgcaacagaatagaattttagaagtagagtaaaaagtt

SEQ ID NO: 15196 - DNA, 122 bp, Homo sapiens
  misc_feature (61)..(62): /note="This region represents a CpG dinucleotide"
  misc_feature (61)..(61): /note="Nucleotide may be methylated to form 5-methylcytosine"
aaccccaggtccatgtgtccaaatccccgtagccagggcggcggccagccaaagaaatgccgccccgagcaggcgcgtgcggctcctggcattctgggtttcatacccgtagggctcgggtg

SEQ ID NO: 15197 - DNA, 122 bp, Homo sapiens
  misc_feature (61)..(62): /note="This region represents a CpG dinucleotide"
  misc_feature (61)..(61): /note="Nucleotide may be methylated to form 5-methylcytosine"
tgcacaacttggataatcaagtaaattataaagcaaatttcagtactcttgcctcagaaccgctgccatctctgcacctgtaatgtagacagtgaaaacgctggttatttattttgtacttt

SEQ ID NO: 15198 - DNA, 122 bp, Homo sapiens
  misc_feature (61)..(62): /note="This region represents a CpG dinucleotide"
  misc_feature (61)..(61): /note="Nucleotide may be methylated to form 5-methylcytosine"
ggctacatatggactcagagcaaacatgtgctgtgatcaattaatgctgcctgctgtaggcgtgggaggaggaagtgatgacttgtgtgcatgtattggccaaccctggacctcccagctct

SEQ ID NO: 15199 - DNA, 122 bp, Homo sapiens
  misc_feature (61)..(62): /note="This region represents a CpG dinucleotide"
  misc_feature (61)..(61): /note="Nucleotide may be methylated to form 5-methylcytosine"
ttagaaaatactggaagctggtgatcagcaccttcccaataagaactcaggagctggacacgtgggctcaagcatgcgcactaaggggcaaaatgctggcgtttaactggttatatgacctt

SEQ ID NO: 15200 - DNA, 122 bp, Homo sapiens
  misc_feature (61)..(62): /note="This region represents a CpG dinucleotide"
  misc_feature (61)..(61): /note="Nucleotide may be methylated to form 5-methylcytosine"
tttacctcaccctccccacgtgtggcagcgccacaaatctggggacacctgtggagccctcgaagctagggaagaagggctgtgttctcaaactgtgttcctcagcccctggagctaacaca

SEQ ID NO: 15201 - DNA, 122 bp, Homo sapiens
  misc_feature (61)..(62): /note="This region represents a CpG dinucleotide"
  misc_feature (61)..(61): /note="Nucleotide may be methylated to form 5-methylcytosine"
atttctaacctccatgtccctctttcacttcttctgtggtgtctcacatgtgtttgtgtacgtgtgtgtatgcatgcacacatccaagtgtatatatgtatcgcaccttgggcaaaatttaa

SEQ ID NO: 15202 - DNA, 122 bp, Homo sapiens
  misc_feature (61)..(62): /note="This region represents a CpG dinucleotide"
  misc_feature (61)..(61): /note="Nucleotide may be methylated to form 5-methylcytosine"
gtggtcataattagtcactgctcatttgtgtcatcagtcatcccagttgttttgacacaacgtaacctttggtcatagctttctttcactcttctggttttcacatatgactttgtttagag

SEQ ID NO: 15203 - DNA, 122 bp, Homo sapiens
  misc_feature (61)..(62): /note="This region represents a CpG dinucleotide"
  misc_feature (61)..(61): /note="Nucleotide may be methylated to form 5-methylcytosine"
aagatctattcaactcactgcccaatctcctctcctggtgcagaaaagacacccagtcagcgacttgcattatctgcaggcatgagtgaataataataatgcctaacccttatatagtgcta

SEQ ID NO: 15204 - DNA, 122 bp, Homo sapiens
  misc_feature (61)..(62): /note="This region represents a CpG dinucleotide"
  misc_feature (61)..(61): /note="Nucleotide may be methylated to form 5-methylcytosine"
gtaacaatctgtgccaattatcacccttgcttatctatgcctcttgttcacaatcattcacgagtgcattcatcttcaattaaactgtaaactccttgaagagagagatcacagcatgctga

SEQ ID NO: 15205 - DNA, 122 bp, Homo sapiens
  misc_feature (61)..(62): /note="This region represents a CpG dinucleotide"
  misc_feature (61)..(61): /note="Nucleotide may be methylated to form 5-methylcytosine"
tgtaccaggcggggttctgaatgcttccacgtcccaatttcaatcacttctgcaaggtgacgcagctaggaaagatgtgactcaggccactctggcatccaggactcacctcctcttctgac

SEQ ID NO: 15206 - DNA, 122 bp, Homo sapiens
  misc_feature (61)..(62): /note="This region represents a CpG dinucleotide"
  misc_feature (61)..(61): /note="Nucleotide may be methylated to form 5-methylcytosine"
taaattctcctctgatttccatgtgctccaagaataaagaccaaaagcctttcccagtcccgtatggctttgtgtaatccaaaccttacttattacttcagcctccagttacaccactccct

SEQ ID NO: 15207 - DNA, 122 bp, Homo sapiens
  misc_feature (61)..(62): /note="This region represents a CpG dinucleotide"
  misc_feature (61)..(61): /note="Nucleotide may be methylated to form 5-methylcytosine"
ccccaaataattttgaaactcatcatcagccgagtttctgccctcatgaggtaattccatcgttctccccagcctgcccctggcagctgtaacacaggagctggcctgagagcagattcacc

SEQ ID NO: 15208 - DNA, 122 bp, Homo sapiens
  misc_feature (61)..(62): /note="This region represents a CpG dinucleotide"
  misc_feature (61)..(61): /note="Nucleotide may be methylated to form 5-methylcytosine"
ggcagttctgagccaggaaccaggtactgcctttacctgatgatgttggctgcagccttccgctcctgggtcaggagctccgggtcgtgcatgacttcttccaggaagccgatcaccttgca

SEQ ID NO: 15209 - DNA, 122 bp, Homo sapiens
  misc_feature (61)..(62): /note="This region represents a CpG dinucleotide"
  misc_feature (61)..(61): /note="Nucleotide may be methylated to form 5-methylcytosine"
acacttactgctgtcctttaagtcagggatcagctgtggactagtaataaactccctatccgttctgctaatccgcaagtcttcaagtgtcacagtgtctgataaactctggttgagacact

SEQ ID NO: 15210 - DNA, 122 bp, Homo sapiens
  misc_feature (61)..(62): /note="This region represents a CpG dinucleotide"
  misc_feature (61)..(61): /note="Nucleotide may be methylated to form 5-methylcytosine"
actgtttttcatcctctgtagacaatgcacctccttattgcctgcatctgggacctaccacgcccagtgcctggccaagggctatcggccttgtctttagcccaacccatgaaataagtgaa

SEQ ID NO: 15211 - DNA, 122 bp, Homo sapiens
  misc_feature (61)..(62): /note="This region represents a CpG dinucleotide"
  misc_feature (61)..(61): /note="Nucleotide may be methylated to form 5-methylcytosine"
agtgcccagcttccctggttctgtcctacacttattagtgattgtacttggggaacagcacgccttagctcagacagcctcataggagagctggccagaagccatatttagacgactcctca

SEQ ID NO: 15212 - DNA, 122 bp, Homo sapiens
  misc_feature (61)..(62): /note="This region represents a CpG dinucleotide"
  misc_feature (61)..(61): /note="Nucleotide may be methylated to form 5-methylcytosine"
taagagctaaaaacagaaaagactaagctccactttcctcaaagactaaatctcttgagacgctgatgattctggcttccttgaatgtgcctggggtaataaaaataattttagaccagggt

SEQ ID NO: 15213 - DNA, 122 bp, Homo sapiens
  misc_feature (61)..(62): /note="This region represents a CpG dinucleotide"
  misc_feature (61)..(61): /note="Nucleotide may be methylated to form 5-methylcytosine"
ataagtttaaaattgcatgctgttttgagtagtgtgatgaaatctcacacagtcctgcttcgtcttacttgggatgcaaatcatccctttgtccagtgtatccacactgtgtatggtacctg

SEQ ID NO: 15214 - DNA, 122 bp, Homo sapiens
  misc_feature (61)..(62): /note="This region represents a CpG dinucleotide"
  misc_feature (61)..(61): /note="Nucleotide may be methylated to form 5-methylcytosine"
gactgccagttaaaatattcaatactacatgggctgacagatacaactgctacataacttcgtgtgaataattgctgtgacaacctgtcaggccagcaaagttctttattaccagttaagag

SEQ ID NO: 15215 - DNA, 122 bp, Homo sapiens
  misc_feature (61)..(62): /note="This region represents a CpG dinucleotide"
  misc_feature (61)..(61): /note="Nucleotide may be methylated to form 5-methylcytosine"
tttctatgtgtaattgacacaaatgagtatttgtgtactgtctagaccatgtcaccatcccgtcagaagctcaggcaatacttatacatgatatgtactagaacacattattttcctggaaa

SEQ ID NO: 15216 - DNA, 122 bp, Homo sapiens
  misc_feature (61)..(62): /note="This region represents a CpG dinucleotide"
  misc_feature (61)..(61): /note="Nucleotide may be methylated to form 5-methylcytosine"
ggagagatgcttcctgctcagatggcattaccgagcactccttccagcctcttgacatgtcgagccactgtttatctagctgtttggttgaggagtaatagagtcctgtgacctgatgtcac

SEQ ID NO: 15217 - DNA, 122 bp, Homo sapiens
  misc_feature (61)..(62): /note="This region represents a CpG dinucleotide"
  misc_feature (61)..(61): /note="Nucleotide may be methylated to form 5-methylcytosine"
tcatttaaaatagcttacagctacaactcatgactttagtaccaatggttatgacctactcggaaatgggcattgttgctcagaattctggtaaaatgttactcatcctagtaaggaaggat

SEQ ID NO: 15218 - DNA, 122 bp, Homo sapiens
  misc_feature (61)..(62): /note="This region represents a CpG dinucleotide"
  misc_feature (61)..(61): /note="Nucleotide may be methylated to form 5-methylcytosine"
agggaggcatagggattttttttcaatggtagtcaccacagacggttgagggtaaattggcgttgttctcaataagggttattgtgaccatggtccaaagtctggcaggaatttttttttat

SEQ ID NO: 15219 - DNA, 122 bp, Homo sapiens
  misc_feature (61)..(62): /note="This region represents a CpG dinucleotide"
  misc_feature (61)..(61): /note="Nucleotide may be methylated to form 5-methylcytosine"
cgtgcctgatcttgtctgatctcggaagctaagcaggttcaggccttgttagtacttggacgggagaaaggagaaaaagaaggacatggatgggaaggtaggacccagcttcaaccccacca

SEQ ID NO: 15220 - DNA, 122 bp, Homo sapiens
  misc_feature (61)..(62): /note="This region represents a CpG dinucleotide"
  misc_feature (61)..(61): /note="Nucleotide may be methylated to form 5-methylcytosine"
agttgtcattaatgccaccctcacctcccaggaactgcaccactaggacggacgacacaccgacgtaatgaccatagtaagaccccatgtacgtggctaatgaggcagtgacccgacgtggc

SEQ ID NO: 15221 - DNA, 122 bp, Homo sapiens
  misc_feature (61)..(62): /note="This region represents a CpG dinucleotide"
  misc_feature (61)..(61): /note="Nucleotide may be methylated to form 5-methylcytosine"
gccaactggttgaagcttgtgccagaatgatcctgctgtttcttaattgtcctaaaagctcgtagccagcaatttccctgccaagcctgacctcactttcatgttttttgtaatatgcagat

SEQ ID NO: 15222 - DNA, 122 bp, Homo sapiens
  misc_feature (61)..(62): /note="This region represents a CpG dinucleotide"
  misc_feature (61)..(61): /note="Nucleotide may be methylated to form 5-methylcytosine"
tgatctgtagtctcattaatagtttggtttctgtgttgatttcctggtttccattctgaacgacagttacacaaggtgtcgccacggggagaagtaggtgagggagattccctatgctgtgt

SEQ ID NO: 15223 - DNA, 122 bp, Homo sapiens
  misc_feature (61)..(62): /note="This region represents a CpG dinucleotide"
  misc_feature (61)..(61): /note="Nucleotide may be methylated to form 5-methylcytosine"
cctggttttgtttcatcttgacatgactggctgatataatccaccttttcacatagcctgcgtaggcacagcctaggccagttaggcaagcggatttccatttttgtaatgatgagactttt

SEQ ID NO: 15224 - DNA, 122 bp, Homo sapiens
  misc_feature (61)..(62): /note="This region represents a CpG dinucleotide"
  misc_feature (61)..(61): /note="Nucleotide may be methylated to form 5-methylcytosine"
aatttaatccatgatgaataaaagcaagattattgagcaatttctgcttaaaaaaatcttcgggagctaagtttctatcctgagtctggttctttagcttccgtttgatcttatatccttca

SEQ ID NO: 15225 - DNA, 122 bp, Homo sapiens
  misc_feature (61)..(62): /note="This region represents a CpG dinucleotide"
  misc_feature (61)..(61): /note="Nucleotide may be methylated to form 5-methylcytosine"
ggattataggcatgagccaccatgcccacccccagtctctttcaatgattaataataatacggttatgaggacaattactgatgtaggtgttgaccattggcattatgctaagcacttcatg

SEQ ID NO: 15226 - DNA, 122 bp, Homo sapiens
  misc_feature (61)..(62): /note="This region represents a CpG dinucleotide"
  misc_feature (61)..(61): /note="Nucleotide may be methylated to form 5-methylcytosine"
taggctaacaatttgtgttgttaaaagaaacacagttgtcccttagctgttaaggaaattcgtaattcaaaaatctgtatttttgcaggtcccagtgaaactttggtttgacgcagtgaatg

SEQ ID NO: 15227 - DNA, 122 bp, Homo sapiens
  misc_feature (61)..(62): /note="This region represents a CpG dinucleotide"
  misc_feature (61)..(61): /note="Nucleotide may be methylated to form 5-methylcytosine"
atctgatttaagccacagtatttatgtttctattacaacatttaaaacagaatcacaggccgggcacagtggctcacggctataatcccagcactttgggaggccaaggcaggtggatcacc

SEQ ID NO: 15228 - DNA, 122 bp, Homo sapiens
  misc_feature (61)..(62): /note="This region represents a CpG dinucleotide"
  misc_feature (61)..(61): /note="Nucleotide may be methylated to form 5-methylcytosine"
aatatggaaacatactaaaagtataaaatttaaacaacagtatttatgagaacttcaaaacgtatttaatgctaaatctgtgaatgacattagcaagagggcagaatataaattctccagat

SEQ ID NO: 15229 - DNA, 122 bp, Homo sapiens
  misc_feature (61)..(62): /note="This region represents a CpG dinucleotide"
  misc_feature (61)..(61): /note="Nucleotide may be methylated to form 5-methylcytosine"
tctagtccacccagactgtaggtaattggcctgtgagaaatgacaccaaccaagactgaacgccattattcacgtctttctttttaagatttttcttttccaatttgagatttgttaacttt

SEQ ID NO: 15230 - DNA, 122 bp, Homo sapiens
  misc_feature (61)..(62): /note="This region represents a CpG dinucleotide"
  misc_feature (61)..(61): /note="Nucleotide may be methylated to form 5-methylcytosine"
ggtagaagagaaaggctataagggattgtctacacaacaatgcgattttatttcctaaaacgttttgttgcaaatgatgatgaacctgtgacaagctggctgtggtcagggtggaaacagga

SEQ ID NO: 15231 - DNA, 122 bp, Homo sapiens
  misc_feature (61)..(62): /note="This region represents a CpG dinucleotide"
  misc_feature (61)..(61): /note="Nucleotide may be methylated to form 5-methylcytosine"
aatgaaccaagacttcctcaagcttagctaagcctcaaatgagaaaggcaacactttctgcgaacatgtcacagtgctggatagcacaaaggctgacctcaagaaaaggctgattcagtaag

SEQ ID NO: 15232 - DNA, 122 bp, Homo sapiens
  misc_feature (61)..(62): /note="This region represents a CpG dinucleotide"
  misc_feature (61)..(61): /note="Nucleotide may be methylated to form 5-methylcytosine"
aatcacagccctcccagggagatgcccctccaggcccacctgtccggagaggatcagcctcgctctaacactgaatgccctaaggccactgtgagccctgccccttaagtcagaggagcagg

SEQ ID NO: 15233 - DNA, 122 bp, Homo sapiens
  misc_feature (61)..(62): /note="This region represents a CpG dinucleotide"
  misc_feature (61)..(61): /note="Nucleotide may be methylated to form 5-methylcytosine"
tctaggccccaaatctaaatttcttggaggaagtattggcccaccttggatgctgtaccccgcacagaggccaatcaactacagtcaaggaggcagctgtgtacaaacatggctcctgagag

SEQ ID NO: 15234 - DNA, 122 bp, Homo sapiens
  misc_feature (61)..(62): /note="This region represents a CpG dinucleotide"
  misc_feature (61)..(61): /note="Nucleotide may be methylated to form 5-methylcytosine"
acatttcgggaagagacgggaaagggagattcagaggagcagagatcagcaaacattttccgtaaagggccaggtatgaataatttaggctttgtgatccaccagtctctgttggaatgact

SEQ ID NO: 15235 - DNA, 122 bp, Homo sapiens
  misc_feature (61)..(62): /note="This region represents a CpG dinucleotide"
  misc_feature (61)..(61): /note="Nucleotide may be methylated to form 5-methylcytosine"
aaagttagaagctagcagagcttggttcttgaggtttaacgagagaagctgtctccacaacgtaaaggtgaagcagcaagtgctgacatagaaaccacagcaagttagtcggaagatctagc

SEQ ID NO: 15236 - DNA, 122 bp, Homo sapiens
  misc_feature (61)..(62): /note="This region represents a CpG dinucleotide"
  misc_feature (61)..(61): /note="Nucleotide may be methylated to form 5-methylcytosine"
gcgctggttcagctctcggcactcgtcgatatctgaaggtgagggcgacaggtgcggcttcgctgagcctccaggcggctcctcaccaccggccccgcccctgcccccacccccgaagcccg

SEQ ID NO: 15237 - DNA, 122 bp, Homo sapiens
  misc_feature (61)..(62): /note="This region represents a CpG dinucleotide"
  misc_feature (61)..(61): /note="Nucleotide may be methylated to form 5-methylcytosine"
ctggaaatgcaggaccctcactgtggggcaagcatatgaacaaggacattccctggcctccgcatcctcgcggccatcttcggcctctccaccctccttgctacattcctggaggacagtcg

SEQ ID NO: 15238 - DNA, 122 bp, Homo sapiens
  misc_feature (61)..(62): /note="This region represents a CpG dinucleotide"
  misc_feature (61)..(61): /note="Nucleotide may be methylated to form 5-methylcytosine"
aactgccgacctctttccactccaattgcggtgaaagtgatatctctctgcctgagctgacgttggcctttaggcttctctaattatttccttaggttagatttctagaaacacagggtcaa

SEQ ID NO: 15239 - DNA, 122 bp, Homo sapiens
  misc_feature (61)..(62): /note="This region represents a CpG dinucleotide"
  misc_feature (61)..(61): /note="Nucleotide may be methylated to form 5-methylcytosine"
tcttttcaaaatcaactagagacaaagaacagcccagcaaacaaaacgctgggttttttgcgttggcccaggtcctctccacgagcctgctgtttccctcttagacaacgctgacagtcagg

SEQ ID NO: 15240 - DNA, 122 bp, Homo sapiens
  misc_feature (61)..(62): /note="This region represents a CpG dinucleotide"
  misc_feature (61)..(61): /note="Nucleotide may be methylated to form 5-methylcytosine"
gacttcgaagtggtttgcaatccgaaagtgagaccttgagtcctcagatggccggcaacgcgccgaggtcacgctccccagaaacacccctctcccctcccctaccccagctccccctgggg

SEQ ID NO: 15241 - DNA, 122 bp, Homo sapiens
  misc_feature (61)..(62): /note="This region represents a CpG dinucleotide"
  misc_feature (61)..(61): /note="Nucleotide may be methylated to form 5-methylcytosine"
caggtagggccatgctgactccttctcagctgcatcctcaggaaccaacacaaggtttcacgctgagcaggtgtcagaatgtacttgacaaatggatgagttgataatttccctagagctat

SEQ ID NO: 15242 - DNA, 122 bp, Homo sapiens
  misc_feature (61)..(62): /note="This region represents a CpG dinucleotide"
  misc_feature (61)..(61): /note="Nucleotide may be methylated to form 5-methylcytosine"
gggcagtggtgatgctgacgagctgtgccttcagctcactctgatgggcattgggagggtcggtcttagctgtcagcttggtcaggcgatgagcccaggtatccagtcgaacatgaatccag

SEQ ID NO: 15243 - DNA, 122 bp, Homo sapiens
  misc_feature (61)..(62): /note="This region represents a CpG dinucleotide"
  misc_feature (61)..(61): /note="Nucleotide may be methylated to form 5-methylcytosine"
aaaattgctgactaccttcgatagcttgcttaacccattggatctgcggtgacttctcttcgtgatgagctgttatgaagtgcatatgagatgatgcatggaatgcctggagcatagtgagg

SEQ ID NO: 15244 - DNA, 122 bp, Homo sapiens
  misc_feature (61)..(62): /note="This region represents a CpG dinucleotide"
  misc_feature (61)..(61): /note="Nucleotide may be methylated to form 5-methylcytosine"
cggaagaacaggaagttgggcggaagtgagtcccacattgtataggtgaagaagctgaggcgttgatagaggaagtgattttactgtggtgacatagtatacaaaaaggaacacggctctgc

SEQ ID NO: 15245 - DNA, 122 bp, Homo sapiens
  misc_feature (61)..(62): /note="This region represents a CpG dinucleotide"
  misc_feature (61)..(61): /note="Nucleotide may be methylated to form 5-methylcytosine"
tgtgttaagtagattctggttggatatagaaacacaggcaccccaggcggaatgcagatacgcctcaacatgtggattaagtaagagccaggaagcagagtaatgaagcaaaaataagacgt

SEQ ID NO: 15246 - DNA, 122 bp, Homo sapiens
  misc_feature (61)..(62): /note="This region represents a CpG dinucleotide"
  misc_feature (61)..(61): /note="Nucleotide may be methylated to form 5-methylcytosine"
tgttcatagaaccatgccaagcagggcggcgggcagcaggtgaagctctgcagtgtctgacgtagctgtagtgtccacacagaggcatctacttcctgccagcatggagggttttgtggatc

SEQ ID NO: 15247 - DNA, 122 bp, Homo sapiens
  misc_feature (61)..(62): /note="This region represents a CpG dinucleotide"
  misc_feature (61)..(61): /note="Nucleotide may be methylated to form 5-methylcytosine"
ccaacaacttcctgctgcgaagcagcggggaatcaaagcgtttgagagccttttcacacccgagagtggtgcagggcctaattaaatggccctcatatcctgcagcctggtggaggccgcat

SEQ ID NO: 15248 - DNA, 122 bp, Homo sapiens
  misc_feature (61)..(62): /note="This region represents a CpG dinucleotide"
  misc_feature (61)..(61): /note="Nucleotide may be methylated to form 5-methylcytosine"
tgttgctgctgctgttgtctttcctgttctattacaagtcagattcctttgtgtctcacccgtggtgtctgcggtgaggaccaaaagactctcccacatggttgccatatttctcagcattc

SEQ ID NO: 15249 - DNA, 122 bp, Homo sapiens
  misc_feature (61)..(62): /note="This region represents a CpG dinucleotide"
  misc_feature (61)..(61): /note="Nucleotide may be methylated to form 5-methylcytosine"
cctctctttcggtttctgcacagtgagcctggagctcaaggaacttgctcctggggtgcccggcttgctgccctaccaacataggttcaagccctcccctccccctgcgcgccaggcctgtg

SEQ ID NO: 15250 - DNA, 122 bp, Homo sapiens
  misc_feature (61)..(62): /note="This region represents a CpG dinucleotide"
  misc_feature (61)..(61): /note="Nucleotide may be methylated to form 5-methylcytosine"
aaagttgagacactccagggtagttactaatcaaaccacaacaacaaaactcaccagactcgccaaacattacaggcgctgcacttgccagtgcgctgattaagaatcactgagaactccac

SEQ ID NO: 15251 - DNA, 122 bp, Homo sapiens
  misc_feature (61)..(62): /note="This region represents a CpG dinucleotide"
  misc_feature (61)..(61): /note="Nucleotide may be methylated to form 5-methylcytosine"
gagcagtaatgtcatgttagttgtgacagtactcaggtgagtaacaccagtaccacctgccgggtgttgtggcctagctgtgtgctaagtgccatgttgggctcctcacacatgatcgtgtt

SEQ ID NO: 15252 - DNA, 122 bp, Homo sapiens
  misc_feature (61)..(62): /note="This region represents a CpG dinucleotide"
  misc_feature (61)..(61): /note="Nucleotide may be methylated to form 5-methylcytosine"
gcactcctcctgtctcaccctcccaaagtgctgggattgtaggcgtgagtcactgcaccccgctagccttttttagtagtatgaagctaactgcctggaactgacaagtttatacccacttg

SEQ ID NO: 15253 - DNA, 122 bp, Homo sapiens
  misc_feature (61)..(62): /note="This region represents a CpG dinucleotide"
  misc_feature (61)..(61): /note="Nucleotide may be methylated to form 5-methylcytosine"
gggtctcagattttctgaactctaatgtgatattggtagagatcctaaacattaaccatccgtagttatttttgagacatggattaaaactattgttttcttcttgttattaacctactgta

SEQ ID NO: 15254 - DNA, 122 bp, Homo sapiens
  misc_feature (61)..(62): /note="This region represents a CpG dinucleotide"
  misc_feature (61)..(61): /note="Nucleotide may be methylated to form 5-methylcytosine"
aaccagggcacatgtgctcagcattgccttccaaagttctttctcaaccttgtaagttctcgttctgagggcatataaagtatgtttatgcaatcccttgtgaaaatagatgaggcaatatg

SEQ ID NO: 15255 - DNA, 122 bp, Homo sapiens
  misc_feature (61)..(62): /note="This region represents a CpG dinucleotide"
  misc_feature (61)..(61): /note="Nucleotide may be methylated to form 5-methylcytosine"
agctttcccactggcccatgtctgaggccatcatctctgtggccagtgcacaggggaggacgctgcaccagtttaggaactgcactaaccacaaggagagtaagaagcaggagtgaaatggc

SEQ ID NO: 15256 - DNA, 122 bp, Homo sapiens
  misc_feature (61)..(62): /note="This region represents a CpG dinucleotide"
  misc_feature (61)..(61): /note="Nucleotide may be methylated to form 5-methylcytosine"
ccaggaaacaccctgctatcaggacagaaatctggccgggggacaggaagttgagtgtgacgcaccaggagactttgaagcctgtgataccaagaggaaatcctaggccatttagcaaagaa

SEQ ID NO: 15257 - DNA, 122 bp, Homo sapiens
  misc_feature (61)..(62): /note="This region represents a CpG dinucleotide"
  misc_feature (61)..(61): /note="Nucleotide may be methylated to form 5-methylcytosine"
gtgccattttgactgtagttcaaaagcagacatcacctggcactcacctgcaagaagaagcgtgtggcttagtggacacagcatgggctctataggaaaagtcttgctcctgccacctaccc

SEQ ID NO: 15258 - DNA, 122 bp, Homo sapiens
  misc_feature (61)..(62): /note="This region represents a CpG dinucleotide"
  misc_feature (61)..(61): /note="Nucleotide may be methylated to form 5-methylcytosine"
cgttgaaggtttaaagccgaggagctacgtgatgagcgctgtgttttaggaagaggactccgtaatagagaggatgagccagtggatccatttctaaatgtgtttcttaggctataggagga

SEQ ID NO: 15259 - DNA, 122 bp, Homo sapiens
  misc_feature (61)..(62): /note="This region represents a CpG dinucleotide"
  misc_feature (61)..(61): /note="Nucleotide may be methylated to form 5-methylcytosine"
tactgagctgtactcagatagcatttggggaaagtacgtgagtcacacataaaaacagaccgttcttaatgcaatgggaagggtgttaactataaaaggaccctgtccagctggctcaggga

SEQ ID NO: 15260 - DNA, 122 bp, Homo sapiens
  misc_feature (61)..(62): /note="This region represents a CpG dinucleotide"
  misc_feature (61)..(61): /note="Nucleotide may be methylated to form 5-methylcytosine"
tctctcctccttctgtgtctggtgatggcaaacgtttatctttgctcaggcctgggtgcacgctaacctcggccaaatctctgaatgttcaaacatctgccaaaataccacatttcgacaat

SEQ ID NO: 15261 - DNA, 122 bp, Homo sapiens
  misc_feature (61)..(62): /note="This region represents a CpG dinucleotide"
  misc_feature (61)..(61): /note="Nucleotide may be methylated to form 5-methylcytosine"
aagatttaatatccttaccacccttttacaaatctataataaagaaggcatgcaacctatcgttaaaaatgagtaatataaaaatgagtaacataagagttgatcctttcatagttcatatg

SEQ ID NO: 15262 - DNA, 122 bp, Homo sapiens
  misc_feature (61)..(62): /note="This region represents a CpG dinucleotide"
  misc_feature (61)..(61): /note="Nucleotide may be methylated to form 5-methylcytosine"
gtaaacatccttgcaatgagagtctgtaacacaggacagtcattgcttactcacaagacacgcagaagcacaagagactcatgaagaatagtctcccagcaaagactgctgggaattgaggg

SEQ ID NO: 15263 - DNA, 122 bp, Homo sapiens
  misc_feature (61)..(62): /note="This region represents a CpG dinucleotide"
  misc_feature (61)..(61): /note="Nucleotide may be methylated to form 5-methylcytosine"
tcttatgaggaaatctgtaggtgtttatgaggcagcaaatgccaaccagagaggaggaagcgctcagcaggaatgccataatagataatcctcacacatagtggagaacaaagggaggaatg

SEQ ID NO: 15264 - DNA, 122 bp, Homo sapiens
  misc_feature (61)..(62): /note="This region represents a CpG dinucleotide"
  misc_feature (61)..(61): /note="Nucleotide may be methylated to form 5-methylcytosine"
gactgacagggcactacgcagtgagtcctgagccaggtctggggctccaggtggaaaccccgcctctcatgcctctcctcaggctccccacaggtgcaggaagccgccgcccagccatggac

SEQ ID NO: 15265 - DNA, 122 bp, Homo sapiens
  misc_feature (61)..(62): /note="This region represents a CpG dinucleotide"
  misc_feature (61)..(61): /note="Nucleotide may be methylated to form 5-methylcytosine"
tttactctctgcttaaaccatccagcaagtcatcaaagttacaaaagcccctgcttagtgcgttctgggttacttcattgtgaagatcaggggactgaagctcagccagatcaagtgcctcg

SEQ ID NO: 15266 - DNA, 122 bp, Homo sapiens
  misc_feature (61)..(62): /note="This region represents a CpG dinucleotide"
  misc_feature (61)..(61): /note="Nucleotide may be methylated to form 5-methylcytosine"
acaaagtatatatattttggaaaaaaaattaaaactatgtattttacctttctaccacatcgcagttcagaccagccacattccatgcacccagtagccacaggtggccaatagctgccaca

SEQ ID NO: 15267 - DNA, 122 bp, Homo sapiens
  misc_feature (61)..(62): /note="This region represents a CpG dinucleotide"
  misc_feature (61)..(61): /note="Nucleotide may be methylated to form 5-methylcytosine"
ccggggtcgccccctgggctcacctgggctcagtctcctgggctcagggttcagcagctccgggctctcctccgccacctgggaggagccttgagtaagtcccgcccggaagtggaggagga

SEQ ID NO: 15268 - DNA, 122 bp, Homo sapiens
  misc_feature (61)..(62): /note="This region represents a CpG dinucleotide"
  misc_feature (61)..(61): /note="Nucleotide may be methylated to form 5-methylcytosine"
atctggatttttctgtttctcagtttaccagatgcctcctttcttccaagctttgcaccacgcctggaacagatcttggctcatggcagtctcagtaaatactggttgaatgaatcagtgag

SEQ ID NO: 15269 - DNA, 122 bp, Homo sapiens
  misc_feature (61)..(62): /note="This region represents a CpG dinucleotide"
  misc_feature (61)..(61): /note="Nucleotide may be methylated to form 5-methylcytosine"
acaccagacccaggtcggccgtagcttctcggggacagagcctggtcgctggacaaaggccgaggccaggcaggctctcccacttccgggaaagccgaggagcagcagaggggccgccggag

SEQ ID NO: 15270 - DNA, 122 bp, Homo sapiens
  misc_feature (61)..(62): /note="This region represents a CpG dinucleotide"
  misc_feature (61)..(61): /note="Nucleotide may be methylated to form 5-methylcytosine"
cactcaatatgttggctttgtttagtgactaagccaaagaaaaaatttaatcagtgagaacgtgtctgtaattatgttctaatccaaaataagagggtgagaaatttttcacctcaccgaga

SEQ ID NO: 15271 - DNA, 122 bp, Homo sapiens
  misc_feature (61)..(62): /note="This region represents a CpG dinucleotide"
  misc_feature (61)..(61): /note="Nucleotide may be methylated to form 5-methylcytosine"
aaaatgattataaggtcttaatgtgaaacagcttggtgaaatgtgtggtttttttccattcgctgccatattcagatagattttcttaaatagtgtttagcctgtaggtcaccagttttaaa

SEQ ID NO: 15272 - DNA, 122 bp, Homo sapiens
  misc_feature (61)..(62): /note="This region represents a CpG dinucleotide"
  misc_feature (61)..(61): /note="Nucleotide may be methylated to form 5-methylcytosine"
gagtcagtggaaatgggaaaggccttcctgttggtgggagaacaatgaatgaaaatcaaacgaacagggcaattacttatgagggaaataaacagggaaatatgatcatcaatcagaagatt

SEQ ID NO: 15273 - DNA, 122 bp, Homo sapiens
  misc_feature (61)..(62): /note="This region represents a CpG dinucleotide"
  misc_feature (61)..(61): /note="Nucleotide may be methylated to form 5-methylcytosine"
tactccgctccaggaatcgtcaactaatataaaagcccaggcagccaggaagtcacctggcggctgatgtgtcacagtttcaggtatttatttccagcttactcttgctgtgtaaaaacaca

SEQ ID NO: 15274 - DNA, 122 bp, Homo sapiens
  misc_feature (61)..(62): /note="This region represents a CpG dinucleotide"
  misc_feature (61)..(61): /note="Nucleotide may be methylated to form 5-methylcytosine"
ttttatcacctaagttcctgttaactatcactcaatcaagatacagaatactcatcaccacgaagatctccctcgtgccacccttgacagtcatatccatctctctgttccttccccaacca

SEQ ID NO: 15275 - DNA, 122 bp, Homo sapiens
  misc_feature (61)..(62): /note="This region represents a CpG dinucleotide"
  misc_feature (61)..(61): /note="Nucleotide may be methylated to form 5-methylcytosine"
ttcagtgatccaaaggttaaatgcaggatgtggtttctgcagactctggcatatatacagcgcatgttcagtgcaggcgagctatttttatgaaagctatgcttaaattttctccttggatg

SEQ ID NO: 15276 - DNA, 122 bp, Homo sapiens
  misc_feature (61)..(62): /note="This region represents a CpG dinucleotide"
  misc_feature (61)..(61): /note="Nucleotide may be methylated to form 5-methylcytosine"
taaagggctcactcatcccatgctgctgttctgcaaggtaccatattactaagtacagctcgtgttcacagtaggtgccaacacatttcagagatgaggaaatgggagcccagagaggtcaa

SEQ ID NO: 15277 - DNA, 122 bp, Homo sapiens
  misc_feature (61)..(62): /note="This region represents a CpG dinucleotide"
  misc_feature (61)..(61): /note="Nucleotide may be methylated to form 5-methylcytosine"
gcgtcagaagcaaaggactgtattactcataacagtagtcagagtatcagcattttcttgcgccagctgcttgagtcccaactgtcacagggcattgtgaagtcagatgacacctgaacagg

SEQ ID NO: 15278 - DNA, 122 bp, Homo sapiens
  misc_feature (61)..(62): /note="This region represents a CpG dinucleotide"
  misc_feature (61)..(61): /note="Nucleotide may be methylated to form 5-methylcytosine"
acatttcaattgcagtcgcttttcccacaaatcagctttatcagctccattagcagttgacgccaataaaaatctgaggtcaacttcctgctggttggttcttaagtgtcagaaataatata

SEQ ID NO: 15279 - DNA, 122 bp, Homo sapiens
  misc_feature (61)..(62): /note="This region represents a CpG dinucleotide"
  misc_feature (61)..(61): /note="Nucleotide may be methylated to form 5-methylcytosine"
aggctgcagacccacttgtgttattgtaaatgaatcagaggggcaagaccttgttctttacggcgtgtgatttaaaatcagttttaaggtacctgccaggtgtatttagaggaaaaggcatg

SEQ ID NO: 15280 - DNA, 122 bp, Homo sapiens
  misc_feature (61)..(62): /note="This region represents a CpG dinucleotide"
  misc_feature (61)..(61): /note="Nucleotide may be methylated to form 5-methylcytosine"
aaagcaagtgaacagaagaaattcaacatcttctatcaataaaatacacttatctactgacgtttaaatcaggattttatcatccaaaccccacttaagaaggtatagcacagatggcagga

SEQ ID NO: 15281 - DNA, 122 bp, Homo sapiens
  misc_feature (61)..(62): /note="This region represents a CpG dinucleotide"
  misc_feature (61)..(61): /note="Nucleotide may be methylated to form 5-methylcytosine"
cctcgggttcagagagcttcctgggtgaacataaaggctgttgcctctgccctcagggcacgtccgaggaggaaccctaaatagcttagggtcccaatcctgtccttttattcccatctaat

SEQ ID NO: 15282 - DNA, 122 bp, Homo sapiens
  misc_feature (61)..(62): /note="This region represents a CpG dinucleotide"
  misc_feature (61)..(61): /note="Nucleotide may be methylated to form 5-methylcytosine"
ataccccccaggtggcatacctgttatagaggtccttagcctatttctcaacagaaacttcgtttacaaaaatagtcacatataataaacacatggattaacaaaaagatgaatccactaac

SEQ ID NO: 15283 - DNA, 122 bp, Homo sapiens
  misc_feature (61)..(62): /note="This region represents a CpG dinucleotide"
  misc_feature (61)..(61): /note="Nucleotide may be methylated to form 5-methylcytosine"
ttttaaagagagcagggttacgagccagagtggtgggatgagcagttctggtgggaaagacggttacagaacaaatgactaaatgtgactcaggtcagaacaggtgaccaagggtgactcag

SEQ ID NO: 15284 - DNA, 122 bp, Homo sapiens
  misc_feature (61)..(62): /note="This region represents a CpG dinucleotide"
  misc_feature (61)..(61): /note="Nucleotide may be methylated to form 5-methylcytosine"
tcctaatcactctcagaacaacagcagcatacctgattgaggagcagctggcattcactgcgcaaagagcaccatcaaaaattgagcatgtggctccaagagccaccactgtttccttctgt

SEQ ID NO: 15285 - DNA, 122 bp, Homo sapiens
  misc_feature (61)..(62): /note="This region represents a CpG dinucleotide"
  misc_feature (61)..(61): /note="Nucleotide may be methylated to form 5-methylcytosine"
aaccatttgcgagattgaggtaatgtatttcccagacttaagcaatttactccttcccaccgtgctgaatcaggctgttaaatcctcttgctgtgtgcgtagagctattggcaccagggaaa

SEQ ID NO: 15286 - DNA, 122 bp, Homo sapiens
  misc_feature (61)..(62): /note="This region represents a CpG dinucleotide"
  misc_feature (61)..(61): /note="Nucleotide may be methylated to form 5-methylcytosine"
caaatgatctacccacctcagcctcccactgctgggattacaggcgtgagccactgtgcccggccatgttctacatacttctgtggttccaagcatatctccagctccaggtgcactttagg

SEQ ID NO: 15287 - DNA, 122 bp, Homo sapiens
  misc_feature (61)..(62): /note="This region represents a CpG dinucleotide"
  misc_feature (61)..(61): /note="Nucleotide may be methylated to form 5-methylcytosine"
accacaatttcctaaatctgacacttttttttttaaaggtaaagaaatcacttttacttacgtaaagagaaggggcaggtcacagactgatggtcaaagatctgaaaatcaaagaaaaaata

SEQ ID NO: 15288 - DNA, 122 bp, Homo sapiens
  misc_feature (61)..(62): /note="This region represents a CpG dinucleotide"
  misc_feature (61)..(61): /note="Nucleotide may be methylated to form 5-methylcytosine"
cattcctccagtgacttggtgtcctcttgaccagacatgagctcccaaaccagaacttcacgctctacctttgggattcagcccctaggataagggagactaaagcctaccatgtgccacgc

SEQ ID NO: 15289 - DNA, 122 bp, Homo sapiens
  misc_feature (61)..(62): /note="This region represents a CpG dinucleotide"
  misc_feature (61)..(61): /note="Nucleotide may be methylated to form 5-methylcytosine"
gccagagatcactttccttgacatcttggttttggtgggttttggctggcttctttaccacgacctgttttatgatcaaggtctttgtgacttgtgtcttgagctacctcctgtgtcttcct

SEQ ID NO: 15290 - DNA, 122 bp, Homo sapiens
  misc_feature (61)..(62): /note="This region represents a CpG dinucleotide"
  misc_feature (61)..(61): /note="Nucleotide may be methylated to form 5-methylcytosine"
gctaatagagagatttctgttaatccttaagagagactagaaactctgatgaccactaagcgaggttggaaagatgtaaagcatttagtgcatttcatgtgcatatagacagcagcctactt

SEQ ID NO: 15291 - DNA, 122 bp, Homo sapiens
  misc_feature (61)..(62): /note="This region represents a CpG dinucleotide"
  misc_feature (61)..(61): /note="Nucleotide may be methylated to form 5-methylcytosine"
gcttcagccctatctcaaagctgcaactctgcctcctggcatggctaatcctgctgggcacggccttcctcaggctgcagcaggcaggccaactttctcctctccctggacctgggtaagat

SEQ ID NO: 15292 - DNA, 122 bp, Homo sapiens
  misc_feature (61)..(62): /note="This region represents a CpG dinucleotide"
  misc_feature (61)..(61): /note="Nucleotide may be methylated to form 5-methylcytosine"
tcagagcaccacagggctgatgtctggatatggattagtgaccaggattattatgtatcacgggtgctagtcaaggatgctggtcagagatgtaaggaaggggctttcctaaacaggctaga

SEQ ID NO: 15293 - DNA, 122 bp, Homo sapiens
  misc_feature (61)..(62): /note="This region represents a CpG dinucleotide"
  misc_feature (61)..(61): /note="Nucleotide may be methylated to form 5-methylcytosine"
gggaaagagaatgaatggtggccccagtactggctcggtaggtgccaagcctacgtggcacgtggcacctttgcacacacttcattgtcttattgctctccagagcaagtccttggccatgc

SEQ ID NO: 15294 - DNA, 122 bp, Homo sapiens
  misc_feature (61)..(62): /note="This region represents a CpG dinucleotide"
  misc_feature (61)..(61): /note="Nucleotide may be methylated to form 5-methylcytosine"
aaccagaatggcattcctgaatctttttttaacagatgtcagtgtggcgagaatgaaacacgtcatgaatactgatgaaatctagcgtgcatatcacgccataagatatcctcatttatatg

SEQ ID NO: 15295 - DNA, 122 bp, Homo sapiens
  misc_feature (61)..(62): /note="This region represents a CpG dinucleotide"
  misc_feature (61)..(61): /note="Nucleotide may be methylated to form 5-methylcytosine"
ggcctaggtccagattattctaagttatgtgaacgtcagacaatgggatcttaggccagccgtgggcagtgttcagtgttttctcaatcttcagtttctcaacttcatttttcccctctctg

SEQ ID NO: 15296 - DNA, 122 bp, Homo sapiens
  misc_feature (61)..(62): /note="This region represents a CpG dinucleotide"
  misc_feature (61)..(61): /note="Nucleotide may be methylated to form 5-methylcytosine"
gtaatgagtcacaaagagtaaatgagtctggtcctagagagaacacgtgagaaatggctccgctgccctggagacttcagcttcatgcatccctgcccaggcagggctgggtgaggggaagg

SEQ ID NO: 15297 - DNA, 122 bp, Homo sapiens
  misc_feature (61)..(62): /note="This region represents a CpG dinucleotide"
  misc_feature (61)..(61): /note="Nucleotide may be methylated to form 5-methylcytosine"
ggcagggttccagacacagtagcctgcctgccccaacagctggggttgaaggtatgagaacgcctaggaacaaggaaaatcctgcacagcagaactggggctggggtcctcagtaaactgct

SEQ ID NO: 15298 - DNA, 122 bp, Homo sapiens
  misc_feature (61)..(62): /note="This region represents a CpG dinucleotide"
  misc_feature (61)..(61): /note="Nucleotide may be methylated to form 5-methylcytosine"
tttaagaggaaggatttggaaaccagccccaaccacattgtgttactgtacctcccttgacgttagtcacattacctttgaggtttagttaaatttgtggcttgctcgtgcctgagggatag

SEQ ID NO: 15299 - DNA, 122 bp, Homo sapiens
  misc_feature (61)..(62): /note="This region represents a CpG dinucleotide"
  misc_feature (61)..(61): /note="Nucleotide may be methylated to form 5-methylcytosine"
cgaatgagggtgagatggtaccaggcccacagagaggccgcggctgggtgcgcagaactacgacaccagccctaagaagccaacaggctgttgaatgccaagcctgaactattaatttgcat

SEQ ID NO: 15300 - DNA, 122 bp, Homo sapiens
  misc_feature (61)..(62): /note="This region represents a CpG dinucleotide"
  misc_feature (61)..(61): /note="Nucleotide may be methylated to form 5-methylcytosine"
cattctgttgtagcatgtttgaaagtgtttttaggaagcagaatgtgtctgagagaaacacgttgaatggtcatataatagttaaagaaatacagtaagagagtatgtgaatcagaaggggc

SEQ ID NO: 15301 - DNA, 122 bp, Homo sapiens
  misc_feature (61)..(62): /note="This region represents a CpG dinucleotide"
  misc_feature (61)..(61): /note="Nucleotide may be methylated to form 5-methylcytosine"
agctgtgtcttagcaggatccccagggcattgcctcacagtcagggtggtgcaaaagtcccgcctggcatcctggtgagtggaccaggagggggcaggtgaaggcgatattattggtccttc

SEQ ID NO: 15302 - DNA, 122 bp, Homo sapiens
  misc_feature (61)..(62): /note="This region represents a CpG dinucleotide"
  misc_feature (61)..(61): /note="Nucleotide may be methylated to form 5-methylcytosine"
gagctgcctggcacgcaggagagccgtgacctcaccagagcacacaggcaccccggtacacggtacacgcagacgcatgtctgccatgtgctccgtcaatccacccaataccccctaagact

SEQ ID NO: 15303 - DNA, 122 bp, Homo sapiens
  misc_feature (61)..(62): /note="This region represents a CpG dinucleotide"
  misc_feature (61)..(61): /note="Nucleotide may be methylated to form 5-methylcytosine"
ggagaaaggagacttgcaccccaggcaggaaggcaaaggcccgggtcagctgggccagagcgccaaaaagacccagcttccccatcaaggtggcagctcttggcttcctagtctccatcaat

SEQ ID NO: 15304 - DNA, 122 bp, Homo sapiens
  misc_feature (61)..(62): /note="This region represents a CpG dinucleotide"
  misc_feature (61)..(61): /note="Nucleotide may be methylated to form 5-methylcytosine"
ccagtttcatcagctatttatcatcactaccttcttccttctttctaactctgattagatcgtcctgatttgacaaattaatcatcctaaggttaggattagattccatgtctcattactat

SEQ ID NO: 15305 - DNA, 122 bp, Homo sapiens
  misc_feature (61)..(62): /note="This region represents a CpG dinucleotide"
  misc_feature (61)..(61): /note="Nucleotide may be methylated to form 5-methylcytosine"
cagcccggcctgccgggactcgtgctgccctacaagtaccaggtgctggcggagatgttccgcagcatggacaccatcgtgggcatgctccacaaccgctccgagacgcccacctttgccaa

SEQ ID NO: 15306 - DNA, 122 bp, Homo sapiens
  misc_feature (61)..(62): /note="This region represents a CpG dinucleotide"
  misc_feature (61)..(61): /note="Nucleotide may be methylated to form 5-methylcytosine"
tcacttattatggagtccaacacaaacacctttgttcattttgttcacttgcttgctgaccgctgaatcatttccttttccttagcttagttgcttaaggcaattttaaaaaacattgggtt

SEQ ID NO: 15307 - DNA, 122 bp, Homo sapiens
  misc_feature (61)..(62): /note="This region represents a CpG dinucleotide"
  misc_feature (61)..(61): /note="Nucleotide may be methylated to form 5-methylcytosine"
agaccgtactagacttacacatatacacacaggtgagtgctgagtatcccttattggaaacgcttgggaccaagtgtctgggatttccagattttcaggttgtcagaatatctgtattacgt

SEQ ID NO: 15308 - DNA, 122 bp, Homo sapiens
  misc_feature (61)..(62): /note="This region represents a CpG dinucleotide"
  misc_feature (61)..(61): /note="Nucleotide may be methylated to form 5-methylcytosine"
gattcaatgcttttgttttgtttctgggctgcttgctatcagcaaagtagagagatttaacggatcttgccgagaatgcaagcctcattccaaggaagccagagctcagaagacatggaaca

SEQ ID NO: 15309 - DNA, 122 bp, Homo sapiens
  misc_feature (61)..(62): /note="This region represents a CpG dinucleotide"
  misc_feature (61)..(61): /note="Nucleotide may be methylated to form 5-methylcytosine"
gaggctagggctaagtgacctgccactcctctctaggcctggagagggacatgtgtactacgtgtactcaggctcagtcctgaaacacgaggactgaagtgttacatggcctgtttctggtt

SEQ ID NO: 15310 - DNA, 122 bp, Homo sapiens
  misc_feature (61)..(62): /note="This region represents a CpG dinucleotide"
  misc_feature (61)..(61): /note="Nucleotide may be methylated to form 5-methylcytosine"
ttttttgtcctcccccatgtcaggtttctcttcttagtttctccttgtggcaggtacagtcgctgcagggccagccgtcatgtttgcatatagcctgcaagaaggaggaaaaagggcacacc

SEQ ID NO: 15311 - DNA, 122 bp, Homo sapiens
  misc_feature (61)..(62): /note="This region represents a CpG dinucleotide"
  misc_feature (61)..(61): /note="Nucleotide may be methylated to form 5-methylcytosine"
tttaatgaagccttcttataagcaggaattgctccatactttctggccagatataaacctcgcaatttacatcatcacattctatttatgaatcactatttggagtcgagtcacactgagtc

SEQ ID NO: 15312 - DNA, 122 bp, Homo sapiens
  misc_feature (61)..(62): /note="This region represents a CpG dinucleotide"
  misc_feature (61)..(61): /note="Nucleotide may be methylated to form 5-methylcytosine"
taacttcaaacatctggcaaactccacaggtagtatttgcaaaagcaattttgcaatgaccgcttttgttatcgcttaagtctttttgagttttccttgggaaatctccaacgtttaacatt

SEQ ID NO: 15313 - DNA, 122 bp, Homo sapiens
  misc_feature (61)..(62): /note="This region represents a CpG dinucleotide"
  misc_feature (61)..(61): /note="Nucleotide may be methylated to form 5-methylcytosine"
aagtcctttttgctttaaactactgaatctgatatcacctattataacaccatggtgtatcgtaaaaacacaccaaacaactattttcaaaatagatgtgatacttctccccagttatacaa

SEQ ID NO: 15314 - DNA, 122 bp, Homo sapiens
  misc_feature (61)..(62): /note="This region represents a CpG dinucleotide"
  misc_feature (61)..(61): /note="Nucleotide may be methylated to form 5-methylcytosine"
gctgtggggagggcttttaatctgccctagctttgtcttggcaggtgaatcctagtgtcccgcctttacatttcctgacaagcctcagcgtggatgctgcctcctgatggcattcatgtgtc

SEQ ID NO: 15315 - DNA, 122 bp, Homo sapiens
  misc_feature (61)..(62): /note="This region represents a CpG dinucleotide"
  misc_feature (61)..(61): /note="Nucleotide may be methylated to form 5-methylcytosine"
agtgggttgctgctcctggctcagctggccagcttttactcccttatttggccccacccacgtcctgttgattggcccatcatgcatttacaaacctttagctagacacagagcgctgattg

SEQ ID NO: 15316 - DNA, 122 bp, Homo sapiens
  misc_feature (61)..(62): /note="This region represents a CpG dinucleotide"
  misc_feature (61)..(61): /note="Nucleotide may be methylated to form 5-methylcytosine"
cttcatgctgacccactctacccaagtttcctttcactggcatcgaccctggaagtggctcgactttgagggagctaaccatattttctgcactttgtcagactgtttttttctcagcccag

SEQ ID NO: 15317 - DNA, 122 bp, Homo sapiens
  misc_feature (61)..(62): /note="This region represents a CpG dinucleotide"
  misc_feature (61)..(61): /note="Nucleotide may be methylated to form 5-methylcytosine"
ggttgttatctgctgaatcttacagtcattgccatttctacactctgcaatgtctatgagcgtttattcaaaaggtgccaaacattagactggccagtgtgttgctgttgcacagtgtagtg

SEQ ID NO: 15318 - DNA, 122 bp, Homo sapiens
  misc_feature (61)..(62): /note="This region represents a CpG dinucleotide"
  misc_feature (61)..(61): /note="Nucleotide may be methylated to form 5-methylcytosine"
tttcacttcccataatgactgattctccacctgccatgacagtgcattcttgatctgctgcgccctccttgggttggggactggaatatttatttttaggaaaagttaaaattatccagaga

SEQ ID NO: 15319 - DNA, 122 bp, Homo sapiens
  misc_feature (61)..(62): /note="This region represents a CpG dinucleotide"
  misc_feature (61)..(61): /note="Nucleotide may be methylated to form 5-methylcytosine"
aaaagtggggaagacactaaattatacagatagattggaaataacattaggtaagaatcgcgccggttttacccacactggaaagagctgagaggtatgcatagctcttttattgctctgag

SEQ ID NO: 15320 - DNA, 122 bp, Homo sapiens
  misc_feature (61)..(62): /note="This region represents a CpG dinucleotide"
  misc_feature (61)..(61): /note="Nucleotide may be methylated to form 5-methylcytosine"
aagaagctgtgggtggatagcaggaggccctgagggtgagtcacccggtttgctgccttgcggtcacagacctttggctattgtcactgcccctgggatgagtcacactgagccttagtgcc

SEQ ID NO: 15321 - DNA, 122 bp, Homo sapiens
  misc_feature (61)..(62): /note="This region represents a CpG dinucleotide"
  misc_feature (61)..(61): /note="Nucleotide may be methylated to form 5-methylcytosine"
ggccctactcacccctcgctccggggtcgcccctgacgcccacccgcggctgaggtcgcacgctccagcctcagtccaccctggaaccctgcatttggcagccacgagagcccatctcccgc

SEQ ID NO: 15322 - DNA, 122 bp, Homo sapiens
  misc_feature (61)..(62): /note="This region represents a CpG dinucleotide"
  misc_feature (61)..(61): /note="Nucleotide may be methylated to form 5-methylcytosine"
tgaatggctgctgtgtgctgggtgtcgtggggtcctgggatacagtcgggggcaagacaccggggggttcctgctccggtgacttgcatcttccgggggagaaagacgctaactgataacag

SEQ ID NO: 15323 - DNA, 122 bp, Homo sapiens
  misc_feature (61)..(62): /note="This region represents a CpG dinucleotide"
  misc_feature (61)..(61): /note="Nucleotide may be methylated to form 5-methylcytosine"
gggcaccactccagcatgctgcaatcctgccccctttagaggagacagtcttccttttgtcgccgttgcttcctggtgatcttcattgctttgtttgtgtttcctacctcacccctgaagga

SEQ ID NO: 15324 - DNA, 122 bp, Homo sapiens
  misc_feature (61)..(62): /note="This region represents a CpG dinucleotide"
  misc_feature (61)..(61): /note="Nucleotide may be methylated to form 5-methylcytosine"
ctgcctcccacagaccctggctgctccttctgtccccaacacccatgtgaccctgtggggcgtgtggtgctctctgcccccaggccatgagtatatgtgactattcactgttgatgtcatct

SEQ ID NO: 15325 - DNA, 122 bp, Homo sapiens
  misc_feature (61)..(62): /note="This region represents a CpG dinucleotide"
  misc_feature (61)..(61): /note="Nucleotide may be methylated to form 5-methylcytosine"
tttcacgcgtaaatctggcaccggaagctggagactgagattagaatgaggaaacgcagacggcctttctctgcaactagtgcatttcatgtggtcttctgaaaattacttatcctttctca

SEQ ID NO: 15326 - DNA, 122 bp, Homo sapiens
  misc_feature (61)..(62): /note="This region represents a CpG dinucleotide"
  misc_feature (61)..(61): /note="Nucleotide may be methylated to form 5-methylcytosine"
tgcttgagattgggaggagtggactcctaacaccagagtgatgactcaggtctgagccggcgtgtgctgccccagctggaggcccgactttccctggagaaacactgagcctgctgtcttca

SEQ ID NO: 15327 - DNA, 122 bp, Homo sapiens
  misc_feature (61)..(62): /note="This region represents a CpG dinucleotide"
  misc_feature (61)..(61): /note="Nucleotide may be methylated to form 5-methylcytosine"
gtttgcaaagtaaactcgtgaagggttacctcctttgcttagctgagctccaacctccttcgccaccatttccatcttctccctgctctgctcacaggaagggaggtaaaggttggtagaag

SEQ ID NO: 15328 - DNA, 122 bp, Homo sapiens
  misc_feature (61)..(62): /note="This region represents a CpG dinucleotide"
  misc_feature (61)..(61): /note="Nucleotide may be methylated to form 5-methylcytosine"
gggatttgggctaaattcctggcctggcccacaaagaagaccaagcggtcagtcccattccgtcccatcctgatttacaggaactcacaccagcgatcaatcttccttaatttgtaactggg

SEQ ID NO: 15329 - DNA, 122 bp, Homo sapiens
  misc_feature (61)..(62): /note="This region represents a CpG dinucleotide"
  misc_feature (61)..(61): /note="Nucleotide may be methylated to form 5-methylcytosine"
aatcttaggaactgatggattaagtcacattattaatcacttcaaatatccagagtttcacgaaattaggacagcagtgggactctaatcctatgaatgactgagctcctcaggcacatata

SEQ ID NO: 15330 - DNA, 122 bp, Homo sapiens
  misc_feature (61)..(62): /note="This region represents a CpG dinucleotide"
  misc_feature (61)..(61): /note="Nucleotide may be methylated to form 5-methylcytosine"
taaacattaaccaggcatttttcttaacaatctgccgttatgagccatactatggactttcgtcttaacacaggcaacactgccatatctgtacatgaacagacctgacatagagtaagaat

SEQ ID NO: 15331 - DNA, 122 bp, Homo sapiens
  misc_feature (61)..(62): /note="This region represents a CpG dinucleotide"
  misc_feature (61)..(61): /note="Nucleotide may be methylated to form 5-methylcytosine"
tggcccgtagagggtagggagagcatagtgtggggaggaagagagctgcacatggtgaaacgcagggcccaacagcaggccctggtcttaggtgctgccaggttcattccaactgctcacag

SEQ ID NO: 15332 - DNA, 122 bp, Homo sapiens
  misc_feature (61)..(62): /note="This region represents a CpG dinucleotide"
  misc_feature (61)..(61): /note="Nucleotide may be methylated to form 5-methylcytosine"
tccattgcctttaatattaacaactctagaaagtagatatttttatctccattttacaagcgaggctctgggtgactaatagttgaacaaggtgacatggatgtaagtcatagaaccagaac

SEQ ID NO: 15333 - DNA, 122 bp, Homo sapiens
  misc_feature (61)..(62): /note="This region represents a CpG dinucleotide"
  misc_feature (61)..(61): /note="Nucleotide may be methylated to form 5-methylcytosine"
tgaagatcatgaatcaaattctaagtgccctcagaaacctcaaggttaagctttattctacgtccagcaaatggccatagcatgagtgatggtaaatgatcatcaggttttcatttccctcc

SEQ ID NO: 15334 - DNA, 122 bp, Homo sapiens
  misc_feature (61)..(62): /note="This region represents a CpG dinucleotide"
  misc_feature (61)..(61): /note="Nucleotide may be methylated to form 5-methylcytosine"
gaagtggagttttctccagaggttcctgatgagaactcagctagtcagcaccttgatctccgctgggcgaggtctgtgcagagccacaggcaggcagtgtgacttctaaccttcagaatcgg

SEQ ID NO: 15335 - DNA, 122 bp, Homo sapiens
  misc_feature (61)..(62): /note="This region represents a CpG dinucleotide"
  misc_feature (61)..(61): /note="Nucleotide may be methylated to form 5-methylcytosine"
cttccagaaggcttcttgatggagttgtggcaagctcatgggggaaatgcttcaccccaacgtaacccagaccaaatatgccattgcacaggaagtgggtgctgagtccaagtgtgtccata

SEQ ID NO: 15336 - DNA, 122 bp, Homo sapiens
  misc_feature (61)..(62): /note="This region represents a CpG dinucleotide"
  misc_feature (61)..(61): /note="Nucleotide may be methylated to form 5-methylcytosine"
gctgctgcagaggaacacacaagactctttgcattcattcaatcaacacttgcaggacggcgctctcccagggctagtcggtcctgggcgccaggaacttcaaggacaattgagcttcagcc

SEQ ID NO: 15337 - DNA, 122 bp, Homo sapiens
  misc_feature (61)..(62): /note="This region represents a CpG dinucleotide"
  misc_feature (61)..(61): /note="Nucleotide may be methylated to form 5-methylcytosine"
ttgcaaatgccactgcgctctcccttcctttcctgccggatgtccccactgagtcagactcgtcaaactctcccagcaaccatgacgcacccaggctttgtgccctgggcctctctcacaca

SEQ ID NO: 15338 - DNA, 122 bp, Homo sapiens
  misc_feature (61)..(62): /note="This region represents a CpG dinucleotide"
  misc_feature (61)..(61): /note="Nucleotide may be methylated to form 5-methylcytosine"
acctaagaaaacagggcagctatgactcactgggccctgctgtatcaggtactgtctcagcgctttatgtgcaccatctgatgtcatcctcccaacaattctacaaacagttactactctct

SEQ ID NO: 15339 - DNA, 122 bp, Homo sapiens
  misc_feature (61)..(62): /note="This region represents a CpG dinucleotide"
  misc_feature (61)..(61): /note="Nucleotide may be methylated to form 5-methylcytosine"
gaagagggagtggccgcctgcctctaaacactaaaaatctaagttccctctagtcaccaacgcccacctggcacggaaaggccttgttttggtgcctttgaccccatttacactccagcaac

SEQ ID NO: 15340 - DNA, 122 bp, Homo sapiens
  misc_feature (61)..(62): /note="This region represents a CpG dinucleotide"
  misc_feature (61)..(61): /note="Nucleotide may be methylated to form 5-methylcytosine"
acttgatggccttaagctcaatgaaatattaatagatgagagtgaagaacatcagaggcacggagatttagaacatcacgcacagtagtataatggggagtcaacaaagaatgagtaaaagt

SEQ ID NO: 15341 - DNA, 122 bp, Homo sapiens
  misc_feature (61)..(62): /note="This region represents a CpG dinucleotide"
  misc_feature (61)..(61): /note="Nucleotide may be methylated to form 5-methylcytosine"
acagggctggaacagttctgagtctgaggtaacagcagataacctttggccacttttatgcgtagagtcatgtgactcaatagtttcctgaacccgggatctggactaatcacctcttatca

SEQ ID NO: 15342 - DNA, 122 bp, Homo sapiens
  misc_feature (61)..(62): /note="This region represents a CpG dinucleotide"
  misc_feature (61)..(61): /note="Nucleotide may be methylated to form 5-methylcytosine"
cgtgctgggtatagcactgaaagtcccatatcctgggaagccttttagtcctgggcaaaccgggacagttggtccccttacacatgaagcagtttcactgggctgatggctgggttagcaca

SEQ ID NO: 15343 - DNA, 122 bp, Homo sapiens
  misc_feature (61)..(62): /note="This region represents a CpG dinucleotide"
  misc_feature (61)..(61): /note="Nucleotide may be methylated to form 5-methylcytosine"
gataatcttttgtagatccctttgtcacttgtaaataccttctcttttactgccataagtcgtttacatgtcagttaaaaaaggtatcctattttagcatctgaataacatttactcttcat

SEQ ID NO: 15344 - DNA, 122 bp, Homo sapiens
  misc_feature (61)..(62): /note="This region represents a CpG dinucleotide"
  misc_feature (61)..(61): /note="Nucleotide may be methylated to form 5-methylcytosine"
aggcgatgtgggagcgggaattacagagcacacctccctgacacagaagttgtcaatatgcgcacagctggtggggaggctcaggcgaaggggggactattaagagctgcgcgggggagcag

SEQ ID NO: 15345 - DNA, 122 bp, Homo sapiens
  misc_feature (61)..(62): /note="This region represents a CpG dinucleotide"
  misc_feature (61)..(61): /note="Nucleotide may be methylated to form 5-methylcytosine"
ggccggtcagctcgtgcacgatgcagttatcagcctcggtgtcgggtgctgtgggcaccacgtgctgtgggcaagcagcgctgagccatgcacgggctggccgggcgccccccacgctggcg

SEQ ID NO: 15346 - DNA, 122 bp, Homo sapiens
  misc_feature (61)..(62): /note="This region represents a CpG dinucleotide"
  misc_feature (61)..(61): /note="Nucleotide may be methylated to form 5-methylcytosine"
gtcttaagggaacgcagcagtgctaggatgctggcaaggcattgtcccttattacccccacggaggcttctgagagcagttgcatagcagcagttttatttcagttaccactcattcacagc

SEQ ID NO: 15347 - DNA, 122 bp, Homo sapiens
  misc_feature (61)..(62): /note="This region represents a CpG dinucleotide"
  misc_feature (61)..(61): /note="Nucleotide may be methylated to form 5-methylcytosine"
aaggaggaaggggatatcttcccaaccagctggatcagctgaatcagccttggtaatcaacgtgacaacacattgcatctacatcttaactagggattattttaaagaatgcctgtaaagct

SEQ ID NO: 15348 - DNA, 122 bp, Homo sapiens
  misc_feature (61)..(62): /note="This region represents a CpG dinucleotide"
  misc_feature (61)..(61): /note="Nucleotide may be methylated to form 5-methylcytosine"
ttatctttttgccttgcctgtttcctcatctctaagaatcttcgcctcctccctgccccacgaggagggtgagagaattcactgagtaatgtccacttagcacttagcttgcaaggggggaa

SEQ ID NO: 15349 - DNA, 122 bp, Homo sapiens
  misc_feature (61)..(62): /note="This region represents a CpG dinucleotide"
  misc_feature (61)..(61): /note="Nucleotide may be methylated to form 5-methylcytosine"
ttggaggaaactcaggaaaaaaaaaaggccaaaagtaacacctgtgaagtaaggtgaaagcgcctggagctatttagccagaaatgagttgtggtataataactgtcatagatatgtatcag

SEQ ID NO: 15350 - DNA, 122 bp, Homo sapiens
  misc_feature (61)..(62): /note="This region represents a CpG dinucleotide"
  misc_feature (61)..(61): /note="Nucleotide may be methylated to form 5-methylcytosine"
agtggtatttggaacaatattgctgctgatcagagggtccaagggagatgtaggtgccgacgtcactgagatcctgatctggccacgtttgaacgaactatttaagcccgacctcacttcct

SEQ ID NO: 15351 - DNA, 122 bp, Homo sapiens
  misc_feature (61)..(62): /note="This region represents a CpG dinucleotide"
  misc_feature (61)..(61): /note="Nucleotide may be methylated to form 5-methylcytosine"
ccagtctcttcccaccagtcttaagtctaggttttcagaacttctgactaactggcttcacgttggggttccaatgacctccttgttgggtttgatttgctggagtgactcacagaacttgg

SEQ ID NO: 15352 - DNA, 122 bp, Homo sapiens
  misc_feature (61)..(62): /note="This region represents a CpG dinucleotide"
  misc_feature (61)..(61): /note="Nucleotide may be methylated to form 5-methylcytosine"
caagtcagcaagtgggtatccaatcccggatgtgtaaggtgccggctgtggacgctgtgacgtgcctgcagtggattggagaggccagcagagggggagccccgctcccctcctctcaagga

SEQ ID NO: 15353 - DNA, 122 bp, Homo sapiens
  misc_feature (61)..(62): /note="This region represents a CpG dinucleotide"
  misc_feature (61)..(61): /note="Nucleotide may be methylated to form 5-methylcytosine"
aagagtatcagttcatgataagtgctatgtagacgattatagggcaccttaaacttagatcgggtgctacagagacaattatataatagggcacctactctgaaaagatcactctagggtga

SEQ ID NO: 15354 - DNA, 122 bp, Homo sapiens
  misc_feature (61)..(62): /note="This region represents a CpG dinucleotide"
  misc_feature (61)..(61): /note="Nucleotide may be methylated to form 5-methylcytosine"
gttatgtacttgtgggtcatgatgttaaatgtgcttttccaagaatagccaagataaatccgaaaaagaaaaacaagcagggacgacttgccctaccagagttcagaacttgtcatgaaact

SEQ ID NO: 15355 - DNA, 122 bp, Homo sapiens
  misc_feature (61)..(62): /note="This region represents a CpG dinucleotide"
  misc_feature (61)..(61): /note="Nucleotide may be methylated to form 5-methylcytosine"
ccacttgaaagtgggccatccagtggcagttagtataatcacagcgttgtgcagccactccgtatatcaacttccaaaacactttcgtcactccaagatttgaaaagcctgtacctattaag

SEQ ID NO: 15356 - DNA, 122 bp, Homo sapiens
  misc_feature (61)..(62): /note="This region represents a CpG dinucleotide"
  misc_feature (61)..(61): /note="Nucleotide may be methylated to form 5-methylcytosine"
atggcgataaaaatagtttcaggttccaggcaatctctgcccatactttttaaaaaataacgtttattttaagttcaagggtacatgtacaagtttgttatataggtaaacttgtgtcatgg

SEQ ID NO: 15357 - DNA, 122 bp, Homo sapiens
  misc_feature (61)..(62): /note="This region represents a CpG dinucleotide"
  misc_feature (61)..(61): /note="Nucleotide may be methylated to form 5-methylcytosine"
taggggagggcggtcggggtggcggtcggaaccgcatcctcttcccaggctggggaagcccgatctggcacggccgagggccccacagccctgctgagtggtgtttacagccccaagtcccg

SEQ ID NO: 15358 - DNA, 122 bp, Homo sapiens
  misc_feature (61)..(62): /note="This region represents a CpG dinucleotide"
  misc_feature (61)..(61): /note="Nucleotide may be methylated to form 5-methylcytosine"
aaattctacagttatgatatttttataattatgctcttttgtaatcagtttgattgcatacgtgtgaaagtgctctgggagaaaaattcaatatagatgcaaggtatgactaacagcttttg

SEQ ID NO: 15359 - DNA, 122 bp, Homo sapiens
  misc_feature (61)..(62): /note="This region represents a CpG dinucleotide"
  misc_feature (61)..(61): /note="Nucleotide may be methylated to form 5-methylcytosine"
actcagtctcaacctgcttatgccaggactcctggtgagcccacagcctgggagggcatacgagtaggtcctgtcccataatagattactcagtcctgactcatatagggggcttatgagag

SEQ ID NO: 15360 - DNA, 122 bp, Homo sapiens
  misc_feature (61)..(62): /note="This region represents a CpG dinucleotide"
  misc_feature (61)..(61): /note="Nucleotide may be methylated to form 5-methylcytosine"
gtcagacttgttttcagttttcagtgatagctctgctgctcctaaattgactcatgtgcacgtcacacagatgtgacaacactgccccagtggagtctaagtcatcaggttgacacagccgg

SEQ ID NO: 15361 - DNA, 122 bp, Homo sapiens
  misc_feature (61)..(62): /note="This region represents a CpG dinucleotide"
  misc_feature (61)..(61): /note="Nucleotide may be methylated to form 5-methylcytosine"
agctagtcctaaaaaaccagttacccaagtatgttcaggaaatctgccttacagctgttgcgcaaattagctttgagcatttgagtagactacagtgtgaaccagcaatgagatgttataac

SEQ ID NO: 15362 - DNA, 122 bp, Homo sapiens
  misc_feature (61)..(62): /note="This region represents a CpG dinucleotide"
  misc_feature (61)..(61): /note="Nucleotide may be methylated to form 5-methylcytosine"
agtcctctgccggcatccagccctgatgattgattctaatccaggccgcttctgaggacacgaggaaaaggctgttagcataggccctactgcgtacctggcagacccaagttcatcatctc

SEQ ID NO: 15363 - DNA, 122 bp, Homo sapiens
  misc_feature (61)..(62): /note="This region represents a CpG dinucleotide"
  misc_feature (61)..(61): /note="Nucleotide may be methylated to form 5-methylcytosine"
gacaatagtaacaagtactttataggctcattgggaggattaaataagagaatgtatacacgctgcttaacctggtgagaggtacctagctagcactcaataaatgtcagcaatcgtcatta

SEQ ID NO: 15364 - DNA, 122 bp, Homo sapiens
  misc_feature (61)..(62): /note="This region represents a CpG dinucleotide"
  misc_feature (61)..(61): /note="Nucleotide may be methylated to form 5-methylcytosine"
ttcactcaccactcactcactgactcatctagagtaacttccagtcttgtaagttccattcgtggtaaatgccctatacagctataccattttcaaatcttttatatggtacttttaatata

SEQ ID NO: 15365 - DNA, 122 bp, Homo sapiens
  misc_feature (61)..(62): /note="This region represents a CpG dinucleotide"
  misc_feature (61)..(61): /note="Nucleotide may be methylated to form 5-methylcytosine"
aaacaaatagccatagtgactcatcccacattaaattcatgatcactgacctgaagtacacgcctaaagcaacctgcaattattctttcttcccccagtctattctctccatttcttttaaa

SEQ ID NO: 15366 - DNA, 122 bp, Homo sapiens
  misc_feature (61)..(62): /note="This region represents a CpG dinucleotide"
  misc_feature (61)..(61): /note="Nucleotide may be methylated to form 5-methylcytosine"
gggcatacacatcaagtgaaattgtggcaaaaatcctctgcactcttgatcttttctctccgtctgtcactttgtggctgagtgcatgtggttgagtgtgcagaagtactcatggatgatgc

SEQ ID NO: 15367 - DNA, 122 bp, Homo sapiens
  misc_feature (61)..(62): /note="This region represents a CpG dinucleotide"
  misc_feature (61)..(61): /note="Nucleotide may be methylated to form 5-methylcytosine"
aagcaacatttaaaggactaggttagtttctgacactaagtgacctccatttgcatacttcgccatgttgtgtgttttatggttgccttaagatgactatgttttttggtagcattgctgtg

SEQ ID NO: 15368 - DNA, 122 bp, Homo sapiens
  misc_feature (61)..(62): /note="This region represents a CpG dinucleotide"
  misc_feature (61)..(61): /note="Nucleotide may be methylated to form 5-methylcytosine"
caacctcctctgtgaatcttgtgctctctctcctccaagcagagtggctagcctgcttctcgcccgctcagcgtacttctcccctgcaccatctccctctgctgtaaatatctagactgtca

SEQ ID NO: 15369 - DNA, 122 bp, Homo sapiens
  misc_feature (61)..(62): /note="This region represents a CpG dinucleotide"
  misc_feature (61)..(61): /note="Nucleotide may be methylated to form 5-methylcytosine"
ggcctaactattctgctagtgggggcatattttattttgaaatccttaaggtgcctggtgcgtaacggcaaccagggatggtggtggcaatgtgggtgaggtggagtcttgcctgcatttca

SEQ ID NO: 15370 - DNA, 122 bp, Homo sapiens
  misc_feature (61)..(62): /note="This region represents a CpG dinucleotide"
  misc_feature (61)..(61): /note="Nucleotide may be methylated to form 5-methylcytosine"
caccatggaagagatctaggtgggggacctaagtagtcagcctgtttgatcttgaggacacgggaaccccccccccaccccaagagatctgtgaagtgtctagggcagagcctgggtggtgg

SEQ ID NO: 15371 - DNA, 122 bp, Homo sapiens
  misc_feature (61)..(62): /note="This region represents a CpG dinucleotide"
  misc_feature (61)..(61): /note="Nucleotide may be methylated to form 5-methylcytosine"
atgggcttttctgtggggtgaaaactcaggcctcaaatccctgcatccgtgaaccttgttcgcaccagcactgcggagagagggctccaggacatagaagggagaatgagggcgtggtgggt

SEQ ID NO: 15372 - DNA, 122 bp, Homo sapiens
  misc_feature (61)..(62): /note="This region represents a CpG dinucleotide"
  misc_feature (61)..(61): /note="Nucleotide may be methylated to form 5-methylcytosine"
ctagccaaagaatattctaaagagctgtcctgtcatgttcaatgtctaggtccacaatcccgcaagcttagcgaagtaatgctctgtcattcttacccccatttacagatggagaaatgggc

SEQ ID NO: 15373 - DNA, 122 bp, Homo sapiens
  misc_feature (61)..(62): /note="This region represents a CpG dinucleotide"
  misc_feature (61)..(61): /note="Nucleotide may be methylated to form 5-methylcytosine"
ttttcaaagaggacttcaaaggggctcaagataatagaaatctgggacttcggcatctttcgtcacaggaatgatagaccaactactatcaatcaccatttgctgaagaaatatttacaaat

SEQ ID NO: 15374 - DNA, 122 bp, Homo sapiens
  misc_feature (61)..(62): /note="This region represents a CpG dinucleotide"
  misc_feature (61)..(61): /note="Nucleotide may be methylated to form 5-methylcytosine"
gcctacaactgcaattaataataatttaggcccatcgctcccagggcagagctgcatctccgtgttagagacaaagacccatcttttccttgttttgtgttcaggcaacatgacgttatttc

SEQ ID NO: 15375 - DNA, 122 bp, Homo sapiens
  misc_feature (61)..(62): /note="This region represents a CpG dinucleotide"
  misc_feature (61)..(61): /note="Nucleotide may be methylated to form 5-methylcytosine"
aaaaccactagcattccaatatgtattcaacagcaagctaacaatataacaggagaaaagcgatagcaaaaaaatgagacaacattctgaagaatttcacataaaagaagattcgaatacct

SEQ ID NO: 15376 - DNA, 122 bp, Homo sapiens
  misc_feature (61)..(62): /note="This region represents a CpG dinucleotide"
  misc_feature (61)..(61): /note="Nucleotide may be methylated to form 5-methylcytosine"
ctgatgagctcagccccataaagaatgtcgaggaggctttgcgcctctgcaggtgactctcgggcccaagcaaccttctggaaaacgggttaataaataaatcaataaagaaccttcaagtt

SEQ ID NO: 15377 - DNA, 122 bp, Homo sapiens
  misc_feature (61)..(62): /note="This region represents a CpG dinucleotide"
  misc_feature (61)..(61): /note="Nucleotide may be methylated to form 5-methylcytosine"
ctgaagattatggtatatagattccttctgataacctcatggcctcacaggttcaaaacccgtgtttgtgaatcactcatacagattggggctaagatgcgtgtccagaaaaccacctatta

SEQ ID NO: 15378 - DNA, 122 bp, Homo sapiens
  misc_feature (61)..(62): /note="This region represents a CpG dinucleotide"
  misc_feature (61)..(61): /note="Nucleotide may be methylated to form 5-methylcytosine"
gctacccccggggcccctccccaggttccgggtctcctgcacctctttagcttctccgctcggccccagatggagctcagttccctcaccccgcggctcctcgccggctgggcagccagagc

SEQ ID NO: 15379 - DNA, 122 bp, Homo sapiens
  misc_feature (61)..(62): /note="This region represents a CpG dinucleotide"
  misc_feature (61)..(61): /note="Nucleotide may be methylated to form 5-methylcytosine"
caaatcctgaaaagacacttttcaatcagaaaactgactttttcaaacaagttcagtaaacgtagctccattaagcttttcatagcctgacctatgcattctggaaatgttcgcttttagcc

SEQ ID NO: 15380 - DNA, 122 bp, Homo sapiens
  misc_feature (61)..(62): /note="This region represents a CpG dinucleotide"
  misc_feature (61)..(61): /note="Nucleotide may be methylated to form 5-methylcytosine"
aaatatttgttaaaatagtggggataattgcacaacattgtgaatataattgaatgcaatcgatgacatagtattgtacacttagaaatgattaagatgggtggggcatggtggctcatgcc

SEQ ID NO: 15381 - DNA, 122 bp, Homo sapiens
  misc_feature (61)..(62): /note="This region represents a CpG dinucleotide"
  misc_feature (61)..(61): /note="Nucleotide may be methylated to form 5-methylcytosine"
ggggcagcacccgataaccaaacacggtcatgtttctgctgcaaaacatgtgagtattcacgcccagtggggaaaaacgagggctctaaatagtctcagggcagggcagtttttgctgccaa

SEQ ID NO: 15382 - DNA, 122 bp, Homo sapiens
  misc_feature (61)..(62): /note="This region represents a CpG dinucleotide"
  misc_feature (61)..(61): /note="Nucleotide may be methylated to form 5-methylcytosine"
aaatactggagacggggatctcactatattgtccaggctggtgtggaactcttgagctcacgtgatcctcccgcctcagcctcccacagtgctgggattacaggcatgagccactacacggc

SEQ ID NO: 15383 - DNA, 122 bp, Homo sapiens
  misc_feature (61)..(62): /note="This region represents a CpG dinucleotide"
  misc_feature (61)..(61): /note="Nucleotide may be methylated to form 5-methylcytosine"
gtcatagtgtgcctgggagcaggaagcacagagagcaaagaaacaggcttagacattggccgaagtactccctggacccaatgacaatgggactgctaagcctattctagtctgtcatgtcc

SEQ ID NO: 15384 - DNA, 122 bp, Homo sapiens
  misc_feature (61)..(62): /note="This region represents a CpG dinucleotide"
  misc_feature (61)..(61): /note="Nucleotide may be methylated to form 5-methylcytosine"
gtcttcaaagaaaacaagttgtccatctagatgatatattcaagttcccttgaatatttgcgatttgtttattcaagtttgttctatattagcccggcaaacagactagtaggaagtagaag

SEQ ID NO: 15385 - DNA, 122 bp, Homo sapiens
  misc_feature (61)..(62): /note="This region represents a CpG dinucleotide"
  misc_feature (61)..(61): /note="Nucleotide may be methylated to form 5-methylcytosine"
ctcacatcttctcttactgaagccatgatcattcatggaaaaggcactgaggggagtgtgcggagcctttgtgaagggagctgtgcttccctgtgctcccttcacatggaggtgagggggag

SEQ ID NO: 15386 - DNA, 122 bp, Homo sapiens
  misc_feature (61)..(62): /note="This region represents a CpG dinucleotide"
  misc_feature (61)..(61): /note="Nucleotide may be methylated to form 5-methylcytosine"
tggcctcctagggccatgtggaccagagagatcttatcacagaagtcataaactgatatccgtgagccaaatctagctcatgggcatgttgtttggcctacagcacattttttttttttttt

SEQ ID NO: 15387 - DNA, 122 bp, Homo sapiens
  misc_feature (61)..(62): /note="This region represents a CpG dinucleotide"
  misc_feature (61)..(61): /note="Nucleotide may be methylated to form 5-methylcytosine"
ctagtgttgtaaatgttaaggatatcttgaatgtgtttacatttggtagttattaacacacgtctgcaggtaaacatgatttttctggttatcctttgcctttaggagagaaaaagaggcaa

SEQ ID NO: 15388 - DNA, 122 bp, Homo sapiens
  misc_feature (61)..(62): /note="This region represents a CpG dinucleotide"
  misc_feature (61)..(61): /note="Nucleotide may be methylated to form 5-methylcytosine"
tctacctgttctgagtcaacagttccaggatgaacctcgcctaaaagtcttccaggggagcgagagtggaatgtctggcttaaggatgcagtctgaccccacagctcacagtggcaggaaag

SEQ ID NO: 15389 - DNA, 122 bp, Homo sapiens
  misc_feature (61)..(62): /note="This region represents a CpG dinucleotide"
  misc_feature (61)..(61): /note="Nucleotide may be methylated to form 5-methylcytosine"
gtagggaaagactaaacaggtaggcaagaactaggtcatggggtgccctggaggccatgtcgacctgatgatattcatttgaagaacaatagggagctattggaggctttctccactaacta

SEQ ID NO: 15390 - DNA, 122 bp, Homo sapiens
  misc_feature (61)..(62): /note="This region represents a CpG dinucleotide"
  misc_feature (61)..(61): /note="Nucleotide may be methylated to form 5-methylcytosine"
gcgtctgcgtcctcagtttccccaggacgcgtaaggagaaaaccgggggagggccccgcacgccgctgcccccccacgtccaagagcccgaccgttcgcccgcgcccctcgaggagtctgcc

SEQ ID NO: 15391 - DNA, 122 bp, Homo sapiens
  misc_feature (61)..(62): /note="This region represents a CpG dinucleotide"
  misc_feature (61)..(61): /note="Nucleotide may be methylated to form 5-methylcytosine"
aaatgaaaacaaaagtcattttcctacatatatcaggcctttgccttgctaagcttacaccgaatacatgtagcagcgtcagacctttcgggtgtggtgtagagggacagggagtacagttt

SEQ ID NO: 15392 - DNA, 122 bp, Homo sapiens
  misc_feature (61)..(62): /note="This region represents a CpG dinucleotide"
  misc_feature (61)..(61): /note="Nucleotide may be methylated to form 5-methylcytosine"
gtcatttctgagtgccattagagccaccaacctgttctgggcctaggctgggtctgtaagcgcccctgttctcgtaaatactttatttgtagagttcctgctgctgggctggccagcacttc

SEQ ID NO: 15393 - DNA, 122 bp, Homo sapiens
  misc_feature (61)..(62): /note="This region represents a CpG dinucleotide"
  misc_feature (61)..(61): /note="Nucleotide may be methylated to form 5-methylcytosine"
tgaaatgtataaaaccaccttcctcattatgtggtcctaaggctgaaatgaggccacgtacgtaaagtgtcagacacactttacatatgggggttagtaaatgttgccatgtcattaattat

SEQ ID NO: 15394 - DNA, 122 bp, Homo sapiens
  misc_feature (61)..(62): /note="This region represents a CpG dinucleotide"
  misc_feature (61)..(61): /note="Nucleotide may be methylated to form 5-methylcytosine"
gctgtagggagcccttcttggctcgctcacgtaacgcacctatgcaacaactggccaatacgctttccaaagctcctgactcccactccgtacattctttggtggtgtttctttgagacaga

SEQ ID NO: 15395 - DNA, 122 bp, Homo sapiens
  misc_feature (61)..(62): /note="This region represents a CpG dinucleotide"
  misc_feature (61)..(61): /note="Nucleotide may be methylated to form 5-methylcytosine"
tattataatgataaatcactaaacacatgtgtagagatcctggcactgacctgttggctgcgtacattgacacatcaaacttctttgccttccagaatttctgatctattgcagctttgaaa

SEQ ID NO: 15396 - DNA, 122 bp, Homo sapiens
  misc_feature (61)..(62): /note="This region represents a CpG dinucleotide"
  misc_feature (61)..(61): /note="Nucleotide may be methylated to form 5-methylcytosine"
aaaaccccaggagtttaatcagcactgggtccaaagcaatgagcaatgagtgtgacctgccgccacccctcagcaagcaagaccaaggccacacaacagcaaccagtgacccaagcaagaga

SEQ ID NO: 15397 - DNA, 122 bp, Homo sapiens
  misc_feature (61)..(62): /note="This region represents a CpG dinucleotide"
  misc_feature (61)..(61): /note="Nucleotide may be methylated to form 5-methylcytosine"
atttggacagttgtaagggaactaaaaacaactgcctgcccttggaaatctgcatggcctcggagactgtgctaaacacattgggtgtgttcttttatccaatctttactgtaactaagcat

SEQ ID NO: 15398 - DNA, 122 bp, Homo sapiens
  misc_feature (61)..(62): /note="This region represents a CpG dinucleotide"
  misc_feature (61)..(61): /note="Nucleotide may be methylated to form 5-methylcytosine"
attcttaagaagctatgaaatgcctctgaaaattccttgcaaccttggagtaacttgatccggagcctagacacttgattctagtccttgattttcttatcactttctgtaaacattgaata

SEQ ID NO: 15399 - DNA, 122 bp, Homo sapiens
  misc_feature (61)..(62): /note="This region represents a CpG dinucleotide"
  misc_feature (61)..(61): /note="Nucleotide may be methylated to form 5-methylcytosine"
cactgaactggaagctatgctcctcaaagggtggttactcatacaggtgactatttgtaccgatttagacagctcacccttgaagctcatggaaatatgacaaacaaaaggccattttgttt

SEQ ID NO: 15400 - DNA, 122 bp, Homo sapiens
  misc_feature (61)..(62): /note="This region represents a CpG dinucleotide"
  misc_feature (61)..(61): /note="Nucleotide may be methylated to form 5-methylcytosine"
acttgtagaaaagcttctcatttactgaggagtaaggcgtaaaagcgggtcacgggcgaacgcatatgagaaactgggtccatatctgagctctgccatcgtcagtgtgactctaagcaagg

SEQ ID NO: 15401 - DNA, 122 bp, Homo sapiens
  misc_feature (61)..(62): /note="This region represents a CpG dinucleotide"
  misc_feature (61)..(61): /note="Nucleotide may be methylated to form 5-methylcytosine"
acatgtgagccatcgtgccctgcccaatgaccactaaatttgaccagtggctctcaacagcgtgtgtgtgagagtgtgtgtgtgtgtgtgtgtgtgtgtgtgtgtgtgtcgggggggcgggg

SEQ ID NO: 15402 - DNA, 122 bp, Homo sapiens
  misc_feature (61)..(62): /note="This region represents a CpG dinucleotide"
  misc_feature (61)..(61): /note="Nucleotide may be methylated to form 5-methylcytosine"
caccccgtagcctttcctcaggctccacgagttctcccggtgatgtgatgaccgacatggcgtctgggctctgaacacagactttactccttccccccggccccgaaacatggggaaaccac

SEQ ID NO: 15403 - DNA, 122 bp, Homo sapiens
  misc_feature (61)..(62): /note="This region represents a CpG dinucleotide"
  misc_feature (61)..(61): /note="Nucleotide may be methylated to form 5-methylcytosine"
ttgcagcaactgtatatgttttcattaaatctgcagataaatgatcaggcatgtatccggcgttgttccactggcactgctgtggactaaacaatggccagtgttctgatgtgaatcatttg

SEQ ID NO: 15404 - DNA, 122 bp, Homo sapiens
  misc_feature (61)..(62): /note="This region represents a CpG dinucleotide"
  misc_feature (61)..(61): /note="Nucleotide may be methylated to form 5-methylcytosine"
ttgctcccccaaatatgcctgtgctttccagtgttctgctcatttaatacattggtctctcgtatttttctgttttgtccactagagagaggtcttctcttcttaaagacaattcctcctcc

SEQ ID NO: 15405 - DNA, 122 bp, Homo sapiens
  misc_feature (61)..(62): /note="This region represents a CpG dinucleotide"
  misc_feature (61)..(61): /note="Nucleotide may be methylated to form 5-methylcytosine"
ctgtccaattgtcctttctttttcatgcaatatagattatttaaacagccactctcactgcgagtcaaataaaatgggttggtgacacagagaatggactccgacgaatgttttatttcctt

SEQ ID NO: 15406 - DNA, 122 bp, Homo sapiens
  misc_feature (61)..(62): /note="This region represents a CpG dinucleotide"
  misc_feature (61)..(61): /note="Nucleotide may be methylated to form 5-methylcytosine"
ctgctgtgggctgatctggtcccactcgaggaaaaggccttatcaccctcctgcagccctcgcctacctcccacccacagccaaaaggcctgttccccagggtgggacggtggtggcagtca

SEQ ID NO: 15407 - DNA, 122 bp, Homo sapiens
  misc_feature (61)..(62): /note="This region represents a CpG dinucleotide"
  misc_feature (61)..(61): /note="Nucleotide may be methylated to form 5-methylcytosine"
actgtctaaataaagaggcaatagtcactgatgctctgataattgcaaatgctatgccttcgcttaaacttctcacgtttaatggcttaaaattctttccaaagattaggggagaaaaagcc

SEQ ID NO: 15408 - DNA, 122 bp, Homo sapiens
  misc_feature (61)..(62): /note="This region represents a CpG dinucleotide"
  misc_feature (61)..(61): /note="Nucleotide may be methylated to form 5-methylcytosine"
tagtaaaatgcagctacagatgacttttttcttcctctttgtgaagccaatttatcactccgttgatttacctttataacatcagcaccataatagctatgatttaggacaaatcctagagt

SEQ ID NO: 15409 - DNA, 122 bp, Homo sapiens
  misc_feature (61)..(62): /note="This region represents a CpG dinucleotide"
  misc_feature (61)..(61): /note="Nucleotide may be methylated to form 5-methylcytosine"
agcaaccccacttatgtgctctcacatgtaggtttcattagcatgctcttttcttccgctcgcaacttgtcaatcaagatggaatctgacagcattggtaattttagtagttatttctttcc

SEQ ID NO: 15410 - DNA, 122 bp, Homo sapiens
  misc_feature (61)..(62): /note="This region represents a CpG dinucleotide"
  misc_feature (61)..(61): /note="Nucleotide may be methylated to form 5-methylcytosine"
tctttccatctggtgccatggcttaattcatcccttacattttggtcatagctctgccatcgctttgcttgattcctgagacagaggatgggttctagacccaaaatgattctaggattagg

SEQ ID NO: 15411 - DNA, 122 bp, Homo sapiens
  misc_feature (61)..(62): /note="This region represents a CpG dinucleotide"
  misc_feature (61)..(61): /note="Nucleotide may be methylated to form 5-methylcytosine"
ggcgatgagcctatagctctcaaatctcacagcttggggaataactcactacagaaaaaccgacctgaatgaaggtgaaggagagaatccacccacgtttacgaaagaccatgccttagcta

SEQ ID NO: 15412 - DNA, 122 bp, Homo sapiens
  misc_feature (61)..(62): /note="This region represents a CpG dinucleotide"
  misc_feature (61)..(61): /note="Nucleotide may be methylated to form 5-methylcytosine"
tgcctcggcctcccaaagtgctgggattacaggcatgagccaccacgcctggtctatggacgtgctttctaaccctgaatgtgtaatggggagttgtggcttcagatttgcattttaccaag

SEQ ID NO: 15413 - DNA, 122 bp, Homo sapiens
  misc_feature (61)..(62): /note="This region represents a CpG dinucleotide"
  misc_feature (61)..(61): /note="Nucleotide may be methylated to form 5-methylcytosine"
ctaagaaagcttagtgtagtatttctaagatttaaaatcttaatgttactcttagaattacgtgtaaaaatgtataccaaagtagcttaaactgatcaaggagacaaggctgaaaacagagc

SEQ ID NO: 15414 - DNA, 122 bp, Homo sapiens
  misc_feature (61)..(62): /note="This region represents a CpG dinucleotide"
  misc_feature (61)..(61): /note="Nucleotide may be methylated to form 5-methylcytosine"
aattatactgcatagcaaactagcccaaaagtcagtggcttacaataataggcattcacgcgtcttgctcatgagtcacagtctacttagttttaggtttcagggtggctttatttctgctc

SEQ ID NO: 15415 - DNA, 122 bp, Homo sapiens
  misc_feature (61)..(62): /note="This region represents a CpG dinucleotide"
  misc_feature (61)..(61): /note="Nucleotide may be methylated to form 5-methylcytosine"
tctcgagggtttataatggatacatgcatataggcacatgtatatattaatggttttatacgtatagctaagtcatctgtgctctgtggtttgattgcaaaagctgaaaaaataaataatat

SEQ ID NO: 15416 - DNA, 122 bp, Homo sapiens
  misc_feature (61)..(62): /note="This region represents a CpG dinucleotide"
  misc_feature (61)..(61): /note="Nucleotide may be methylated to form 5-methylcytosine"
cccatcttagtaaatggcagttcatccttctggttgctgtgacccaaagccttagagtcacgctgactcttcacttccatatttgccctcttagaggcgaatctcaacacagcagacagagt

SEQ ID NO: 15417 - DNA, 122 bp, Homo sapiens
  misc_feature (61)..(62): /note="This region represents a CpG dinucleotide"
  misc_feature (61)..(61): /note="Nucleotide may be methylated to form 5-methylcytosine"
tccacccaaatactgaaaatcataagcaatgactgccattaaattatggatgactctgcccgccagttgtttgcaagcagagtaaatagaccatcagggacagggtaaagtgaaacttaata

SEQ ID NO: 15418 - DNA, 122 bp, Homo sapiens
  misc_feature (61)..(62): /note="This region represents a CpG dinucleotide"
  misc_feature (61)..(61): /note="Nucleotide may be methylated to form 5-methylcytosine"
agaaatgtccaggtaatgtgtatactcactcacttccctcatgacaggcttagccttaggcgtgaagttggaacagaggcatttctcttgcattttgtgtagtgttccgtgtgcctctttgt

SEQ ID NO: 15419 - DNA, 122 bp, Homo sapiens
  misc_feature (61)..(62): /note="This region represents a CpG dinucleotide"
  misc_feature (61)..(61): /note="Nucleotide may be methylated to form 5-methylcytosine"
tcctaccctggctgccaggcaaatacccccaggggagcagacctattgctgggccacctccggaccaagcatcctttcccgctgagttgggcaggcctgtggctgggcactgcagggctgac

SEQ ID NO: 15420 - DNA, 122 bp, Homo sapiens
  misc_feature (61)..(62): /note="This region represents a CpG dinucleotide"
  misc_feature (61)..(61): /note="Nucleotide may be methylated to form 5-methylcytosine"
aaatgcaacctggaaaacaggccttcagattcaacagatccaccctgtgcattagggtgtcgcaaacgggatcagttgctgggattaccaggaaatccaatcttctaaatcttcccccctcc

SEQ ID NO: 15421 - DNA, 122 bp, Homo sapiens
  misc_feature (61)..(62): /note="This region represents a CpG dinucleotide"
  misc_feature (61)..(61): /note="Nucleotide may be methylated to form 5-methylcytosine"
atgatgatgatgatgatgaccacaccagactcagtgccaggcactgctctaagtgctttacgggattatttcacttagtactcacaagaatgctatgggatagtgccaccactatcccaatt

SEQ ID NO: 15422 - DNA, 122 bp, Homo sapiens
  misc_feature (61)..(62): /note="This region represents a CpG dinucleotide"
  misc_feature (61)..(61): /note="Nucleotide may be methylated to form 5-methylcytosine"
cgctgagggcacaggaaggagttttgggggcggcaggcagggaagcaagcaggatgggaacgccaggctctcaggggaaggaaccagataaatcatcagcaaggaaaacctataggtttccc

SEQ ID NO: 15423 - DNA, 122 bp, Homo sapiens
  misc_feature (61)..(62): /note="This region represents a CpG dinucleotide"
  misc_feature (61)..(61): /note="Nucleotide may be methylated to form 5-methylcytosine"
tcaaagcaaaaaaaaaaaaaaagaagtcaatcaggcctttttattgctatggtttcaaagcgaaatttaacactggggtttctaatagtggaaatgaccatatgcagagcagcccgtgtcat

SEQ ID NO: 15424 - DNA, 122 bp, Homo sapiens
  misc_feature (61)..(62): /note="This region represents a CpG dinucleotide"
  misc_feature (61)..(61): /note="Nucleotide may be methylated to form 5-methylcytosine"
ccagacatatctagcaaataaaacaggcctcaatccagaggctagtatttcttctcacatcggaaatgataaagatgctgtgaccacaactttcacagatcgtcatttcactgttttgccac

SEQ ID NO: 15425 - DNA, 122 bp, Homo sapiens
  misc_feature (61)..(62): /note="This region represents a CpG dinucleotide"
  misc_feature (61)..(61): /note="Nucleotide may be methylated to form 5-methylcytosine"
cttcacacgttggcagtatttcacgttttggtagtttctctggtcattttcccctgtggccgtctttaataatgagtcatactcagtgtaatagaaataatatccataagcaagaaaatcat

SEQ ID NO: 15426 - DNA, 122 bp, Homo sapiens
  misc_feature (61)..(62): /note="This region represents a CpG dinucleotide"
  misc_feature (61)..(61): /note="Nucleotide may be methylated to form 5-methylcytosine"
tgcccggtggcaccaggcagctgagcaggccctaatcctgtctagggcagccttactcaccggcagatggctgactggctgtaggctggaccttccgttgcagtcagagcctgacccacctg

SEQ ID NO: 15427 - DNA, 122 bp, Homo sapiens
  misc_feature (61)..(62): /note="This region represents a CpG dinucleotide"
  misc_feature (61)..(61): /note="Nucleotide may be methylated to form 5-methylcytosine"
cctttaccacgtcccaaagctcctcccctccagcgaggtgtgtctggagctatgtgggggcgggaggaagggtgaagtgttaagagacccaaagcccggagaggtgctgctaagctggtctg

SEQ ID NO: 15428 - DNA, 122 bp, Homo sapiens
  misc_feature (61)..(62): /note="This region represents a CpG dinucleotide"
  misc_feature (61)..(61): /note="Nucleotide may be methylated to form 5-methylcytosine"
gtatgtgtgtggggtgacttatcaggttgtcagcatgtcaatgagcagacgtccttcttccgtcagggttcagtaagtggtaaaagctgacagtcatgggtaaaaaataatagaaggtgaaa

SEQ ID NO: 15429 - DNA, 122 bp, Homo sapiens
  misc_feature (61)..(62): /note="This region represents a CpG dinucleotide"
  misc_feature (61)..(61): /note="Nucleotide may be methylated to form 5-methylcytosine"
atctttctgtaggatctctgcattatccccactggtatgatgcttggtcaagcgggtgaccgcaccctgcctgcagtttgtaacactgcgtcatgacattgtcaaacatcactccatcactc

SEQ ID NO: 15430 - DNA, 122 bp, Homo sapiens
  misc_feature (61)..(62): /note="This region represents a CpG dinucleotide"
  misc_feature (61)..(61): /note="Nucleotide may be methylated to form 5-methylcytosine"
cactccagaggagcagaagagggcagcctgtaccttcccagaggcctccctctggaggagcgggtctttctccgcaggcctgggcccaggcagagctgagatgcacctttagaggcagcaga

SEQ ID NO: 15431 - DNA, 122 bp, Homo sapiens
  misc_feature (61)..(62): /note="This region represents a CpG dinucleotide"
  misc_feature (61)..(61): /note="Nucleotide may be methylated to form 5-methylcytosine"
ttcaccctcaccctgacaagggacctgcagctgtggcacccagtagtgtctaatgacatccgtcaactctggacatgaatgcctgcgatcctgagaacgagttaaatgactaatcactccta

SEQ ID NO: 15432 - DNA, 122 bp, Homo sapiens
  misc_feature (61)..(62): /note="This region represents a CpG dinucleotide"
  misc_feature (61)..(61): /note="Nucleotide may be methylated to form 5-methylcytosine"
ctagatcatcctttgggcaagaaccagttttgaagtgcttaaagaagataactccagtttcgcttcagtcatcaatcatgtgtgattctgtgtaggcaaaagacaatctcaatattcatttg

SEQ ID NO: 15433 - DNA, 122 bp, Homo sapiens
  misc_feature (61)..(62): /note="This region represents a CpG dinucleotide"
  misc_feature (61)..(61): /note="Nucleotide may be methylated to form 5-methylcytosine"
cttcagcctgatgaaatcatttccattctgtgggagcagtaaatcctgacatgccttaaacgccctgatccagtttagctgagagtgcaagggaaactggctcactctttgaagaaaaataa

SEQ ID NO: 15434 - DNA, 122 bp, Homo sapiens
  misc_feature (61)..(62): /note="This region represents a CpG dinucleotide"
  misc_feature (61)..(61): /note="Nucleotide may be methylated to form 5-methylcytosine"
agctcctgcataaacaggaacccagcaagcaacaaaatacctgggcaagggcactgagtccgcatcactgtcaactcctggttactggtgacctcctgacccgaattcctcatgtgctagtt

SEQ ID NO: 15435 - DNA, 122 bp, Homo sapiens
  misc_feature (61)..(62): /note="This region represents a CpG dinucleotide"
  misc_feature (61)..(61): /note="Nucleotide may be methylated to form 5-methylcytosine"
cctgatctgaccaggaaatgaagtccacgtttcaggagggggtggggtggggtgaggtgtcgagtccctccacccagggtgccaggctcagcaggccctgccctaatggctggctgatgttt

SEQ ID NO: 15436 - DNA, 122 bp, Homo sapiens
  misc_feature (61)..(62): /note="This region represents a CpG dinucleotide"
  misc_feature (61)..(61): /note="Nucleotide may be methylated to form 5-methylcytosine"
ttgaatggtggctctaactatttggttaccactgagtttcaagatgtgttccctgggccacgaagaagtcagctacttgtcaaggatcagctatgttatgggtggatcctgctagaaccaaa

SEQ ID NO: 15437 - DNA, 122 bp, Homo sapiens
  misc_feature (61)..(62): /note="This region represents a CpG dinucleotide"
  misc_feature (61)..(61): /note="Nucleotide may be methylated to form 5-methylcytosine"
tgaaaaggatggagctgtgactgaagcaatccagctatttagcctaagcatgtgccaacacgcccagctaattttttgtatctttagtagaggtggggtttcaccatgttggccaagatggt

SEQ ID NO: 15438 - DNA, 122 bp, Homo sapiens
  misc_feature (61)..(62): /note="This region represents a CpG dinucleotide"
  misc_feature (61)..(61): /note="Nucleotide may be methylated to form 5-methylcytosine"
tgcttccaagtcagagactcttcaccaagccttttttctccttggagaccaatggagcagcgttaatctggcacagatgagcactcccataatgctcaacatctctttccaagagtggagag

SEQ ID NO: 15439 - DNA, 122 bp, Homo sapiens
  misc_feature (61)..(62): /note="This region represents a CpG dinucleotide"
  misc_feature (61)..(61): /note="Nucleotide may be methylated to form 5-methylcytosine"
agccatttataggctccactgccaaaaggctctgattccaggatgagtcactgacatagacggggaattgggactggctgttagcaggaggcctcacttcctcaccatgtggcttatccaca

SEQ ID NO: 15440 - DNA, 122 bp, Homo sapiens
  misc_feature (61)..(62): /note="This region represents a CpG dinucleotide"
  misc_feature (61)..(61): /note="Nucleotide may be methylated to form 5-methylcytosine"
tcttggcacatccctggcctcaggccctcacctaacagtgaggcagcagctgcccagccccgcaatgtgcctgctgtcaggcagctcttgcctgaaacttacttccacattctttcctgatg

SEQ ID NO: 15441 - DNA, 122 bp, Homo sapiens
  misc_feature (61)..(62): /note="This region represents a CpG dinucleotide"
  misc_feature (61)..(61): /note="Nucleotide may be methylated to form 5-methylcytosine"
aaaggccagtctttaaaaactgagtgatctctaaacactctgcactagtcataccaccaccgtcccgttcaagagtctgtgcctctaaggctgttcattctgtctagttcatgatccctttc

SEQ ID NO: 15442 - DNA, 122 bp, Homo sapiens
  misc_feature (61)..(62): /note="This region represents a CpG dinucleotide"
  misc_feature (61)..(61): /note="Nucleotide may be methylated to form 5-methylcytosine"
ccagaatgagaaagggcagatgtggaaacaacttccaggctatttctacggccattaaaacgaggtctccaaagaatgatgactatgtgggaatgcttacatgtaatattaactttccagaa

SEQ ID NO: 15443 - DNA, 122 bp, Homo sapiens
  misc_feature (61)..(62): /note="This region represents a CpG dinucleotide"
  misc_feature (61)..(61): /note="Nucleotide may be methylated to form 5-methylcytosine"
aatcttattaaactaacctatcaaatctaatcttattaaatcccaaacactggcagggcacggtggctcactcctgtaatcccagcactttgggaggtcgaggcaggtggatcacctgaggt

SEQ ID NO: 15444 - DNA, 122 bp, Homo sapiens
  misc_feature (61)..(62): /note="This region represents a CpG dinucleotide"
  misc_feature (61)..(61): /note="Nucleotide may be methylated to form 5-methylcytosine"
aaaccacagggcctactccagcacataatgggcctattgtgaagcagtggaagtcaagttcgtctacagaagtttaatcatggccctaggaggaagttcaagtttaaaaagggtcctgttct

SEQ ID NO: 15445 - DNA, 122 bp, Homo sapiens
  misc_feature (61)..(62): /note="This region represents a CpG dinucleotide"
  misc_feature (61)..(61): /note="Nucleotide may be methylated to form 5-methylcytosine"
ctcagtgccatcgggattagagctaatgagttggaagaagttaacaatgcttcgggccagcggaggcccaggagacctctcaggccccgcgttgtggccgcctttcaccactgaggtgtaat

SEQ ID NO: 15446 - DNA, 122 bp, Homo sapiens
  misc_feature (61)..(62): /note="This region represents a CpG dinucleotide"
  misc_feature (61)..(61): /note="Nucleotide may be methylated to form 5-methylcytosine"
ctgctaaatgggcagggtgcggccctggggcagccattttgcctagcccaagggatagcacgtgcaaagtaggagagagatgaagataaaacagtacctaacgtgccaaggttataggcacc

SEQ ID NO: 15447 - DNA, 122 bp, Homo sapiens
  misc_feature (61)..(62): /note="This region represents a CpG dinucleotide"
  misc_feature (61)..(61): /note="Nucleotide may be methylated to form 5-methylcytosine"
agccagagcgtcttggcagttctcagcaccttgacatcacttccttgctaccactcagagcggcagtgacacagttcccttatctcagaaggccagaagacggctgtcaaaggtcacaggga

SEQ ID NO: 15448 - DNA, 122 bp, Homo sapiens
  misc_feature (61)..(62): /note="This region represents a CpG dinucleotide"
  misc_feature (61)..(61): /note="Nucleotide may be methylated to form 5-methylcytosine"
agaagagtcagatactattatctccaagttttgctccaaaatatgagctctgaaagtgaacgtgaggacccatttccatctgtcccctaccccattctactcccaggtataagttgcttacc

SEQ ID NO: 15449 - DNA, 122 bp, Homo sapiens
  misc_feature (61)..(62): /note="This region represents a CpG dinucleotide"
  misc_feature (61)..(61): /note="Nucleotide may be methylated to form 5-methylcytosine"
ctagaatccagagatgactcgcaggttccatctgagttccttaaaggacagtttctgcaacgtaggtgttccatgattgcttgttgaatgaatgaataggagtatctatcacaaccatgtcc

SEQ ID NO: 15450 - DNA, 122 bp, Homo sapiens
  misc_feature (61)..(62): /note="This region represents a CpG dinucleotide"
  misc_feature (61)..(61): /note="Nucleotide may be methylated to form 5-methylcytosine"
ctcaggtgatccacccacctcggcctcccaaagtgctgggattacaggcgtgagccactgcgcctggcctactagggtgagtttctaaggcaggagctgagagtagacatggctagtagggt

SEQ ID NO: 15451 - DNA, 122 bp, Homo sapiens
  misc_feature (61)..(62): /note="This region represents a CpG dinucleotide"
  misc_feature (61)..(61): /note="Nucleotide may be methylated to form 5-methylcytosine"
aggcaccgcagctccgccacccttgtctggagcagaatcctgtgatcagaatggtaatctcgggttaccccacccaagtcaggatggcctgggagtacagataagggaagaggaagccatta

SEQ ID NO: 15452 - DNA, 122 bp, Homo sapiens
  misc_feature (61)..(62): /note="This region represents a CpG dinucleotide"
  misc_feature (61)..(61): /note="Nucleotide may be methylated to form 5-methylcytosine"
cgcagcagggccagccccggcggctggaaggcggcggctgggcctggacgtgggtgtgggcgcccccggcctccccccgcccccgcaggcgccccccacccccctagcaggcgccccggtcc

SEQ ID NO: 15453 - DNA, 122 bp, Homo sapiens
  misc_feature (61)..(62): /note="This region represents a CpG dinucleotide"
  misc_feature (61)..(61): /note="Nucleotide may be methylated to form 5-methylcytosine"
gttttttgctgtttctaaaaatcaattccatcttcggtggacggagatttcctgtcactacggcttttcaaaagcatgtactcccgattcttagggtagttcccagcaggcgattacagctg

SEQ ID NO: 15454 - DNA, 122 bp, Homo sapiens
  misc_feature (61)..(62): /note="This region represents a CpG dinucleotide"
  misc_feature (61)..(61): /note="Nucleotide may be methylated to form 5-methylcytosine"
gagccagatattaaatatcaggaactacttgtttttctttttcttaatttgagacagtctcgctctgttgcccaggctggagtgcagtggcgcgatcttggctcactgcaacttccacctcc

SEQ ID NO: 15455 - DNA, 122 bp, Homo sapiens
  misc_feature (61)..(62): /note="This region represents a CpG dinucleotide"
  misc_feature (61)..(61): /note="Nucleotide may be methylated to form 5-methylcytosine"
ccgcggggggaggcgggcaggggcccatgcccagggtcagatactatgcaggtaagtgtccgacagcaggaagtgtggggatagcaatagagagctggaggtgggtggaggaaggagagagg

SEQ ID NO: 15456 - DNA, 122 bp, Homo sapiens
  misc_feature (61)..(62): /note="This region represents a CpG dinucleotide"
  misc_feature (61)..(61): /note="Nucleotide may be methylated to form 5-methylcytosine"
ccttcttcatttactcagatctcaacaaattctgacctttggtctgtgacagtattttcacgtgctcccgctgctctgtctacttctcctacaagtcttttgtaagcatgatgtcattccaa

SEQ ID NO: 15457 - DNA, 122 bp, Homo sapiens
  misc_feature (61)..(62): /note="This region represents a CpG dinucleotide"
  misc_feature (61)..(61): /note="Nucleotide may be methylated to form 5-methylcytosine"
tgtgtgtgagtgaatttttcagagctcagctttctagagggtggagcagtgtctgtcacacgggcttctcatagctcaaactgtcatccctgctttagctcatctcttcctaattgttctct

SEQ ID NO: 15458 - DNA, 122 bp, Homo sapiens
  misc_feature (61)..(62): /note="This region represents a CpG dinucleotide"
  misc_feature (61)..(61): /note="Nucleotide may be methylated to form 5-methylcytosine"
ccatagtagagaaatggactaagggctttaatccctgagtttctgagctgtcgaattgtccgaatatttctcatcatattcagcagttctgtatgagctgaatgagtcagcaggacctaagg

SEQ ID NO: 15459 - DNA, 122 bp, Homo sapiens
  misc_feature (61)..(62): /note="This region represents a CpG dinucleotide"
  misc_feature (61)..(61): /note="Nucleotide may be methylated to form 5-methylcytosine"
ctaaaagctttttgggttaaggacatggtcattccatgttacagcttattttttcctaatcgaaatccccaaatgatcaatttcctagtcttcttccatgctttttctccactgcactatca

SEQ ID NO: 15460 - DNA, 122 bp, Homo sapiens
  misc_feature (61)..(62): /note="This region represents a CpG dinucleotide"
  misc_feature (61)..(61): /note="Nucleotide may be methylated to form 5-methylcytosine"
ttatctcctgtgattcaatggtggaagtaataatattagcagttaaaattttctaagacacgatcaggaaaaggagacttcggtcgttctgcttcttgttaagaacagctggcaatttaaaa

SEQ ID NO: 15461 - DNA, 122 bp, Homo sapiens
  misc_feature (61)..(62): /note="This region represents a CpG dinucleotide"
  misc_feature (61)..(61): /note="Nucleotide may be methylated to form 5-methylcytosine"
ctcacctctggcaggctgtcaggaaatgagaggttacggcacctgcaaagaacagccaagcgcttagatttgtgactcagctggagtcatctcaggagctgacccagcccatgtcctggctc

SEQ ID NO: 15462 - DNA, 122 bp, Homo sapiens
  misc_feature (61)..(62): /note="This region represents a CpG dinucleotide"
  misc_feature (61)..(61): /note="Nucleotide may be methylated to form 5-methylcytosine"
tatctcaaatgtgaggcaaatagctaatggtgtttgtgtatacgaggaaggtggagtcaccggttcttcgtggccatcagaggaccgacacgcccataggtctcatgcattaagtctgcgtt

SEQ ID NO: 15463 - DNA, 122 bp, Homo sapiens
  misc_feature (61)..(62): /note="This region represents a CpG dinucleotide"
  misc_feature (61)..(61): /note="Nucleotide may be methylated to form 5-methylcytosine"
ctgtcgactcccgctggaataatcaatctatcaaaacaacccattgatcctgaggcaaaccgctttcaaaaccaccacatagttcctggacgtcctggcttcctcatgacacttggggaaga

SEQ ID NO: 15464 - DNA, 122 bp, Homo sapiens
  misc_feature (61)..(62): /note="This region represents a CpG dinucleotide"
  misc_feature (61)..(61): /note="Nucleotide may be methylated to form 5-methylcytosine"
tgatgctaatttttcatttcctgggcctgccattccatccaaatcacattttgctcagcacgcttcttaacaaaacagatccagttgattggtgacttttaagtgaggaagctttctgattt

SEQ ID NO: 15465 - DNA, 122 bp, Homo sapiens
  misc_feature (61)..(62): /note="This region represents a CpG dinucleotide"
  misc_feature (61)..(61): /note="Nucleotide may be methylated to form 5-methylcytosine"
cagagccccacccttccatcaccaccctccgccaacgcacccctgggtgctggcataacacgcaagcttcacagatggcttttctcagctgaagcccagtccctgctgccaccacccggccg

SEQ ID NO: 15466 - DNA, 122 bp, Homo sapiens
  misc_feature (61)..(62): /note="This region represents a CpG dinucleotide"
  misc_feature (61)..(61): /note="Nucleotide may be methylated to form 5-methylcytosine"
acctgcaccccagatgaaaatgtacccaaatgcatcgttcatgctgggaaacctctggaacgtaatgggaggaaggatcgggcgagccctgtccggctcctgttcttacactctcgtgcctg

SEQ ID NO: 15467 - DNA, 122 bp, Homo sapiens
  misc_feature (61)..(62): /note="This region represents a CpG dinucleotide"
  misc_feature (61)..(61): /note="Nucleotide may be methylated to form 5-methylcytosine"
ctccctgcaaggtgagtcagctcccagaagccccagggcctggtccggctgtcctggccccggcctcatgccctgcactaggtggaagacaggatctccagggaacccggctgctttgggcc

SEQ ID NO: 15468 - DNA, 122 bp, Homo sapiens
  misc_feature (61)..(62): /note="This region represents a CpG dinucleotide"
  misc_feature (61)..(61): /note="Nucleotide may be methylated to form 5-methylcytosine"
ggaagagaaatgcaaaagcagctgcagaatcctgccccttccaccccaaggggcacagcccggagatgaagcttattttaggatcacaagtgcacgctctggtagacggaggatgactttgt

SEQ ID NO: 15469 - DNA, 122 bp, Homo sapiens
  misc_feature (61)..(62): /note="This region represents a CpG dinucleotide"
  misc_feature (61)..(61): /note="Nucleotide may be methylated to form 5-methylcytosine"
acacataattacagtcagcacaactgcattcaatgtcagccatttctatcagctctttctcgttctttgatcttaattacatgaacaagtagcagaccatgagccttagaggcctgtggacc

SEQ ID NO: 15470 - DNA, 122 bp, Homo sapiens
  misc_feature (61)..(62): /note="This region represents a CpG dinucleotide"
  misc_feature (61)..(61): /note="Nucleotide may be methylated to form 5-methylcytosine"
gcatgagaggtaatattcgctcttcctggctgcctcaaaccatagtcaggattataaagacgcatgaatcagagatggcagcctataacaaaagctttacctccagctgttttgctcatttt

SEQ ID NO: 15471 - DNA, 122 bp, Homo sapiens
  misc_feature (61)..(62): /note="This region represents a CpG dinucleotide"
  misc_feature (61)..(61): /note="Nucleotide may be methylated to form 5-methylcytosine"
ccgcaagatttcttaagtaaaacacacacaaaacctaaccataggccgggtgcagtggctcgtatctgtaatcccagcacttcaggaggcttaagtgtgaggattgcatgagcccaggagtt

SEQ ID NO: 15472 - DNA, 122 bp, Homo sapiens
  misc_feature (61)..(62): /note="This region represents a CpG dinucleotide"
  misc_feature (61)..(61): /note="Nucleotide may be methylated to form 5-methylcytosine"
agtggctttgggggaggcctgggtcaacctgggcatccttgtgttgcagacaggcgagggcgtgaacgatgtgcggaagggagcctgtgccagccacgtcagcaccatggccagcttcctga

SEQ ID NO: 15473 - DNA, 122 bp, Homo sapiens
  misc_feature (61)..(62): /note="This region represents a CpG dinucleotide"
  misc_feature (61)..(61): /note="Nucleotide may be methylated to form 5-methylcytosine"
gcacatgtgtcaatattctcaacagtggagcagttagggttaaccctaggcagagttcatcgttggtgcactccctgttccccgaaatactacatttccattctttattcaaccatttcttt

SEQ ID NO: 15474 - DNA, 122 bp, Homo sapiens
  misc_feature (61)..(62): /note="This region represents a CpG dinucleotide"
  misc_feature (61)..(61): /note="Nucleotide may be methylated to form 5-methylcytosine"
ctcactcttcttgtcagcttctctgaagttactagccctggacaaccccttgtggtttcccggcactccggtcagtttcctgttggaacactaaccaaaacactgccagtgcataagtgaca

SEQ ID NO: 15475 - DNA, 122 bp, Homo sapiens
  misc_feature (61)..(62): /note="This region represents a CpG dinucleotide"
  misc_feature (61)..(61): /note="Nucleotide may be methylated to form 5-methylcytosine"
tgaagtcaaagcgagtcacttcttggtggccgtactgctggatgctgatgagctggccctcgtataccacaccaggcttcaggcctttgatggtgtaggagtttaagtggcctggtatggta

SEQ ID NO: 15476 - DNA, 122 bp, Homo sapiens
  misc_feature (61)..(62): /note="This region represents a CpG dinucleotide"
  misc_feature (61)..(61): /note="Nucleotide may be methylated to form 5-methylcytosine"
agacagaacctggatccttgattatgtgatagatccactcaattaccctccctagacccacggtccctagggacttttctcaggaaatgaaaacttcctgtattgtctaaaccattttgaat

SEQ ID NO: 15477 - DNA, 122 bp, Homo sapiens
  misc_feature (61)..(62): /note="This region represents a CpG dinucleotide"
  misc_feature (61)..(61): /note="Nucleotide may be methylated to form 5-methylcytosine"
gcaggatgagctaatccgtggtcagatgctcttggatcaaagattcatgctgaaaccagccgtcagagcaaagaagccaagttcatggatgaaaaaaaaatgaggctgggaagcacaatgca

SEQ ID NO: 15478 - DNA, 122 bp, Homo sapiens
  misc_feature (61)..(62): /note="This region represents a CpG dinucleotide"
  misc_feature (61)..(61): /note="Nucleotide may be methylated to form 5-methylcytosine"
cgacattcctaaacttaagtgtttctttcttccttctcctcttattaatatttcagcacgcgtgttcagtaacaccaaacggtggttccctttcaagaggaagtgagaaagaggaaatgtac

SEQ ID NO: 15479 - DNA, 122 bp, Homo sapiens
  misc_feature (61)..(62): /note="This region represents a CpG dinucleotide"
  misc_feature (61)..(61): /note="Nucleotide may be methylated to form 5-methylcytosine"
cagtgccagcagaaaactactacacattgaatcctgacagctgaatacgtccttggaacacgtttacaatcctttatgtagaaatgtatcctttaaagaataaggaaggtgcgtgcattcta

SEQ ID NO: 15480 - DNA, 122 bp, Homo sapiens
  misc_feature (61)..(62): /note="This region represents a CpG dinucleotide"
  misc_feature (61)..(61): /note="Nucleotide may be methylated to form 5-methylcytosine"
attgctgggtcaaatggcatttctacaagagatgaatacttttttattcctttaccatagcgtgtcaggagagagagaagatgcaagtgggtggtcagtcagccaaatgtaactgtaggtcc

SEQ ID NO: 15481 - DNA, 122 bp, Homo sapiens
  misc_feature (61)..(62): /note="This region represents a CpG dinucleotide"
  misc_feature (61)..(61): /note="Nucleotide may be methylated to form 5-methylcytosine"
gctggacttggaaccatatgacctgagttttactttctgctctgccctgggccacattttcgtcttaatatttcatgttttaaaggcataatgatgtcactgactggctgatgaaatcccaa

SEQ ID NO: 15482 - DNA, 122 bp, Homo sapiens
  misc_feature (61)..(62): /note="This region represents a CpG dinucleotide"
  misc_feature (61)..(61): /note="Nucleotide may be methylated to form 5-methylcytosine"
agagactccagtgcagccgtgtggtggaggaagattcatacacacaaaaaagggaagtgacgtaaggaaatcggaagtgagatacagaaacaactggattggttacagctcatcctttgcct

SEQ ID NO: 15483 - DNA, 122 bp, Homo sapiens
  misc_feature (61)..(62): /note="This region represents a CpG dinucleotide"
  misc_feature (61)..(61): /note="Nucleotide may be methylated to form 5-methylcytosine"
actacagcccatcttcttcttctagagctaccaagggattaatagcatatcacacctaggcgtgctatggtgggaagcagaatgccaggggaacgtgtacttcattcaagtcattgcaaatt

SEQ ID NO: 15484 - DNA, 122 bp, Homo sapiens
  misc_feature (61)..(62): /note="This region represents a CpG dinucleotide"
  misc_feature (61)..(61): /note="Nucleotide may be methylated to form 5-methylcytosine"
cctgaaacctcccaggcagggaatcacctcttcacacacagtttgcatctctgcagttgacggcaggagcaaaaaatgtggccagccaggttggaagggtgacaactgatggaggcatggaa

SEQ ID NO: 15485 - DNA, 122 bp, Homo sapiens
  misc_feature (61)..(62): /note="This region represents a CpG dinucleotide"
  misc_feature (61)..(61): /note="Nucleotide may be methylated to form 5-methylcytosine"
cttggacaagtcattgaccctgtcttcttggaaagacgtggatctcagaatccttcacaacgctttgctcctgatagctagtacctgttcagcagagtcggcacaagctcacacagcccttg

SEQ ID NO: 15486 - DNA, 122 bp, Homo sapiens
  misc_feature (61)..(62): /note="This region represents a CpG dinucleotide"
  misc_feature (61)..(61): /note="Nucleotide may be methylated to form 5-methylcytosine"
gtcccagcaactagggaggatgaagtgggaggattgcttgagcctgggaggtcgaggctgcggtgagctgtgatagcaccattgcacaatctaaactgggccacagagcaagacctcgtctc

SEQ ID NO: 15487 - DNA, 122 bp, Homo sapiens
  misc_feature (61)..(62): /note="This region represents a CpG dinucleotide"
  misc_feature (61)..(61): /note="Nucleotide may be methylated to form 5-methylcytosine"
tgaatgagcatgttgtaagtagaatgtataattttgttagtgtacccctcagaggttggccgatgagtagcagcaatgcagtaacaatataaagctgtcacttggtggagctagaatactat

SEQ ID NO: 15488 - DNA, 122 bp, Homo sapiens
  misc_feature (61)..(62): /note="This region represents a CpG dinucleotide"
  misc_feature (61)..(61): /note="Nucleotide may be methylated to form 5-methylcytosine"
ccccacccctcccccttgatactcctgggctcagttacacactcctgctttcagtagaagcggtatttccactgaaggcagcttcatccagccagtcatggagggaggagtgcttttctgtg

SEQ ID NO: 15489 - DNA, 122 bp, Homo sapiens
  misc_feature (61)..(62): /note="This region represents a CpG dinucleotide"
  misc_feature (61)..(61): /note="Nucleotide may be methylated to form 5-methylcytosine"
accccaggggtgtagtgatacctcatggcccagggcttcagccattcaaaaacagacattcgccatgattcatactgttagcataaactatctcgtcaaactaacaaaatgcagcccaaggc

SEQ ID NO: 15490 - DNA, 122 bp, Homo sapiens
  misc_feature (61)..(62): /note="This region represents a CpG dinucleotide"
  misc_feature (61)..(61): /note="Nucleotide may be methylated to form 5-methylcytosine"
caaaaataaagaatttgggttctgtccaaacactggcagcagagggagtgaccgccaccacggcaccagggcacaccaacaacacagacagaagcggcaatgcatctcacgtgccgcgtggg

SEQ ID NO: 15491 - DNA, 122 bp, Homo sapiens
  misc_feature (61)..(62): /note="This region represents a CpG dinucleotide"
  misc_feature (61)..(61): /note="Nucleotide may be methylated to form 5-methylcytosine"
agttttcctaaaacataagcacactggttaagccagcaggttaactctgtggctctgacacgcccagtgtgcattcctgaccctgacacatcacacaagctgatgcctccccggacactcct

SEQ ID NO: 15492 - DNA, 122 bp, Homo sapiens
  misc_feature (61)..(62): /note="This region represents a CpG dinucleotide"
  misc_feature (61)..(61): /note="Nucleotide may be methylated to form 5-methylcytosine"
tttactgtcaaatagtcaattccacaggtgagttttgccagtttctcctagacactagcacgttgaaattgatttgaattgttctttttaataggaaagtaattgaagcagtaattaatgta

SEQ ID NO: 15493 - DNA, 122 bp, Homo sapiens
  misc_feature (61)..(62): /note="This region represents a CpG dinucleotide"
  misc_feature (61)..(61): /note="Nucleotide may be methylated to form 5-methylcytosine"
cagatattccggcctcgagaacagctcatgctgagagccaacagcctgaagaaagcaattcgtcagatcatagaacacacagaaaaaggtaactggccttgtgatgaggaggggctttcctc

SEQ ID NO: 15494 - DNA, 122 bp, Homo sapiens
  misc_feature (61)..(62): /note="This region represents a CpG dinucleotide"
  misc_feature (61)..(61): /note="Nucleotide may be methylated to form 5-methylcytosine"
acaaaatcaaccttaagaaccctgtttcctaatgtggaaaggatcaacaaagacctccagcgatgcgtcactcttgctgccggtcgctgccaagcccagccacccagctagcgggacgcaca

SEQ ID NO: 15495 - DNA, 122 bp, Homo sapiens
  misc_feature (61)..(62): /note="This region represents a CpG dinucleotide"
  misc_feature (61)..(61): /note="Nucleotide may be methylated to form 5-methylcytosine"
tgataatgaaacagtgattttttttttttttttttttttttttgtattggcctggaaatacggccagtctcaggaagtgactgccattgacaaagccaatttcccatcctcccttgcagtga

SEQ ID NO: 15496 - DNA, 122 bp, Homo sapiens
  misc_feature (61)..(62): /note="This region represents a CpG dinucleotide"
  misc_feature (61)..(61): /note="Nucleotide may be methylated to form 5-methylcytosine"
ggcgcgggcctgttctgtgagggagaaaacaagcgtcctatttaccacgagaatgaatatcgggctctgtgtgaaaatcccacttgctctgagatgtgtgaagccagcagggccagggacgc

SEQ ID NO: 15497 - DNA, 122 bp, Homo sapiens
  misc_feature (61)..(62): /note="This region represents a CpG dinucleotide"
  misc_feature (61)..(61): /note="Nucleotide may be methylated to form 5-methylcytosine"
atctgtgtcccccactctactgccaacacagtggtaggaagggaaggcggcaggcttaggcgaggtcctgcaggctggacaggatctgtcaccattacttagcccaggcccatctctttact

SEQ ID NO: 15498 - DNA, 122 bp, Homo sapiens
  misc_feature (61)..(62): /note="This region represents a CpG dinucleotide"
  misc_feature (61)..(61): /note="Nucleotide may be methylated to form 5-methylcytosine"
gacgtagctcacatatcatatgatccctccccttccagtggacacgtccatggctttcagcgtgtttatagatgggcaacatccccacgggcccttttagaacattcgcttcacctcagaaa

SEQ ID NO: 15499 - DNA, 122 bp, Homo sapiens
  misc_feature (61)..(62): /note="This region represents a CpG dinucleotide"
  misc_feature (61)..(61): /note="Nucleotide may be methylated to form 5-methylcytosine"
ccagcaaatgtgccatcttcagccactggaggtcatctgctgaaatttcattgcccagttcgtatcagatgcaatcagaatttgtttgatgacaaaaacacttatcagctagtctgtcagtg

SEQ ID NO: 15500 - DNA, 122 bp, Homo sapiens
  misc_feature (61)..(62): /note="This region represents a CpG dinucleotide"
  misc_feature (61)..(61): /note="Nucleotide may be methylated to form 5-methylcytosine"
aaggatggcggaggagttttccttggaagtcattatagaacgaatgtgcttgcgcacgtgcgtccatccccgcacacagtcggccacactcaccttacagaaagccagcagcgcggccccat

SEQ ID NO: 15501 - DNA, 122 bp, Homo sapiens
  misc_feature (61)..(62): /note="This region represents a CpG dinucleotide"
  misc_feature (61)..(61): /note="Nucleotide may be methylated to form 5-methylcytosine"
aagctatgcgctttggaaaaagaagaggttggtttgaaatgagatttttgtcagtctggccgtccttagtgaaacactgaggctgttctgaagagctgtcagaatctcagttgctggcatcc

SEQ ID NO: 15502 - DNA, 122 bp, Homo sapiens
  misc_feature (61)..(62): /note="This region represents a CpG dinucleotide"
  misc_feature (61)..(61): /note="Nucleotide may be methylated to form 5-methylcytosine"
tatctcagaaaaaaaaaaaccaccatagatctctttaaaaccacttacaatgtaagcattcggacatggttttacctttcccgagtataaaaatgtgttaggaacacagaaagcttaaaata

SEQ ID NO: 15503 - DNA, 122 bp, Homo sapiens
  misc_feature (61)..(62): /note="This region represents a CpG dinucleotide"
  misc_feature (61)..(61): /note="Nucleotide may be methylated to form 5-methylcytosine"
cctggttgcacataaacattacgcaacagtaaactagtacttttatgtcactgcacacatcgctgcctacactgaactcactaaatcacagataagagggcacttgtacagtggggatggca

SEQ ID NO: 15504 - DNA, 122 bp, Homo sapiens
  misc_feature (61)..(62): /note="This region represents a CpG dinucleotide"
  misc_feature (61)..(61): /note="Nucleotide may be methylated to form 5-methylcytosine"
ctcgagtgcatccactccgcgagccacgggcggcgcctgcccacccgcggctcggctttgcgtgttgtaagccgactattctatcaccattgcaggataagctggcctttaaattttcaaag

SEQ ID NO: 15505 - DNA, 122 bp, Homo sapiens
  misc_feature (61)..(62): /note="This region represents a CpG dinucleotide"
  misc_feature (61)..(61): /note="Nucleotide may be methylated to form 5-methylcytosine"
gagcctcacattgtccctctccccatcccacacacagcccaattctcacaacccctcctgcgaggcctgctccccacgcccctactcctgggcccctctcgggtctccttctcatgctccgt

SEQ ID NO: 15506 - DNA, 122 bp, Homo sapiens
  misc_feature (61)..(62): /note="This region represents a CpG dinucleotide"
  misc_feature (61)..(61): /note="Nucleotide may be methylated to form 5-methylcytosine"
cagtgtgcttgttgagctggattgcacctgggatcacacctggagcaggttacgtaaccacgtaggagttttcctacctgggaaatgaagctcataagctctgcctacctcacaggttcctg

SEQ ID NO: 15507 - DNA, 122 bp, Homo sapiens
  misc_feature (61)..(62): /note="This region represents a CpG dinucleotide"
  misc_feature (61)..(61): /note="Nucleotide may be methylated to form 5-methylcytosine"
acaggggcgatttcagagccagtggggctgtgcaggggcagaaggtgcaggggcaaaggacggatgtggctggttattagaaaaaaaaagacatggcaggcaggtctgagtgcaatggtgtt

SEQ ID NO: 15508 - DNA, 122 bp, Homo sapiens
  misc_feature (61)..(62): /note="This region represents a CpG dinucleotide"
  misc_feature (61)..(61): /note="Nucleotide may be methylated to form 5-methylcytosine"
tcaaagccctcaaaatcatctttggagaaaggcacagactagcgactgtttctgtgatttcgtgtctttttacttccagacatgtccttaaccttggcacaacaaatctctaaatcgattga

SEQ ID NO: 15509 - DNA, 122 bp, Homo sapiens
  misc_feature (61)..(62): /note="This region represents a CpG dinucleotide"
  misc_feature (61)..(61): /note="Nucleotide may be methylated to form 5-methylcytosine"
caaacagagagcttgtacaggagaactcctccttttccaaaaccatcagataccttgagacgtattcactatcatgagaacagcactggaaagaccttcccccatgattcaattacttccca

SEQ ID NO: 15510 - DNA, 122 bp, Homo sapiens
  misc_feature (61)..(62): /note="This region represents a CpG dinucleotide"
  misc_feature (61)..(61): /note="Nucleotide may be methylated to form 5-methylcytosine"
agtcagtagatgacagattgtggtctgcaaggctttgcatctgtccaggcctcagatctacgcaagtagcttgtacagaaggggattagagctttgtttgctctccagtttagatgccttaa

SEQ ID NO: 15511 - DNA, 122 bp, Homo sapiens
  misc_feature (61)..(62): /note="This region represents a CpG dinucleotide"
  misc_feature (61)..(61): /note="Nucleotide may be methylated to form 5-methylcytosine"
gaacaaataataacaataacagaagggtaaattagtctcgtagatatgagagagagtgagcgagctccaacactgtaactagcaggcacctgagtggttctggacaaattccatatgccaca

SEQ ID NO: 15512 - DNA, 122 bp, Homo sapiens
  misc_feature (61)..(62): /note="This region represents a CpG dinucleotide"
  misc_feature (61)..(61): /note="Nucleotide may be methylated to form 5-methylcytosine"
cctaatctgatttcctcctctttacataaagatctcttggtggccaggcgtggtggctcacgcctgtaatcctagcactttgggaagccgaggcgggtggatcacttgaggtcaggaattcg

SEQ ID NO: 15513 - DNA, 122 bp, Homo sapiens
  misc_feature (61)..(62): /note="This region represents a CpG dinucleotide"
  misc_feature (61)..(61): /note="Nucleotide may be methylated to form 5-methylcytosine"
actcaagcaattcaatgtagctctgatatgctggagaacaatctagcagttagctatcagcggtggtgtggttccttttaagcaaaggtagcttgtagtcttcagacttgtgacctgtgcag

SEQ ID NO: 15514 - DNA, 122 bp, Homo sapiens
  misc_feature (61)..(62): /note="This region represents a CpG dinucleotide"
  misc_feature (61)..(61): /note="Nucleotide may be methylated to form 5-methylcytosine"
tgtttgtgtcttcaacatctggtacagtgcctggcacagtgtttctcaaatgactagatccgttaatgagcatgctattacactgaaatttagtagtgacaaatttatctaattgtacatcc

SEQ ID NO: 15515 - DNA, 122 bp, Homo sapiens
  misc_feature (61)..(62): /note="This region represents a CpG dinucleotide"
  misc_feature (61)..(61): /note="Nucleotide may be methylated to form 5-methylcytosine"
tcatcacttatggataggtttccacttcccagtcacttgaaggtaaacatgcttacgtggcgactttttcttttccctcccgagtgtggtttgtggtagaatttgagggaaatataaatgag

SEQ ID NO: 15516 - DNA, 122 bp, Homo sapiens
  misc_feature (61)..(62): /note="This region represents a CpG dinucleotide"
  misc_feature (61)..(61): /note="Nucleotide may be methylated to form 5-methylcytosine"
caaccccaaccagagtgacctgattgagcaggcagccgagatgctttatggattgatccacgcccgctacatccttaccaaccgtggcatcgcccagatggtgaggcctctctgctcctacc

SEQ ID NO: 15517 - DNA, 122 bp, Homo sapiens
  misc_feature (61)..(62): /note="This region represents a CpG dinucleotide"
  misc_feature (61)..(61): /note="Nucleotide may be methylated to form 5-methylcytosine"
gcctgtgcatctagaacagctatgaaacatccttgggagatttgagaaaatccctcaaaacgtgttctgagttttatggttcagaggagaaccacagattgtgaaagtctctgagtagaatt

SEQ ID NO: 15518 - DNA, 122 bp, Homo sapiens
  misc_feature (61)..(62): /note="This region represents a CpG dinucleotide"
  misc_feature (61)..(61): /note="Nucleotide may be methylated to form 5-methylcytosine"
ccaattccacaatttcaatgtcccacagccacagacttgcatataaaagctaaaaccaaacgatggctttaatcctacagaagagcgctacagcatcagttattcaatcccaattcacagca

SEQ ID NO: 15519 - DNA, 122 bp, Homo sapiens
  misc_feature (61)..(62): /note="This region represents a CpG dinucleotide"
  misc_feature (61)..(61): /note="Nucleotide may be methylated to form 5-methylcytosine"
ggacacattattattaactaaaatccactttcttcacttttactgcctttttctgttccacgatcccatccagatgccacattacatttagttgtccttgttattttttattagtcatagtc

SEQ ID NO: 15520 - DNA, 122 bp, Homo sapiens
  misc_feature (61)..(62): /note="This region represents a CpG dinucleotide"
  misc_feature (61)..(61): /note="Nucleotide may be methylated to form 5-methylcytosine"
tgtccagctcaacgtgggcggctctctgtactacaccactgtgcgggccctgacccgccacgacaccatgctcaaggccatgttcagtgggcgcatggaggtgctgaccgacaaagaaggtg

SEQ ID NO: 15521 - DNA, 122 bp, Homo sapiens
  misc_feature (61)..(62): /note="This region represents a CpG dinucleotide"
  misc_feature (61)..(61): /note="Nucleotide may be methylated to form 5-methylcytosine"
cgctctctcgctctctctctcgctctcattttgtggtcttcgatgtactaatgtgctgggcgaagcaacctttactgagaacagttgttatggaagctccagttgtctgtcagttaattatt

SEQ ID NO: 15522 - DNA, 122 bp, Homo sapiens
  misc_feature (61)..(62): /note="This region represents a CpG dinucleotide"
  misc_feature (61)..(61): /note="Nucleotide may be methylated to form 5-methylcytosine"
ccagggaaccctcccctctccccggcagtgtcccctcctcctccctcttcccctctcctccgaaaaggtggccatgtaaacaggaagtggctcaaagacatagagggagtgtggctggaagc

SEQ ID NO: 15523 - DNA, 122 bp, Homo sapiens
  misc_feature (61)..(62): /note="This region represents a CpG dinucleotide"
  misc_feature (61)..(61): /note="Nucleotide may be methylated to form 5-methylcytosine"
gtcgggggcctgtttcattctacttaagattccacaaggcacagacagcagcaactcgtgcgttatttttccctctagaatttccaggacgtcgaggagacgctgtgcagcaagttctgtca

SEQ ID NO: 15524 - DNA, 122 bp, Homo sapiens
  misc_feature (61)..(62): /note="This region represents a CpG dinucleotide"
  misc_feature (61)..(61): /note="Nucleotide may be methylated to form 5-methylcytosine"
cttcattttcaaattactataatatttaacatgccttttcagactatatatgtgacaccccgatgaataagaagagcagccagctgagaaggggaactctacaaagctattttttcaacagc

SEQ ID NO: 15525 - DNA, 122 bp, Homo sapiens
  misc_feature (61)..(62): /note="This region represents a CpG dinucleotide"
  misc_feature (61)..(61): /note="Nucleotide may be methylated to form 5-methylcytosine"
tcacttgtatcaccaactgctcatcagtaaacctcatatctctagaataatctctgctgtcgtatttgtatttctagcatatactatgatgtctgacttagtagcttcataaaaatctattg

SEQ ID NO: 15526 - DNA, 122 bp, Homo sapiens
  misc_feature (61)..(62): /note="This region represents a CpG dinucleotide"
  misc_feature (61)..(61): /note="Nucleotide may be methylated to form 5-methylcytosine"
ctgagttccgcctttccttcctcacacattccatttgcagcttcctgctaagtcagacggcgatattgggcaacagcaaatcaaacttgacccaagtgcttctccccagggaatgtgagaag

SEQ ID NO: 15527 - DNA, 122 bp, Homo sapiens
  misc_feature (61)..(62): /note="This region represents a CpG dinucleotide"
  misc_feature (61)..(61): /note="Nucleotide may be methylated to form 5-methylcytosine"
gaacatccttttaagttaaaaatggaaaaaccaaggccattttgggacaactgtttttaacgttaatgcatcacaatacaggaaaatactggaggtgagcaggttatttgcctgagtcattt

SEQ ID NO: 15528 - DNA, 122 bp, Homo sapiens
  misc_feature (61)..(62): /note="This region represents a CpG dinucleotide"
  misc_feature (61)..(61): /note="Nucleotide may be methylated to form 5-methylcytosine"
gggagcctgatcattgtaaattacctgtgacatctcattaatcctctttttcctcacaaacgcataattaatggtaacattgacaataatacacaaattagctaagtgacgctttatggtgt

SEQ ID NO: 15529 - DNA, 122 bp, Homo sapiens
  misc_feature (61)..(62): /note="This region represents a CpG dinucleotide"
  misc_feature (61)..(61): /note="Nucleotide may be methylated to form 5-methylcytosine"
cgatgccctcccctcttaatgctattttagcttttcctcttgtaaatttcagagccagctcgaaggttattgaggacacttatccgaaagaggcaaataatagaggtgctgagagtgttttt

SEQ ID NO: 15530 - DNA, 122 bp, Homo sapiens
  misc_feature (61)..(62): /note="This region represents a CpG dinucleotide"
  misc_feature (61)..(61): /note="Nucleotide may be methylated to form 5-methylcytosine"
gtgaactctagtcccagtttcttattcctggtactggcttagtttgaggcagctgcccaccgttaagtccagtgagccatggcctggggacaaggtcaggtacatgtgtaatcagctgggtc

SEQ ID NO: 15531 - DNA, 122 bp, Homo sapiens
  misc_feature (61)..(62): /note="This region represents a CpG dinucleotide"
  misc_feature (61)..(61): /note="Nucleotide may be methylated to form 5-methylcytosine"
atatattttattgtctttagatatccagtactacaacataatgtcttccacaaagtgtttcgagtcctgctatagctgtggcttagctcttcttgtgggaacctgtgtgtcttatgttctct

SEQ ID NO: 15532 - DNA, 122 bp, Homo sapiens
  misc_feature (61)..(62): /note="This region represents a CpG dinucleotide"
  misc_feature (61)..(61): /note="Nucleotide may be methylated to form 5-methylcytosine"
cagttccagctcttcaatgcagtgaacatacttcctgatttctcagctgaaatgactgctcgtcctttgcatacctacagcattcttgaatcagctttcaccaccagctcatgggagtcagg

SEQ ID NO: 15533 - DNA, 122 bp, Homo sapiens
  misc_feature (61)..(62): /note="This region represents a CpG dinucleotide"
  misc_feature (61)..(61): /note="Nucleotide may be methylated to form 5-methylcytosine"
tttatagtctgtcaaatagcaacttggatttgtatagctcaggaacttcaatgcataaaacgtgtcagggcatgcaaagaaacaactttaggagaaacaacactgttgtttctttgaagatg

SEQ ID NO: 15534 - DNA, 122 bp, Homo sapiens
  misc_feature (61)..(62): /note="This region represents a CpG dinucleotide"
  misc_feature (61)..(61): /note="Nucleotide may be methylated to form 5-methylcytosine"
tcttcataaccaattccaacgtgttctcacttaagtaatgggtataaaaccccacttaagcgtaatattttaaatatttgaagccatcttttctgagagaacccgaagctgttttttctaga

SEQ ID NO: 15535 - DNA, 122 bp, Homo sapiens
  misc_feature (61)..(62): /note="This region represents a CpG dinucleotide"
  misc_feature (61)..(61): /note="Nucleotide may be methylated to form 5-methylcytosine"
tttcttcctctcctccttccgccgccgggactacggctccgccccccccgccggttcccgcgcccgctcccagcagaacagcgaccgccgcgcgctcccccacttccgctcacaacatggcg

SEQ ID NO: 15536 - DNA, 122 bp, Homo sapiens
  misc_feature (61)..(62): /note="This region represents a CpG dinucleotide"
  misc_feature (61)..(61): /note="Nucleotide may be methylated to form 5-methylcytosine"
cacacggtccttccccttctgtgcctggctgctttcactgaacgtcctgtcttcaaggttcgcccgtgcttagcccgtcacagctctgcccatcttcctggccagatgatatttcatgtcac

SEQ ID NO: 15537 - DNA, 122 bp, Homo sapiens
  misc_feature (61)..(62): /note="This region represents a CpG dinucleotide"
  misc_feature (61)..(61): /note="Nucleotide may be methylated to form 5-methylcytosine"
atacctaccagtttgtggttctgactacatcacctatgggaatgaatgtcacttgtgtaccgagagcttgtgagtacctcataagaagaaaatgagatctggagtcagtgctctctactaca

SEQ ID NO: 15538 - DNA, 122 bp, Homo sapiens
  misc_feature (61)..(62): /note="This region represents a CpG dinucleotide"
  misc_feature (61)..(61): /note="Nucleotide may be methylated to form 5-methylcytosine"
atttatttcatttcatttttggtccaatgcattttgttttctgttttctacaagggagcccgaatcagggcctcagaaaaacaaggccgagctgccaactggaaatgtttgctctgggggcg

SEQ ID NO: 15539 - DNA, 122 bp, Homo sapiens
  misc_feature (61)..(62): /note="This region represents a CpG dinucleotide"
  misc_feature (61)..(61): /note="Nucleotide may be methylated to form 5-methylcytosine"
ctgaaaaggggagaggcattcagccgctgcttttgatgcgctatctatattagaccgatgcgccgttcttaatcaggcctagtccgatttcctttcctctctcggtcggtcctctgaacttt

SEQ ID NO: 15540 - DNA, 122 bp, Homo sapiens
  misc_feature (61)..(62): /note="This region represents a CpG dinucleotide"
  misc_feature (61)..(61): /note="Nucleotide may be methylated to form 5-methylcytosine"
tcagtctcttctgtgcaaccacggtaatcttttgaaagtgcaagtccaatcgtgttttcccgaattaaaaagcttttgctggctgtacatcttcacagaatataccgaatgaaattataggt

SEQ ID NO: 15541 - DNA, 122 bp, Homo sapiens
  misc_feature (61)..(62): /note="This region represents a CpG dinucleotide"
  misc_feature (61)..(61): /note="Nucleotide may be methylated to form 5-methylcytosine"
ttacagttatagcggaaggagaagaaggaccttcttcacatggaggcaagagagagcaagcggggaactgccatacttttaggccatgggaggtggttggagaagattgcatcatgggagag

SEQ ID NO: 15542 - DNA, 122 bp, Homo sapiens
  misc_feature (61)..(62): /note="This region represents a CpG dinucleotide"
  misc_feature (61)..(61): /note="Nucleotide may be methylated to form 5-methylcytosine"
ttggcgcccactgtgctgaccacctcttcatgcagctgcaggtggggtgggctttgaggccggaagccaaaaatgagtaggagcctcctggttgggcgggaagtggggtgaggggggaaggt

SEQ ID NO: 15543 - DNA, 122 bp, Homo sapiens
  misc_feature (61)..(62): /note="This region represents a CpG dinucleotide"
  misc_feature (61)..(61): /note="Nucleotide may be methylated to form 5-methylcytosine"
tagtgatcatgacttattttaggttccttacttgtagaccaatgctgtcactcagctctacgttgagtaatatgtgtatcattcactgcatttattaataagctcctatttacctcacagta

SEQ ID NO: 15544 - DNA, 122 bp, Homo sapiens
  misc_feature (61)..(62): /note="This region represents a CpG dinucleotide"
  misc_feature (61)..(61): /note="Nucleotide may be methylated to form 5-methylcytosine"
atataactgtattttaaagggggaactgtattttaatctgtaccctgggaatgaaaccgacgggaaaagactaactcagtctttgcagatatttattcagtatgagatatctgggttaattc

SEQ ID NO: 15545 - DNA, 122 bp, Homo sapiens
  misc_feature (61)..(62): /note="This region represents a CpG dinucleotide"
  misc_feature (61)..(61): /note="Nucleotide may be methylated to form 5-methylcytosine"
ctgtcatcaggtgacccagggcatcctgtcctggagcccggacatcctttgaaaacaaatcgtggggctcccctaatccccgttgcagaaccaaacagggtgaagggatttggagactcagg

SEQ ID NO: 15546 - DNA, 122 bp, Homo sapiens
  misc_feature (61)..(62): /note="This region represents a CpG dinucleotide"
  misc_feature (61)..(61): /note="Nucleotide may be methylated to form 5-methylcytosine"
tgatttttctttatccgtgattctactcagcccatattttgtacctttgactggttggtccgttttctagtctgcccctttcagtcccagtggaatattcaagcttatagtaaagaatgaaa

SEQ ID NO: 15547 - DNA, 122 bp, Homo sapiens
  misc_feature (61)..(62): /note="This region represents a CpG dinucleotide"
  misc_feature (61)..(61): /note="Nucleotide may be methylated to form 5-methylcytosine"
gccacttaatttctctggccagtctgaatttaaatggctaaacatttcttccctagcctgcggggtcagtagttagtaatcacggcaggtatgcatgactctcaccaattatgagtataatt

SEQ ID NO: 15548 - DNA, 122 bp, Homo sapiens
  misc_feature (61)..(62): /note="This region represents a CpG dinucleotide"
  misc_feature (61)..(61): /note="Nucleotide may be methylated to form 5-methylcytosine"
ataaagataaagacaacacatatcaaatcagttaatgggggggcgttaaaaccatagccacggacattagactgaagtggagaacttacatatatcgagagagacagagagagagagataca

SEQ ID NO: 15549 - DNA, 122 bp, Homo sapiens
  misc_feature (61)..(62): /note="This region represents a CpG dinucleotide"
  misc_feature (61)..(61): /note="Nucleotide may be methylated to form 5-methylcytosine"
agttttctgtgtttagatctgatggcatctgcatgacttctgtgtttatttttctcattacgacttcagagttagcaagacgatggcctctttatcttttctcactgccatattttccaggc

SEQ ID NO: 15550 - DNA, 122 bp, Homo sapiens
  misc_feature (61)..(62): /note="This region represents a CpG dinucleotide"
  misc_feature (61)..(61): /note="Nucleotide may be methylated to form 5-methylcytosine"
gacgatgacagtgtacatcaaagaaggccatgaaatacctttagaagccatgaggaatcacgagcaagccagaattaggagaaagcaaagtcaatagcaagagcagaaggaaggtaacataa

SEQ ID NO: 15551 - DNA, 122 bp, Homo sapiens
  misc_feature (61)..(62): /note="This region represents a CpG dinucleotide"
  misc_feature (61)..(61): /note="Nucleotide may be methylated to form 5-methylcytosine"
ttttacagatgaggaaactatagcttagaagggttagggacttgctagagctcactaatacgtggtgaaatcaggcttcggcactacccaatactgcctcaacaggggactttgtataagtg

SEQ ID NO: 15552 - DNA, 122 bp, Homo sapiens
  misc_feature (61)..(62): /note="This region represents a CpG dinucleotide"
  misc_feature (61)..(61): /note="Nucleotide may be methylated to form 5-methylcytosine"
gttaggcctgagcagggcagcccttcaaatgcaattcaatgctgctgagagggaaacgaacggagtccatcccagccgtggagtaaatggactgattaacggcaaagctaacagtaataaat

SEQ ID NO: 15553 - DNA, 122 bp, Homo sapiens
  misc_feature (61)..(62): /note="This region represents a CpG dinucleotide"
  misc_feature (61)..(61): /note="Nucleotide may be methylated to form 5-methylcytosine"
agaataatctaaaaataaaggctgattacctcatgtggtataaacttaccaatgactccccgttgcctagaggctcaaattgctagcatggcctggcgtgtggccctggtcaaccaagtctc

SEQ ID NO: 15554 - DNA, 122 bp, Homo sapiens
  misc_feature (61)..(62): /note="This region represents a CpG dinucleotide"
  misc_feature (61)..(61): /note="Nucleotide may be methylated to form 5-methylcytosine"
atctggctgaggtggggcctggacatcaggattgtaagagctccccaggtgattctgatacgcagccaaggttgagaaccttggctgtagaccaacatctaggcgtcatttcacaagtggcc

SEQ ID NO: 15555 - DNA, 122 bp, Homo sapiens
  misc_feature (61)..(62): /note="This region represents a CpG dinucleotide"
  misc_feature (61)..(61): /note="Nucleotide may be methylated to form 5-methylcytosine"
tccagtttcatgaataattgataagctctttccaacttgtcagaagcaacttagccgtctcgccttgcggcctggaacccctggcaatttccggagcaccggcaagagacttttgcacagtt

SEQ ID NO: 15556 - DNA, 122 bp, Homo sapiens
  misc_feature (61)..(62): /note="This region represents a CpG dinucleotide"
  misc_feature (61)..(61): /note="Nucleotide may be methylated to form 5-methylcytosine"
attagcttatttagctattagaaataagatcgcagtatatctaggacattttgtgagacacgacactgagtattacgggtcaaattctggttaagtatacataggcgtatattcaacctatc

SEQ ID NO: 15557 - DNA, 122 bp, Homo sapiens
  misc_feature (61)..(62): /note="This region represents a CpG dinucleotide"
  misc_feature (61)..(61): /note="Nucleotide may be methylated to form 5-methylcytosine"
attatttttccttggtgagtcctactcttgacttcgctagctaacaggacagtaacacaacgcaaggataaagtgacacgccaccacgcctagctcggtgcatgttggctaacagacgatgg

SEQ ID NO: 15558 - DNA, 122 bp, Homo sapiens
  misc_feature (61)..(62): /note="This region represents a CpG dinucleotide"
  misc_feature (61)..(61): /note="Nucleotide may be methylated to form 5-methylcytosine"
ttcaaagtagttttaccagtttacacttaagccagcagcgcgtgaatggttacttcatatcgtagtcaatacttgataatctacattttagccattctggtgagcgtgtaatggtatatcat

SEQ ID NO: 15559 - DNA, 122 bp, Homo sapiens
  misc_feature (61)..(62): /note="This region represents a CpG dinucleotide"
  misc_feature (61)..(61): /note="Nucleotide may be methylated to form 5-methylcytosine"
ttctcagtcacacatacaactcaaaggatgactaactcagatacagcaggctgagaattacgttttaactcctccccttccccttccaagtaatccatgatatgtcagtctataactggttt

SEQ ID NO: 15560 - DNA, 122 bp, Homo sapiens
  misc_feature (61)..(62): /note="This region represents a CpG dinucleotide"
  misc_feature (61)..(61): /note="Nucleotide may be methylated to form 5-methylcytosine"
cacatggtaggtgcttggcaaatatgtataaaaacatgccatgtaacaaaaaaggaggaacgaactgtgacctctgcccttaaggaaggtaagacttaacctaggagtagacaaacatccag

SEQ ID NO: 15561 - DNA, 122 bp, Homo sapiens
  misc_feature (61)..(62): /note="This region represents a CpG dinucleotide"
  misc_feature (61)..(61): /note="Nucleotide may be methylated to form 5-methylcytosine"
gacaggagaagactgccaagccaccaccggtcctgcgacatattcaccagctgccggcggcgaggtcagaccccagattcgggtttgcccagcaggcgctcggcttccatgctcgctctcca

SEQ ID NO: 15562 - DNA, 122 bp, Homo sapiens
  misc_feature (61)..(62): /note="This region represents a CpG dinucleotide"
  misc_feature (61)..(61): /note="Nucleotide may be methylated to form 5-methylcytosine"
ttctcatatggcagttcagggttacaaaacagagtgttccagccaaaaagacagaagctgcgtaacgtttaatgactcagcttcagaagtcatatagtgtcacttctgctgcatcctactgg

SEQ ID NO: 15563 - DNA, 122 bp, Homo sapiens
  misc_feature (61)..(62): /note="This region represents a CpG dinucleotide"
  misc_feature (61)..(61): /note="Nucleotide may be methylated to form 5-methylcytosine"
tgtctcaaaaaaaaaaaaaaaaaaaaaaaaaaagaggagggcattgtgtgggcaaaagtgcggaggaggaaaagtatagggtgtgtttgtggaacagtcctggtgcaattaatggctaagcc

SEQ ID NO: 15564 - DNA, 122 bp, Homo sapiens
  misc_feature (61)..(62): /note="This region represents a CpG dinucleotide"
  misc_feature (61)..(61): /note="Nucleotide may be methylated to form 5-methylcytosine"
acttgacccttcctctccttcagagatctcagcgtgtaaactttgcacactgaggaacttcgatcatgatataatgctctgatacggccacacaccatccaggagttctgaattggcttttt

SEQ ID NO: 15565 - DNA, 122 bp, Homo sapiens
  misc_feature (61)..(62): /note="This region represents a CpG dinucleotide"
  misc_feature (61)..(61): /note="Nucleotide may be methylated to form 5-methylcytosine"
agccagcttccagcaggcagggctgggaggttgaacttgagccggtttgggagccaggagcgagtgggtgacaggtcattcctgactgggaaggttgcttgacaagtcaggattgtgcctcc

SEQ ID NO: 15566 - DNA, 122 bp, Homo sapiens
  misc_feature (61)..(62): /note="This region represents a CpG dinucleotide"
  misc_feature (61)..(61): /note="Nucleotide may be methylated to form 5-methylcytosine"
cgccacactacctccacgtactcattcagcaaacatttatgttacagctactatgagtcacgtgctgtttcagatgctggagaaacagtgaagatgaagacaaaatccctctgagaatggag

SEQ ID NO: 15567 - DNA, 122 bp, Homo sapiens
  misc_feature (61)..(62): /note="This region represents a CpG dinucleotide"
  misc_feature (61)..(61): /note="Nucleotide may be methylated to form 5-methylcytosine"
accagttataaataagattcaataaattaaaacagcaactggaattctcttctgttaaggcggggcagggagagccctcagtctggcacaggtagggttgggtggcagaagagcaaagcaaa

SEQ ID NO: 15568 - DNA, 122 bp, Homo sapiens
  misc_feature (61)..(62): /note="This region represents a CpG dinucleotide"
  misc_feature (61)..(61): /note="Nucleotide may be methylated to form 5-methylcytosine"
gtggtttggcttcaccatggcttcctgccgtgcctggaaccttagggtgctggtggctgtcgtgtgtggactactgactggcatcattttgggactgggcatctggaggattgtgatcagga

SEQ ID NO: 15569 - DNA, 122 bp, Homo sapiens
  misc_feature (61)..(62): /note="This region represents a CpG dinucleotide"
  misc_feature (61)..(61): /note="Nucleotide may be methylated to form 5-methylcytosine"
acaaaatcctgttttgtttaattactccacatgatctgttgcaaaggtgacaatggtcagcgaggctgcactgaggtaacactgtcacgtggtcagccaggctcactcaccagcaggtggct

SEQ ID NO: 15570 - DNA, 122 bp, Homo sapiens
  misc_feature (61)..(62): /note="This region represents a CpG dinucleotide"
  misc_feature (61)..(61): /note="Nucleotide may be methylated to form 5-methylcytosine"
tagtgtcccctgggcttgagaagaggtggtgaaccgtctgcagggccagaccttggagcacgcctccactgccctcccggaactggatgtgctgagcaggagacagaagcattccccaagct

SEQ ID NO: 15571 - DNA, 122 bp, Homo sapiens
  misc_feature (61)..(62): /note="This region represents a CpG dinucleotide"
  misc_feature (61)..(61): /note="Nucleotide may be methylated to form 5-methylcytosine"
cccacttactcccatttccacctcaaaaaaggcaccatcattatcacccaaaccaactttcgagacagaggggaatgatgttcccactcccaattaggaatcaatgcagcccaacaaagaag

SEQ ID NO: 15572 - DNA, 122 bp, Homo sapiens
  misc_feature (61)..(62): /note="This region represents a CpG dinucleotide"
  misc_feature (61)..(61): /note="Nucleotide may be methylated to form 5-methylcytosine"
tctcatgacccaagtgccccttttttggtggcatctgtttctttaagctgtattttatctcgtctgtgtaaaggtgtttcctttggcgtttccttctgtgcattgtctcattgctttgaatg

SEQ ID NO: 15573 - DNA, 122 bp, Homo sapiens
  misc_feature (61)..(62): /note="This region represents a CpG dinucleotide"
  misc_feature (61)..(61): /note="Nucleotide may be methylated to form 5-methylcytosine"
gttctattttcataggaatttaccattatctttgacacaaatgcctgctttgtccacttgcgctagtaccagccccaaaacaaacttttacggctagaaaatggtctatgtaagatagaaaa

SEQ ID NO: 15574 - DNA, 122 bp, Homo sapiens
  misc_feature (61)..(62): /note="This region represents a CpG dinucleotide"
  misc_feature (61)..(61): /note="Nucleotide may be methylated to form 5-methylcytosine"
gcctcagcctcccaaagtgctgggattacaggcgtgagccaccccacccagcccttcccacgtattctggcagggaatgctgttgtcccccaagcctaccctaagaggaagacttcttctgg

SEQ ID NO: 15575 - DNA, 122 bp, Homo sapiens
  misc_feature (61)..(62): /note="This region represents a CpG dinucleotide"
  misc_feature (61)..(61): /note="Nucleotide may be methylated to form 5-methylcytosine"
gggggtggagggtggcctgggcaacgggcagcagctcctgcccctggggccccggccacacggaagtggctgttgaagaggaagctaccaggaccctggcaagaaattgtgtcctgtgtctc

SEQ ID NO: 15576 - DNA, 122 bp, Homo sapiens
  misc_feature (61)..(62): /note="This region represents a CpG dinucleotide"
  misc_feature (61)..(61): /note="Nucleotide may be methylated to form 5-methylcytosine"
acctgggtaaaaataaagcccaggcaatatgactgcaccttttccattccatgctgcaatcgcatttacatctcgaaattgactctaatgaccaaggcaaggtcaactagaaaaatccactc

SEQ ID NO: 15577 - DNA, 122 bp, Homo sapiens
  misc_feature (61)..(62): /note="This region represents a CpG dinucleotide"
  misc_feature (61)..(61): /note="Nucleotide may be methylated to form 5-methylcytosine"
gacagaagctttcaacaaacttcttaaactcctgtttatactcttaaattgcttggtaaacgcctccttctaaggtactttaaaaggtcaagttttgcccaagtctcctctctgaaaactaa

SEQ ID NO: 15578 - DNA, 122 bp, Homo sapiens
  misc_feature (61)..(62): /note="This region represents a CpG dinucleotide"
  misc_feature (61)..(61): /note="Nucleotide may be methylated to form 5-methylcytosine"
atgcagaatgtgctcctaggccacaggcttatagtttctatttcttactccaggtttcatcgtccataacgaagagtgagactatttggaaacagagactgatcatctttgggggaagccct

SEQ ID NO: 15579 - DNA, 122 bp, Homo sapiens
  misc_feature (61)..(62): /note="This region represents a CpG dinucleotide"
  misc_feature (61)..(61): /note="Nucleotide may be methylated to form 5-methylcytosine"
ggcttatagatttttccacagtctagactttgctgattgaatgctcatggtacagctcaacgtcttcttctgccctctgtattttttgcaaccagcagctgaatccagaagcctaatcaggc

SEQ ID NO: 15580 - DNA, 122 bp, Homo sapiens
  misc_feature (61)..(62): /note="This region represents a CpG dinucleotide"
  misc_feature (61)..(61): /note="Nucleotide may be methylated to form 5-methylcytosine"
ttactctgtttttaatggatttacaagataacctgatgctgtgcggtttgtttactgtagcggctttatggtgttttgtaccagtaaacgggcttccatcagcagatctgtctggaataaag

SEQ ID NO: 15581 - DNA, 122 bp, Homo sapiens
  misc_feature (61)..(62): /note="This region represents a CpG dinucleotide"
  misc_feature (61)..(61): /note="Nucleotide may be methylated to form 5-methylcytosine"
ggaaagagaatgggatcagggcccaggtctctctgccttagacaaacgcagagccctgtgcgcgaggaagaacactgcttcctgagacagaaaggatcgttagctagtgacacgggggttaa

SEQ ID NO: 15582 - DNA, 122 bp, Homo sapiens
  misc_feature (61)..(62): /note="This region represents a CpG dinucleotide"
  misc_feature (61)..(61): /note="Nucleotide may be methylated to form 5-methylcytosine"
gcacatcactcaacctcactggtttcagttttgttgcccatatttggtgctgatgttatccgacatccctttcaaacattctattaaaaacctcaagctacacgagtgcacgtggtttaaag

SEQ ID NO: 15583 - DNA, 122 bp, Homo sapiens
  misc_feature (61)..(62): /note="This region represents a CpG dinucleotide"
  misc_feature (61)..(61): /note="Nucleotide may be methylated to form 5-methylcytosine"
cgagactccatctcaagaaacaaacaaacaaaaaaacaaaaacaaaaacaaaagatgcaacggtctccatttaacttccccatatgactgatgcaggaggcagatgcgtgtcagagaaagaa

SEQ ID NO: 15584 - DNA, 122 bp, Homo sapiens
  misc_feature (61)..(62): /note="This region represents a CpG dinucleotide"
  misc_feature (61)..(61): /note="Nucleotide may be methylated to form 5-methylcytosine"
agatcagagaaaggcaatctaatgccaagtggcatgactgccagtaaccttgtgagtcagcgccacttcggatgttctattggtctcattagtagcactagaaacatataaaaaatgaccag

SEQ ID NO: 15585 - DNA, 122 bp, Homo sapiens
  misc_feature (61)..(62): /note="This region represents a CpG dinucleotide"
  misc_feature (61)..(61): /note="Nucleotide may be methylated to form 5-methylcytosine"
gttgtctctaatcctttctttaaattcttcattatgaaacataaaaacaaatgccaggcgcggcagctcacgcctgtaatcccagcactttgggaggccgaagcgggcagatcacccgaggt

SEQ ID NO: 15586 - DNA, 122 bp, Homo sapiens
  misc_feature (61)..(62): /note="This region represents a CpG dinucleotide"
  misc_feature (61)..(61): /note="Nucleotide may be methylated to form 5-methylcytosine"
atgtggtactcgtgagcaggattttcaatgcctggctggttgttacttatccatttagtccgagcttcagggaaagaacatgacaccggcctccagcagagcctgctcttggtccactgttt

SEQ ID NO: 15587 - DNA, 122 bp, Homo sapiens
  misc_feature (61)..(62): /note="This region represents a CpG dinucleotide"
  misc_feature (61)..(61): /note="Nucleotide may be methylated to form 5-methylcytosine"
ttttgcacatgaagatgccagcagatatactaccgaggaggaaacacaccgagcttggaacgacaaatagccccaggctggataggctatttcctgctagagagtgacaacaccctaaataa

SEQ ID NO: 15588 - DNA, 122 bp, Homo sapiens
  misc_feature (61)..(62): /note="This region represents a CpG dinucleotide"
  misc_feature (61)..(61): /note="Nucleotide may be methylated to form 5-methylcytosine"
ttactaaataatggcagctcctgttacgtctggtgtcattcatcatgactaaggccctctcggggaagtgggcagaacatatgatgatccgggggcctctttgtatttggtgcctacttacc

SEQ ID NO: 15589 - DNA, 122 bp, Homo sapiens
  misc_feature (61)..(62): /note="This region represents a CpG dinucleotide"
  misc_feature (61)..(61): /note="Nucleotide may be methylated to form 5-methylcytosine"
ttcaggtgaagaaaatgggcgctctgactcaccatgatctggcatataaagagagtacaacgcagagtgtaccagagtccaggtggtcaaaatggtaacattagtaaaatgaccctgctcaa

SEQ ID NO: 15590 - DNA, 122 bp, Homo sapiens
  misc_feature (61)..(62): /note="This region represents a CpG dinucleotide"
  misc_feature (61)..(61): /note="Nucleotide may be methylated to form 5-methylcytosine"
cttaacctaaagatcgagtccacggtgggagtactgggctccaagtcagggcagtgaaggcgcaaggtagtagactaacacccctccacctgcactggcacatcctccatgcatttggcaat

SEQ ID NO: 15591 - DNA, 122 bp, Homo sapiens
  misc_feature (61)..(62): /note="This region represents a CpG dinucleotide"
  misc_feature (61)..(61): /note="Nucleotide may be methylated to form 5-methylcytosine"
gtcccttgggggaagccaagggacttccctcatcctctgatatgctgcttgggtgatgggcggtgctggggactgggcccagcagtaccccgggatcccaaacgcggggatgacgggagcca

SEQ ID NO: 15592 - DNA, 122 bp, Homo sapiens
  misc_feature (61)..(62): /note="This region represents a CpG dinucleotide"
  misc_feature (61)..(61): /note="Nucleotide may be methylated to form 5-methylcytosine"
gtgcccggagaacaagaaagggggcttaggaacggagcatatgataaccacaattaaacacgcaatagacgggttggaagataaagactaggaatctctcagcagaataaacaacagtggaa

SEQ ID NO: 15593 - DNA, 122 bp, Homo sapiens
  misc_feature (61)..(62): /note="This region represents a CpG dinucleotide"
  misc_feature (61)..(61): /note="Nucleotide may be methylated to form 5-methylcytosine"
tcgtgattggtgtgaaaatgaaacctgctccttccagaacaatgagaatgctacctctgccgacaacattcccatccaactaagatcaagccagattgctcttgagtcattggttagtaacc

SEQ ID NO: 15594 - DNA, 122 bp, Homo sapiens
  misc_feature (61)..(62): /note="This region represents a CpG dinucleotide"
  misc_feature (61)..(61): /note="Nucleotide may be methylated to form 5-methylcytosine"
tctgtccctttatcctgccttgactgaggatgtgacgcctggaatggtgatgcctggtgccgtgatgcagtcaccatataatcttgaggtgacaggcatgaggccagaacgtcaacactgag

SEQ ID NO: 15595 - DNA, 122 bp, Homo sapiens
  misc_feature (61)..(62): /note="This region represents a CpG dinucleotide"
  misc_feature (61)..(61): /note="Nucleotide may be methylated to form 5-methylcytosine"
ttgtgatcctctggatttggtgtccactctgaacgcggcgtgggtgtttaacaactgtgacgggacagatgtcattaatgtgaaaatgctcgcagccttccccttttccaccctgctaaaag

SEQ ID NO: 15596 - DNA, 122 bp, Homo sapiens
  misc_feature (61)..(62): /note="This region represents a CpG dinucleotide"
  misc_feature (61)..(61): /note="Nucleotide may be methylated to form 5-methylcytosine"
tttcagtatattctgtaaatgaattgttcatggacttcaaagtgctggctgctgtgctaacgaggagagatttgcataaggccctaatcacgcgcatactgattaagcttcattatggaaac

SEQ ID NO: 15597 - DNA, 122 bp, Homo sapiens
  misc_feature (61)..(62): /note="This region represents a CpG dinucleotide"
  misc_feature (61)..(61): /note="Nucleotide may be methylated to form 5-methylcytosine"
caccgagagagagcaatgaggtcagatggtccctgcagaagtgagatcattagaaagccacgtgcccatcgtgtcctgcgtgtaaagactgctaccacacaatgcctgtgtctatgacagca

SEQ ID NO: 15598 - DNA, 122 bp, Homo sapiens
  misc_feature (61)..(62): /note="This region represents a CpG dinucleotide"
  misc_feature (61)..(61): /note="Nucleotide may be methylated to form 5-methylcytosine"
ggcttccttgcttccaaagtcaatatgcagagtgtcctgatagcatgggagcatctcaagcgtagccagcagagtagacgcttcatttttcagcccttgctagaaggcagagaaagaggaag

SEQ ID NO: 15599 - DNA, 122 bp, Homo sapiens
  misc_feature (61)..(62): /note="This region represents a CpG dinucleotide"
  misc_feature (61)..(61): /note="Nucleotide may be methylated to form 5-methylcytosine"
gctctccaggcctgcctgtccattctagctattccactcggtcctctaactctgcgggtacgcaaagataaataaaggagagcccgctctgatctctgcagtctggaagtcaccaatctgtc

SEQ ID NO: 15600 - DNA, 122 bp, Homo sapiens
  misc_feature (61)..(62): /note="This region represents a CpG dinucleotide"
  misc_feature (61)..(61): /note="Nucleotide may be methylated to form 5-methylcytosine"
attcacgcccgcatcactcgattcccacaacactcatcacccacaagtgcagctttcaatcggagctgaacgagagctaactaagaatgagcccgacaagcaccgggaacaccaagcacagc

SEQ ID NO: 15601 - DNA, 122 bp, Homo sapiens
  misc_feature (61)..(62): /note="This region represents a CpG dinucleotide"
  misc_feature (61)..(61): /note="Nucleotide may be methylated to form 5-methylcytosine"
cggaggtggctgccacctcccacgccaggcaaagggctgcctcggtggttctcccagccacggttccaccactgagccccagggaaggagacttctgacccagccacctcctgccccgctgc

SEQ ID NO: 15602 - DNA, 122 bp, Homo sapiens
  misc_feature (61)..(62): /note="This region represents a CpG dinucleotide"
  misc_feature (61)..(61): /note="Nucleotide may be methylated to form 5-methylcytosine"
ggtgacccgcccacctcggcctcccaaagtgctgggattacaggtgtgagccacagcacccggtctacatgtttttgtttgaatgcctgttttcagtgatgttgggcctactctgaggagtg

SEQ ID NO: 15603 - DNA, 122 bp, Homo sapiens
  misc_feature (61)..(62): /note="This region represents a CpG dinucleotide"
  misc_feature (61)..(61): /note="Nucleotide may be methylated to form 5-methylcytosine"
aaaatcccagttgtgccacacctaactgtgttaccctggacaagtcacttctctctattccgcatctataacacaggagttagttaatgtgcatatggctcttagaacagtgcccagcacat

SEQ ID NO: 15604 - DNA, 122 bp, Homo sapiens
  misc_feature (61)..(62): /note="This region represents a CpG dinucleotide"
  misc_feature (61)..(61): /note="Nucleotide may be methylated to form 5-methylcytosine"
ctttatattttctgtgaggtggatgtggtaaaaagaggtgtgagctgtgtcttcagttgacgtggaggaggggaaatcccatacctcttatttagccccagagctccaacaggaagtggtag

SEQ ID NO: 15605 - DNA, 122 bp, Homo sapiens
  misc_feature (61)..(62): /note="This region represents a CpG dinucleotide"
  misc_feature (61)..(61): /note="Nucleotide may be methylated to form 5-methylcytosine"
tgcaagaacccaggtcccctggctctgaaggctctctccacaacacagcaagctgtcagacgtctttgttgcatcatgcattgaggtagtgaatagtccgtaaacagtgaggaagggtaatg

SEQ ID NO: 15606 - DNA, 122 bp, Homo sapiens
  misc_feature (61)..(62): /note="This region represents a CpG dinucleotide"
  misc_feature (61)..(61): /note="Nucleotide may be methylated to form 5-methylcytosine"
tgacattatcggcatgaataaaagatgagatctgctaggggtggctgtcaggatcctccccgcacaggcgaggctcccggcaagactgacagtaagaggctctgcgggaaggagctgggcgg

SEQ ID NO: 15607 - DNA, 122 bp, Homo sapiens
  misc_feature (61)..(62): /note="This region represents a CpG dinucleotide"
  misc_feature (61)..(61): /note="Nucleotide may be methylated to form 5-methylcytosine"
gaggaggtgttgcggcatccccagtgttctgtttctctaagcatgttcatatgtgtaaaccgctgagattttttcttggggggaagacatttttatctatatggcttatatttctcccaaaa

SEQ ID NO: 15608 - DNA, 122 bp, Homo sapiens
  misc_feature (61)..(62): /note="This region represents a CpG dinucleotide"
  misc_feature (61)..(61): /note="Nucleotide may be methylated to form 5-methylcytosine"
actttacctctgtgtctcggttttctcatctctaaagtagactaatgctagtactggcctcgtagggagagaattgaataaattcaatgaattcatgcatatgtcaagcagttacatatatc

SEQ ID NO: 15609 - DNA, 122 bp, Homo sapiens
  misc_feature (61)..(62): /note="This region represents a CpG dinucleotide"
  misc_feature (61)..(61): /note="Nucleotide may be methylated to form 5-methylcytosine"
tcatgtgtaaaattggtgagtaatgcatgtctgttgtcattagacaactgaggtcatctacggaaactccttgttcaggccatggctcttggcagtgctcactatgagtgcgatttgggtag

SEQ ID NO: 15610 - DNA, 122 bp, Homo sapiens
  misc_feature (61)..(62): /note="This region represents a CpG dinucleotide"
  misc_feature (61)..(61): /note="Nucleotide may be methylated to form 5-methylcytosine"
ttgagaaatgactttgttttagagaaaacttttgtttccagaggcacaggctacacagcacggagtggaatagaaatacggcgattatccagttcatttacttgcagtacacagccagacaa

SEQ ID NO: 15611 - DNA, 122 bp, Homo sapiens
  misc_feature (61)..(62): /note="This region represents a CpG dinucleotide"
  misc_feature (61)..(61): /note="Nucleotide may be methylated to form 5-methylcytosine"
tctcgggccgctcactccggctggcagtggcgggaggcagtgtgtgctgctcgcaccctgcgtttccagttttaggagactgaagcatcccagacagctgttgacaatcaggaagaccctac

SEQ ID NO: 15612 - DNA, 122 bp, Homo sapiens
  misc_feature (61)..(62): /note="This region represents a CpG dinucleotide"
  misc_feature (61)..(61): /note="Nucleotide may be methylated to form 5-methylcytosine"
tataaacccaaaggctcctcccttccctgcctctggtagcccctcccttctcacttactacgcagctgaccagagaaaagacaaggggtgggaaggcactgagcaggactgagtggggagta

SEQ ID NO: 15613 - DNA, 122 bp, Homo sapiens
  misc_feature (61)..(62): /note="This region represents a CpG dinucleotide"
  misc_feature (61)..(61): /note="Nucleotide may be methylated to form 5-methylcytosine"
tggagattaatctcgtatgtagaagttcattagtaaatatattcatgtcatacagactttcggttccttattgcaaatttatgatttgggaactcccttaatgaaatttgggagcaagcaag

SEQ ID NO: 15614 - DNA, 122 bp, Homo sapiens
  misc_feature (61)..(62): /note="This region represents a CpG dinucleotide"
  misc_feature (61)..(61): /note="Nucleotide may be methylated to form 5-methylcytosine"
agaatgagttcagtaagtgtgagccagtattagaaaatgtttcttgaatgaagatgtgaacggaatgagccctgaacttgagtcacagtggtgacacatagtgcatgtggggatgaggcagc

SEQ ID NO: 15615 - DNA, 122 bp, Homo sapiens
  misc_feature (61)..(62): /note="This region represents a CpG dinucleotide"
  misc_feature (61)..(61): /note="Nucleotide may be methylated to form 5-methylcytosine"
ttttaattctgttctctagcacttgttacagtgattcatatcctggatacgcatgtgaatcgcctgtggactgtttaaaaatgtagactctgactagacagacctaatcagaatctctgtgt

SEQ ID NO: 15616 - DNA, 122 bp, Homo sapiens
  misc_feature (61)..(62): /note="This region represents a CpG dinucleotide"
  misc_feature (61)..(61): /note="Nucleotide may be methylated to form 5-methylcytosine"
cccccgtgcggcggggcaggacatctcccagacagctggggacaccctttccagcgggagcgggaggcgctgttgttcaggaaaggaagttgtgtgtttgtgaatgagcgcactttgtggtt

SEQ ID NO: 15617 - DNA, 122 bp, Homo sapiens
  misc_feature (61)..(62): /note="This region represents a CpG dinucleotide"
  misc_feature (61)..(61): /note="Nucleotide may be methylated to form 5-methylcytosine"
caggaagcaaaggcaactataaatgcctatcactgcctaactgaatccaatgtattacaccgcctgtcccatgcagctatgagggactgcagctctcactgactcatcagatactgtatcac

SEQ ID NO: 15618 - DNA, 122 bp, Homo sapiens
  misc_feature (61)..(62): /note="This region represents a CpG dinucleotide"
  misc_feature (61)..(61): /note="Nucleotide may be methylated to form 5-methylcytosine"
atattcatttatgatccatattttttccttggaaataattattttcattttgctggaccacgttttagagagcctcacttctgttgatttgattctgagcaatgtttctgagctggactgac

SEQ ID NO: 15619 - DNA, 122 bp, Homo sapiens
  misc_feature (61)..(62): /note="This region represents a CpG dinucleotide"
  misc_feature (61)..(61): /note="Nucleotide may be methylated to form 5-methylcytosine"
aggtaaacagggcaggcaaagggagcagttcacagaatgaggcacaaagacaacatgagacggttgctcttgagctccagcagtaagggctgtttctgattaggtgcatacaattgcagagc

SEQ ID NO: 15620 - DNA, 122 bp, Homo sapiens
  misc_feature (61)..(62): /note="This region represents a CpG dinucleotide"
  misc_feature (61)..(61): /note="Nucleotide may be methylated to form 5-methylcytosine"
aaatgctcattaagtgaaagatgaccagaaatgtacctgctaacttccaactcttcaacacgtcacattgtgatgtcagtgagggcttaaagggaatatggtggttggctgatttcacatcc

SEQ ID NO: 15621 - DNA, 122 bp, Homo sapiens
  misc_feature (61)..(62): /note="This region represents a CpG dinucleotide"
  misc_feature (61)..(61): /note="Nucleotide may be methylated to form 5-methylcytosine"
atcattccttactgcttggaaaagtgagactccgttgcacctctaggaatctttttaaaacgccctgtatgttccttaacactgcctgtaggaatcctgtagccctagccccgtgggatttc

SEQ ID NO: 15622 - DNA, 122 bp, Homo sapiens
  misc_feature (61)..(62): /note="This region represents a CpG dinucleotide"
  misc_feature (61)..(61): /note="Nucleotide may be methylated to form 5-methylcytosine"
acctgctcagaacacgtctgggacggctctgttcgtgggagacacacacagaccagtctgcgtcagcaggaaataagagtgagcagggttctagaactctgaaaccttgggactagaagtgt

SEQ ID NO: 15623 - DNA, 122 bp, Homo sapiens
  misc_feature (61)..(62): /note="This region represents a CpG dinucleotide"
  misc_feature (61)..(61): /note="Nucleotide may be methylated to form 5-methylcytosine"
cgatgagatggtttaattatctgccttttctccccccacccccacccagcagcttcctgtcggacagactgaagcctggctgggctagtgacggtaaaaatcactgacagcaccagcaaaca

SEQ ID NO: 15624 - DNA, 122 bp, Homo sapiens
  misc_feature (61)..(62): /note="This region represents a CpG dinucleotide"
  misc_feature (61)..(61): /note="Nucleotide may be methylated to form 5-methylcytosine"
agtatcttaagtaaactgaaatgacttctgaattgctgtggtcaggcagttccctcagggcgaagcatggatctcaaccatcagggcagccccagcaataaggatggctcctgccacacaga

SEQ ID NO: 15625 - DNA, 122 bp, Homo sapiens
  misc_feature (61)..(62): /note="This region represents a CpG dinucleotide"
  misc_feature (61)..(61): /note="Nucleotide may be methylated to form 5-methylcytosine"
gggcaagtttttatgtggtcatctgtctttatttctcttaggtgtatactttaggagtggcgttgctggattatatggtgcctctgtttaaccttttgaagaactgccagattgttttccaa

SEQ ID NO: 15626 - DNA, 122 bp, Homo sapiens
  misc_feature (61)..(62): /note="This region represents a CpG dinucleotide"
  misc_feature (61)..(61): /note="Nucleotide may be methylated to form 5-methylcytosine"
attactcgctcaccacaaaggtctttgccattcagttcataaacagcatcatctgcatcacgcagatcatcaaactccacaaaaccatatctagaagagagcaaagaaaatactggttggta

SEQ ID NO: 15627 - DNA, 122 bp, Homo sapiens
  misc_feature (61)..(62): /note="This region represents a CpG dinucleotide"
  misc_feature (61)..(61): /note="Nucleotide may be methylated to form 5-methylcytosine"
tcgtggcaccttttaccacctgatatgttcaatggctctatgtttgtttgtagtaagtctcgcctgactagaatataagacccatgggagaagagactttctgctctacccttggcacatac

SEQ ID NO: 15628 - DNA, 122 bp, Homo sapiens
  misc_feature (61)..(62): /note="This region represents a CpG dinucleotide"
  misc_feature (61)..(61): /note="Nucleotide may be methylated to form 5-methylcytosine"
atgcattctctcctaaaatgtgacatgtctgatttcaatccactttaacccagtgtgctgcgtctttgttgtcaaagggtgttgcatctgcttaaactcacacatctcgaaggttgctgtga

SEQ ID NO: 15629 - DNA, 122 bp, Homo sapiens
  misc_feature (61)..(62): /note="This region represents a CpG dinucleotide"
  misc_feature (61)..(61): /note="Nucleotide may be methylated to form 5-methylcytosine"
tggcccgggacagaaacagttgcgttgcgcatgttgtgagaccccagtgaccaggaaccccggggagaagtctcctccatgagtcatgatagccgcaggcagctgcgaaggagggggacgtg

SEQ ID NO: 15630 - DNA, 122 bp, Homo sapiens
  misc_feature (61)..(62): /note="This region represents a CpG dinucleotide"
  misc_feature (61)..(61): /note="Nucleotide may be methylated to form 5-methylcytosine"
caagcctgcccggcacgtgagggagcagctgtcctcagagacaggcctggacatgagggtcgtacaggtgagatgccagcactcctgtgccctccggggatcccaggcccgggacaggggtg

SEQ ID NO: 15631 - DNA, 122 bp, Homo sapiens
  misc_feature (61)..(62): /note="This region represents a CpG dinucleotide"
  misc_feature (61)..(61): /note="Nucleotide may be methylated to form 5-methylcytosine"
gaaatgcggcagtacccactaaaaaacttaaaaatgcttaccattcatgactcagcaattcgactctagaattttttaggaaaaagtttcaatgatgtatattaagattcatgcatacagtt

SEQ ID NO: 15632 - DNA, 122 bp, Homo sapiens
  misc_feature (61)..(62): /note="This region represents a CpG dinucleotide"
  misc_feature (61)..(61): /note="Nucleotide may be methylated to form 5-methylcytosine"
gggaggcgaggaggctggtgagctgctgtggggaagcggctatgttgcacaggtcctgctcgcagcagtggtgccacagagtgtaggagtgcagccagtaggtggcatagcctggcagaggg

SEQ ID NO: 15633 - DNA, 122 bp, Homo sapiens
  misc_feature (61)..(62): /note="This region represents a CpG dinucleotide"
  misc_feature (61)..(61): /note="Nucleotide may be methylated to form 5-methylcytosine"
ctcttgagcccgtggcttcctttgcaaaggcccagggtaagaaaggcagtgcagggaacacgtggagtcagttgtctaacaataacaaagatctgctcttgggaggtgtggctccatcccca

SEQ ID NO: 15634 - DNA, 122 bp, Homo sapiens
  misc_feature (61)..(62): /note="This region represents a CpG dinucleotide"
  misc_feature (61)..(61): /note="Nucleotide may be methylated to form 5-methylcytosine"
cagtgccctttccatccgcaccacagttcatgtctaacggtgaaagttcaagggtggtgacggctgataagatagtttttgtctggaggaacctcgataatgttttgcaagctatgaagctc

SEQ ID NO: 15635 - DNA, 122 bp, Homo sapiens
  misc_feature (61)..(62): /note="This region represents a CpG dinucleotide"
  misc_feature (61)..(61): /note="Nucleotide may be methylated to form 5-methylcytosine"
ggtatcagagcacccaaccatgatgccaaattagagcagatcaaggtccacactagactgcgtatattagaacattttaatcatagccaagaattatattggacatcactgttttagatgta

SEQ ID NO: 15636 - DNA, 122 bp, Homo sapiens
  misc_feature (61)..(62): /note="This region represents a CpG dinucleotide"
  misc_feature (61)..(61): /note="Nucleotide may be methylated to form 5-methylcytosine"
tctcagcctctggagaagaggacagttcttactacacactgacaggtctgatttgaagaacgtgctacaagctctgaagaagaaataccaggtaggaacttggagagctcccaagcctacaa

SEQ ID NO: 15637 - DNA, 122 bp, Homo sapiens
  misc_feature (61)..(62): /note="This region represents a CpG dinucleotide"
  misc_feature (61)..(61): /note="Nucleotide may be methylated to form 5-methylcytosine"
aagttttaccacataacatgggtgacccatggctcattagcctctgtgctttggtttcctcgtgtacagaacaggaataacagtaaacccacttcacgggattgctgtgaggattaagtgag

SEQ ID NO: 15638 - DNA, 122 bp, Homo sapiens
  misc_feature (61)..(62): /note="This region represents a CpG dinucleotide"
  misc_feature (61)..(61): /note="Nucleotide may be methylated to form 5-methylcytosine"
cttaccacatgcaccaaacagactgcaactggcagcccttgcctctttccacacccacagcgagacgccctatgaggaggccaccttgagaagagtcaactctcaactcttcatgccagtaa

SEQ ID NO: 15639 - DNA, 122 bp, Homo sapiens
  misc_feature (61)..(62): /note="This region represents a CpG dinucleotide"
  misc_feature (61)..(61): /note="Nucleotide may be methylated to form 5-methylcytosine"
aaattgtcgccaagcccattaggctacctgaactgtctcagaaagtgcgggtggctgcgtcgaacggtggtggctcagaggaagagattggggccggcagcgacctaggtacctcactctgg

SEQ ID NO: 15640 - DNA, 122 bp, Homo sapiens
  misc_feature (61)..(62): /note="This region represents a CpG dinucleotide"
  misc_feature (61)..(61): /note="Nucleotide may be methylated to form 5-methylcytosine"
tattttgtgactctcagctctttgagaaggcagtgtgtctcagaaagccagcggtaaaagcgatggttgctaagggaacaattgaattgctgacactgagacatgtaatgtgactgaaaact

SEQ ID NO: 15641 - DNA, 122 bp, Homo sapiens
  misc_feature (61)..(62): /note="This region represents a CpG dinucleotide"
  misc_feature (61)..(61): /note="Nucleotide may be methylated to form 5-methylcytosine"
cttgcttttagcgactgattctaaaccaagccaacagttcacattctaagcatagtgctgcgtgtctttcatgtatttaagatatcttttaaaaatatacaagtctaagatatttagatcag

SEQ ID NO: 15642 - DNA, 122 bp, Homo sapiens
  misc_feature (61)..(62): /note="This region represents a CpG dinucleotide"
  misc_feature (61)..(61): /note="Nucleotide may be methylated to form 5-methylcytosine"
ccccaacctctgaaaaactccaacgtgagaactccccggcactgcttctgactggcacggcggtggcaggtgagggcagccggccatctgcatctggtctggaccacagagcgtggagggct

SEQ ID NO: 15643 - DNA, 122 bp, Homo sapiens
  misc_feature (61)..(62): /note="This region represents a CpG dinucleotide"
  misc_feature (61)..(61): /note="Nucleotide may be methylated to form 5-methylcytosine"
tagaatagtggccaagaacacagagtgcttcagttgagtcccacgttttctacttattagcgatgtcactggaggcaatttatttaacagttttgtgacttgcttgtctcatatttaaaatg

SEQ ID NO: 15644 - DNA, 122 bp, Homo sapiens
  misc_feature (61)..(62): /note="This region represents a CpG dinucleotide"
  misc_feature (61)..(61): /note="Nucleotide may be methylated to form 5-methylcytosine"
gagcctctgaaaggctttgaggagtttgcaaatgccctgcaggggagcaacttcaggtctcgctgacctttatccctcaggagaggatctccagtgaggctgtgctctccgggaattctttt

SEQ ID NO: 15645 - DNA, 122 bp, Homo sapiens
  misc_feature (61)..(62): /note="This region represents a CpG dinucleotide"
  misc_feature (61)..(61): /note="Nucleotide may be methylated to form 5-methylcytosine"
gacatctgctctccttctcttgcccaaatacggtttctgaatagacaagtaattctgatccgtggtcttctggaggaagcaataatagaagtagaaatcttatacctagagaggaactggag

SEQ ID NO: 15646 - DNA, 122 bp, Homo sapiens
  misc_feature (61)..(62): /note="This region represents a CpG dinucleotide"
  misc_feature (61)..(61): /note="Nucleotide may be methylated to form 5-methylcytosine"
aggtcgatgggcacagcaggcactccctgagggtccccgtcccagcgacctcgccgcccgcgcccccaggtcaggcctgagaaatgactgtggccgccagagagagggagcccctgggagcc

SEQ ID NO: 15647 - DNA, 122 bp, Homo sapiens
  misc_feature (61)..(62): /note="This region represents a CpG dinucleotide"
  misc_feature (61)..(61): /note="Nucleotide may be methylated to form 5-methylcytosine"
tgggctattcttatgccttcaggaaacccacctttaccacctggctgttgtgactggcatcgctgaggctgtttctttgtgtataaaatcgaataaggacacatcacgtgctagcaatccac

SEQ ID NO: 15648 - DNA, 122 bp, Homo sapiens
  misc_feature (61)..(62): /note="This region represents a CpG dinucleotide"
  misc_feature (61)..(61): /note="Nucleotide may be methylated to form 5-methylcytosine"
gctgccccacctccagaatcgcctgctctaggaagctgtaacaggtgacaggtgtaccggcgctcctggagggaggtaaagtcatagtgtgcacatcacagtgactgatatttgcataacaa

SEQ ID NO: 15649 - DNA, 122 bp, Homo sapiens
  misc_feature (61)..(62): /note="This region represents a CpG dinucleotide"
  misc_feature (61)..(61): /note="Nucleotide may be methylated to form 5-methylcytosine"
gctctggacagaagcctgggattagtgagctgtgattacatcactccttttctgctcctccgcctttaagagcaagcttctttatgctatccctggatggttttgttccaacccctatgcta

SEQ ID NO: 15650 - DNA, 122 bp, Homo sapiens
  misc_feature (61)..(62): /note="This region represents a CpG dinucleotide"
  misc_feature (61)..(61): /note="Nucleotide may be methylated to form 5-methylcytosine"
catatcctttgactcggcaattgcactggcaggaattctgctgttatcctcacacacatacggctccaggcatatgtctaaggatcctcatagcagcaatgtctgcaagacttagtcactgg

SEQ ID NO: 15651 - DNA, 122 bp, Homo sapiens
  misc_feature (61)..(62): /note="This region represents a CpG dinucleotide"
  misc_feature (61)..(61): /note="Nucleotide may be methylated to form 5-methylcytosine"
actgttctggaaacagacttctcccttctcacgcagcttatgccactggcaaaagaggggcgggaaatgtgatccaggattaataatgcacagatgtttctcaggaagtagtatatcactgt

SEQ ID NO: 15652 - DNA, 122 bp, Homo sapiens
  misc_feature (61)..(62): /note="This region represents a CpG dinucleotide"
  misc_feature (61)..(61): /note="Nucleotide may be methylated to form 5-methylcytosine"
gtagtccttaagattataaagaacctgaaaaattcctatcacccaatgatgtcgtaaccacggtaagttgtagtgcactgcattactcacatatttttggtgatgctggagaaaaacaaacc

SEQ ID NO: 15653 - DNA, 122 bp, Homo sapiens
  misc_feature (61)..(62): /note="This region represents a CpG dinucleotide"
  misc_feature (61)..(61): /note="Nucleotide may be methylated to form 5-methylcytosine"
gccccaaaaagcccatggtcttgtgtatcttgtatggagggagggatgtaaacaatataacgtgataaatatgctggcctagaagtggcaactcattcatacgtggagattctagaaaggct

SEQ ID NO: 15654 - DNA, 122 bp, Homo sapiens
  misc_feature (61)..(62): /note="This region represents a CpG dinucleotide"
  misc_feature (61)..(61): /note="Nucleotide may be methylated to form 5-methylcytosine"
gcgtcagggcgccgaggctgaggtagcagccggaagtgcagccgaaggcgcagccggaagcgctgccacagtgccggtcgcacacgtggcactggctgcaacctcctggcaacagctgccag

SEQ ID NO: 15655 - DNA, 122 bp, Homo sapiens
  misc_feature (61)..(62): /note="This region represents a CpG dinucleotide"
  misc_feature (61)..(61): /note="Nucleotide may be methylated to form 5-methylcytosine"
taaacagggattgttttccacaacaaagtttgtggtaatttgttaccagcaataagaaaacgaatacattctgagcttttgttgcttagaaagcagtgcctgaggccaaggcttatgtgcta

SEQ ID NO: 15656 - DNA, 122 bp, Homo sapiens
  misc_feature (61)..(62): /note="This region represents a CpG dinucleotide"
  misc_feature (61)..(61): /note="Nucleotide may be methylated to form 5-methylcytosine"
aacaaaaacaaaacaaaaaacaaacccaaacaagccacaaagaaaggagttggacccagacgggaaacaggccggtcctgaaggtcattttggcaacaatcaccaccgatatttacaacgaa

SEQ ID NO: 15657 - DNA, 122 bp, Homo sapiens
  misc_feature (61)..(62): /note="This region represents a CpG dinucleotide"
  misc_feature (61)..(61): /note="Nucleotide may be methylated to form 5-methylcytosine"
ttcatactcacacaaacttgtgtacatacaaaaatgactgtttggaaagcaaccacctaccgtgaagtgacccagaactttgcaccgttccatggataattgtaggaaaccaacaaatagtt

SEQ ID NO: 15658 - DNA, 122 bp, Homo sapiens
  misc_feature (61)..(62): /note="This region represents a CpG dinucleotide"
  misc_feature (61)..(61): /note="Nucleotide may be methylated to form 5-methylcytosine"
gggacttgttggcacacaaacgtcagcaacgtggtggatgtaaacctggccttggacagacgacaaaggcgatgattccaggccctcaagtgtgcctcagagaatgtatcagtgacaggaag

SEQ ID NO: 15659 - DNA, 122 bp, Homo sapiens
  misc_feature (61)..(62): /note="This region represents a CpG dinucleotide"
  misc_feature (61)..(61): /note="Nucleotide may be methylated to form 5-methylcytosine"
agagatggctgatgactgttggagtcgaagaggaatgaaatgccagaggtgtcatcaagacggacttgcttctggggtgggaatgactcaaagagccctgcccagggccacatctcaccaga

SEQ ID NO: 15660 - DNA, 122 bp, Homo sapiens
  misc_feature (61)..(62): /note="This region represents a CpG dinucleotide"
  misc_feature (61)..(61): /note="Nucleotide may be methylated to form 5-methylcytosine"
ccttgttagcttgcaagtaagtttcagacccttcacagttcttgacagtcatccataactcgctttgtatgctataatatctaaggtgtctaactccaaggtgtctagaacagagtaggtga

SEQ ID NO: 15661 - DNA, 122 bp, Homo sapiens
  misc_feature (61)..(62): /note="This region represents a CpG dinucleotide"
  misc_feature (61)..(61): /note="Nucleotide may be methylated to form 5-methylcytosine"
agcccctgctgctccacggggaggagctagagtgattgtggtcatgggacaaggggacagcggcatggaaaacagagactcagcagcagaccaaaaagacgggtgcacacaatatatgactt

SEQ ID NO: 15662 - DNA, 122 bp, Homo sapiens
  misc_feature (61)..(62): /note="This region represents a CpG dinucleotide"
  misc_feature (61)..(61): /note="Nucleotide may be methylated to form 5-methylcytosine"
acaaatgtaaaagaaggtgccttacaggttataactttgcaaggatcatagaaggaaacacgcttgcaaactatgagaaatttgggctttgagccaagtttatctgatcactaaggacagga

SEQ ID NO: 15663 - DNA, 122 bp, Homo sapiens
  misc_feature (61)..(62): /note="This region represents a CpG dinucleotide"
  misc_feature (61)..(61): /note="Nucleotide may be methylated to form 5-methylcytosine"
ctgctctagccaccagcaaggttcccaagtgaaagtgagtcctctcaggagaaatgaaagcgctgtctctttaggtgcccactccttacccaccagcggagcaatgttttccaggctggcca

SEQ ID NO: 15664 - DNA, 122 bp, Homo sapiens
  misc_feature (61)..(62): /note="This region represents a CpG dinucleotide"
  misc_feature (61)..(61): /note="Nucleotide may be methylated to form 5-methylcytosine"
gtgcacatgaagtcaaagtggaagtaagctattaagatcttagtatgagtcaaaaagggccggctgacagtccttggctatatgactgggagcaagtgccttaacctttctcaacatcagtt

SEQ ID NO: 15665 - DNA, 122 bp, Homo sapiens
  misc_feature (61)..(62): /note="This region represents a CpG dinucleotide"
  misc_feature (61)..(61): /note="Nucleotide may be methylated to form 5-methylcytosine"
agaactcctgagccaaagcaatcctcaccttggtctcccatgtagctgcaactataggtgcgtgccaccatgactggctactttttaatttttatttttgtagagacagagtctcactatgt

SEQ ID NO: 15666 - DNA, 122 bp, Homo sapiens
  misc_feature (61)..(62): /note="This region represents a CpG dinucleotide"
  misc_feature (61)..(61): /note="Nucleotide may be methylated to form 5-methylcytosine"
tttctcctaagtcatattctgtgggagcctcccactatttgtaacagtactcattaagttcgtacttaacaagtaagcaatgagctgctgtctttggcctctagaaagattcaaggtgaacc

SEQ ID NO: 15667 - DNA, 122 bp, Homo sapiens
  misc_feature (61)..(62): /note="This region represents a CpG dinucleotide"
  misc_feature (61)..(61): /note="Nucleotide may be methylated to form 5-methylcytosine"
atcagtgccaagtcctgcttcctctgccatctgtctgccttgccatttaagtcagcctgacgtactcatgggcccacttgctccaccccaccccaatcaaagggcagagactgaaaactgac

SEQ ID NO: 15668 - DNA, 122 bp, Homo sapiens
  misc_feature (61)..(62): /note="This region represents a CpG dinucleotide"
  misc_feature (61)..(61): /note="Nucleotide may be methylated to form 5-methylcytosine"
tagctcttgtgctcttagacaacataaatgcagacagtcatggaagggctgcccagcccacgctaccacctctgagcccttacataagctctgtcaggtttaccttcctgctctggattgat

SEQ ID NO: 15669 - DNA, 122 bp, Homo sapiens
  misc_feature (61)..(62): /note="This region represents a CpG dinucleotide"
  misc_feature (61)..(61): /note="Nucleotide may be methylated to form 5-methylcytosine"
ggtgcttttaaatacaggtactattcttaccttcattttatgggtgatgaaactgaagcacggagaggttaggcaacttctccatggccacacagcttgtgagtggtagcattcaaacccat

SEQ ID NO: 15670 - DNA, 122 bp, Homo sapiens
  misc_feature (61)..(62): /note="This region represents a CpG dinucleotide"
  misc_feature (61)..(61): /note="Nucleotide may be methylated to form 5-methylcytosine"
ctcgcttcactgcaccgccctgcacaccaagataccagggccagctttcagttactggcccgggtctccaccaagcgcaggagacctggtctgctctggcctgcgagctgggactcggagct

SEQ ID NO: 15671 - DNA, 122 bp, Homo sapiens
  misc_feature (61)..(62): /note="This region represents a CpG dinucleotide"
  misc_feature (61)..(61): /note="Nucleotide may be methylated to form 5-methylcytosine"
tgaggtaatgtatgtaaagcaccgagtcaggtgcctgatacgcagtaggtgcttagcaaacggtagctaatactatcatcattgtcattgttattgtgacacccatgagcccacagacagag

SEQ ID NO: 15672 - DNA, 122 bp, Homo sapiens
  misc_feature (61)..(62): /note="This region represents a CpG dinucleotide"
  misc_feature (61)..(61): /note="Nucleotide may be methylated to form 5-methylcytosine"
agaaaaaaaaggtagatccaattatgttcaaacctgctgcctgctttccttcaccattgacgaattgctagtcaaccccttcttttcccaatctctctttttattggaatcaagtcagcctt

SEQ ID NO: 15673 - DNA, 122 bp, Homo sapiens
  misc_feature (61)..(62): /note="This region represents a CpG dinucleotide"
  misc_feature (61)..(61): /note="Nucleotide may be methylated to form 5-methylcytosine"
tgaatggactccagttcttggaacacttaatctttctataataaagaactcctggctgggcgcggtgtctcacacctgtaatcccagcactttgggaggccgaggcgggcggatcacctgag

SEQ ID NO: 15674 - DNA, 122 bp, Homo sapiens
  misc_feature (61)..(62): /note="This region represents a CpG dinucleotide"
  misc_feature (61)..(61): /note="Nucleotide may be methylated to form 5-methylcytosine"
ggcaactgactgactccacccagcctcatgactcctgaccctgctcagaggctgactcagcgcagaaggactgctttccacaccctatgatttgatccccaaccaatcagcagcacctctgc

SEQ ID NO: 15675 - DNA, 122 bp, Homo sapiens
  misc_feature (61)..(62): /note="This region represents a CpG dinucleotide"
  misc_feature (61)..(61): /note="Nucleotide may be methylated to form 5-methylcytosine"
tcaacaagccaaaccccaacttcaaaagctcctgccgaggagaggaaatactgatcagcacgtccctgctctgacgctgctcaccatggccttggcgctcactgctgccctgccccagaatc

SEQ ID NO: 15676 - DNA, 122 bp, Homo sapiens
  misc_feature (61)..(62): /note="This region represents a CpG dinucleotide"
  misc_feature (61)..(61): /note="Nucleotide may be methylated to form 5-methylcytosine"
gtttggaaaatagtgacatgtcagtacaaagggaatactgctctacaataagaaggaacacgccacagatacatagcatggatgaatgtcaaaaacattgtgagagaaaaatgcctgaacag

SEQ ID NO: 15677 - DNA, 122 bp, Homo sapiens
  misc_feature (61)..(62): /note="This region represents a CpG dinucleotide"
  misc_feature (61)..(61): /note="Nucleotide may be methylated to form 5-methylcytosine"
cccagaggctgaggtcagcttttgggctgctctttcttcagccatttactagtttcccatcgtaataataactacccctacctaagctttatagctcagcaaggactttcacaaacattctg

SEQ ID NO: 15678 - DNA, 122 bp, Homo sapiens
  misc_feature (61)..(62): /note="This region represents a CpG dinucleotide"
  misc_feature (61)..(61): /note="Nucleotide may be methylated to form 5-methylcytosine"
cacttcctgcatcatgttacccttccatcagatatctaccttctacctgtgcacctgtgacgtaatgtgctgacacatcgacaaaccacaagagagaaaataagacctggcaaatggagcat

SEQ ID NO: 15679 - DNA, 122 bp, Homo sapiens
  misc_feature (61)..(62): /note="This region represents a CpG dinucleotide"
  misc_feature (61)..(61): /note="Nucleotide may be methylated to form 5-methylcytosine"
ctgctggaggctgcccaggatcttctcacccaagagatgaatcagccgagtcaccacctgcgggcagacacaggagccaagagccacacgttttaaactgagaaacactgggaaccaaagac

SEQ ID NO: 15680 - DNA, 122 bp, Homo sapiens
  misc_feature (61)..(62): /note="This region represents a CpG dinucleotide"
  misc_feature (61)..(61): /note="Nucleotide may be methylated to form 5-methylcytosine"
aattaaatgacctaatgcaaactgttataagccaaagcctatggttcccagaaaaaggcacgctagacataaagctctcggaacaagtggggagaaatcttaaacagcattatgcacaaggg

SEQ ID NO: 15681 - DNA, 122 bp, Homo sapiens
  misc_feature (61)..(62): /note="This region represents a CpG dinucleotide"
  misc_feature (61)..(61): /note="Nucleotide may be methylated to form 5-methylcytosine"
tgcaagagcaacatcagagtggacgtgggtaagggttctgagccatctacagacaccacacgcacacaggacgccactgtgcaggatatttggcaaggtttcttactgttccaagttttttt

SEQ ID NO: 15682 - DNA, 122 bp, Homo sapiens
  misc_feature (61)..(62): /note="This region represents a CpG dinucleotide"
  misc_feature (61)..(61): /note="Nucleotide may be methylated to form 5-methylcytosine"
cggggggagactcatcaagcactttggccagtgcctggcgtgcatatgctgtgtgcttggcgttagcaggtggttcttactccgggacaggctctgctggtaggtgagctgtttgccaatcc

SEQ ID NO: 15683 - DNA, 122 bp, Homo sapiens
  misc_feature (61)..(62): /note="This region represents a CpG dinucleotide"
  misc_feature (61)..(61): /note="Nucleotide may be methylated to form 5-methylcytosine"
ctatccagaggaagtacaggcaaaaggaaagaggaagggtgaagcctggctcactctacccgcctgactcatggcttccggtgccataacccagacgacttgtttctgtgatttctcaatct

SEQ ID NO: 15684 - DNA, 122 bp, Homo sapiens
  misc_feature (61)..(62): /note="This region represents a CpG dinucleotide"
  misc_feature (61)..(61): /note="Nucleotide may be methylated to form 5-methylcytosine"
gagaggtagggcatttagggtgtgactgggtcatgagggcttagtgtgccattggattgacgggttatcatgagagtgggctagcatgctcagccctcaccatgtgataccctgcactgcct

SEQ ID NO: 15685 - DNA, 122 bp, Homo sapiens
  misc_feature (61)..(62): /note="This region represents a CpG dinucleotide"
  misc_feature (61)..(61): /note="Nucleotide may be methylated to form 5-methylcytosine"
gaattactgcagatggtgacattgaacaggaaataggtagttaagacacaggaaattgcacgtcagtaaaaagacacaccaataaagataaggaacagaaagtcccatgagagaatgtgaag

SEQ ID NO: 15686 - DNA, 122 bp, Homo sapiens
  misc_feature (61)..(62): /note="This region represents a CpG dinucleotide"
  misc_feature (61)..(61): /note="Nucleotide may be methylated to form 5-methylcytosine"
cacctctctcttcctccttttcataacggcatcatgtattaagttttgttatgagccaggcgtttaatttttttttttttggagacagagtcttactctgtcaccgaggctagagcgcggtg

SEQ ID NO: 15687 - DNA, 122 bp, Homo sapiens
  misc_feature (61)..(62): /note="This region represents a CpG dinucleotide"
  misc_feature (61)..(61): /note="Nucleotide may be methylated to form 5-methylcytosine"
catgtggtagccaaaacactaatgcagactcaactgcattaagagacaaagtgtacaggacgagggagtgcacagcaccacccctgccctggacaggccatagttagaatagagggcttggc

SEQ ID NO: 15688 - DNA, 122 bp, Homo sapiens
  misc_feature (61)..(62): /note="This region represents a CpG dinucleotide"
  misc_feature (61)..(61): /note="Nucleotide may be methylated to form 5-methylcytosine"
aataaatgaataatttataaacctttttctttccttttttttttcatatcaccaggtgaccgatattccagagtggtatttacttcatctggaggggagacattatggaatttacctgcaat

SEQ ID NO: 15689 - DNA, 122 bp, Homo sapiens
  misc_feature (61)..(62): /note="This region represents a CpG dinucleotide"
  misc_feature (61)..(61): /note="Nucleotide may be methylated to form 5-methylcytosine"
gagggaatgagtcatacccccaacccccagcataagggatgaaaatacagaagccagatacgagttcccttgtgctccatgcagaggtttccttccagattagaatacttaggtccccaatc

SEQ ID NO: 15690 - DNA, 122 bp, Homo sapiens
  misc_feature (61)..(62): /note="This region represents a CpG dinucleotide"
  misc_feature (61)..(61): /note="Nucleotide may be methylated to form 5-methylcytosine"
agccctttaactctctgaggctccgtgttctcagagtgactcgaggattcactgaggtgccgtgtgagaagtgggtggcccagacctggacacaaagaagccttgatcaatgtttgcagttt

SEQ ID NO: 15691 - DNA, 122 bp, Homo sapiens
  misc_feature (61)..(62): /note="This region represents a CpG dinucleotide"
  misc_feature (61)..(61): /note="Nucleotide may be methylated to form 5-methylcytosine"
tcagggtggcaggtcaccagttgactaatggcctcctccaaggtttgctggcagacactgcgttgccatgaaccctattgatcccagaagtttgcctgctgcttagacagtctttgcgggcg

SEQ ID NO: 15692 - DNA, 122 bp, Homo sapiens
  misc_feature (61)..(62): /note="This region represents a CpG dinucleotide"
  misc_feature (61)..(61): /note="Nucleotide may be methylated to form 5-methylcytosine"
gtgagggtgagtggcagccattgaggatgccatggctgtggtgacaggcagctcacactgcgtgtcctctctgcatagcaactcagcatctctgctgcttcctgactcatctgcccttcggc

SEQ ID NO: 15693 - DNA, 122 bp, Homo sapiens
  misc_feature (61)..(62): /note="This region represents a CpG dinucleotide"
  misc_feature (61)..(61): /note="Nucleotide may be methylated to form 5-methylcytosine"
agaatcaaatggagaaaacagtgaggatggtgtggggttccagaaacaagtgatcaactacgtcaaatgctggtaagaagtcaagtgagataaggacagaattaaccagagaatgggcaatg

SEQ ID NO: 15694 - DNA, 122 bp, Homo sapiens
  misc_feature (61)..(62): /note="This region represents a CpG dinucleotide"
  misc_feature (61)..(61): /note="Nucleotide may be methylated to form 5-methylcytosine"
ctcgcctttccctctcctcctgaaattcgttttcttgggggacagtagcatgcattccaacgtttccttgtgttttctcccacggaagcgagcatcctggaagcagtgcctcgttggaaagt

SEQ ID NO: 15695 - DNA, 122 bp, Homo sapiens
  misc_feature (61)..(62): /note="This region represents a CpG dinucleotide"
  misc_feature (61)..(61): /note="Nucleotide may be methylated to form 5-methylcytosine"
gggcagacattgcccgtaactgcaaagtgtaacaatgttgttgtcatcattatccaataacgccagagcaaagacattgtttttcacttttattattatacatcaaagatatggtattttcc

SEQ ID NO: 15696 - DNA, 122 bp, Homo sapiens
  misc_feature (61)..(62): /note="This region represents a CpG dinucleotide"
  misc_feature (61)..(61): /note="Nucleotide may be methylated to form 5-methylcytosine"
ggcaatctctttctctctctctgtctttcacacacacacacacacacacacacacacacacgaagaagaaattctaggagcaacaagaataaggaattaatgtgtgtctattatgtttctca

SEQ ID NO: 15697 - DNA, 122 bp, Homo sapiens
  misc_feature (61)..(62): /note="This region represents a CpG dinucleotide"
  misc_feature (61)..(61): /note="Nucleotide may be methylated to form 5-methylcytosine"
ttgacctctacttacttaacattagggaaatatcacagacccatgacagtggaggttttgcgacccttcagtgtatccttgtagtttcagagatgacttccaggtttccttgaaatgaaatg

SEQ ID NO: 15698 - DNA, 122 bp, Homo sapiens
  misc_feature (61)..(62): /note="This region represents a CpG dinucleotide"
  misc_feature (61)..(61): /note="Nucleotide may be methylated to form 5-methylcytosine"
ggacatcaacattcaataagcaattatgctgctccttcatactcgatctaaattagtccacgtttccctcaaagagaatccaacgaacctccaaacccggctcttaaattgcaatctctttg

SEQ ID NO: 15699 - DNA, 122 bp, Homo sapiens
  misc_feature (61)..(62): /note="This region represents a CpG dinucleotide"
  misc_feature (61)..(61): /note="Nucleotide may be methylated to form 5-methylcytosine"
ttctcacccctgaccttgcctagtcctaagcgtcctttctgccttgtcagaaggattccccgagccctcctgcccagtccggcttccgcaggagacctgagtttgttttcttttactgagtt

SEQ ID NO: 15700 - DNA, 122 bp, Homo sapiens
  misc_feature (61)..(62): /note="This region represents a CpG dinucleotide"
  misc_feature (61)..(61): /note="Nucleotide may be methylated to form 5-methylcytosine"
ctcctacaacaaatgcgaacaaccatatacccttcacatggcttatgtctagctctcaaacggtatcacaagtgtaactgctacaaagtatataatctggggcattattttcatgcttcaaa

SEQ ID NO: 15701 - DNA, 122 bp, Homo sapiens
  misc_feature (61)..(62): /note="This region represents a CpG dinucleotide"
  misc_feature (61)..(61): /note="Nucleotide may be methylated to form 5-methylcytosine"
tagggcccgcccaggccccaaccaccaccctggaaacagctgtgatggctctgcccagggcgccgaggccgggggaagggatctccagggagaggccctggatggggagaggaggtgatgag

SEQ ID NO: 15702 - DNA, 122 bp, Homo sapiens
  misc_feature (61)..(62): /note="This region represents a CpG dinucleotide"
  misc_feature (61)..(61): /note="Nucleotide may be methylated to form 5-methylcytosine"
aaaagggctgatggaagcaaagagaagaggaagtggttgtcggggtgagagctgggcccgcgccccacatggctgtcacacaggaagccctgctgaagcagctgtccccggaagaagccatt

SEQ ID NO: 15703 - DNA, 122 bp, Homo sapiens
  misc_feature (61)..(62): /note="This region represents a CpG dinucleotide"
  misc_feature (61)..(61): /note="Nucleotide may be methylated to form 5-methylcytosine"
ccaatcaactgaatggacccctcctctcagccaagggccttccaaagttaacctaaaaaacgagttcaggccataatgggaaggcagttcagacatgcctgattgtacccacctccctttgg

SEQ ID NO: 15704 - DNA, 122 bp, Homo sapiens
  misc_feature (61)..(62): /note="This region represents a CpG dinucleotide"
  misc_feature (61)..(61): /note="Nucleotide may be methylated to form 5-methylcytosine"
aaggaatcagacttgtttcattgaagcagaatttcttggcttcaccagttgctgcgtcatcgttttaatcgtctttgaactcttaaaattttaacatgcattttcaaaccttgtcttttaag

SEQ ID NO: 15705 - DNA, 122 bp, Homo sapiens
  misc_feature (61)..(62): /note="This region represents a CpG dinucleotide"
  misc_feature (61)..(61): /note="Nucleotide may be methylated to form 5-methylcytosine"
gggctatttattcaggaagttagtggacttgtttcccagctaagatctgggagcagtaatcgtcctctcttgtggagggtcaggtgtttgtagggggcgctgctggtggcttagaaaagttt

SEQ ID NO: 15706 - DNA, 122 bp, Homo sapiens
  misc_feature (61)..(62): /note="This region represents a CpG dinucleotide"
  misc_feature (61)..(61): /note="Nucleotide may be methylated to form 5-methylcytosine"
ccccatcgtttgtccagtcagatccggattcatcacacacacattctgctctctgtataacgagaaaagaaaaaaatgtaagataaaaggaaaaatacttagcaagttgttattaattttta

SEQ ID NO: 15707 - DNA, 122 bp, Homo sapiens
  misc_feature (61)..(62): /note="This region represents a CpG dinucleotide"
  misc_feature (61)..(61): /note="Nucleotide may be methylated to form 5-methylcytosine"
gatagcatcagaggaagagataagctgccccttagggagctgattgtaatgcgttccagacgtctgcacgcccctggtgcaagcaccagctttctgttaaagactcagggttatgttgtttg

SEQ ID NO: 15708 - DNA, 122 bp, Homo sapiens
  misc_feature (61)..(62): /note="This region represents a CpG dinucleotide"
  misc_feature (61)..(61): /note="Nucleotide may be methylated to form 5-methylcytosine"
taaggattgcttggttagccaagagtttagttactggcttggctgatggctcagcagacacgcaggcctttctttccctcctagtttaggttgaatgactcatactcaccaggttgaggcta

SEQ ID NO: 15709 - DNA, 122 bp, Homo sapiens
  misc_feature (61)..(62): /note="This region represents a CpG dinucleotide"
  misc_feature (61)..(61): /note="Nucleotide may be methylated to form 5-methylcytosine"
caagaggccttacctgggggggccagtgtgcagagggccctagagctgagaggccgcggacggagtaacagctggattctgaggacgtggaagaggccacaccacgcagcagaaggaaggag

SEQ ID NO: 15710 - DNA, 122 bp, Homo sapiens
  misc_feature (61)..(62): /note="This region represents a CpG dinucleotide"
  misc_feature (61)..(61): /note="Nucleotide may be methylated to form 5-methylcytosine"
caggttaaagttcaaactccttaacatggtcctttatgacctggctcctgcctgcctaaccggcttcatctttggtcactcactcacatttcagccacactaaactactctgagcttcctga

SEQ ID NO: 15711 - DNA, 122 bp, Homo sapiens
  misc_feature (61)..(62): /note="This region represents a CpG dinucleotide"
  misc_feature (61)..(61): /note="Nucleotide may be methylated to form 5-methylcytosine"
attttctaatgggcctggacaggaggacccagctctgtttcttatgggtcttgtggatggcgctgggaaatcaggcttgcctaactggatatacagagcttagcattaacagctggacagag

SEQ ID NO: 15712 - DNA, 122 bp, Homo sapiens
  misc_feature (61)..(62): /note="This region represents a CpG dinucleotide"
  misc_feature (61)..(61): /note="Nucleotide may be methylated to form 5-methylcytosine"
aggaccattgggatggaggtgggcacaaagactgctgcttccagggtgtgcggccctggccgtgtgtctgacatcccataaatgtgtgtgtggtgtgactacgggcaccacaaactccgcag

SEQ ID NO: 15713 - DNA, 122 bp, Homo sapiens
  misc_feature (61)..(62): /note="This region represents a CpG dinucleotide"
  misc_feature (61)..(61): /note="Nucleotide may be methylated to form 5-methylcytosine"
accaaacaagaactttccctgacctgaatactgggttcaattgtgctgtgttcattattacgcagcattttacccacgattacttcctgttcaagttcctgtttgttgctgtactctgagac

SEQ ID NO: 15714 - DNA, 122 bp, Homo sapiens
  misc_feature (61)..(62): /note="This region represents a CpG dinucleotide"
  misc_feature (61)..(61): /note="Nucleotide may be methylated to form 5-methylcytosine"
tgacctatgaaattagccttttctacaatgcattcttagaagaggggcttggaactctctcgttagtggggctctcacaatttaattgtttgctcagcaactataaaaggaacaggtaaaca

SEQ ID NO: 15715 - DNA, 122 bp, Homo sapiens
  misc_feature (61)..(62): /note="This region represents a CpG dinucleotide"
  misc_feature (61)..(61): /note="Nucleotide may be methylated to form 5-methylcytosine"
actgtgcctgggccttcaccattagcctgccttggctgcttggttccagggagactccctcgatgctattccagcctttcagatggcctgttgtgtgacgctggctgtgtctcaatttccgg

SEQ ID NO: 15716 - DNA, 122 bp, Homo sapiens
  misc_feature (61)..(62): /note="This region represents a CpG dinucleotide"
  misc_feature (61)..(61): /note="Nucleotide may be methylated to form 5-methylcytosine"
ttgaaggaaagaccccaggaaagtgggatttgggtgttcgggtcacgagtgggctgaaggcgcctctactcacctgcacgtagtccaccgaatctccgagcgccttgaaggctgtgtacatg

SEQ ID NO: 15717 - DNA, 122 bp, Homo sapiens
  misc_feature (61)..(62): /note="This region represents a CpG dinucleotide"
  misc_feature (61)..(61): /note="Nucleotide may be methylated to form 5-methylcytosine"
aatactagagtgtttttcactttgctaactttactttctaggtgagctcatccaatctcacggctttaaataatctccttctctgactttccctttgactcctacacttccacatatgtttg

SEQ ID NO: 15718 - DNA, 122 bp, Homo sapiens
  misc_feature (61)..(62): /note="This region represents a CpG dinucleotide"
  misc_feature (61)..(61): /note="Nucleotide may be methylated to form 5-methylcytosine"
gtaagaggagatgacagtgtaaggacacagatgtgcagttgtctgtgggctgcaaagctgcgagctgaccaccaggctccagatagtcaggaaccctgaaggcctggaaatgcctgtctgca

SEQ ID NO: 15719 - DNA, 122 bp, Homo sapiens
  misc_feature (61)..(62): /note="This region represents a CpG dinucleotide"
  misc_feature (61)..(61): /note="Nucleotide may be methylated to form 5-methylcytosine"
tcccaagtacctaatttttcagcctcttaaagaactccagtagctcctacctaaatgctacgtgtattctgatcattcaaggatgtgggttttgtcatttgcatatggttttgccctgatct

SEQ ID NO: 15720 - DNA, 122 bp, Homo sapiens
  misc_feature (61)..(62): /note="This region represents a CpG dinucleotide"
  misc_feature (61)..(61): /note="Nucleotide may be methylated to form 5-methylcytosine"
ctttaacataggtacactcttatctattctaatgactcccccatggttgtggtgaggatacgcagaggtgaatctgaaagctgtttatggactctaggattaaaaaaaactactattgtcat

SEQ ID NO: 15721 - DNA, 122 bp, Homo sapiens
  misc_feature (61)..(62): /note="This region represents a CpG dinucleotide"
  misc_feature (61)..(61): /note="Nucleotide may be methylated to form 5-methylcytosine"
cccactccaagagtgtaatatttcacttaatacacttctgctgctttgcttcgctatctgcgtgtgtctcgtccagttctttgttcaggacaccaagaacctggaactacacggcaccatcc

SEQ ID NO: 15722 - DNA, 122 bp, Homo sapiens
  misc_feature (61)..(62): /note="This region represents a CpG dinucleotide"
  misc_feature (61)..(61): /note="Nucleotide may be methylated to form 5-methylcytosine"
cctgagaagttttccagtaggatagaatgtgaaagcccaaacaatgacctcagcagattccgaggcttcctgtgagtaatacatgatgaacatttgtgggtgtaagtggaattgtgtgttgc

SEQ ID NO: 15723 - DNA, 122 bp, Homo sapiens
  misc_feature (61)..(62): /note="This region represents a CpG dinucleotide"
  misc_feature (61)..(61): /note="Nucleotide may be methylated to form 5-methylcytosine"
tttgtttaaacacttttcatcaaattcctagtgcctagtacagagcttttaaccctaatacgtttcctgcgtgtacttattgaaggaataatgacaaactctgccttagattggtgactggc

SEQ ID NO: 15724 - DNA, 122 bp, Homo sapiens
  misc_feature (61)..(62): /note="This region represents a CpG dinucleotide"
  misc_feature (61)..(61): /note="Nucleotide may be methylated to form 5-methylcytosine"
gggccagggcgcgccgggatccgctgcgccaggaccctgcagacccggccgcggccgggccgagtgcctcccgccggggccttacgcccacggtccacgcttgcaacaccagggctgtacgg

SEQ ID NO: 15725 - DNA, 122 bp, Homo sapiens
  misc_feature (61)..(62): /note="This region represents a CpG dinucleotide"
  misc_feature (61)..(61): /note="Nucleotide may be methylated to form 5-methylcytosine"
gcttgtgtaagctatgcagcttctggttctgtttacgtcatcatgcactttggcatttgccgcttatcacaaagtgttgttagtcttccacatacctaatatgtgctacatatttgtgcaag

SEQ ID NO: 15726 - DNA, 122 bp, Homo sapiens
  misc_feature (61)..(62): /note="This region represents a CpG dinucleotide"
  misc_feature (61)..(61): /note="Nucleotide may be methylated to form 5-methylcytosine"
aatttaaatctaacatgtagtcagcaaactctaatgttctttacaaaataacctcaaacacgtttgtctgactcatcttttttatcccatcacttacagacaactgggcatggaagtgaagg

SEQ ID NO: 15727 - DNA, 122 bp, Homo sapiens
  misc_feature (61)..(62): /note="This region represents a CpG dinucleotide"
  misc_feature (61)..(61): /note="Nucleotide may be methylated to form 5-methylcytosine"
ctggtgaaccgggggttcccagtcccagtttccttagagtcagctttgtcagggctctggcgactgtggaaggatttgtggctagaggctgagcccagggcctggtggactgaccgaaccag

SEQ ID NO: 15728 - DNA, 122 bp, Homo sapiens
  misc_feature (61)..(62): /note="This region represents a CpG dinucleotide"
  misc_feature (61)..(61): /note="Nucleotide may be methylated to form 5-methylcytosine"
ttaaacccaatggagggcagcttccaggcacaggtcacggggaaattttggagggtagtacgtattgtattgcttgaaagttgttccatgaccaagaggttaaatgccttcttttgccaaga

SEQ ID NO: 15729 - DNA, 122 bp, Homo sapiens
  misc_feature (61)..(62): /note="This region represents a CpG dinucleotide"
  misc_feature (61)..(61): /note="Nucleotide may be methylated to form 5-methylcytosine"
caatctctccccacttcctcctagagaatctgccgtgggtgaggggccagaggggagtggcgccagcagccccagcaccacactgctgctgctggccctgggcaatctcacttcccttcctg

SEQ ID NO: 15730 - DNA, 122 bp, Homo sapiens
  misc_feature (61)..(62): /note="This region represents a CpG dinucleotide"
  misc_feature (61)..(61): /note="Nucleotide may be methylated to form 5-methylcytosine"
cgtgattcgctcgcctcagcctcccaaagtgctgggattacaggcatgagtcactgcacccggccgaagagatgtctttctaattcactcacagatgctatataggctagctggggctctgc

SEQ ID NO: 15731 - DNA, 122 bp, Homo sapiens
  misc_feature (61)..(62): /note="This region represents a CpG dinucleotide"
  misc_feature (61)..(61): /note="Nucleotide may be methylated to form 5-methylcytosine"
gtccaaaaagacaggtgttaaccggtggagctgggtctaaatccacaattttctcagtgccgctacaatggtagcagaattaagcaggattttctagtccttacaaataggttcaaggcagc

SEQ ID NO: 15732 - DNA, 122 bp, Homo sapiens
  misc_feature (61)..(62): /note="This region represents a CpG dinucleotide"
  misc_feature (61)..(61): /note="Nucleotide may be methylated to form 5-methylcytosine"
gtaagtctcaggacacaaaatgacattgagaatctagtttagcggggtttccaggaaagacgaagaaaggttatttaggtttctctttcatttctcttttgctacaaagggtttgggacatt

SEQ ID NO: 15733 - DNA, 122 bp, Homo sapiens
  misc_feature (61)..(62): /note="This region represents a CpG dinucleotide"
  misc_feature (61)..(61): /note="Nucleotide may be methylated to form 5-methylcytosine"
tcctgcttctgaatgacacgtgtcccaggctgtgctacttaggcacatagttccaggacacgcaatcccagatcccagttgtctgctggatttgctgcagggcttgcttctgactccctccc

SEQ ID NO: 15734 - DNA, 122 bp, Homo sapiens
  misc_feature (61)..(62): /note="This region represents a CpG dinucleotide"
  misc_feature (61)..(61): /note="Nucleotide may be methylated to form 5-methylcytosine"
gacgttctgaacaatactattaaccaccatgacctaattgacattctagaacactgcacccgaccagtttcagaatacacattctttccttgtgcatatgctacatccgccaaggtagactg

SEQ ID NO: 15735 - DNA, 122 bp, Homo sapiens
  misc_feature (61)..(62): /note="This region represents a CpG dinucleotide"
  misc_feature (61)..(61): /note="Nucleotide may be methylated to form 5-methylcytosine"
agcacgtgctcgtgttttacagagtgcctctgtgtacgttagctcatggggttggtctcacgctgtgctggcctgctaaccagaaatgtcaccctctgacaggaagagagtaagttggcatt

SEQ ID NO: 15736 - DNA, 122 bp, Homo sapiens
  misc_feature (61)..(62): /note="This region represents a CpG dinucleotide"
  misc_feature (61)..(61): /note="Nucleotide may be methylated to form 5-methylcytosine"
gttcaactttcttttcttggcagctgatttaccagtgacctctcccaaagtgaagtgacacgtaaacaagacacaaaaagttgactcccgtttaagaaatatttcaaggctagtgatgggta

SEQ ID NO: 15737 - DNA, 122 bp, Homo sapiens
  misc_feature (61)..(62): /note="This region represents a CpG dinucleotide"
  misc_feature (61)..(61): /note="Nucleotide may be methylated to form 5-methylcytosine"
aagtgaatctttctaatttgcagtaaaagtataccattcacacactttggtacttcagtacggcaaggttttgaaatccatttcacaagtggtggcagcacatttcacatcggatggaaaca

SEQ ID NO: 15738 - DNA, 122 bp, Homo sapiens
  misc_feature (61)..(62): /note="This region represents a CpG dinucleotide"
  misc_feature (61)..(61): /note="Nucleotide may be methylated to form 5-methylcytosine"
tgaatgacttttccaccctctttccttggcaggaacaagtgaccctgtcttccgtggcctcgtggggctggctctgctcctcctcccttgactgagagacgtcatggagattgggtggaggg

SEQ ID NO: 15739 - DNA, 122 bp, Homo sapiens
  misc_feature (61)..(62): /note="This region represents a CpG dinucleotide"
  misc_feature (61)..(61): /note="Nucleotide may be methylated to form 5-methylcytosine"
ctgtgggaaaaaaatttcaaaacctaaaaaactcaaggccataaaaggttttggaagtaacgaaggcagccttctgagtcacaaaattagggggcatcatgtgaaacaggaaatcttgctct

SEQ ID NO: 15740 - DNA, 122 bp, Homo sapiens
  misc_feature (61)..(62): /note="This region represents a CpG dinucleotide"
  misc_feature (61)..(61): /note="Nucleotide may be methylated to form 5-methylcytosine"
aatgcacagcatttcctgactgccaaagcagctcctgtaacttgcacttttttgaatatgcgtcattgactggaagccaatttagtcatcagagcacagccacaccctcctcactctgacac

SEQ ID NO: 15741 - DNA, 122 bp, Homo sapiens
  misc_feature (61)..(62): /note="This region represents a CpG dinucleotide"
  misc_feature (61)..(61): /note="Nucleotide may be methylated to form 5-methylcytosine"
gaagagaagcaatactattttcatgaaaaccaaacagcattaacaattttacaccattgacgttgtttacatggcaacttacaggaagtggcaatcctcaactgtttctgggtgagcaaaga

SEQ ID NO: 15742 - DNA, 122 bp, Homo sapiens
  misc_feature (61)..(62): /note="This region represents a CpG dinucleotide"
  misc_feature (61)..(61): /note="Nucleotide may be methylated to form 5-methylcytosine"
tgcacttgacaaacaactccgtctctgaaagtctaaccaaaagacccaattcacagtgaacggtcacctgccactcactaggaacaggctggcttgacgaaatggaagaatcaacattgtca

SEQ ID NO: 15743 - DNA, 122 bp, Homo sapiens
  misc_feature (61)..(62): /note="This region represents a CpG dinucleotide"
  misc_feature (61)..(61): /note="Nucleotide may be methylated to form 5-methylcytosine"
taaacatcacagcattatctaaactatattgcaattatttgttgacatgcccgactccaccgctaagttgtgagctagcttattctcatttatacctgccccactattagcatggtggcaca

SEQ ID NO: 15744 - DNA, 122 bp, Homo sapiens
  misc_feature (61)..(62): /note="This region represents a CpG dinucleotide"
  misc_feature (61)..(61): /note="Nucleotide may be methylated to form 5-methylcytosine"
ccatcctaaccagtgctggaatattcgttaatgctgccatccctaatgagtcacaattaacgtggtttagtgtaattctattgtgaggcacagcatgctcacctagcaaaaccagagcacac

SEQ ID NO: 15745 - DNA, 122 bp, Homo sapiens
  misc_feature (61)..(62): /note="This region represents a CpG dinucleotide"
  misc_feature (61)..(61): /note="Nucleotide may be methylated to form 5-methylcytosine"
atttatatagttataattcattataatgaatattattcttattcattcattgttcatctacgcagagtgctttgaacttgcctggcatgtacggtaagctattattcattcaacagtataaa

SEQ ID NO: 15746 - DNA, 122 bp, Homo sapiens
  misc_feature (61)..(62): /note="This region represents a CpG dinucleotide"
  misc_feature (61)..(61): /note="Nucleotide may be methylated to form 5-methylcytosine"
tttgatagataaactacaaatattagtaactcaccttttcctgagggttttagttcctaccgccactacatatatagggtcaaatgagactacatatagggtcaaatgagactacatatagg

SEQ ID NO: 15747 - DNA, 122 bp, Homo sapiens
  misc_feature (61)..(62): /note="This region represents a CpG dinucleotide"
  misc_feature (61)..(61): /note="Nucleotide may be methylated to form 5-methylcytosine"
cactgcacttggctgtgattcatcagcatgaacccttcctggattttcttctaggcttctcggccggcactgagtacatggacctgcagaatgacctaggccaggtgagccacgagggatgg

SEQ ID NO: 15748 - DNA, 122 bp, Homo sapiens
  misc_feature (61)..(62): /note="This region represents a CpG dinucleotide"
  misc_feature (61)..(61): /note="Nucleotide may be methylated to form 5-methylcytosine"
gggaggagtctcaggttatttgtggatatatttgaaaaccaccacagtatctactgtgatcgtcagaagtttaagacagctggccgtaattgaataaagagcgtactgatacagaaggtgga

SEQ ID NO: 15749 - DNA, 122 bp, Homo sapiens
  misc_feature (61)..(62): /note="This region represents a CpG dinucleotide"
  misc_feature (61)..(61): /note="Nucleotide may be methylated to form 5-methylcytosine"
agtggatacacatttaagcattatgatcattttgtgagcctttttcaaaactgcgctcaacgtccttgattttttccccttgtcatcagagcaccacagagaaagcctgcatcctggacacg

SEQ ID NO: 15750 - DNA, 122 bp, Homo sapiens
  misc_feature (61)..(62): /note="This region represents a CpG dinucleotide"
  misc_feature (61)..(61): /note="Nucleotide may be methylated to form 5-methylcytosine"
ggggtttacgcaaggtagtgatgaaaactaggagagaagtatctgcttccctttagtctgcgctgtggagttctgtgagtcatgttccatagacttacacatcactccagaaacatgcttca

SEQ ID NO: 15751 - DNA, 122 bp, Homo sapiens
  misc_feature (61)..(62): /note="This region represents a CpG dinucleotide"
  misc_feature (61)..(61): /note="Nucleotide may be methylated to form 5-methylcytosine"
gatagcttcttcctgctttggttggtaaaatgaactctttaagtgggcaattcatgatgtcgcaatagaatagtgaatgaactaaaaagaaaatgttcacaatataagcttaaaaagcaagt

SEQ ID NO: 15752 - DNA, 122 bp, Homo sapiens
  misc_feature (61)..(62): /note="This region represents a CpG dinucleotide"
  misc_feature (61)..(61): /note="Nucleotide may be methylated to form 5-methylcytosine"
cttgtgactcaccggtaagtaacccaggctccctctgactccctaggagagtactgtctccgacctgggccccagctaggatggggcaaccctaccctgtccattgaaggtgtgatgttagc

SEQ ID NO: 15753 - DNA, 122 bp, Homo sapiens
  misc_feature (61)..(62): /note="This region represents a CpG dinucleotide"
  misc_feature (61)..(61): /note="Nucleotide may be methylated to form 5-methylcytosine"
gtcctccacagaagtgatgatccaaacacagagacaagaaatggcactggcaccctgccacgggataaataaaataacaactaggcctggattacctggcaaatgtacaaatactacagatg

SEQ ID NO: 15754 - DNA, 122 bp, Homo sapiens
  misc_feature (61)..(62): /note="This region represents a CpG dinucleotide"
  misc_feature (61)..(61): /note="Nucleotide may be methylated to form 5-methylcytosine"
ttgtaagcaggagatatcctgaaatctggttctccctacataggatgaccagccagaggccgatgggtggaatgttcccacagagtcagagaggatgtgagtcatgccttcttacatcattt

SEQ ID NO: 15755 - DNA, 122 bp, Homo sapiens
  misc_feature (61)..(62): /note="This region represents a CpG dinucleotide"
  misc_feature (61)..(61): /note="Nucleotide may be methylated to form 5-methylcytosine"
gcgcaggagaggcaaaaatgtaatagtggtgagtttgatatagattgtgatgacatgccccgtgctgcccccaaaggtctttctatgcagtggggacagtgagagctgaggcagagtggcac

SEQ ID NO: 15756 - DNA, 122 bp, Homo sapiens
  misc_feature (61)..(62): /note="This region represents a CpG dinucleotide"
  misc_feature (61)..(61): /note="Nucleotide may be methylated to form 5-methylcytosine"
cccgccctgctgatgggacaacagtcttggcagaagactcaagctccctctggcaggtgccgcagctgggcctggccctggaggatgtgcagtctggacacccccacatcaggaacaccccg

SEQ ID NO: 15757 - DNA, 122 bp, Homo sapiens
  misc_feature (61)..(62): /note="This region represents a CpG dinucleotide"
  misc_feature (61)..(61): /note="Nucleotide may be methylated to form 5-methylcytosine"
agccgccgggagtgccagtcacccagtgctctgctctcctcccccccaacagtctgcacacgcagtttttatttgtgtacttttctcaaggctctaagctgttggcaggcattactcatgac

SEQ ID NO: 15758 - DNA, 122 bp, Homo sapiens
  misc_feature (61)..(62): /note="This region represents a CpG dinucleotide"
  misc_feature (61)..(61): /note="Nucleotide may be methylated to form 5-methylcytosine"
atgataaacaggtgtgatattcctgagtccctaggtagctataaggccagttagcctgggcggcttcagcctcctgctggtgacttcacctcgctgcctttcagtttcatcctctctaaaac

SEQ ID NO: 15759 - DNA, 122 bp, Homo sapiens
  misc_feature (61)..(62): /note="This region represents a CpG dinucleotide"
  misc_feature (61)..(61): /note="Nucleotide may be methylated to form 5-methylcytosine"
agtatgacagtcacttaaataggaagtagataacttgctgtgataactagaaagcatcatcgttagatgaaggatgaaggcaccatgaagtgcttggacaaagagagtcagaaatgcatggt

SEQ ID NO: 15760 - DNA, 122 bp, Homo sapiens
  misc_feature (61)..(62): /note="This region represents a CpG dinucleotide"
  misc_feature (61)..(61): /note="Nucleotide may be methylated to form 5-methylcytosine"
cagacatgcgggtgcatatgcctgggggtgtgagcacagcagagcccagaggcctgcaggcgtgtgcacacatccacaaagtgtccacacatccacaaagtgtcacaaatacacacaagtgt

SEQ ID NO: 15761 - DNA, 122 bp, Homo sapiens
  misc_feature (61)..(62): /note="This region represents a CpG dinucleotide"
  misc_feature (61)..(61): /note="Nucleotide may be methylated to form 5-methylcytosine"
cgggcctcttggcctcgcactggcgccctcacccacacatcgtccctttatccgctcagacgctgcaaagggccttctgtctccgggggtaggaccgcagaccctctggtggcctgcccgcc

SEQ ID NO: 15762 - DNA, 122 bp, Homo sapiens
  misc_feature (61)..(62): /note="This region represents a CpG dinucleotide"
  misc_feature (61)..(61): /note="Nucleotide may be methylated to form 5-methylcytosine"
tgaaaggggcacctgcgggaacctgcacagatgcagctgcctggtgggattacagcagtccgcccagccactgcccagggcgcctggaagcctgtcaagggcatagtcctttgtggctgatg

SEQ ID NO: 15763 - DNA, 122 bp, Homo sapiens
  misc_feature (61)..(62): /note="This region represents a CpG dinucleotide"
  misc_feature (61)..(61): /note="Nucleotide may be methylated to form 5-methylcytosine"
aggtatctttttattggctcaattcatgtcctattagtcttggaatttaacaaggcctcacggcaaagaaggtctggaagagaacttattaactttccctcagagtaatgagtcccatatgg

SEQ ID NO: 15764 - DNA, 122 bp, Homo sapiens
  misc_feature (61)..(62): /note="This region represents a CpG dinucleotide"
  misc_feature (61)..(61): /note="Nucleotide may be methylated to form 5-methylcytosine"
tttgtgtccaggagtaaccatggcacagagcctgtgggcagggagtcctgcttcagagcccgcctgggtttctggggaggtaatccctgcagctggcgggtggcccgcagctggggatgttt

SEQ ID NO: 15765 - DNA, 122 bp, Homo sapiens
  misc_feature (61)..(62): /note="This region represents a CpG dinucleotide"
  misc_feature (61)..(61): /note="Nucleotide may be methylated to form 5-methylcytosine"
tcccccctgccagccagtgcctccactcccaggtccctccactgtcacacagaccctgggcggcctctaagcccagaaattccaaggctaggccagaataattggggtgggtgggggcaggg

SEQ ID NO: 15766 - DNA, 122 bp, Homo sapiens
  misc_feature (61)..(62): /note="This region represents a CpG dinucleotide"
  misc_feature (61)..(61): /note="Nucleotide may be methylated to form 5-methylcytosine"
actgttatcattttaggagccttgaggtaatggagcactactgggtagtacagataaaagcgtggaaatggcagatacttggagctgcataagtgaactgcgatggaacagaagacctcatt

SEQ ID NO: 15767 - DNA, 122 bp, Homo sapiens
  misc_feature (61)..(62): /note="This region represents a CpG dinucleotide"
  misc_feature (61)..(61): /note="Nucleotide may be methylated to form 5-methylcytosine"
gactgctggcgccaataactgagctcttcaccttgcagaacttgacagctgggtactctgcggcaaggcagatcatgcaaccattcatggcttcggtccctggaatgccatcctcataaata

SEQ ID NO: 15768 - DNA, 122 bp, Homo sapiens
  misc_feature (61)..(62): /note="This region represents a CpG dinucleotide"
  misc_feature (61)..(61): /note="Nucleotide may be methylated to form 5-methylcytosine"
agggaaactccctttcccggtccgctaagtaacgggtgccttcccaggcactggcgctaccgctagaccaaggtgtcctcaagcggcctttatcaggatgtgatagaggactttcactctta

SEQ ID NO: 15769 - DNA, 122 bp, Homo sapiens
  misc_feature (61)..(62): /note="This region represents a CpG dinucleotide"
  misc_feature (61)..(61): /note="Nucleotide may be methylated to form 5-methylcytosine"
caggaagctactgtcaagagatgttacaaaggggcgggggagagtagggagttgaggtggcgggtaaggatatgccaagtgtcaagtagatagtgcaggaaagaaatgcacatttctccaag

SEQ ID NO: 15770 - DNA, 122 bp, Homo sapiens
  misc_feature (61)..(62): /note="This region represents a CpG dinucleotide"
  misc_feature (61)..(61): /note="Nucleotide may be methylated to form 5-methylcytosine"
cgcctcctggaatgctaggggaggtttccggagacttccttttcctcattatacacctggcgaatgcacaccgccccaaggaacctgatcaatggtgatgtcatcctgactgatggcttcag

SEQ ID NO: 15771 - DNA, 122 bp, Homo sapiens
  misc_feature (61)..(62): /note="This region represents a CpG dinucleotide"
  misc_feature (61)..(61): /note="Nucleotide may be methylated to form 5-methylcytosine"
aatgccataatgtcctggactatggtggggatggtgggtgttccccacacttgagcagaacgaagcctgtgtaagctgtgaaactgtcagctttggagattagtcatccttgctcagaccct

SEQ ID NO: 15772 - DNA, 122 bp, Homo sapiens
  misc_feature (61)..(62): /note="This region represents a CpG dinucleotide"
  misc_feature (61)..(61): /note="Nucleotide may be methylated to form 5-methylcytosine"
aataggataataaccgcattatagcaaaaggactcagatcccaacccccctgggacactgcgccctaggcgggctcacgccctcctcccccgcccatttcgaagacttgggttttcctctgg

SEQ ID NO: 15773 - DNA, 122 bp, Homo sapiens
  misc_feature (61)..(62): /note="This region represents a CpG dinucleotide"
  misc_feature (61)..(61): /note="Nucleotide may be methylated to form 5-methylcytosine"
catgccctatctttagagggcctccatttctttgtgcggtgtctgcagctgtggttagtgcgtgagataaaagtgcaggatcctataaatagataaattcagagtgttccagagtaagagac

SEQ ID NO: 15774 - DNA, 122 bp, Homo sapiens
  misc_feature (61)..(62): /note="This region represents a CpG dinucleotide"
  misc_feature (61)..(61): /note="Nucleotide may be methylated to form 5-methylcytosine"
tgggcgttgccgtctgacctgtgcacagatgtggccaggtgaggacacaagctgttgtctcgtttgctgtgtgctgttcgcagacacgtctcactaggcggtttgctcagaactccagagga

SEQ ID NO: 15775 - DNA, 122 bp, Homo sapiens
  misc_feature (61)..(62): /note="This region represents a CpG dinucleotide"
  misc_feature (61)..(61): /note="Nucleotide may be methylated to form 5-methylcytosine"
ggctcacttgtgcctccagcgcagcagtgagttcaggtagcatgtgtgcctgtctctgagcgggagcatcctcccccggctgtggcacctgggcaacgggacatcaattcctgctctttaat

SEQ ID NO: 15776 - DNA, 122 bp, Homo sapiens
  misc_feature (61)..(62): /note="This region represents a CpG dinucleotide"
  misc_feature (61)..(61): /note="Nucleotide may be methylated to form 5-methylcytosine"
tttccaagtccagggaacattctgttccctgggcttcagtttataactgaatgtgctttacgtttagaagacaagctatagcttgtaaaatgaatgtggaaataatctaaagtatgaggcct

SEQ ID NO: 15777 - DNA, 122 bp, Homo sapiens
  misc_feature (61)..(62): /note="This region represents a CpG dinucleotide"
  misc_feature (61)..(61): /note="Nucleotide may be methylated to form 5-methylcytosine"
ctccagcttgaaagggttttatttagaaagctacgaattggtttttggaagtgtgtcattcgcttcttccctggtgactagatgtatcacgtagtaagaagtaagaatgcaggaaacagaaa

SEQ ID NO: 15778 - DNA, 122 bp, Homo sapiens
  misc_feature (61)..(62): /note="This region represents a CpG dinucleotide"
  misc_feature (61)..(61): /note="Nucleotide may be methylated to form 5-methylcytosine"
ctcagtggtgtcttttttacagcccagagccgcacatgtcctgtccgtgttccggtcctgcggtgactcacagtcacatcacagtgcaggcagacgctcccctgacagcccattggctcttc

SEQ ID NO: 15779 - DNA, 122 bp, Homo sapiens
  misc_feature (61)..(62): /note="This region represents a CpG dinucleotide"
  misc_feature (61)..(61): /note="Nucleotide may be methylated to form 5-methylcytosine"
ctatagaacagaagtaagacaacagttggattctgaaagccagacaaggccccaggactccgagactgattcaaacctcacacactcagtggtggaggccagacacacactgttcaactacc

SEQ ID NO: 15780 - DNA, 122 bp, Homo sapiens
  misc_feature (61)..(62): /note="This region represents a CpG dinucleotide"
  misc_feature (61)..(61): /note="Nucleotide may be methylated to form 5-methylcytosine"
ctcctgggcatttctttaaactattcagttacagttgatcagcgcaacataacacctctgcgtagcaggcacagttggttgcctccccataggaaggggaacctatgtttcatattgcatat

SEQ ID NO: 15781 - DNA, 122 bp, Homo sapiens
  misc_feature (61)..(62): /note="This region represents a CpG dinucleotide"
  misc_feature (61)..(61): /note="Nucleotide may be methylated to form 5-methylcytosine"
acacttgctccacaacctcgcctactgctcccttttccagggccccacgactagcttccccgccctcacagggctagggagagggatagggaggaggttccccaccacctaagggggtgtca

SEQ ID NO: 15782 - DNA, 122 bp, Homo sapiens
  misc_feature (61)..(62): /note="This region represents a CpG dinucleotide"
  misc_feature (61)..(61): /note="Nucleotide may be methylated to form 5-methylcytosine"
agtgaaggggtaagactccggaacgttcggtctccgggtcccattcagccttcgttgaatcgcgcccttagactcacaacagttgcagatctaacgtaatttttaaagccacctttggcgcc

SEQ ID NO: 15783 - DNA, 122 bp, Homo sapiens
  misc_feature (61)..(62): /note="This region represents a CpG dinucleotide"
  misc_feature (61)..(61): /note="Nucleotide may be methylated to form 5-methylcytosine"
gatatggccctctcaccaatcacatgggatgcatgctgctagaaaacttctccagctgggcgtacctgaaccaccaccacccccaacccccttcctttttctactgtaaaacttttccaccc

SEQ ID NO: 15784 - DNA, 122 bp, Homo sapiens
  misc_feature (61)..(62): /note="This region represents a CpG dinucleotide"
  misc_feature (61)..(61): /note="Nucleotide may be methylated to form 5-methylcytosine"
acatttggacttcacctctatgcgagctgcagtcttgggatgtcaatatcacatggcagacggtttttcctccggcagatggtatgtctctttgccactccccccagccatcaagagaaatt

SEQ ID NO: 15785 - DNA, 122 bp, Homo sapiens
  misc_feature (61)..(62): /note="This region represents a CpG dinucleotide"
  misc_feature (61)..(61): /note="Nucleotide may be methylated to form 5-methylcytosine"
ctggctttcgatccctaagtctgaaggcacagcccctcccagctaccatcagacagggagcggcggctaggacagctgtatcacttcaatgttacttcaaccaaaccaagagggacagcaac

SEQ ID NO: 15786 - DNA, 122 bp, Homo sapiens
  misc_feature (61)..(62): /note="This region represents a CpG dinucleotide"
  misc_feature (61)..(61): /note="Nucleotide may be methylated to form 5-methylcytosine"
ctggctggccaggcccagggcctgggctcatgggctatattgagggctgagtcaccagcccgcgcctgggtcaggctgagtgtcactggctgctggggcctgagtcaggccccgatttatcc

SEQ ID NO: 15787 - DNA, 122 bp, Homo sapiens
  misc_feature (61)..(62): /note="This region represents a CpG dinucleotide"
  misc_feature (61)..(61): /note="Nucleotide may be methylated to form 5-methylcytosine"
ttgaggtttgttgatgaacttcctcgttgcactgaggtgaaatgttgaatgtcatgtggacgcaagtaggaacgtaattggtaggttgtgttctcatcttgtttgtcacaacatttttgact

SEQ ID NO: 15788 - DNA, 122 bp, Homo sapiens
  misc_feature (61)..(62): /note="This region represents a CpG dinucleotide"
  misc_feature (61)..(61): /note="Nucleotide may be methylated to form 5-methylcytosine"
ttatgaactccagagtaaacaaaaagtttgtacaataagggaaatataatatgagaataacgcttacacagtcataagtactgaatatgacattagcgtgttgggtgctgaagagagttgaa

SEQ ID NO: 15789 - DNA, 122 bp, Homo sapiens
  misc_feature (61)..(62): /note="This region represents a CpG dinucleotide"
  misc_feature (61)..(61): /note="Nucleotide may be methylated to form 5-methylcytosine"
aataatcaggacatttaaaaagttgctgtttataaaatactttttaaaaatgtcatcacacgcactatgagtgcactcagtcttgatgtctcgctaaagcattagctgtctagctccttctc

SEQ ID NO: 15790 - DNA, 122 bp, Homo sapiens
  misc_feature (61)..(62): /note="This region represents a CpG dinucleotide"
  misc_feature (61)..(61): /note="Nucleotide may be methylated to form 5-methylcytosine"
aaggaactacttggtttgaatttctccaagtctatgccaaactcctgaatgagtttggcccgcctttggtttatactgtttagccagccctgctctaactaggctcctgtccgcctgagaaa

SEQ ID NO: 15791 - DNA, 122 bp, Homo sapiens
  misc_feature (61)..(62): /note="This region represents a CpG dinucleotide"
  misc_feature (61)..(61): /note="Nucleotide may be methylated to form 5-methylcytosine"
gctttactatattttcttagagtaaagctataagcttatgctttgaacatgtaatgcattcgggtttaaaagaaaaaagagcaaacgttattgaaacccaaaccagaatgatttcacaagaa

SEQ ID NO: 15792 - DNA, 122 bp, Homo sapiens
  misc_feature (61)..(62): /note="This region represents a CpG dinucleotide"
  misc_feature (61)..(61): /note="Nucleotide may be methylated to form 5-methylcytosine"
atattataggcttgtctccatggcaactactgaacactgccattgtcgtgtgaaagcagccgcagacaatacacaaacaagtgagcccggctgtgttccagttcaactttatttatggacac

SEQ ID NO: 15793 - DNA, 122 bp, Homo sapiens
  misc_feature (61)..(62): /note="This region represents a CpG dinucleotide"
  misc_feature (61)..(61): /note="Nucleotide may be methylated to form 5-methylcytosine"
cgggaggcgtgggagcgcagggcgccccgggtccggatccggctacaggggcgaacagagcgggttctccatcccctggggtgaaatctctgggcccaggctttgagaccctctaactcgcc

SEQ ID NO: 15794 - DNA, 122 bp, Homo sapiens
  misc_feature (61)..(62): /note="This region represents a CpG dinucleotide"
  misc_feature (61)..(61): /note="Nucleotide may be methylated to form 5-methylcytosine"
cagggaaggcttttaccaggaagctgcctcaaagggaaagcagggggcaaaagggtttgacgccagtgtttgccactcctgctaagaataagcacccctctggaagagagtggggtgctagg

SEQ ID NO: 15795 - DNA, 122 bp, Homo sapiens
  misc_feature (61)..(62): /note="This region represents a CpG dinucleotide"
  misc_feature (61)..(61): /note="Nucleotide may be methylated to form 5-methylcytosine"
ctacaccgcttgtcattgacatgcccatttatgtaagtctggaaggtttctttaaggcctcgttacagagaatattgggtaataggatctttgcacaattttccgaaggaaagtttttacca

SEQ ID NO: 15796 - DNA, 122 bp, Homo sapiens
  misc_feature (61)..(62): /note="This region represents a CpG dinucleotide"
  misc_feature (61)..(61): /note="Nucleotide may be methylated to form 5-methylcytosine"
caacagggcacctttatgggatccttcagcctaccttttgtctggcataccaactgtcatcgtggtcaagttttatttctcattcccacctgcacctcacatcctcccaagcttgtccaact

SEQ ID NO: 15797 - DNA, 122 bp, Homo sapiens
  misc_feature (61)..(62): /note="This region represents a CpG dinucleotide"
  misc_feature (61)..(61): /note="Nucleotide may be methylated to form 5-methylcytosine"
tggtttttgtttttgtttttttaactgacagataacagtgtatgtatttatcatgtgcaacgtgacatattcttgaaaaatgcaagaggagcggatgttaagcactttcaccacaaaaatga

SEQ ID NO: 15798 - DNA, 122 bp, Homo sapiens
  misc_feature (61)..(62): /note="This region represents a CpG dinucleotide"
  misc_feature (61)..(61): /note="Nucleotide may be methylated to form 5-methylcytosine"
gtagcaatgtctaaaagatcccactaaaatgtgggacctgatgactgtcacatcctatttcgtaattacagtcatgccttatgaggacctggcttcacagccatgaaactctgaaaaagaca

SEQ ID NO: 15799 - DNA, 122 bp, Homo sapiens
  misc_feature (61)..(62): /note="This region represents a CpG dinucleotide"
  misc_feature (61)..(61): /note="Nucleotide may be methylated to form 5-methylcytosine"
ggattatgactttactttgttaagacatctaagtagacaggcccagcgagtcattggaaacgttcatctgtaactcataagagaagcaaaataattggtaatcctatgcaaaaaagcgaaat

SEQ ID NO: 15800 - DNA, 122 bp, Homo sapiens
  misc_feature (61)..(62): /note="This region represents a CpG dinucleotide"
  misc_feature (61)..(61): /note="Nucleotide may be methylated to form 5-methylcytosine"
tatggtagtttaaaagcagtccatagtctcatccatcacaaacatgctgataggcataaacgtgtttattaagtgaaacgtatcctttaaaaataaaaaagggaagcctgtatataaatgaa

SEQ ID NO: 15801 - DNA, 122 bp, Homo sapiens
  misc_feature (61)..(62): /note="This region represents a CpG dinucleotide"
  misc_feature (61)..(61): /note="Nucleotide may be methylated to form 5-methylcytosine"
tcatgttacggcaaaccttaagctgaatgaacaacttttcttctcttgaatatatcttaacgccaaattttgagtgcttttttgttacccatcctcatatgtcccagctagaaagaatcctg

SEQ ID NO: 15802 - DNA, 122 bp, Homo sapiens
  misc_feature (61)..(62): /note="This region represents a CpG dinucleotide"
  misc_feature (61)..(61): /note="Nucleotide may be methylated to form 5-methylcytosine"
acagctccacctaaacccacgggtgacttaaaagctgaagccttgtcataatcattgtcacgtactcttattatgatgaaactttgctcctctttttgctgaggagattcacctaagttact

SEQ ID NO: 15803 - DNA, 122 bp, Homo sapiens
  misc_feature (61)..(62): /note="This region represents a CpG dinucleotide"
  misc_feature (61)..(61): /note="Nucleotide may be methylated to form 5-methylcytosine"
acaaatacgaactgcttaaaatccagccattctctggcaactttctagactcctttaaatcgggttaaattatgtcatggtttgctatgattcactcagcaaatgttctgagctcctgctct

SEQ ID NO: 15804 - DNA, 122 bp, Homo sapiens
  misc_feature (61)..(62): /note="This region represents a CpG dinucleotide"
  misc_feature (61)..(61): /note="Nucleotide may be methylated to form 5-methylcytosine"
ctactcagcctttaaaaaacaggaaattctgcaatatgtgacaacatggatgaatgaggacgttctgataagtgaaataagccagtcacagaaagatatgtgattccatatgtgaagtatct

SEQ ID NO: 15805 - DNA, 122 bp, Homo sapiens
  misc_feature (61)..(62): /note="This region represents a CpG dinucleotide"
  misc_feature (61)..(61): /note="Nucleotide may be methylated to form 5-methylcytosine"
tgcgagctcagggcaggggtctgtattccaggaacttgggtgggcttcatagacccctgtcgttcccagaattataggcagcacggagtgtgcttgtgcacactttcctgggtggagaggca

SEQ ID NO: 15806 - DNA, 122 bp, Homo sapiens
  misc_feature (61)..(62): /note="This region represents a CpG dinucleotide"
  misc_feature (61)..(61): /note="Nucleotide may be methylated to form 5-methylcytosine"
gcttcaaatccagccataagctgataattgcagttcataagtatgataattgggtgctcacgcatgcgtgtgtgagatgtgtcaccctcaaaccttgttatgacgtcagcacattacccgtc

SEQ ID NO: 15807 - DNA, 122 bp, Homo sapiens
  misc_feature (61)..(62): /note="This region represents a CpG dinucleotide"
  misc_feature (61)..(61): /note="Nucleotide may be methylated to form 5-methylcytosine"
ttgggttgaagtgatagagggaagagcaggaaacatatggcctccgacctcaggaagtggcggggccacatacacccaaggcactgcttctgagttatagaaccatttttgtataatgtcga

SEQ ID NO: 15808 - DNA, 122 bp, Homo sapiens
  misc_feature (61)..(62): /note="This region represents a CpG dinucleotide"
  misc_feature (61)..(61): /note="Nucleotide may be methylated to form 5-methylcytosine"
taaatatagcatgaggtcaggttttgccttgtgggccagtttgagaattggcttattcatcgctataacaagaaaagagaagaaaccactgaagcccaatccacttattggtatgactcata

SEQ ID NO: 15809 - DNA, 122 bp, Homo sapiens
  misc_feature (61)..(62): /note="This region represents a CpG dinucleotide"
  misc_feature (61)..(61): /note="Nucleotide may be methylated to form 5-methylcytosine"
ttccttttttgaagcaagatcttgctctcttgcccaggtcggagtgcagtggcatgaccacggctcagtgcaggcttgacttccagggctcaagcaatactcgcacctcaggttttccagta

SEQ ID NO: 15810 - DNA, 122 bp, Homo sapiens
  misc_feature (61)..(62): /note="This region represents a CpG dinucleotide"
  misc_feature (61)..(61): /note="Nucleotide may be methylated to form 5-methylcytosine"
ttagacatgagcatgtcaagcatacaactattattcttgaaacgggagagttccctgaaccgctctcaggacttgtgacaggagtgtggctcatttactcagccactgtgcactcaaatccc

SEQ ID NO: 15811 - DNA, 122 bp, Homo sapiens
  misc_feature (61)..(62): /note="This region represents a CpG dinucleotide"
  misc_feature (61)..(61): /note="Nucleotide may be methylated to form 5-methylcytosine"
agcgagctccctggagacccatgcagcgggtcaggtgccagctgccgccaggtctgtgcgcggggccgggccaccagcgtgcggcttcccgctctggagagtttatggcccctgtcctcgga

SEQ ID NO: 15812 - DNA, 122 bp, Homo sapiens
  misc_feature (61)..(62): /note="This region represents a CpG dinucleotide"
  misc_feature (61)..(61): /note="Nucleotide may be methylated to form 5-methylcytosine"
ttcctcacagggtggtcctgtctgcacatgagtggagctttgcaaacctgccagttaaggcgtctctgccagggatggggtggggagcctaggggtagaaaacacagccctaagggtggaac

SEQ ID NO: 15813 - DNA, 122 bp, Homo sapiens
  misc_feature (61)..(62): /note="This region represents a CpG dinucleotide"
  misc_feature (61)..(61): /note="Nucleotide may be methylated to form 5-methylcytosine"
agactccctccacacccacagtgccccctgaggaagcctggccccacagatggtgactggcgggagccatcagaccccctgtctgattgattgcacttgagtgctagagaggaggccatgag

SEQ ID NO: 15814 - DNA, 122 bp, Homo sapiens
  misc_feature (61)..(62): /note="This region represents a CpG dinucleotide"
  misc_feature (61)..(61): /note="Nucleotide may be methylated to form 5-methylcytosine"
agtcaggtggcctgggctcctccaccctcgctaacagctaactccatggccatggacacacgcttgtgccacaggtgcagactttctaaagacttaggttttggagatctctctggtctccg

SEQ ID NO: 15815 - DNA, 122 bp, Homo sapiens
  misc_feature (61)..(62): /note="This region represents a CpG dinucleotide"
  misc_feature (61)..(61): /note="Nucleotide may be methylated to form 5-methylcytosine"
accaccatatgcctaatcctttcatagttatctagtgtcacagtccaatgcacacttcaacggaatcactagtttctatgaatgtcattagtacgagctggtctgcacatgggttcccttca

SEQ ID NO: 15816 - DNA, 122 bp, Homo sapiens
  misc_feature (61)..(62): /note="This region represents a CpG dinucleotide"
  misc_feature (61)..(61): /note="Nucleotide may be methylated to form 5-methylcytosine"
tgatgaagaacaagtaaataaaaaaccattgtgctaagtgctctccttcatttattctcacgatcacattctgaggtaggtattactatgcacattttacaggtcaggaaagcaaagctcac

SEQ ID NO: 15817 - DNA, 122 bp, Homo sapiens
  misc_feature (61)..(62): /note="This region represents a CpG dinucleotide"
  misc_feature (61)..(61): /note="Nucleotide may be methylated to form 5-methylcytosine"
ccaggtgatttgcacacaggtaaagcctgaaaagcctgcctcagaggatgtgaaagctctcgtttagttcagtgtggtcctcgggaaagctcttctgctcaccgcaagttggctggtttcca

SEQ ID NO: 15818 - DNA, 122 bp, Homo sapiens
  misc_feature (61)..(62): /note="This region represents a CpG dinucleotide"
  misc_feature (61)..(61): /note="Nucleotide may be methylated to form 5-methylcytosine"
cggtaatctaggactcccaggctttcaggaagcttaagccctggcccaaccttgattttacgtgacttcatagaaggtcctcattaccctagatgtcatatttatggacttcacaatggcat

SEQ ID NO: 15819 - DNA, 122 bp, Homo sapiens
  misc_feature (61)..(62): /note="This region represents a CpG dinucleotide"
  misc_feature (61)..(61): /note="Nucleotide may be methylated to form 5-methylcytosine"
ccccgggtgccctctcctgcgcctgctcccctgggagagagtgcgctgctgctgactccacggtgtgctgacacacaggaagaaaggcctcaggcagtgcacactgagcccgggactgtttc

SEQ ID NO: 15820 - DNA, 122 bp, Homo sapiens
  misc_feature (61)..(62): /note="This region represents a CpG dinucleotide"
  misc_feature (61)..(61): /note="Nucleotide may be methylated to form 5-methylcytosine"
gtgggcagcagtgagccttacctagttcccacatcgttttcaaggtcggtgtcactcctgcggtgctctggtgacagcacctggtttagatctaggcagtctgcacacagaattcagacctg

SEQ ID NO: 15821 - DNA, 122 bp, Homo sapiens
  misc_feature (61)..(62): /note="This region represents a CpG dinucleotide"
  misc_feature (61)..(61): /note="Nucleotide may be methylated to form 5-methylcytosine"
cttttctactctgtttactaagaaactctgagttcttttagtttgattagagtgaaaacccggatcactgcttcctgtgtttcagacctactgccagaattttattttttcaggggcaaaat

SEQ ID NO: 15822 - DNA, 122 bp, Homo sapiens
  misc_feature (61)..(62): /note="This region represents a CpG dinucleotide"
  misc_feature (61)..(61): /note="Nucleotide may be methylated to form 5-methylcytosine"
tgattctcggggatgtattgctctggggtctcttgcagcgtctgtgcaaggtcctgaaggcgtctgcaggtgttagttgccaagaaagctgtagagtatcacctgttgctccgttaccctct

SEQ ID NO: 15823 - DNA, 122 bp, Homo sapiens
  misc_feature (61)..(62): /note="This region represents a CpG dinucleotide"
  misc_feature (61)..(61): /note="Nucleotide may be methylated to form 5-methylcytosine"
tgttttaccaacttatcataaattagccacagaactgcccaaagtacaagccagaacttacgtaagtcaaaaactgagtcatgattcagtcataattaatgtttttccttccttcccctttt

SEQ ID NO: 15824 - DNA, 122 bp, Homo sapiens
  misc_feature (61)..(62): /note="This region represents a CpG dinucleotide"
  misc_feature (61)..(61): /note="Nucleotide may be methylated to form 5-methylcytosine"
gctgaaataagtttataaagtacagccctccctatttttgccattgatgacttaataccacggaggtttttcttacagttacgctgctgacctttaaaacaacgattaatggatttattttt

SEQ ID NO: 15825 - DNA, 122 bp, Homo sapiens
  misc_feature (61)..(62): /note="This region represents a CpG dinucleotide"
  misc_feature (61)..(61): /note="Nucleotide may be methylated to form 5-methylcytosine"
aatgtctgctgtacatctgagtacacaattgtctttcacagaagatggagcaaagtattacggaaagttcattggcttctgagtctgagagaaatgggttcaaatcctgaatacgttcctta

SEQ ID NO: 15826 - DNA, 122 bp, Homo sapiens
  misc_feature (61)..(62): /note="This region represents a CpG dinucleotide"
  misc_feature (61)..(61): /note="Nucleotide may be methylated to form 5-methylcytosine"
actggcttcaggagtgaaggtgcagaccttcgcggtgagtgttacagctcataaaggcggcgcacacccagagagtgagcagcagcaagatttattgcaaacagttaaagaacaaagcttcc

SEQ ID NO: 15827 - DNA, 122 bp, Homo sapiens
  misc_feature (61)..(62): /note="This region represents a CpG dinucleotide"
  misc_feature (61)..(61): /note="Nucleotide may be methylated to form 5-methylcytosine"
aaatatttattactctgccagccactgttcaaggtgctgaggataaaacaaggaaaggaacgaagtctctgtgttcgttagagcttttatattctaataggggaaacagcaaaaaataaaca

SEQ ID NO: 15828 - DNA, 122 bp, Homo sapiens
  misc_feature (61)..(62): /note="This region represents a CpG dinucleotide"
  misc_feature (61)..(61): /note="Nucleotide may be methylated to form 5-methylcytosine"
agcttgtgccatatattgccattttctccaaggggtgttaaataatttcccacctctgcacgttattatgactctcagtactcacatcgctctggaggtcataggcctgccgagcatggatg

SEQ ID NO: 15829 - DNA, 122 bp, Homo sapiens
  misc_feature (61)..(62): /note="This region represents a CpG dinucleotide"
  misc_feature (61)..(61): /note="Nucleotide may be methylated to form 5-methylcytosine"
agcctggtttggttctcattctttacatagaatttctgggcactcagggctaggatctgccgttaggctaaggagtgcctggctttgtggaaagacagtggggttactttgtgagcagagcg

SEQ ID NO: 15830 - DNA, 122 bp, Homo sapiens
  misc_feature (61)..(62): /note="This region represents a CpG dinucleotide"
  misc_feature (61)..(61): /note="Nucleotide may be methylated to form 5-methylcytosine"
gtgagtaatcggtagtgcgtgcaggccctcggagatccctgaggtgtgattattttcatgcgtacatttctgtcgtcatcctccaaagggtgctttgtcatttccttcactctttcctcact

SEQ ID NO: 15831 - DNA, 122 bp, Homo sapiens
  misc_feature (61)..(62): /note="This region represents a CpG dinucleotide"
  misc_feature (61)..(61): /note="Nucleotide may be methylated to form 5-methylcytosine"
aagaaataaatattatttacctaagtgggtaggtgatgaaagaggagttttcaagagagacggagtaggtaaaggaagagagctagttgatttagtctgaaccttaagggaggaaaaaattt

SEQ ID NO: 15832 - DNA, 122 bp, Homo sapiens
  misc_feature (61)..(62): /note="This region represents a CpG dinucleotide"
  misc_feature (61)..(61): /note="Nucleotide may be methylated to form 5-methylcytosine"
ctacccagacacgattcagttcggctctatttagaaagatgaattaaaagctagcactgccgtacatccaaccctttggattaggaaaatagtcagagtgcaggtgtggcataatatgcaac

SEQ ID NO: 15833 - DNA, 122 bp, Homo sapiens
  misc_feature (61)..(62): /note="This region represents a CpG dinucleotide"
  misc_feature (61)..(61): /note="Nucleotide may be methylated to form 5-methylcytosine"
atccagtgctcagggccagtccctgctctgcacatggaagtgcaactgagattagaaacacggtgagacacctaatccctgcactgccctttcatgaatctcgacctgctaacatattcatc

SEQ ID NO: 15834 - DNA, 122 bp, Homo sapiens
  misc_feature (61)..(62): /note="This region represents a CpG dinucleotide"
  misc_feature (61)..(61): /note="Nucleotide may be methylated to form 5-methylcytosine"
caccatcatcatcatcgtcagtggctgcagcatctttgctaacatttattaagtgcttaccgtctaccaggttctgtagtaattacctgacctgcattattttatttaattctccacagaat

SEQ ID NO: 15835 - DNA, 122 bp, Homo sapiens
  misc_feature (61)..(62): /note="This region represents a CpG dinucleotide"
  misc_feature (61)..(61): /note="Nucleotide may be methylated to form 5-methylcytosine"
gagaataaataacttagttcatacttcctccctcaaagttaaaagatattccctttgcagcgaaaaatggagctttgaggctccttcgagaaacgctccttggggttgtagaaaggaggaag

SEQ ID NO: 15836 - DNA, 122 bp, Homo sapiens
  misc_feature (61)..(62): /note="This region represents a CpG dinucleotide"
  misc_feature (61)..(61): /note="Nucleotide may be methylated to form 5-methylcytosine"
aataataaggttacctcgtgactgtaataattctggtatgaccatttctgtgatgccaagcggcgttttcaagagtcctattagaaatgtatttggcatcttgaatagcttgaacctattac

SEQ ID NO: 15837 - DNA, 122 bp, Homo sapiens
  misc_feature (61)..(62): /note="This region represents a CpG dinucleotide"
  misc_feature (61)..(61): /note="Nucleotide may be methylated to form 5-methylcytosine"
aagcaaagatccaggtaagaaaatgggtatcgttggccgcataatgtggtcaatagtatgcgatgtgagaaaaataattttgaaaacttgagaaagcaaagggcgtgaatcttaatctagaa

SEQ ID NO: 15838 - DNA, 122 bp, Homo sapiens
  misc_feature (61)..(62): /note="This region represents a CpG dinucleotide"
  misc_feature (61)..(61): /note="Nucleotide may be methylated to form 5-methylcytosine"
agagaccacttaggaagctgttgcagtaactctggcatgaaatgttggtgatcaaaaccacggtggtggcagtgggaaaggaggcaagtggaggagtccagaaatatacacaaagttgaggt

SEQ ID NO: 15839 - DNA, 122 bp, Homo sapiens
  misc_feature (61)..(62): /note="This region represents a CpG dinucleotide"
  misc_feature (61)..(61): /note="Nucleotide may be methylated to form 5-methylcytosine"
gctgtggagttgtaatattttatgtttttgtagcctccacaatttaaatttgtctttgtacggtatctgagtggatcccttagagacagattggaacccagagggagaaaattatttgcatt

SEQ ID NO: 15840 - DNA, 122 bp, Homo sapiens
  misc_feature (61)..(62): /note="This region represents a CpG dinucleotide"
  misc_feature (61)..(61): /note="Nucleotide may be methylated to form 5-methylcytosine"
ggaaggtaggaatctttgaatgaatacgtaagatgtaagtcctgagattcaacaattttacgatgtcatctgagaaaggacagaaggatgtgttcccacatattgagtcatcacttgtatgt

SEQ ID NO: 15841 - DNA, 122 bp, Homo sapiens
  misc_feature (61)..(62): /note="This region represents a CpG dinucleotide"
  misc_feature (61)..(61): /note="Nucleotide may be methylated to form 5-methylcytosine"
tcagatctaagcacatatcttaggttttctggagtgatcctgacatttaggtattttgtgcgagtcagacagtctgtccttgtgtttggcttggaaaacatgtttgccgtaactagagctag

SEQ ID NO: 15842 - DNA, 122 bp, Homo sapiens
  misc_feature (61)..(62): /note="This region represents a CpG dinucleotide"
  misc_feature (61)..(61): /note="Nucleotide may be methylated to form 5-methylcytosine"
gtcatctcaccctactcaaacgcactgaatcagaatctctaggccttagaccaagacatccgtctaatgaaaggaagcacaaaaaaccatcaagagaaacaacctttaactcccaaaggaat

SEQ ID NO: 15843 - DNA, 122 bp, Homo sapiens
  misc_feature (61)..(62): /note="This region represents a CpG dinucleotide"
  misc_feature (61)..(61): /note="Nucleotide may be methylated to form 5-methylcytosine"
ctctttacaacactcctaaaatctaaaataaaagggaagtctcaggggtctaaagtagaacgctggacctccaggggaaataattttcttgtaactgtaggtgtgtgtacctgttcattatc

SEQ ID NO: 15844 - DNA, 122 bp, Homo sapiens
  misc_feature (61)..(62): /note="This region represents a CpG dinucleotide"
  misc_feature (61)..(61): /note="Nucleotide may be methylated to form 5-methylcytosine"
aagggttcactcaaaaatttgtgtatgatataggttcattatgctttgggatctaaaccccgaagaagacagaagcatgaccatctgtcatgactcatctaaagcatagatcacagaatggc

SEQ ID NO: 15845 - DNA, 122 bp, Homo sapiens
  misc_feature (61)..(62): /note="This region represents a CpG dinucleotide"
  misc_feature (61)..(61): /note="Nucleotide may be methylated to form 5-methylcytosine"
ctgccccacacatgcaggcaggaggaggcagccccacaggcccctctgccccacctggcacggacacatccagccagcaaacactgagcatctgtcacgtgtggagcactgtcctggaaaca

SEQ ID NO: 15846 - DNA, 122 bp, Homo sapiens
  misc_feature (61)..(62): /note="This region represents a CpG dinucleotide"
  misc_feature (61)..(61): /note="Nucleotide may be methylated to form 5-methylcytosine"
tttggagctctgtatctcattctttcggtttcttctggttttcaccaaatagcatgtgttcgccatctagccacgttgctggatgtgtgtccagtgtatggcgtctggcagctgaacagttg

SEQ ID NO: 15847 - DNA, 122 bp, Homo sapiens
  misc_feature (61)..(62): /note="This region represents a CpG dinucleotide"
  misc_feature (61)..(61): /note="Nucleotide may be methylated to form 5-methylcytosine"
gaagtttggctgtactatttcctagtcatgtgaccttgggtaagttatttaagagcctcacgttcaaggaagggacatcatttgaacaagaccttgaaggttgcacaaaatttaagcatgtg

SEQ ID NO: 15848 - DNA, 122 bp, Homo sapiens
  misc_feature (61)..(62): /note="This region represents a CpG dinucleotide"
  misc_feature (61)..(61): /note="Nucleotide may be methylated to form 5-methylcytosine"
acactctgaagttggcttcaacatagagcaattcaggtccagtcattctttttcataattcgactcattatttggcattcaaatataattgcagtttattcaaaatatttcaaaagtaagtt

SEQ ID NO: 15849 - DNA, 122 bp, Homo sapiens
  misc_feature (61)..(62): /note="This region represents a CpG dinucleotide"
  misc_feature (61)..(61): /note="Nucleotide may be methylated to form 5-methylcytosine"
tctcttcttacctgactcactgtcccaattttggatctcagccacactgggtttagctgacggatgtcatggccatcaagactaatagttccttgttgagaggaaaggaaaggaaagagtca

SEQ ID NO: 15850 - DNA, 122 bp, Homo sapiens
  misc_feature (61)..(62): /note="This region represents a CpG dinucleotide"
  misc_feature (61)..(61): /note="Nucleotide may be methylated to form 5-methylcytosine"
ctgagcaaggacctgggctcagagcagatatttccaagttttaacaaaacaaaatctcagcgggttttaatataatccaaatagtaggtgctcagagatttggcacacaaagcaggttagtg

SEQ ID NO: 15851 - DNA, 122 bp, Homo sapiens
  misc_feature (61)..(62): /note="This region represents a CpG dinucleotide"
  misc_feature (61)..(61): /note="Nucleotide may be methylated to form 5-methylcytosine"
aaatacagctcaacaacttcatccaactcaactgcagatttttcacagtctttaagtcaacgaattatcctggctttttctagagagtctttcacaaaataagattttattcctaacctcaa

SEQ ID NO: 15852 - DNA, 122 bp, Homo sapiens
  misc_feature (61)..(62): /note="This region represents a CpG dinucleotide"
  misc_feature (61)..(61): /note="Nucleotide may be methylated to form 5-methylcytosine"
ggctgaggtaaacattcttcatgactcagtgggattggagctcagttgcataattccatgcgttatgtaatcacagctacataaccataacatgggaggctcatcatctggctccaagccac

SEQ ID NO: 15853 - DNA, 122 bp, Homo sapiens
  misc_feature (61)..(62): /note="This region represents a CpG dinucleotide"
  misc_feature (61)..(61): /note="Nucleotide may be methylated to form 5-methylcytosine"
tatatatctggagacattcagctctgtacacacagataagccttaagcttgcagagactgcgtagtattcagttgtccccataccacaatgtgctgtgtctgtcccctattaatggacgtgg

SEQ ID NO: 15854 - DNA, 122 bp, Homo sapiens
  misc_feature (61)..(62): /note="This region represents a CpG dinucleotide"
  misc_feature (61)..(61): /note="Nucleotide may be methylated to form 5-methylcytosine"
atttaatagagatgtgaatacagagaactatatctctactataagacaaatagcaccctacgcacagtaatgacagcccaagtagtctacttgtaggaacaatgaaaggaagtgatgggggc

SEQ ID NO: 15855 - DNA, 122 bp, Homo sapiens
  misc_feature (61)..(62): /note="This region represents a CpG dinucleotide"
  misc_feature (61)..(61): /note="Nucleotide may be methylated to form 5-methylcytosine"
ttaaatgtattgtgttgattctgacaattctatgaagtaggaaatgtggagacatttatccgaagagagaaagtgaactacctaacaaaacagttaggaagtggtgggatcccaggtcggct

SEQ ID NO: 15856 - DNA, 122 bp, Homo sapiens
  misc_feature (61)..(62): /note="This region represents a CpG dinucleotide"
  misc_feature (61)..(61): /note="Nucleotide may be methylated to form 5-methylcytosine"
ttattttcattatgagaaacagctccattaatagtaacagatctctttgtttactttatccggaacaagtcccacccacaaagaagagagactgttcaaagaacctaacaaggaaagttggt

SEQ ID NO: 15857 - DNA, 122 bp, Homo sapiens
  misc_feature (61)..(62): /note="This region represents a CpG dinucleotide"
  misc_feature (61)..(61): /note="Nucleotide may be methylated to form 5-methylcytosine"
caagttgcgtgagacaattttatcaatcaatctaccaatctctctctgcatgtacatacacgtgggccctatcagttctgcttctctggagaactctgactaatacagacggttttctaaat

SEQ ID NO: 15858 - DNA, 122 bp, Homo sapiens
  misc_feature (61)..(62): /note="This region represents a CpG dinucleotide"
  misc_feature (61)..(61): /note="Nucleotide may be methylated to form 5-methylcytosine"
atgagagtcgggcaactgacttgggttccagttccagttttgcatttactccttactccccgtgtaatcctggtgggggcagtcaattcctcagagttgcagttttctcctagggctaaagg

SEQ ID NO: 15859 - DNA, 122 bp, Homo sapiens
  misc_feature (61)..(62): /note="This region represents a CpG dinucleotide"
  misc_feature (61)..(61): /note="Nucleotide may be methylated to form 5-methylcytosine"
aacttgcttaagcttctatggccaataatagtgagcagactccagtctgactccaaagcccgtgctattcccctcacacctctctcccttccccagctcaaaaaggcctatttttctaactg

SEQ ID NO: 15860 - DNA, 122 bp, Homo sapiens
  misc_feature (61)..(62): /note="This region represents a CpG dinucleotide"
  misc_feature (61)..(61): /note="Nucleotide may be methylated to form 5-methylcytosine"
tcagggtcaggcttggttctcagatggtcagggactacctcatggctgaaaacaggcacccgtccttcagtctgccgctgtaacacacagattttattgatcctactctgtactccaagaag

SEQ ID NO: 15861 - DNA, 122 bp, Homo sapiens
  misc_feature (61)..(62): /note="This region represents a CpG dinucleotide"
  misc_feature (61)..(61): /note="Nucleotide may be methylated to form 5-methylcytosine"
gaccatttcccggcataggctccggtgcccctgcccggctcccgccgggaagttctaggccgccgcacagaaagccctgccctccacgccgggtctctggagcgccctgggttgcccggccg

SEQ ID NO: 15862 - DNA, 122 bp, Homo sapiens
  misc_feature (61)..(62): /note="This region represents a CpG dinucleotide"
  misc_feature (61)..(61): /note="Nucleotide may be methylated to form 5-methylcytosine"
tgttggggttcacctgtgttggggttcgctgtgtgttggggtctgccgcgtgatggggttcgctgtgtgttggggtttgccgtgtgtttactgagtccagtgtttctgttctctgctcactg

SEQ ID NO: 15863 - DNA, 122 bp, Homo sapiens
  misc_feature (61)..(62): /note="This region represents a CpG dinucleotide"
  misc_feature (61)..(61): /note="Nucleotide may be methylated to form 5-methylcytosine"
aacccctctgttgggtaacatgaaaagactgtattcctctaagatgttgggattgatatacgtgatttaatctgcaataggtggaataaccaggggaactggttatgaatatgtgaatgcaa

SEQ ID NO: 15864 - DNA, 122 bp, Homo sapiens
  misc_feature (61)..(62): /note="This region represents a CpG dinucleotide"
  misc_feature (61)..(61): /note="Nucleotide may be methylated to form 5-methylcytosine"
tttgggcagacagggggctgcgggcttcttgccctggaggctgtgggagagccctttccccggggggaggcatgactgggatgccagggacttcaaggagaggtctgaagatggtgatagac

SEQ ID NO: 15865 - DNA, 122 bp, Homo sapiens
  misc_feature (61)..(62): /note="This region represents a CpG dinucleotide"
  misc_feature (61)..(61): /note="Nucleotide may be methylated to form 5-methylcytosine"
aggagggacaggggtcttccagcgcggttccaaggtgcactggagtacatgtttggtctacgtaagaattgggctgcagggggcgccatttacataaaatacttcgggattggagctacctg

SEQ ID NO: 15866 - DNA, 122 bp, Homo sapiens
  misc_feature (61)..(62): /note="This region represents a CpG dinucleotide"
  misc_feature (61)..(61): /note="Nucleotide may be methylated to form 5-methylcytosine"
tactttaatgtttctgtaggtctcattcagaaccatcttgttaaattcaggattcttcagcgtgtcaaggaagtttgaatacaggctatgaaagtttggctcaatactgactctcttcataa

SEQ ID NO: 15867 - DNA, 122 bp, Homo sapiens
  misc_feature (61)..(62): /note="This region represents a CpG dinucleotide"
  misc_feature (61)..(61): /note="Nucleotide may be methylated to form 5-methylcytosine"
tgggatagcagaacccttttttcacccaacaactgttagcagattaggatggctgggcagcgggggaagggtgggggcatactcctttcctataattcccttctctgaacctcatggaattt

SEQ ID NO: 15868 - DNA, 122 bp, Homo sapiens
  misc_feature (61)..(62): /note="This region represents a CpG dinucleotide"
  misc_feature (61)..(61): /note="Nucleotide may be methylated to form 5-methylcytosine"
gctggcttcctggccttgtgaaatcttctagaggcaggaagaagcctgagcgctccctgacgccacttgagtttgacttcatgggtttgccgtgtgcccctgaacaaaccagttatcctctc

SEQ ID NO: 15869 - DNA, 122 bp, Homo sapiens
  misc_feature (61)..(62): /note="This region represents a CpG dinucleotide"
  misc_feature (61)..(61): /note="Nucleotide may be methylated to form 5-methylcytosine"
ctttggccccagtaaattcttgcaacatatgaaatgcccagtggaaatgcaaaataatcacgtcatctttcacacatttatggtatgttggcaatgtttctaatagccactaagggacaaga

SEQ ID NO: 15870 - DNA, 122 bp, Homo sapiens
  misc_feature (61)..(62): /note="This region represents a CpG dinucleotide"
  misc_feature (61)..(61): /note="Nucleotide may be methylated to form 5-methylcytosine"
caaataagaatttaaaaaatagttattctactactgtagggtgctcccaaatattgctcacgtttaatacttacaacaactgctacaaactaggcaaggcaaatatccacacttcctcctac

SEQ ID NO: 15871 - DNA, 122 bp, Homo sapiens
  misc_feature (61)..(62): /note="This region represents a CpG dinucleotide"
  misc_feature (61)..(61): /note="Nucleotide may be methylated to form 5-methylcytosine"
caaactgtaacagtgttaagcaatttgtttcttggggaagtgtttaggtcatacaggctacgccctcattattaatgctactatgaaaagggcttgctagaatgcattctctctcttctgtt

SEQ ID NO: 15872 - DNA, 122 bp, Homo sapiens
  misc_feature (61)..(62): /note="This region represents a CpG dinucleotide"
  misc_feature (61)..(61): /note="Nucleotide may be methylated to form 5-methylcytosine"
cattttgacctaatgagacgctcagccctgtgttctgtaacttaagacatatcaatagcacgcccatgattgtagcagaggttagcatgcctgcattgcagttgtactcagtctatatgagt

SEQ ID NO: 15873 - DNA, 122 bp, Homo sapiens
  misc_feature (61)..(62): /note="This region represents a CpG dinucleotide"
  misc_feature (61)..(61): /note="Nucleotide may be methylated to form 5-methylcytosine"
agtcaatatttaaacaccaacaccatctctggcaaaacagagaacagagatctgggactgcggagagaagaaaaagagaaagcagacagacaaagcaattaggatgtggggctggcatgcct

SEQ ID NO: 15874 - DNA, 122 bp, Homo sapiens
  misc_feature (61)..(62): /note="This region represents a CpG dinucleotide"
  misc_feature (61)..(61): /note="Nucleotide may be methylated to form 5-methylcytosine"
gctataacagcacctgttggcttctaagtgcacagagttctcacaacaatgtgccaaaaccgccacccttcccatcctggcacccacctccccccaccccaggagacctgcatatcagatat

SEQ ID NO: 15875 - DNA, 122 bp, Homo sapiens
  misc_feature (61)..(62): /note="This region represents a CpG dinucleotide"
  misc_feature (61)..(61): /note="Nucleotide may be methylated to form 5-methylcytosine"
actgctgttggtatatgccatggcctcctgccaacctaccagccttcgatccttcagttccgacaggtctcacactctgagccatgcctcctacctgagggacagtgccgtgatggatgact

SEQ ID NO: 15876 - DNA, 122 bp, Homo sapiens
  misc_feature (61)..(62): /note="This region represents a CpG dinucleotide"
  misc_feature (61)..(61): /note="Nucleotide may be methylated to form 5-methylcytosine"
tcctgacacacacaggattgtacatttcctggagccattcttcctacaacaccacatttacgaaaagcagctaacacatgagtgagcttaagggcttcagctgtgatcctactaatcctgtc

SEQ ID NO: 15877 - DNA, 122 bp, Homo sapiens
  misc_feature (61)..(62): /note="This region represents a CpG dinucleotide"
  misc_feature (61)..(61): /note="Nucleotide may be methylated to form 5-methylcytosine"
atccactggctttgggcttggctatggcacaggctttggctaatgggatgtgagggaacacgatgttcacttaccacatttgagcagaagcctaaacgtgactgtgtggcttagctagggcc

SEQ ID NO: 15878 - DNA, 122 bp, Homo sapiens
  misc_feature (61)..(62): /note="This region represents a CpG dinucleotide"
  misc_feature (61)..(61): /note="Nucleotide may be methylated to form 5-methylcytosine"
gtagcttactgaatctccagacacaagtgacacaatcttagatcatccattgcttagacacgtaagcaagctcagctcagagtaagagaattactcaacttgctcactttaccattacccat

SEQ ID NO: 15879 - DNA, 122 bp, Homo sapiens
  misc_feature (61)..(62): /note="This region represents a CpG dinucleotide"
  misc_feature (61)..(61): /note="Nucleotide may be methylated to form 5-methylcytosine"
gcacagtaacacactgcattgttttacatgtatctttgcctcacttcccttttttttccacgcttatttccctgttcttatgccttgcaaatacagtgtcagcactttaatccttgcttaaa

SEQ ID NO: 15880 - DNA, 122 bp, Homo sapiens
  misc_feature (61)..(62): /note="This region represents a CpG dinucleotide"
  misc_feature (61)..(61): /note="Nucleotide may be methylated to form 5-methylcytosine"
gccggcactgggcccgcgcccgtccccgacagatggccatccagccctgctggagcgcagcgtcggttcgagtaggccaatcccatttttggcgaaaacagattgttagaaagctcttcctt

SEQ ID NO: 15881 - DNA, 122 bp, Homo sapiens
  misc_feature (61)..(62): /note="This region represents a CpG dinucleotide"
  misc_feature (61)..(61): /note="Nucleotide may be methylated to form 5-methylcytosine"
actgtgattatccatttcagaaaatacacattcttctcagaaataggatttaattttaaacgtgtcgtttgttatgaaaattaatcacctaatgtcatagatagattagattggcaagggtc

SEQ ID NO: 15882 - DNA, 122 bp, Homo sapiens
  misc_feature (61)..(62): /note="This region represents a CpG dinucleotide"
  misc_feature (61)..(61): /note="Nucleotide may be methylated to form 5-methylcytosine"
aaatctgataagaagcatttacaagctattctcgctgaagcctgctacaggcttcatctgcgtaataagaaatttgctttccataattgcttatcttaatccagacagttcttttccattga

SEQ ID NO: 15883 - DNA, 122 bp, Homo sapiens
  misc_feature (61)..(62): /note="This region represents a CpG dinucleotide"
  misc_feature (61)..(61): /note="Nucleotide may be methylated to form 5-methylcytosine"
ggccaaggaggagagacaggctcacctgtttggtgagaagttccatgcagatggcccctccgcccagaacatacctgcatgagaaaggttagtcagctgtgcctgacaaaatctccaagtct

SEQ ID NO: 15884 - DNA, 122 bp, Homo sapiens
  misc_feature (61)..(62): /note="This region represents a CpG dinucleotide"
  misc_feature (61)..(61): /note="Nucleotide may be methylated to form 5-methylcytosine"
aaggcacacagcagcagctttccagttctctcatttcagaatttaaagctggaactcatgcgttggtttatgttttgttaaaccagtaaaagacaacaacaacaaaattcgtgcatggctgc

SEQ ID NO: 15885 - DNA, 122 bp, Homo sapiens
  misc_feature (61)..(62): /note="This region represents a CpG dinucleotide"
  misc_feature (61)..(61): /note="Nucleotide may be methylated to form 5-methylcytosine"
tagaaagcagaagttttttgtatactctgtttagtttctcacttcctgtgagcacaacttcgttaccacctgcagcctgtgctgtcttttcaccttttactttagaactaactgttcagtct

SEQ ID NO: 15886 - DNA, 122 bp, Homo sapiens
  misc_feature (61)..(62): /note="This region represents a CpG dinucleotide"
  misc_feature (61)..(61): /note="Nucleotide may be methylated to form 5-methylcytosine"
tagactgacttgtagactggcaagattactgatttcctcaagtttgacactggtagcgtacgtatggttactggaggtgctaatctgagacaaactggtgtgatcaccaacagagaaaagac

SEQ ID NO: 15887 - DNA, 122 bp, Homo sapiens
  misc_feature (61)..(62): /note="This region represents a CpG dinucleotide"
  misc_feature (61)..(61): /note="Nucleotide may be methylated to form 5-methylcytosine"
attgcattagggttgctcaacccaagggtcatgatgcataactctctggccatggagaatcgtttgtgtggctagaatttcctgctgtgcccccagcccaatgccaggaaatctctcctctg

SEQ ID NO: 15888 - DNA, 122 bp, Homo sapiens
  misc_feature (61)..(62): /note="This region represents a CpG dinucleotide"
  misc_feature (61)..(61): /note="Nucleotide may be methylated to form 5-methylcytosine"
attgatgaatcaggtcaaccacatttgaaccacatttaattgatggataaccagacattacgtgcctcttgctgtgatacaataggaagtatagagcatcatatatagagtatccttgccta

SEQ ID NO: 15889 - DNA, 122 bp, Homo sapiens
  misc_feature (61)..(62): /note="This region represents a CpG dinucleotide"
  misc_feature (61)..(61): /note="Nucleotide may be methylated to form 5-methylcytosine"
tgggaggtcacaacacatagagaccagcttttctatcactgcatattaaactcttgattgcgttccccagcagcagcctaagtgatgctaatagagttcccagtttataattaagtaggcaa

SEQ ID NO: 15890 - DNA, 122 bp, Homo sapiens
  misc_feature (61)..(62): /note="This region represents a CpG dinucleotide"
  misc_feature (61)..(61): /note="Nucleotide may be methylated to form 5-methylcytosine"
ggtgtggagcacgtggattaagtagaacagaaacagatcctgccaggaccgccccagggacgccagagacacaaagcagaaactgattgtgcccggagggccctgcatcccttacccacgct

SEQ ID NO: 15891 - DNA, 122 bp, Homo sapiens
  misc_feature (61)..(62): /note="This region represents a CpG dinucleotide"
  misc_feature (61)..(61): /note="Nucleotide may be methylated to form 5-methylcytosine"
cgtctgggccaggatagagaggggagtaagatagacctttccttgctgttacagaacttacgtctttgttggagagacaggaaataaacaagtaagttaaaaacccacaatttggggtagag

SEQ ID NO: 15892 - DNA, 122 bp, Homo sapiens
  misc_feature (61)..(62): /note="This region represents a CpG dinucleotide"
  misc_feature (61)..(61): /note="Nucleotide may be methylated to form 5-methylcytosine"
gtgactcatctgacataatcttctaaacaatttagcatacgggtacgtacttacctaggccgtaatacctgtattttcttctctttcgttctttctttcttttctttgttttgagacaggct

SEQ ID NO: 15893 - DNA, 122 bp, Homo sapiens
  misc_feature (61)..(62): /note="This region represents a CpG dinucleotide"
  misc_feature (61)..(61): /note="Nucleotide may be methylated to form 5-methylcytosine"
ttccttgttatgcaagcgcttgctttcagtttcaagttgtacaatcctagggctcacaatcggtgacccaatacatgacagcctttcatagtctttaatgcagtctttacaggaaccttcca

SEQ ID NO: 15894 - DNA, 122 bp, Homo sapiens
  misc_feature (61)..(62): /note="This region represents a CpG dinucleotide"
  misc_feature (61)..(61): /note="Nucleotide may be methylated to form 5-methylcytosine"
gtaatgagcatcttcatccctttccttcaagattagaagaatatcattcttatggtattccgaaacatatgactcaaacacttgaccaaccagtgtaacttgatcgctattcatcttgaatc

SEQ ID NO: 15895 - DNA, 122 bp, Homo sapiens
  misc_feature (61)..(62): /note="This region represents a CpG dinucleotide"
  misc_feature (61)..(61): /note="Nucleotide may be methylated to form 5-methylcytosine"
tttcccaacgaaactcttctgccaggcggcataaggggcgcggccctccgctcttcagaacggctggtgtctgctttgaaaggtcctgactagaatctgtttatattttgactgcactggca

SEQ ID NO: 15896 - DNA, 122 bp, Homo sapiens
  misc_feature (61)..(62): /note="This region represents a CpG dinucleotide"
  misc_feature (61)..(61): /note="Nucleotide may be methylated to form 5-methylcytosine"
gggggatcttgactgacattttagatcctgtctgctgctcactgattatgactgtggacgcgtctccctgcttctctgggtctgtttcttcatctctaaaataggtatgctaacattccaat

SEQ ID NO: 15897 - DNA, 122 bp, Homo sapiens
  misc_feature (61)..(62): /note="This region represents a CpG dinucleotide"
  misc_feature (61)..(61): /note="Nucleotide may be methylated to form 5-methylcytosine"
gatgactcggacatagacatccaggaggacgatgaatccgacagtgagttggaagaaaggcggctgcccaagccacagacagccatggagatgctcatgcaaggtaccccggcgtctttcgc

SEQ ID NO: 15898 - DNA, 122 bp, Homo sapiens
  misc_feature (61)..(62): /note="This region represents a CpG dinucleotide"
  misc_feature (61)..(61): /note="Nucleotide may be methylated to form 5-methylcytosine"
agtggccctcctttggaggtaacagatgcctttcctaagaactcaaagttctcttttcagcgtgctgtgacttgaatatggaaatcattttaatttcttcttttctcttatggggaaatttc

SEQ ID NO: 15899 - DNA, 122 bp, Homo sapiens
  misc_feature (61)..(62): /note="This region represents a CpG dinucleotide"
  misc_feature (61)..(61): /note="Nucleotide may be methylated to form 5-methylcytosine"
cccccaccaccaccattctacccacttccccttcatggtcttcttacccccgcaaagatacgaagctaaaagatccatcattcctgagcatgagaattgaggaaggcacaagatgagccctt

SEQ ID NO: 15900 - DNA, 122 bp, Homo sapiens
  misc_feature (61)..(62): /note="This region represents a CpG dinucleotide"
  misc_feature (61)..(61): /note="Nucleotide may be methylated to form 5-methylcytosine"
gttcaacagcaagcagctcctgccaagtgcttagtggctttctgcttgctggggcagtggcgccagtgctggcccaaggcccggccacctcagcaggacagcatgaggacagtccgggcctg

SEQ ID NO: 15901 - DNA, 122 bp, Homo sapiens
  misc_feature (61)..(62): /note="This region represents a CpG dinucleotide"
  misc_feature (61)..(61): /note="Nucleotide may be methylated to form 5-methylcytosine"
tgggggctgtgtccgtctgcctgcctgcccccctgcactgggcccttctgactttaattacgtcctccttggctaaattcacaggtggctttccttggaggaggcgtttacctctccccaag

SEQ ID NO: 15902 - DNA, 122 bp, Homo sapiens
  misc_feature (61)..(62): /note="This region represents a CpG dinucleotide"
  misc_feature (61)..(61): /note="Nucleotide may be methylated to form 5-methylcytosine"
tggctgattcaagaagaacacgtgcaaagcggggcttattcacaggagtctggtgttggccgttaggtttgatcgtggtcagcagctgtgtgatgtgtgggttctgggtcagtgcgatgaag

SEQ ID NO: 15903 - DNA, 122 bp, Homo sapiens
  misc_feature (61)..(62): /note="This region represents a CpG dinucleotide"
  misc_feature (61)..(61): /note="Nucleotide may be methylated to form 5-methylcytosine"
tcttgaagtgagggggagttttcttgttttttctctctcctcctcccatttccttctccacgtcactcccacccaacctgtggtctgtctccttcgcattctcatccgcctcctctgtgttt

SEQ ID NO: 15904 - DNA, 122 bp, Homo sapiens
  misc_feature (61)..(62): /note="This region represents a CpG dinucleotide"
  misc_feature (61)..(61): /note="Nucleotide may be methylated to form 5-methylcytosine"
gcaaagtgccttttagcttgcgcgcctgcctctgagggccggggcgagagagacggctggcgtcggctgcaacggctgcaacgagtctgaaggcgctggcaagaaaatcccaaggaaagctc

SEQ ID NO: 15905 - DNA, 122 bp, Homo sapiens
  misc_feature (61)..(62): /note="This region represents a CpG dinucleotide"
  misc_feature (61)..(61): /note="Nucleotide may be methylated to form 5-methylcytosine"
gtgccaggcacattgccaggtcttccaaatatattatctcagttaaaattataacaacctcgtgaggtgggttactgttatcctgatatcacaaagagaaaattgactgaatagggtgacca

SEQ ID NO: 15906 - DNA, 122 bp, Homo sapiens
  misc_feature (61)..(62): /note="This region represents a CpG dinucleotide"
  misc_feature (61)..(61): /note="Nucleotide may be methylated to form 5-methylcytosine"
ttgaggcccttggcccaacccatgctgtgcttaacaaacataattccatgctaactaaaccggaagttctgaactacagatagggtgtcaaggagattgtgtgtgcgcgtgcattgtgtgtg

SEQ ID NO: 15907 - DNA, 122 bp, Homo sapiens
  misc_feature (61)..(62): /note="This region represents a CpG dinucleotide"
  misc_feature (61)..(61): /note="Nucleotide may be methylated to form 5-methylcytosine"
gaagtaactgaggatagcaccactctgttggtgactcagttcccctgtctcatggaggaacgaagctgagctttgaatctgggtgtgctcctctctcagggtgactggttataaaagatgct

SEQ ID NO: 15908 - DNA, 122 bp, Homo sapiens
  misc_feature (61)..(62): /note="This region represents a CpG dinucleotide"
  misc_feature (61)..(61): /note="Nucleotide may be methylated to form 5-methylcytosine"
ccacttatactctgagcttgaaacaactgctttatgccacaaaattcctattgctgtctccgttagtgactaattcaatatgtcctgaatgtcaacgtatttttattactcagctaaagttg

SEQ ID NO: 15909 - DNA, 122 bp, Homo sapiens
  misc_feature (61)..(62): /note="This region represents a CpG dinucleotide"
  misc_feature (61)..(61): /note="Nucleotide may be methylated to form 5-methylcytosine"
ctggagggatgagagtagaaaagggatgatcctattttgatggctttgagggtgggggctcgatttggaaaggaccctgcagaagtggggaagggcactgcaaatcagatagggcaccctag

SEQ ID NO: 15910 - DNA, 122 bp, Homo sapiens
  misc_feature (61)..(62): /note="This region represents a CpG dinucleotide"
  misc_feature (61)..(61): /note="Nucleotide may be methylated to form 5-methylcytosine"
ctgactgcagaccttgaagaatgtttaatccaatatattatgatcacattacacacattacgtgaaaatatgacctttatgtagagagaatcatagactattggaagtggaaagaaccttgt

SEQ ID NO: 15911 - DNA, 122 bp, Homo sapiens
  misc_feature (61)..(62): /note="This region represents a CpG dinucleotide"
  misc_feature (61)..(61): /note="Nucleotide may be methylated to form 5-methylcytosine"
caaagccttccacgctgtttgtgcagccctgaactatgtcagtgggaagctacatgaaaccgtgtcatatgacctcatgccccatgagtcacaaaatcattaattcattctcactatctccc

SEQ ID NO: 15912 - DNA, 122 bp, Homo sapiens
  misc_feature (61)..(62): /note="This region represents a CpG dinucleotide"
  misc_feature (61)..(61): /note="Nucleotide may be methylated to form 5-methylcytosine"
cactccgactcgtatgcctgctctctttaaaatagccaatcggaattagcttaaactgtgcggaccaaccctagccaatagtggaacgacacagcagtaagggctacctgcatcaggaataa

SEQ ID NO: 15913 - DNA, 122 bp, Homo sapiens
  misc_feature (61)..(62): /note="This region represents a CpG dinucleotide"
  misc_feature (61)..(61): /note="Nucleotide may be methylated to form 5-methylcytosine"
cctgctgaattcttttaatgtccagctgtgtttgtactgttcagcacactgctccacagccggtgttcatcattagtgtcactggggataaagttggcagaaaaaagctgccccaatccaaa

SEQ ID NO: 15914 - DNA, 122 bp, Homo sapiens
  misc_feature (61)..(62): /note="This region represents a CpG dinucleotide"
  misc_feature (61)..(61): /note="Nucleotide may be methylated to form 5-methylcytosine"
ggcccacgccttcttccgcgaggagcgcggtgtgcacgtggaactagcggaggaggacgacggcgagaagccgggcctcaagctctggctgcgcatggaggacgcgcggcgcggggggcgcc

SEQ ID NO: 15915 - DNA, 122 bp, Homo sapiens
  misc_feature (61)..(62): /note="This region represents a CpG dinucleotide"
  misc_feature (61)..(61): /note="Nucleotide may be methylated to form 5-methylcytosine"
cctcatcctggagtgtacaccaccactcccatccaggatagccaaccaactcctgattgacggggagtgatcccctatacacaaggctgcacccctgtctgaaggtcagagcaactctgtgg

SEQ ID NO: 15916 - DNA, 122 bp, Homo sapiens
  misc_feature (61)..(62): /note="This region represents a CpG dinucleotide"
  misc_feature (61)..(61): /note="Nucleotide may be methylated to form 5-methylcytosine"
cccatgcttcagattcaaaggaggtctgtgaagggctgggctttgcttaacctttcacatcgcaaaacttcctgcctctctggcctcagacaaacacatcctccaggccagggttcagaagg

SEQ ID NO: 15917 - DNA, 122 bp, Homo sapiens
  misc_feature (61)..(62): /note="This region represents a CpG dinucleotide"
  misc_feature (61)..(61): /note="Nucleotide may be methylated to form 5-methylcytosine"
agatgccgctccctcccaacgggagccgggcgcgggttcgtggccgacagatggcgcctgcgcgttccattcgcctccaagtcgccgaagagcgaacaccccaaacaatcccgaagcgccac

SEQ ID NO: 15918 - DNA, 122 bp, Homo sapiens
  misc_feature (61)..(62): /note="This region represents a CpG dinucleotide"
  misc_feature (61)..(61): /note="Nucleotide may be methylated to form 5-methylcytosine"
gtttcttaaggcgtgtgtagtgagaaggctgggaaagtaaggcaggtggacctcaccagacggaagcatgcaaaacagaaacacacggacagctcacccggtatccccctccctttcagcac

SEQ ID NO: 15919 - DNA, 122 bp, Homo sapiens
  misc_feature (61)..(62): /note="This region represents a CpG dinucleotide"
  misc_feature (61)..(61): /note="Nucleotide may be methylated to form 5-methylcytosine"
ggtccttttgtgtccagaattggtgcgttctcggtctcactgcctttaagaatgaagcagcgaactgtcgcggtgtttcagttcttaaagatggtgtgtccagagtttgttccttcagatgt

SEQ ID NO: 15920 - DNA, 122 bp, Homo sapiens
  misc_feature (61)..(62): /note="This region represents a CpG dinucleotide"
  misc_feature (61)..(61): /note="Nucleotide may be methylated to form 5-methylcytosine"
atgctcttaatgtattatgaaatgagaaaaccaggctaccaaactgtaagaatggaatgacgacaatttttagaaaccacagtgtgtgcacacatagatggatgtgtgtgtgaatgtatgtg

SEQ ID NO: 15921 - DNA, 122 bp, Homo sapiens
  misc_feature (61)..(62): /note="This region represents a CpG dinucleotide"
  misc_feature (61)..(61): /note="Nucleotide may be methylated to form 5-methylcytosine"
ctctaagtggatattggccatgtgcatttgttgtgatacagaaagctcaaagaacaggcacgctattcatttgctgaagacttaagttgtggatacataaaatcttgagagtacttaatcca

SEQ ID NO: 15922 - DNA, 122 bp, Homo sapiens
  misc_feature (61)..(62): /note="This region represents a CpG dinucleotide"
  misc_feature (61)..(61): /note="Nucleotide may be methylated to form 5-methylcytosine"
ccttacgtagcccccagctaccagagtccaggaccaatggctcatgactcccaggacggacggttgtgtgcaacaacagagggagggttgaaagccgtggcccaggatcttcgataccactg

SEQ ID NO: 15923 - DNA, 122 bp, Homo sapiens
  misc_feature (61)..(62): /note="This region represents a CpG dinucleotide"
  misc_feature (61)..(61): /note="Nucleotide may be methylated to form 5-methylcytosine"
atacccattagcctatggtaaaattggtttcacctaaagtctcagtttccaagaacctaccggggaagttgtaaagacttactgcatttcattgtatgactatgccaatttattcatccacc

SEQ ID NO: 15924 - DNA, 122 bp, Homo sapiens
  misc_feature (61)..(62): /note="This region represents a CpG dinucleotide"
  misc_feature (61)..(61): /note="Nucleotide may be methylated to form 5-methylcytosine"
cttaaattcacaacagctttccatgctacctgagttaattacatcattcaaacacattgtcggtgaatgtttttgtcaagatactccgagcgtttgataatagaagtaagataacagaatca

SEQ ID NO: 15925 - DNA, 122 bp, Homo sapiens
  misc_feature (61)..(62): /note="This region represents a CpG dinucleotide"
  misc_feature (61)..(61): /note="Nucleotide may be methylated to form 5-methylcytosine"
agggatattcaaggcactggggaaagaatgagctagagatgtagacttgaataacacagccgtttacaaccttccagctttgtgtctagaactcaggatgaacatgtgtatggtaatatatg

SEQ ID NO: 15926 - DNA, 122 bp, Homo sapiens
  misc_feature (61)..(62): /note="This region represents a CpG dinucleotide"
  misc_feature (61)..(61): /note="Nucleotide may be methylated to form 5-methylcytosine"
aaaatcacccttcaaatctttacctaaaagatcctgattagtaactaacgtggttcagcccgaaaaatgatcaactgattacttagcatttggaaccaactgtccacagttatagattgtac

SEQ ID NO: 15927 - DNA, 122 bp, Homo sapiens
  misc_feature (61)..(62): /note="This region represents a CpG dinucleotide"
  misc_feature (61)..(61): /note="Nucleotide may be methylated to form 5-methylcytosine"
tcaaggatagtttattgagacagattaataggaaattatgatgcagtgttgtaagtgctacgatgagtgctgaatcaaatctcatatcccagagtagtcttcatggcgctgtcactaattga

SEQ ID NO: 15928 - DNA, 122 bp, Homo sapiens
  misc_feature (61)..(62): /note="This region represents a CpG dinucleotide"
  misc_feature (61)..(61): /note="Nucleotide may be methylated to form 5-methylcytosine"
gggttcttggcagagttcttcttgtctgtcaagatgctctcctgaaaaccagccaggctccgggggctgcaggaatcagatagatacttcccagctgtggacaaaatcctgtaatgaaagga

SEQ ID NO: 15929 - DNA, 122 bp, Homo sapiens
  misc_feature (61)..(62): /note="This region represents a CpG dinucleotide"
  misc_feature (61)..(61): /note="Nucleotide may be methylated to form 5-methylcytosine"
cccaatttataacagtgctagttccaaacaaatctaaagtatgtgaatcactcactgtatcgacagctgtctaatttcactcatccaagcccacaatatgcctgacacggtctcagtctgcc

SEQ ID NO: 15930 - DNA, 122 bp, Homo sapiens
  misc_feature (61)..(62): /note="This region represents a CpG dinucleotide"
  misc_feature (61)..(61): /note="Nucleotide may be methylated to form 5-methylcytosine"
gagccattgtttgcaaacccctggtctaagttcaaagctgatgagtagctttcctggaaccgtccctgtgagttttacccaggggtcctgaccctatttcctccccagggagttttgaaacc

SEQ ID NO: 15931 - DNA, 122 bp, Homo sapiens
  misc_feature (61)..(62): /note="This region represents a CpG dinucleotide"
  misc_feature (61)..(61): /note="Nucleotide may be methylated to form 5-methylcytosine"
tgtagccttctgtgactagcttctttcacttagcatcaggtttctcaggttccttcatgtcgtgatatgacttaactttatcttatgaccgaatagtattccattgtatggatataccacat

SEQ ID NO: 15932 - DNA, 122 bp, Homo sapiens
  misc_feature (61)..(62): /note="This region represents a CpG dinucleotide"
  misc_feature (61)..(61): /note="Nucleotide may be methylated to form 5-methylcytosine"
acgccccgcgagggaccgtcgttagtgccaagacagctgccgctcctgccggcctagggccgcagccggaatcccgggccacatcccctgccccgttgtgccttccacacctcgggcagtca

SEQ ID NO: 15933 - DNA, 122 bp, Homo sapiens
  misc_feature (61)..(62): /note="This region represents a CpG dinucleotide"
  misc_feature (61)..(61): /note="Nucleotide may be methylated to form 5-methylcytosine"
actctaaggcggtagaaaccggtttccccgggtctatttagggggcatttggggcccctgcgtgtggagtgggagagcctgggctcaccctccctagccctggcgtgggcgacaaggctcca

SEQ ID NO: 15934 - DNA, 122 bp, Homo sapiens
  misc_feature (61)..(62): /note="This region represents a CpG dinucleotide"
  misc_feature (61)..(61): /note="Nucleotide may be methylated to form 5-methylcytosine"
tctagcacatcctaagcactcaataaatgtcatatgcatacatgcccacacacacaaatacgtatatacacacatatatacatgtctacatatgtatattcatatatgtgtatatgtatgtg

SEQ ID NO: 15935 - DNA, 122 bp, Homo sapiens
  misc_feature (61)..(62): /note="This region represents a CpG dinucleotide"
  misc_feature (61)..(61): /note="Nucleotide may be methylated to form 5-methylcytosine"
gctgtgttgccatgccgtcatccggttgctatgacttgtgaggttgtggatgtgccagaacgtgaatctattaatttaacaggaactaggctcagcacatatattccttgttaggtcatttg

SEQ ID NO: 15936 - DNA, 122 bp, Homo sapiens
  misc_feature (61)..(62): /note="This region represents a CpG dinucleotide"
  misc_feature (61)..(61): /note="Nucleotide may be methylated to form 5-methylcytosine"
gactagagagtcaggtttgtaggccatgtggctagggacaagccccaggttaccctgtagcggtttctactgccactgccctgagcacatatctggcagctcgcaaccccaaatactgagca

SEQ ID NO: 15937 - DNA, 122 bp, Homo sapiens
  misc_feature (61)..(62): /note="This region represents a CpG dinucleotide"
  misc_feature (61)..(61): /note="Nucleotide may be methylated to form 5-methylcytosine"
gaaacaagaagccgtcgatgataacttcttccccatgaatccggtgtgtgtggccccacccgcccgagctctgtcctaccttatctgaagttctgccaagagttttctgtaaatgtaatttt

SEQ ID NO: 15938 - DNA, 122 bp, Homo sapiens
  misc_feature (61)..(62): /note="This region represents a CpG dinucleotide"
  misc_feature (61)..(61): /note="Nucleotide may be methylated to form 5-methylcytosine"
tctcaacctgtctgtgcctcaggttctccttctgtaaaagggccatcgtggttcctgtggcgtgggagggtgacaattactgtggtgaggggtgtggagcttgcagcagtgcttgtcacagc

SEQ ID NO: 15939 - DNA, 122 bp, Homo sapiens
  misc_feature (61)..(62): /note="This region represents a CpG dinucleotide"
  misc_feature (61)..(61): /note="Nucleotide may be methylated to form 5-methylcytosine"
atgcataacgatggggccattgggtggtaaacaaatgcagtttgaatcaggcgtctccctcgccctttctggagatgcgcaaatcatagagaaaagagttactaacccagcggtaaaccgcc

SEQ ID NO: 15940 - DNA, 122 bp, Homo sapiens
  misc_feature (61)..(62): /note="This region represents a CpG dinucleotide"
  misc_feature (61)..(61): /note="Nucleotide may be methylated to form 5-methylcytosine"
tggagccaaggccccgtggatgccctaggcctttcttttgatgtattttctttttccaggcgttgtcattctgagcctgcaataggaaggtctgcatcagtaatctctcatgtgcctttggg

SEQ ID NO: 15941 - DNA, 122 bp, Homo sapiens
  misc_feature (61)..(62): /note="This region represents a CpG dinucleotide"
  misc_feature (61)..(61): /note="Nucleotide may be methylated to form 5-methylcytosine"
gattgaaagctatgtgaagttgaaattcacatctgggctctctctgtgtcttcataatgacgagaattgctttgtaaatcctgggtgattcatacatttgtattgcatacctgagcatagga

SEQ ID NO: 15942 - DNA, 122 bp, Homo sapiens
  misc_feature (61)..(62): /note="This region represents a CpG dinucleotide"
  misc_feature (61)..(61): /note="Nucleotide may be methylated to form 5-methylcytosine"
cacacacatcctacgaggacggctccaggaaccacaatgggcgaggagggctcgggcggccgctgattctcatgactctgtgggtctcaatgctccatgagaacgtagcccagctcataaaa

SEQ ID NO: 15943 - DNA, 122 bp, Homo sapiens
  misc_feature (61)..(62): /note="This region represents a CpG dinucleotide"
  misc_feature (61)..(61): /note="Nucleotide may be methylated to form 5-methylcytosine"
aatacaaggcctgcggtgcaggtagactttgcaagctggtctaagcacaaggtgactctgcggaataacagcaaaagtggaactggggaaaagtactgcagagacatgctatccttacatat

SEQ ID NO: 15944 - DNA, 122 bp, Homo sapiens
  misc_feature (61)..(62): /note="This region represents a CpG dinucleotide"
  misc_feature (61)..(61): /note="Nucleotide may be methylated to form 5-methylcytosine"
ctcatcatatttttagggttacctgaaatggaattttgtactctgtattaacacatgacacgattgaatcctgagactctgagcagccagactggcatggctttaagccagctgtagcaaga

SEQ ID NO: 15945 - DNA, 122 bp, Homo sapiens
  misc_feature (61)..(62): /note="This region represents a CpG dinucleotide"
  misc_feature (61)..(61): /note="Nucleotide may be methylated to form 5-methylcytosine"
gacagcgtggtcttggccgcaagcatgcattagtttagctgcgacaggctaacttctgggcggctgatccttgttcagctttcctgttactggaacacatttatggctatctcgtggagatg

SEQ ID NO: 15946 - DNA, 122 bp, Homo sapiens
  misc_feature (61)..(62): /note="This region represents a CpG dinucleotide"
  misc_feature (61)..(61): /note="Nucleotide may be methylated to form 5-methylcytosine"
gccaggatacttgggagtcaaacaggagctgaagagctagaacagggctagagtgagacacgtgaggcatttggagcctgaaacttagagacactcatgcttagtgttcatccccctctctc

SEQ ID NO: 15947 - DNA, 122 bp, Homo sapiens
  misc_feature (61)..(62): /note="This region represents a CpG dinucleotide"
  misc_feature (61)..(61): /note="Nucleotide may be methylated to form 5-methylcytosine"
atgattcacatacacacatgaataacttaattctttgaatagttcttagaatgtccatcacgaaaacttaaaaatacattgagaaaacccctaaaacaatatagaatatactttgtactttt

SEQ ID NO: 15948 - DNA, 122 bp, Homo sapiens
  misc_feature (61)..(62): /note="This region represents a CpG dinucleotide"
  misc_feature (61)..(61): /note="Nucleotide may be methylated to form 5-methylcytosine"
atgagtaagaaatagtaaacattggccaggaccagaaaatgtgaagccatcttattttagcgtcagtcaatgagacttcccttaccctctctctctccttcctactccaggttccaccttgg

SEQ ID NO: 15949 - DNA, 122 bp, Homo sapiens
  misc_feature (61)..(62): /note="This region represents a CpG dinucleotide"
  misc_feature (61)..(61): /note="Nucleotide may be methylated to form 5-methylcytosine"
ggttcataaacctacacttgataatcatccatgcttttgccaccagtattgcaaattctacgttacaattttatgttgtcttacatccttttggcagcatgtcttaaccacatataaaataa

SEQ ID NO: 15950 - DNA, 122 bp, Homo sapiens
  misc_feature (61)..(62): /note="This region represents a CpG dinucleotide"
  misc_feature (61)..(61): /note="Nucleotide may be methylated to form 5-methylcytosine"
cccggggctctgggagggggaggcatggactgttcctcatttgcctcggatttctcaattcgcattctgccccaggcacgtggaaggtaacactgcaatgggtctcttcatgcagatggggc

SEQ ID NO: 15951 - DNA, 122 bp, Homo sapiens
  misc_feature (61)..(62): /note="This region represents a CpG dinucleotide"
  misc_feature (61)..(61): /note="Nucleotide may be methylated to form 5-methylcytosine"
gctgtgttactttgggggtgtgatatgtctctgaatctcagcctcctcatccatcaaatacgtggggttaaaccagatgatctctaagacttcttccagctctaaaattctgtcactctctg

SEQ ID NO: 15952 - DNA, 122 bp, Homo sapiens
  misc_feature (61)..(62): /note="This region represents a CpG dinucleotide"
  misc_feature (61)..(61): /note="Nucleotide may be methylated to form 5-methylcytosine"
ttatttcctttgagagactgcttcttacccttggcaaaatctttgagtcattactccacgcgctaggtggagcaatagcctgaatctgagtttttccagtgtgaaactactgccctattaga

SEQ ID NO: 15953 - DNA, 122 bp, Homo sapiens
  misc_feature (61)..(62): /note="This region represents a CpG dinucleotide"
  misc_feature (61)..(61): /note="Nucleotide may be methylated to form 5-methylcytosine"
gactaaccctcatgtttgctaggtctgctgcctctccctcttggtggttcattccttctgcgttttgtgatcttttattaagagcttatcttcaatagaggctatttatctatgagaatgtg

SEQ ID NO: 15954 - DNA, 122 bp, Homo sapiens
  misc_feature (61)..(62): /note="This region represents a CpG dinucleotide"
  misc_feature (61)..(61): /note="Nucleotide may be methylated to form 5-methylcytosine"
tgtgcaaccatcaccacagtccatttaaaaaggaaggaaatgttgacacatgcaacaatacggatgaaccgaggacattatactagtgaaataaaccagtcggaaaaagacaaatattattt

SEQ ID NO: 15955 - DNA, 122 bp, Homo sapiens
  misc_feature (61)..(62): /note="This region represents a CpG dinucleotide"
  misc_feature (61)..(61): /note="Nucleotide may be methylated to form 5-methylcytosine"
tgtaacacagatctgtacgtccgccaaatttagtatgatacttaatagctattcttgaggcgctcacatttcattggcctaacatgactttaaaattacaaattgtaagatacaagccaaca

SEQ ID NO: 15956 - DNA, 122 bp, Homo sapiens
  misc_feature (61)..(62): /note="This region represents a CpG dinucleotide"
  misc_feature (61)..(61): /note="Nucleotide may be methylated to form 5-methylcytosine"
gctgggttctccaggagcctgtctgcagcctgtgcccacgaggacttgttcctagaagtacgtgaagggatactgtctgctttctcttcgggtcatgcatgcacagaggacatgccgcgccc

SEQ ID NO: 15957 - DNA, 122 bp, Homo sapiens
  misc_feature (61)..(62): /note="This region represents a CpG dinucleotide"
  misc_feature (61)..(61): /note="Nucleotide may be methylated to form 5-methylcytosine"
agtcttggtttcagagttcagcaagggatatgcatggtggtggtagcgttgggacagaagcggggcactacttgagagttttgaaatatgtaatttgtcacagcaaggacaagggcaagtga

SEQ ID NO: 15958 - DNA, 122 bp, Homo sapiens
  misc_feature (61)..(62): /note="This region represents a CpG dinucleotide"
  misc_feature (61)..(61): /note="Nucleotide may be methylated to form 5-methylcytosine"
aatgatagcaaggtcacaggtttaaatctctactccatgatcacaggccctctccctggacgggtcctatggctctggtgtcagcccgaccctttggtaaaaaaacagctgaagtggacatc

SEQ ID NO: 15959 - DNA, 122 bp, Homo sapiens
  misc_feature (61)..(62): /note="This region represents a CpG dinucleotide"
  misc_feature (61)..(61): /note="Nucleotide may be methylated to form 5-methylcytosine"
acacagtaaggtagccaaggctcaccttatacttcctcatgcagttgatgacagtaattccgtagccattactgagcatgtacatttgtcaggtactggtttgtactttaaaagaattacca

SEQ ID NO: 15960 - DNA, 122 bp, Homo sapiens
  misc_feature (61)..(62): /note="This region represents a CpG dinucleotide"
  misc_feature (61)..(61): /note="Nucleotide may be methylated to form 5-methylcytosine"
tgagtagtatctgtagtgtagatatactggacaaagggatgattcacgtcccaggtgggacggagaggacagcgagaaatttcatcacactacttagaattgtgtgcaatttaaaacttatg

SEQ ID NO: 15961 - DNA, 122 bp, Homo sapiens
  misc_feature (61)..(62): /note="This region represents a CpG dinucleotide"
  misc_feature (61)..(61): /note="Nucleotide may be methylated to form 5-methylcytosine"
tgagctttggcccagtacaatgtcacttgtatttattttcttatggcaactttgagatagcggaagtgttctttaccaagagccagggagggcccggagtcctgccggctgctgtcccggcc

SEQ ID NO: 15962 - DNA, 122 bp, Homo sapiens
  misc_feature (61)..(62): /note="This region represents a CpG dinucleotide"
  misc_feature (61)..(61): /note="Nucleotide may be methylated to form 5-methylcytosine"
acggctgcattctctttggcatcgagttcagctacgccatggagacggcgtacgtgaccccggtgctcctgcagatgggcctgcccgaccagctctacagcctggtgtggttcatcagcccc

SEQ ID NO: 15963 - DNA, 122 bp, Homo sapiens
  misc_feature (61)..(62): /note="This region represents a CpG dinucleotide"
  misc_feature (61)..(61): /note="Nucleotide may be methylated to form 5-methylcytosine"
taattgttggctttttacctactgccctctgtctagtgtggtatcttatttctttgtgttcgtcctgctcttcaaagttctttcctggctgaggatttggatttggatttggagctgtcatt

SEQ ID NO: 15964 - DNA, 122 bp, Homo sapiens
  misc_feature (61)..(62): /note="This region represents a CpG dinucleotide"
  misc_feature (61)..(61): /note="Nucleotide may be methylated to form 5-methylcytosine"
cacggaggggaggggccagcctcagagatcaagtgggcagagtcttcccaagggcgtggacgcacacagccatgcgcacagcagggaggcagacagggagcaaagaggccagagcaggcagc

SEQ ID NO: 15965 - DNA, 122 bp, Homo sapiens
  misc_feature (61)..(62): /note="This region represents a CpG dinucleotide"
  misc_feature (61)..(61): /note="Nucleotide may be methylated to form 5-methylcytosine"
ttatcatacttttgagtctggatgaattttgtcttagggcggagagctcatcagttctaccggtcttggagaacaagattttctaaagggaaaggaagattcttgaacatattgtgaaagag

SEQ ID NO: 15966 - DNA, 122 bp, Homo sapiens
  misc_feature (61)..(62): /note="This region represents a CpG dinucleotide"
  misc_feature (61)..(61): /note="Nucleotide may be methylated to form 5-methylcytosine"
cttgtttacacagagctgggccaatggttacacaataacagataatcagaaaaatcttctcgtaaggcacactgtaactagcagagagaggtgtgcatactcaataagtatgttaaagcctg

SEQ ID NO: 15967 - DNA, 122 bp, Homo sapiens
  misc_feature (61)..(62): /note="This region represents a CpG dinucleotide"
  misc_feature (61)..(61): /note="Nucleotide may be methylated to form 5-methylcytosine"
gagctgggcttggtgtttatgtctgatccagacaactgggggtttatgacgatttactgacgcaagagctccccgaagcagcatgccagaaattaatcaagggaggaggaattctttttaag

SEQ ID NO: 15968 - DNA, 122 bp, Homo sapiens
  misc_feature (61)..(62): /note="This region represents a CpG dinucleotide"
  misc_feature (61)..(61): /note="Nucleotide may be methylated to form 5-methylcytosine"
cacccaaaaagacccagaagacaaatggaagttaagaaggtgaagaggggacctagggaacggcattccaggcggaacaactgaagactgatgtatgaaaaggtccttacatgagaacttga

SEQ ID NO: 15969 - DNA, 122 bp, Homo sapiens
  misc_feature (61)..(62): /note="This region represents a CpG dinucleotide"
  misc_feature (61)..(61): /note="Nucleotide may be methylated to form 5-methylcytosine"
atatttataaaatacccacttggaactgatgagacaggtttcagaaatgtttgctgcatgcgctcattgtctgaatcattgtttcaggttgctccggttgctaagaagactatgaacaagtc

SEQ ID NO: 15970 - DNA, 122 bp, Homo sapiens
  misc_feature (61)..(62): /note="This region represents a CpG dinucleotide"
  misc_feature (61)..(61): /note="Nucleotide may be methylated to form 5-methylcytosine"
tagcttagaagaggatctgttcctgaccagtcccatggaaattgtgactcagcaggacatcgtcctctcagacgcagagaacaaggtaagtctcctccagggaatgacttgatggctcataa

SEQ ID NO: 15971 - DNA, 122 bp, Homo sapiens
  misc_feature (61)..(62): /note="This region represents a CpG dinucleotide"
  misc_feature (61)..(61): /note="Nucleotide may be methylated to form 5-methylcytosine"
acaagcttacaaaatctgcttcagatcaaacagccatcttctacattgcagagtttgtttcgtatgcaaatggatcctctttcgttgagaagccaggtgtgtagaaactcagggaggaccaa

SEQ ID NO: 15972 - DNA, 122 bp, Homo sapiens
  misc_feature (61)..(62): /note="This region represents a CpG dinucleotide"
  misc_feature (61)..(61): /note="Nucleotide may be methylated to form 5-methylcytosine"
cttgactcttttacctgctgaacaagtgaaataacatctctgaaccttgagttccccatccgtgaaatgggaatgacaccagccttgaaggattgaatgacacaccacttgtggcacgccta

SEQ ID NO: 15973 - DNA, 122 bp, Homo sapiens
  misc_feature (61)..(62): /note="This region represents a CpG dinucleotide"
  misc_feature (61)..(61): /note="Nucleotide may be methylated to form 5-methylcytosine"
agggttgctgcatttgggtgaggatgaggaagcattaattcccctgtacttctggcttgacggtgctgaggcagaatagaatccagtgactaaaggtcctaagacattaggagtcaggagtc

SEQ ID NO: 15974 - DNA, 122 bp, Homo sapiens
  misc_feature (61)..(62): /note="This region represents a CpG dinucleotide"
  misc_feature (61)..(61): /note="Nucleotide may be methylated to form 5-methylcytosine"
tcacagatctacaggatcagaccagtgggcagacagctggaaggagaggaattgtgcctgcgctgcctaccaccacccagcacagcattgggcacatggtatgcccttactgaatatttgct

SEQ ID NO: 15975 - DNA, 122 bp, Homo sapiens
  misc_feature (61)..(62): /note="This region represents a CpG dinucleotide"
  misc_feature (61)..(61): /note="Nucleotide may be methylated to form 5-methylcytosine"
gcctcttctttccaagacctgggagctgggtaataccagggcacttttatcaatcaacaacgtctagaggagatagtcgagaaccagaaagtcaatagtcaagacacaaagaataatttaga

SEQ ID NO: 15976 - DNA, 122 bp, Homo sapiens
  misc_feature (61)..(62): /note="This region represents a CpG dinucleotide"
  misc_feature (61)..(61): /note="Nucleotide may be methylated to form 5-methylcytosine"
cgcatccccacctggcagtgggagaggacagggaggagcaggtgtcaggagtcaccctcacgcccagcagcacccgcccagcaagggtgtcatcctgaaccctgccccagggccgggaggag

SEQ ID NO: 15977 - DNA, 122 bp, Homo sapiens
  misc_feature (61)..(62): /note="This region represents a CpG dinucleotide"
  misc_feature (61)..(61): /note="Nucleotide may be methylated to form 5-methylcytosine"
ccacaagagctccagccccttcccataagctgcagcacagttggtctggccgtctgcattcgctgaaatgtaggcatgaaatgagaaacaccagcacatgtgagtcaccacttctcgggaat

SEQ ID NO: 15978 - DNA, 122 bp, Homo sapiens
  misc_feature (61)..(62): /note="This region represents a CpG dinucleotide"
  misc_feature (61)..(61): /note="Nucleotide may be methylated to form 5-methylcytosine"
aaatgtttcagagatgtaatctgaaggtctgatctctctgaaccagccccttagcatcttcgtcttcatgaagctatgcagtttcctctgttgtttcttaagcaatacctcattaagtgatt

SEQ ID NO: 15979 - DNA, 122 bp, Homo sapiens
  misc_feature (61)..(62): /note="This region represents a CpG dinucleotide"
  misc_feature (61)..(61): /note="Nucleotide may be methylated to form 5-methylcytosine"
gccccagaagaatccagacatgcagcagcacaattgaaatcctcattgaggacttcaggtcgttgcactgtactatacaggggattcgtgtggaatgagttgattgctgctgctcttgcccc

SEQ ID NO: 15980 - DNA, 122 bp, Homo sapiens
  misc_feature (61)..(62): /note="This region represents a CpG dinucleotide"
  misc_feature (61)..(61): /note="Nucleotide may be methylated to form 5-methylcytosine"
aagaccagttagtccagttccagataaagcctggggtttggattccataccaggataatacggcgttcactcaccctggggtatgggtccaactatagagaacaatccacatttgcctccta

SEQ ID NO: 15981 - DNA, 122 bp, Homo sapiens
  misc_feature (61)..(62): /note="This region represents a CpG dinucleotide"
  misc_feature (61)..(61): /note="Nucleotide may be methylated to form 5-methylcytosine"
aaagtgaagttagggccgagccacgtggaatggctaatgctgggcaggcgtccaaggaaccgaccttggagccctgcaggagcgtgggatgagagcctgcttgcaaacaagatcaccgagtt

SEQ ID NO: 15982 - DNA, 122 bp, Homo sapiens
  misc_feature (61)..(62): /note="This region represents a CpG dinucleotide"
  misc_feature (61)..(61): /note="Nucleotide may be methylated to form 5-methylcytosine"
tttaaagtgacaggaacgaaatcattctgaagggagcagggcaaggacatatgcatcatgcgctgaacctttgttcctgaagcattactatggattttggagcattaagtaatttaaagcac

SEQ ID NO: 15983 - DNA, 122 bp, Homo sapiens
  misc_feature (61)..(62): /note="This region represents a CpG dinucleotide"
  misc_feature (61)..(61): /note="Nucleotide may be methylated to form 5-methylcytosine"
tgctctctgctctgtgcttcacccaacacctccttctcacgagcatcctgccttagtcaccgatggtaattaccttgatactgagatagggagagagagccagtggaagggtgagacctcga

SEQ ID NO: 15984 - DNA, 122 bp, Homo sapiens
  misc_feature (61)..(62): /note="This region represents a CpG dinucleotide"
  misc_feature (61)..(61): /note="Nucleotide may be methylated to form 5-methylcytosine"
ggtttttttgtttttgtttttttttgttttttttttttcttacaaaatagccatagtttgcgcaacccgttttggagagggcaagtacaaacaatctgttgttactgccttatataacagca

SEQ ID NO: 15985 - DNA, 122 bp, Homo sapiens
  misc_feature (61)..(62): /note="This region represents a CpG dinucleotide"
  misc_feature (61)..(61): /note="Nucleotide may be methylated to form 5-methylcytosine"
agtggatcgggagacagcgctgcccgggcggtgtctcgggaccccgacagctgcggttggcgggcaccataggccgaagcacccgggtatgattccccacccctgccccacctcctggcctc

SEQ ID NO: 15986 - DNA, 122 bp, Homo sapiens
  misc_feature (61)..(62): /note="This region represents a CpG dinucleotide"
  misc_feature (61)..(61): /note="Nucleotide may be methylated to form 5-methylcytosine"
caaattaatactccgtatgccatcttaccatacatttcttgtctctgcaatgaggctgagcgagactgtcccaaatgtgtttttatcctgagtctgaggcaggctgaactttaatctgcatg

SEQ ID NO: 15987 - DNA, 122 bp, Homo sapiens
  misc_feature (61)..(62): /note="This region represents a CpG dinucleotide"
  misc_feature (61)..(61): /note="Nucleotide may be methylated to form 5-methylcytosine"
gaggatggcccaagcccaggtccctggcatggtggggcaggggcctgagtcacagcctggcgtgaccctgcccagtccccaggaatggccagctcgtccagaggtgagacccaggtcaacaa

SEQ ID NO: 15988 - DNA, 122 bp, Homo sapiens
  misc_feature (61)..(62): /note="This region represents a CpG dinucleotide"
  misc_feature (61)..(61): /note="Nucleotide may be methylated to form 5-methylcytosine"
acactgggttctcttccttcccagtgaaataattctcttttattctctatatccagttaacgtttattgattccctgttgtgagtagatatgtctattgcatctgctattgcctgtgaccac

SEQ ID NO: 15989 - DNA, 122 bp, Homo sapiens
  misc_feature (61)..(62): /note="This region represents a CpG dinucleotide"
  misc_feature (61)..(61): /note="Nucleotide may be methylated to form 5-methylcytosine"
aacaatgtgaccactcctgcaacaacttcctcctggcgcccacaaaccgaggcgcagacacggaatgagctccgtctccatgaacttgccagaaaacaaaatagggggaagactattaatcc

SEQ ID NO: 15990 - DNA, 122 bp, Homo sapiens
  misc_feature (61)..(62): /note="This region represents a CpG dinucleotide"
  misc_feature (61)..(61): /note="Nucleotide may be methylated to form 5-methylcytosine"
aagctgccattagcttcaaaaaaaaaaaaaaagtctcgggaaggtgaccagggagggtgacgtagagttctgttaacaggctaattcaagaacagctgtcaaaaccacacagaggagagcta

SEQ ID NO: 15991 - DNA, 122 bp, Homo sapiens
  misc_feature (61)..(62): /note="This region represents a CpG dinucleotide"
  misc_feature (61)..(61): /note="Nucleotide may be methylated to form 5-methylcytosine"
atgataaattcttgccttaacaacagctattgattttaattattgagataccaatgatctcgtagggggatgccaattattacgaagtatctgtggaagacaatggtgctgtgtatgcatac

SEQ ID NO: 15992 - DNA, 122 bp, Homo sapiens
  misc_feature (61)..(62): /note="This region represents a CpG dinucleotide"
  misc_feature (61)..(61): /note="Nucleotide may be methylated to form 5-methylcytosine"
ctcttgttttcctcatttcactagtgtgtgtggtagagtgtattatcaaaactgcgactgcgcctcttccagggagaatttttttttttttgagacagagtcttactctgtggccctggctc

SEQ ID NO: 15993 - DNA, 122 bp, Homo sapiens
  misc_feature (61)..(62): /note="This region represents a CpG dinucleotide"
  misc_feature (61)..(61): /note="Nucleotide may be methylated to form 5-methylcytosine"
cacctctcagctgaggccactggcaatggtaaaggcagctgtgccaggcgagtagagcaacgaacacaatgccaagtgcaagagcacagggctggctaggaatagctcatgagctaaaatcc

SEQ ID NO: 15994 - DNA, 122 bp, Homo sapiens
  misc_feature (61)..(62): /note="This region represents a CpG dinucleotide"
  misc_feature (61)..(61): /note="Nucleotide may be methylated to form 5-methylcytosine"
ctcaagcagtcctccttattcagcttcttgaggagctgggattatgagcattagccaccacgcccagccagtgtgaacattttgatcttgtgatatctgtaagacgtctaagtgttgttgga

SEQ ID NO: 15995 - DNA, 122 bp, Homo sapiens
  misc_feature (61)..(62): /note="This region represents a CpG dinucleotide"
  misc_feature (61)..(61): /note="Nucleotide may be methylated to form 5-methylcytosine"
ggagggtgagaccaggcagggcagggcaggctgcaggaatgacccaggacaggtgggcagcggaggaggagaacgcggaggaactgcaaattcctgcctctcccagcaactgtgaagggacc

SEQ ID NO: 15996 - DNA, 122 bp, Homo sapiens
  misc_feature (61)..(62): /note="This region represents a CpG dinucleotide"
  misc_feature (61)..(61): /note="Nucleotide may be methylated to form 5-methylcytosine"
tgcttgtgtaggtccaccacagggagccttcgatgcggaccttctgggttttgatctcctcgatgtccttaaattcactctttatctcccccttgatgaacttcctcttcttctcatgtctc

SEQ ID NO: 15997 - DNA, 122 bp, Homo sapiens
  misc_feature (61)..(62): /note="This region represents a CpG dinucleotide"
  misc_feature (61)..(61): /note="Nucleotide may be methylated to form 5-methylcytosine"
ggcgggcggatcacccgaggtcaggatttcaagaccagcctggccaacatggggaaaccccgtctgtactaaaagtgcacaaattagtcaggcgttgtgacacatgcctgtaataccagcta

SEQ ID NO: 15998 - DNA, 122 bp, Homo sapiens
  misc_feature (61)..(62): /note="This region represents a CpG dinucleotide"
  misc_feature (61)..(61): /note="Nucleotide may be methylated to form 5-methylcytosine"
ttctgcatataaaggaagttcctggctatagagtacaacacgctccatgcctttagcgaacgtgcttcagggaagagaaagcatttctagtgagaagctacatatcacgtatgctgcactgg

SEQ ID NO: 15999 - DNA, 122 bp, Homo sapiens
  misc_feature (61)..(62): /note="This region represents a CpG dinucleotide"
  misc_feature (61)..(61): /note="Nucleotide may be methylated to form 5-methylcytosine"
gcatattatctaaaagtgtcatgaaaccctgggcagcggacctcaaaggacagtccctggcgtccgaatgagtggcatcaccagagagcttgttagaaatgcaaaccttccggcctcaccag

SEQ ID NO: 16000 - DNA, 122 bp, Homo sapiens
  misc_feature (61)..(62): /note="This region represents a CpG dinucleotide"
  misc_feature (61)..(61): /note="Nucleotide may be methylated to form 5-methylcytosine"
aggaggccgggcgcggtgtctcacgcctgtaatcccagcactttgggaggccgaggccggcggatcagctgagttcgggagtttgacaacagcttggccaacagtgaaaccccgtctctact

SEQ ID NO: 16001 - DNA, 122 bp, Homo sapiens
  misc_feature (61)..(62): /note="This region represents a CpG dinucleotide"
  misc_feature (61)..(61): /note="Nucleotide may be methylated to form 5-methylcytosine"
gtgagcctctgaggattcagtgtcccctgcaggtccaaccagttatgaccttggtgtggccgtgtcacaggaagctggagatggaatttctgcagggtgtgctttattgcatagctgcttgg

SEQ ID NO: 16002 - DNA, 122 bp, Homo sapiens
  misc_feature (61)..(62): /note="This region represents a CpG dinucleotide"
  misc_feature (61)..(61): /note="Nucleotide may be methylated to form 5-methylcytosine"
aaaaaaaaaaaaaaaaaaaaagtgggttttttttggttttctttttttggtcatacaaaacgtagttgtgaaaggaaaagaaaatgccagccctgtttgacagacattagatttatgatcgt

SEQ ID NO: 16003 - DNA, 122 bp, Homo sapiens
  misc_feature (61)..(62): /note="This region represents a CpG dinucleotide"
  misc_feature (61)..(61): /note="Nucleotide may be methylated to form 5-methylcytosine"
taggctactactcccaactatgtgacagacacagcagctaagtgactaaagagcaggtaacgtctatggcactgctactctggacacagggatgattcatatcctggacaggtcagggtagg

SEQ ID NO: 16004 - DNA, 122 bp, Homo sapiens
  misc_feature (61)..(62): /note="This region represents a CpG dinucleotide"
  misc_feature (61)..(61): /note="Nucleotide may be methylated to form 5-methylcytosine"
tttataggtaaatcaaacacaatcctttcccttaaaatgcccacagtagtggaagagacacgatgagctgtcctttagaaagataaattcagcagcactgatgtgaggagattggagatctc

SEQ ID NO: 16005 - DNA, 122 bp, Homo sapiens
  misc_feature (61)..(62): /note="This region represents a CpG dinucleotide"
  misc_feature (61)..(61): /note="Nucleotide may be methylated to form 5-methylcytosine"
tgtgggagaacaaactaactgagctgcctctcacctaggatactcctacagcccaaactacgagttcaagagaattctatcttggaaaggactgagtcttattagactgcttatccctaata

SEQ ID NO: 16006 - DNA, 122 bp, Homo sapiens
  misc_feature (61)..(62): /note="This region represents a CpG dinucleotide"
  misc_feature (61)..(61): /note="Nucleotide may be methylated to form 5-methylcytosine"
gcagcatagtttccactggtagtaattccattcagctactcagacaacacgctcctcggccgaatgggacgacccttcttaagatggaaaatgttacaaaagaaaaaggatgaaggtctgtg

SEQ ID NO: 16007 - DNA, 122 bp, Homo sapiens
  misc_feature (61)..(62): /note="This region represents a CpG dinucleotide"
  misc_feature (61)..(61): /note="Nucleotide may be methylated to form 5-methylcytosine"
gacagctataatcatttgtttgttctaacctgaactttcactagctgcttgctgtccatgcggcctaggcaatcagatgaagcttgaatttcacagttatgtgaattgttctttgtactgca

SEQ ID NO: 16008 - DNA, 122 bp, Homo sapiens
  misc_feature (61)..(62): /note="This region represents a CpG dinucleotide"
  misc_feature (61)..(61): /note="Nucleotide may be methylated to form 5-methylcytosine"
gcagggcctggtgactccatatgttccaaagcctcagtctcctgggcaccctgcccccttcgccttggccacgttttgtgaacaagcagaactagatcttgctgcctgggcaaatgtttcat

SEQ ID NO: 16009 - DNA, 122 bp, Homo sapiens
  misc_feature (61)..(62): /note="This region represents a CpG dinucleotide"
  misc_feature (61)..(61): /note="Nucleotide may be methylated to form 5-methylcytosine"
cagtcttggatgaagtctaggtgatggttttttttaagcttctcaggtgattccagtgtgcggccagagttaagaacaactgctacaaagccaaacagctatgatgagctcccagacactcc

SEQ ID NO: 16010 - DNA, 122 bp, Homo sapiens
  misc_feature (61)..(62): /note="This region represents a CpG dinucleotide"
  misc_feature (61)..(61): /note="Nucleotide may be methylated to form 5-methylcytosine"
aggtctcagtagacatcaggatcaatgtcggtgttcttcttctgccagagtaaaccaaagcgagtgtgggcagaaaaggagtcataggaggtgattcatctctcaatgcatctgaaggagca

SEQ ID NO: 16011 - DNA, 122 bp, Homo sapiens
  misc_feature (61)..(62): /note="This region represents a CpG dinucleotide"
  misc_feature (61)..(61): /note="Nucleotide may be methylated to form 5-methylcytosine"
ccttgtcctgcactcagccccagacactgtcagacacaccgccctccccgccatgcctctcgcagaccctcccagaaaaccaagcatctcccaggagtctccagggatctccaggactctgg

SEQ ID NO: 16012 - DNA, 122 bp, Homo sapiens
  misc_feature (61)..(62): /note="This region represents a CpG dinucleotide"
  misc_feature (61)..(61): /note="Nucleotide may be methylated to form 5-methylcytosine"
cataatgcagcaggtcccaggtgtaacccggaggaaaaggcagacaaggtcctgcgatgccgcagctgaaaggaagctgacgccaacgggcttctcagaagaacaatgactcattagtcccg

SEQ ID NO: 16013 - DNA, 122 bp, Homo sapiens
  misc_feature (61)..(62): /note="This region represents a CpG dinucleotide"
  misc_feature (61)..(61): /note="Nucleotide may be methylated to form 5-methylcytosine"
gaaccctgggaactttgctggagactttcactaataccctgacctgtattttcttcaatgcgcaactcttacctcactcaagttggttaacctctatgtgctttgatagccacggcaataaa

SEQ ID NO: 16014 - DNA, 122 bp, Homo sapiens
  misc_feature (61)..(62): /note="This region represents a CpG dinucleotide"
  misc_feature (61)..(61): /note="Nucleotide may be methylated to form 5-methylcytosine"
ttgcactgagcttccaggcttagtctatggaaaaattctagtttgatgcttaatagaactcggacaagttgcctcattccttgttttttaatccaaaacttgtttcaccacaagaaagtttt

SEQ ID NO: 16015 - DNA, 122 bp, Homo sapiens
  misc_feature (61)..(62): /note="This region represents a CpG dinucleotide"
  misc_feature (61)..(61): /note="Nucleotide may be methylated to form 5-methylcytosine"
gtctggacaggaactcatgtgcctgctctagtctatccctagctaggcaaattcctatgacgccagaacattagtcagagtttgaaaggtcagctcctgttaatccaccccctctccccaag

SEQ ID NO: 16016 - DNA, 122 bp, Homo sapiens
  misc_feature (61)..(62): /note="This region represents a CpG dinucleotide"
  misc_feature (61)..(61): /note="Nucleotide may be methylated to form 5-methylcytosine"
actcatatcctttttgcctagaatgttcagatcctaggaactgacatctgtcatgtcctccgtagaacttctgtttatgaagtgcatatatgacttgtcatccgatccttttttactcttga

SEQ ID NO: 16017 - DNA, 122 bp, Homo sapiens
  misc_feature (61)..(62): /note="This region represents a CpG dinucleotide"
  misc_feature (61)..(61): /note="Nucleotide may be methylated to form 5-methylcytosine"
catttccctcgcagttccattaggatgtaccaattgttaggccgtcagctgccgatcgcgcgcccggcgaggatgcagaggattggggggaggtggtgacttgcattttatttacaacaact

SEQ ID NO: 16018 - DNA, 122 bp, Homo sapiens
  misc_feature (61)..(62): /note="This region represents a CpG dinucleotide"
  misc_feature (61)..(61): /note="Nucleotide may be methylated to form 5-methylcytosine"
gtggccaaggcaggtggagctagcggtcgaggtttctggactgaggcccctcccccagtgcggtcatcccacccagaacttcgctctgcccctgcccattctaggacagccggtgagtcagt

SEQ ID NO: 16019 - DNA, 122 bp, Homo sapiens
  misc_feature (61)..(62): /note="This region represents a CpG dinucleotide"
  misc_feature (61)..(61): /note="Nucleotide may be methylated to form 5-methylcytosine"
tggctagattaggtggtgtaggacgttatatacaaatacagtgtcatagagtgacttttccgaggcacactgtttacccagaaggagttcttcagtgcttttggttgttttcatttgacttt

SEQ ID NO: 16020 - DNA, 122 bp, Homo sapiens
  misc_feature (61)..(62): /note="This region represents a CpG dinucleotide"
  misc_feature (61)..(61): /note="Nucleotide may be methylated to form 5-methylcytosine"
tcggaagcacaaacagcataagatcaacacttctgtgtctaaattacactcaaagccaggcgtgcctataatcccagttctttggaaggctgaggcaggaaggttgcttgagttcaggagtt

SEQ ID NO: 16021 - DNA, 122 bp, Homo sapiens
  misc_feature (61)..(62): /note="This region represents a CpG dinucleotide"
  misc_feature (61)..(61): /note="Nucleotide may be methylated to form 5-methylcytosine"
ttcaaagggaaatcaggctgcatctgctgagggaacgaggagacaagggagcctcttgcacgcttgtaatgtctgagccagatcttagattcacctgcagcaggcccagcccttttccccag

SEQ ID NO: 16022 - DNA, 122 bp, Homo sapiens
  misc_feature (61)..(62): /note="This region represents a CpG dinucleotide"
  misc_feature (61)..(61): /note="Nucleotide may be methylated to form 5-methylcytosine"
gaaatgtctaatcctatgtacaatcctaccactctttatatttcagtaaacttgctaagccgcaaggaacatagactctcatatcactttcacctgaacgggaactattatattcctgacag

SEQ ID NO: 16023 - DNA, 122 bp, Homo sapiens
  misc_feature (61)..(62): /note="This region represents a CpG dinucleotide"
  misc_feature (61)..(61): /note="Nucleotide may be methylated to form 5-methylcytosine"
cccagaatgtcgctgtagttccttagagacctatgtgctcttccataaatactgtatcatcgtgggtttcctgacacgcaggttccagtagattgaggtgggaggaagaacaggctgagtga

SEQ ID NO: 16024 - DNA, 122 bp, Homo sapiens
  misc_feature (61)..(62): /note="This region represents a CpG dinucleotide"
  misc_feature (61)..(61): /note="Nucleotide may be methylated to form 5-methylcytosine"
ctgtggctagtgtggcacaaggaagaggaaggatgggagattacgtgctagtgtgatgtgcggttgtcttcctgtgggtgttcccccagccacatacatagaactgggagctcctggtgcac

SEQ ID NO: 16025 - DNA, 122 bp, Homo sapiens
  misc_feature (61)..(62): /note="This region represents a CpG dinucleotide"
  misc_feature (61)..(61): /note="Nucleotide may be methylated to form 5-methylcytosine"
tcataggagctatttggttttgggggtgcatgtttaagtgatacatttatagattaaaaacgaaattcaggccatgtgctgtggctcacacctgtaatccagtacctgcagagcccctcctg

SEQ ID NO: 16026 - DNA, 122 bp, Homo sapiens
  misc_feature (61)..(62): /note="This region represents a CpG dinucleotide"
  misc_feature (61)..(61): /note="Nucleotide may be methylated to form 5-methylcytosine"
cttctccagaccagtaaggaattaggaggaagtgatgtaggagtggcccatattaactaacgataaaacagcctgtagttactgaagggttatcaaaagccagaccttgtgctaagtccatg

SEQ ID NO: 16027 - DNA, 122 bp, Homo sapiens
  misc_feature (61)..(62): /note="This region represents a CpG dinucleotide"
  misc_feature (61)..(61): /note="Nucleotide may be methylated to form 5-methylcytosine"
ctgtctgggttcctgctgtagacactgtgagaacttcctttccaagtgtagccaagcacccgccccactgctgcagcctgtgccatcctcccccttctctgcacacattgcatatccctgtg

SEQ ID NO: 16028 - DNA, 122 bp, Homo sapiens
  misc_feature (61)..(62): /note="This region represents a CpG dinucleotide"
  misc_feature (61)..(61): /note="Nucleotide may be methylated to form 5-methylcytosine"
attattcttattcattcattgttcatctacgcagagtgctttgaacttgcctggcatgtacggtaagctattattcattcaacagtataaactggccaggtgaggtgactcaagcctgtaat

SEQ ID NO: 16029 - DNA, 122 bp, Homo sapiens
  misc_feature (61)..(62): /note="This region represents a CpG dinucleotide"
  misc_feature (61)..(61): /note="Nucleotide may be methylated to form 5-methylcytosine"
atcacaccactgcactccatcctgggtgacagagcgagggtccgtctcaaaaaaaaaaaccgaagacaaaagctgacaagtagctgtgaagtcccaagataaactatggttgaaaattgttt

SEQ ID NO: 16030 - DNA, 122 bp, Homo sapiens
  misc_feature (61)..(62): /note="This region represents a CpG dinucleotide"
  misc_feature (61)..(61): /note="Nucleotide may be methylated to form 5-methylcytosine"
aatataaataacgagccctgttcatagaaaagcgtgccagaatttcattgattaacatcccgtgccacagcctctctttgaaattaaaaacactttcaatgacactgaaaagacattgcaca

SEQ ID NO: 16031 - DNA, 122 bp, Homo sapiens
  misc_feature (61)..(62): /note="This region represents a CpG dinucleotide"
  misc_feature (61)..(61): /note="Nucleotide may be methylated to form 5-methylcytosine"
agggcagggctccagagctaggctgctaagttcagatcttccattctttagctgtgagaccgtgggcaagttaatgaacctctctgggtttcagtagcctcgtctagaaaacaggaatcata

SEQ ID NO: 16032 - DNA, 122 bp, Homo sapiens
  misc_feature (61)..(62): /note="This region represents a CpG dinucleotide"
  misc_feature (61)..(61): /note="Nucleotide may be methylated to form 5-methylcytosine"
tatttacaacggagagttttgttaagtctccttcctggcctgacagacacaggactgactcgcatgtactgtgttttaggaaatattgcctgcatgatcaggaagtaatgacgatggtcagg

SEQ ID NO: 16033 - DNA, 122 bp, Homo sapiens
  misc_feature (61)..(62): /note="This region represents a CpG dinucleotide"
  misc_feature (61)..(61): /note="Nucleotide may be methylated to form 5-methylcytosine"
ctaagcattctttattgtatacacagttgatcatcctggactgtataagaggcacatgttcgaaaaaaaaaaaaaaaaagaagaagaacaagctgctgttttcactccagggattattttac

SEQ ID NO: 16034 - DNA, 122 bp, Homo sapiens
  misc_feature (61)..(62): /note="This region represents a CpG dinucleotide"
  misc_feature (61)..(61): /note="Nucleotide may be methylated to form 5-methylcytosine"
gactgaatgagggaatggaaagtcttaccgtggaggcctgaccagttaacagagccccagcgtgcctctgactccttagagaaaggaccaactgcagcaagaggggttgaagctagatgtga

SEQ ID NO: 16035 - DNA, 122 bp, Homo sapiens
  misc_feature (61)..(62): /note="This region represents a CpG dinucleotide"
  misc_feature (61)..(61): /note="Nucleotide may be methylated to form 5-methylcytosine"
gtggtgtatgcacagcatcttcaagtttcccccgaacctagaattaagcatctgtataaacgtttgcattggaggagataatcaagagggcatggatttcttcggtagctgaagtagtagtg

SEQ ID NO: 16036 - DNA, 122 bp, Homo sapiens
  misc_feature (61)..(62): /note="This region represents a CpG dinucleotide"
  misc_feature (61)..(61): /note="Nucleotide may be methylated to form 5-methylcytosine"
taaggcaggaacagaaaataaaatactgcatgttctcccttatatgtgggagctaaacagcgggttactcatggccataaagatggcaacaggccaggtgcaatggctcacgcctgtaatcc

SEQ ID NO: 16037 - DNA, 122 bp, Homo sapiens
  misc_feature (61)..(62): /note="This region represents a CpG dinucleotide"
  misc_feature (61)..(61): /note="Nucleotide may be methylated to form 5-methylcytosine"
ggactacagatttgaggagcccgcaacttattcaggaagccctcttatgggaaaatgatacgaaattataaatgcaaagttaggtacaaaagcagaaggggtctgtacaggtgagaagtcct

SEQ ID NO: 16038 - DNA, 122 bp, Homo sapiens
  misc_feature (61)..(62): /note="This region represents a CpG dinucleotide"
  misc_feature (61)..(61): /note="Nucleotide may be methylated to form 5-methylcytosine"
aaagaaaaaacaaaccaaaaacggatatgataaacctatctcagtggtcagcccctggggcgcaaacattcccctgagtcagggaagggtgactgtaacacaggtatcattatgatttaggt

SEQ ID NO: 16039 - DNA, 122 bp, Homo sapiens
  misc_feature (61)..(62): /note="This region represents a CpG dinucleotide"
  misc_feature (61)..(61): /note="Nucleotide may be methylated to form 5-methylcytosine"
aacctctgtggcttgaaaacacaaagtttaattacttgcccatgcttctcttccactgcacgctgggagtagctcctgtatcctcaggcccaggtgaaataattttcccatcctgagcactg

SEQ ID NO: 16040 - DNA, 122 bp, Homo sapiens
  misc_feature (61)..(62): /note="This region represents a CpG dinucleotide"
  misc_feature (61)..(61): /note="Nucleotide may be methylated to form 5-methylcytosine"
gtcacattcctccccaacttccttgactgcagtcattttagtttccagattaaatggaaacgtaaggattcatctgatcaaactgacagagtcatgagagcctccagagaggtcctctagac

SEQ ID NO: 16041 - DNA, 122 bp, Homo sapiens
  misc_feature (61)..(62): /note="This region represents a CpG dinucleotide"
  misc_feature (61)..(61): /note="Nucleotide may be methylated to form 5-methylcytosine"
atgtggactgcacagccttttttggtcacattgagtcttgtttaaattttttagtctcttcgtttattaagttccttctttttagattgttgtacttgcttcagcaagaaacctcaagcaca

SEQ ID NO: 16042 - DNA, 122 bp, Homo sapiens
  misc_feature (61)..(62): /note="This region represents a CpG dinucleotide"
  misc_feature (61)..(61): /note="Nucleotide may be methylated to form 5-methylcytosine"
ttattcatatgtagcttcctccttaaagcattactttccaccaaatggccaaaagaaatacgcaaagagactcatttcattggttaagtcacggcagaaaacttttatttatattgcctttc

SEQ ID NO: 16043 - DNA, 122 bp, Homo sapiens
  misc_feature (61)..(62): /note="This region represents a CpG dinucleotide"
  misc_feature (61)..(61): /note="Nucleotide may be methylated to form 5-methylcytosine"
agtagaaatatctatgcatgagataaagcatcttactgccctgagccctgagcctgccatcgtgtgaatgctccttaaggattaggttcattcactgaatgaacgtttctttgtgtttacta

SEQ ID NO: 16044 - DNA, 122 bp, Homo sapiens
  misc_feature (61)..(62): /note="This region represents a CpG dinucleotide"
  misc_feature (61)..(61): /note="Nucleotide may be methylated to form 5-methylcytosine"
cttcatttccttggtcacgctgtgactgagagatggtcactgcagcttatctgggcagtccgtgcagggtatgggagtcagtagggtgagtcaagtaggttgtatccagctgtcccataggg

SEQ ID NO: 16045 - DNA, 122 bp, Homo sapiens
  misc_feature (61)..(62): /note="This region represents a CpG dinucleotide"
  misc_feature (61)..(61): /note="Nucleotide may be methylated to form 5-methylcytosine"
atctccatctcctgggtttaagcaattcttgtgcctcagcttcctgagtagctaggactacgggcatgcaccaccacagtcagccactttttgtattattcgtagagatgagtttcaccatg

SEQ ID NO: 16046 - DNA, 122 bp, Homo sapiens
  misc_feature (61)..(62): /note="This region represents a CpG dinucleotide"
  misc_feature (61)..(61): /note="Nucleotide may be methylated to form 5-methylcytosine"
gtgtttgtggctaatcagacacatggggacacagcagcagttgatgaatccctctcgggccgctcggcaaggctctgatgtaatggaaagtgtagggtaacgctttctacagatcatttgaa

SEQ ID NO: 16047 - DNA, 122 bp, Homo sapiens
  misc_feature (61)..(62): /note="This region represents a CpG dinucleotide"
  misc_feature (61)..(61): /note="Nucleotide may be methylated to form 5-methylcytosine"
gtttatgaggttcctgcctatccttctattgtcactttttctttaagcttcttactggaccgcaaactctttgggggaaggatgtatgtctgattcatgtaacccaaatctttgaccattca

SEQ ID NO: 16048 - DNA, 122 bp, Homo sapiens
  misc_feature (61)..(62): /note="This region represents a CpG dinucleotide"
  misc_feature (61)..(61): /note="Nucleotide may be methylated to form 5-methylcytosine"
ctgtgccagacggtgcctcagcagtgacagttatcagcagcagctaacctttactgagtgcgcacatgtggcagcgcttgtgatgagcattttgcatgcattgtttcacaacaaccctaagg

SEQ ID NO: 16049 - DNA, 122 bp, Homo sapiens
  misc_feature (61)..(62): /note="This region represents a CpG dinucleotide"
  misc_feature (61)..(61): /note="Nucleotide may be methylated to form 5-methylcytosine"
tattattattagctatatgaccttgagcaagtctcttgaactgtctgaacctgttttcctcgtctgtaaaatggggaataccaaggttgctgtgagaattaagtgaacttgtgcatgtaaag

SEQ ID NO: 16050 - DNA, 122 bp, Homo sapiens
  misc_feature (61)..(62): /note="This region represents a CpG dinucleotide"
  misc_feature (61)..(61): /note="Nucleotide may be methylated to form 5-methylcytosine"
acacaacaggaagtcaataaatgtttgctgcatggctcagtgttcatcaacctttaagcacgagaccaaaagattgcaaagatgcttcatgctgtgacctctagcctccgggaaggactcat

SEQ ID NO: 16051 - DNA, 122 bp, Homo sapiens
  misc_feature (61)..(62): /note="This region represents a CpG dinucleotide"
  misc_feature (61)..(61): /note="Nucleotide may be methylated to form 5-methylcytosine"
aacactggctcacggtgtatcttctgttcttggaacagccttttattataaacatatcaacgataaaaatacttactccaaaatgcaagtctgtgaacacatcctataaggcagatggaaag

SEQ ID NO: 16052 - DNA, 122 bp, Homo sapiens
  misc_feature (61)..(62): /note="This region represents a CpG dinucleotide"
  misc_feature (61)..(61): /note="Nucleotide may be methylated to form 5-methylcytosine"
ttcacaatacctttatcaaattccaactattttctacttttcttccttatacaacccaggcgcacgggttgaaataattttccttaagaaatccaggaagctctggcctggccctccctcta

SEQ ID NO: 16053 - DNA, 122 bp, Homo sapiens
  misc_feature (61)..(62): /note="This region represents a CpG dinucleotide"
  misc_feature (61)..(61): /note="Nucleotide may be methylated to form 5-methylcytosine"
acacacaggcacacacgcacacacacaagtactaaaattatcttcactgacaggaatgcacgataaaaggcatttgaaagccactggtttagagaacgagcttcagagttccagttgcctaa

SEQ ID NO: 16054 - DNA, 122 bp, Homo sapiens
  misc_feature (61)..(62): /note="This region represents a CpG dinucleotide"
  misc_feature (61)..(61): /note="Nucleotide may be methylated to form 5-methylcytosine"
ttattagttgccttcagaaatgccattacaatttcactgccaccacaagggaacttaaaccgcagaaagcacaacaccagtgtagcaaaaagtccagtctttgtagccctattgaatattca

SEQ ID NO: 16055 - DNA, 122 bp, Homo sapiens
  misc_feature (61)..(62): /note="This region represents a CpG dinucleotide"
  misc_feature (61)..(61): /note="Nucleotide may be methylated to form 5-methylcytosine"
tcgtgacagccctgccagctaagggcagtagtctctctccctactccacccactacttaacggaagagaaactaaggctcagagaggttgagcaacacaccacagcctgcacagctgcctgg

SEQ ID NO: 16056 - DNA, 122 bp, Homo sapiens
  misc_feature (61)..(62): /note="This region represents a CpG dinucleotide"
  misc_feature (61)..(61): /note="Nucleotide may be methylated to form 5-methylcytosine"
caagattcacagatggtggctgagtggtcgagtcagaattcaagctgaaactcttcctcacgctcagctgcctctagaagttgatggttaacaagcaaaagaaaaggcactgaagcagatac

SEQ ID NO: 16057 - DNA, 122 bp, Homo sapiens
  misc_feature (61)..(62): /note="This region represents a CpG dinucleotide"
  misc_feature (61)..(61): /note="Nucleotide may be methylated to form 5-methylcytosine"
ctctcctaatcgttttcctaggatatttccacagtggatgacaccctgcctcagtccttgcgcagctggattacatgcttcctggggataatcagcacccttgtcatgatctgcatggccac

SEQ ID NO: 16058 - DNA, 122 bp, Homo sapiens
  misc_feature (61)..(62): /note="This region represents a CpG dinucleotide"
  misc_feature (61)..(61): /note="Nucleotide may be methylated to form 5-methylcytosine"
tcaataagataagcccactaaccacatgcttggatgccacagcagaatgaaattgctctacgtttccagacacttgctcttcagttctacatttagctcatggtgcctggtgccaagctgca

SEQ ID NO: 16059 - DNA, 122 bp, Homo sapiens
  misc_feature (61)..(62): /note="This region represents a CpG dinucleotide"
  misc_feature (61)..(61): /note="Nucleotide may be methylated to form 5-methylcytosine"
cccctattttacagataaggaaactaaatgtcagagagttcaataattttcccaagatcacgaagccaataagtgatggagtcatgacttaaattcaggtcttttggtgacacaacccagac

SEQ ID NO: 16060 - DNA, 122 bp, Homo sapiens
  misc_feature (61)..(62): /note="This region represents a CpG dinucleotide"
  misc_feature (61)..(61): /note="Nucleotide may be methylated to form 5-methylcytosine"
cagtccccagtgattaaaccttcctgttgggactgcactctcacagagatataagacatacgtgatcagcacaagtatgtacctacccagccctggctttactgtgcctagtcagccaggcc

SEQ ID NO: 16061 - DNA, 122 bp, Homo sapiens
  misc_feature (61)..(62): /note="This region represents a CpG dinucleotide"
  misc_feature (61)..(61): /note="Nucleotide may be methylated to form 5-methylcytosine"
ccttttctcaagctcactcctctggtattgaatggtttttctctccttttgctcttgcaacgttctctacagtcctgttaatttccaggccagctcttcccccaccggccccgcaagccttc

SEQ ID NO: 16062 - DNA, 122 bp, Homo sapiens
  misc_feature (61)..(62): /note="This region represents a CpG dinucleotide"
  misc_feature (61)..(61): /note="Nucleotide may be methylated to form 5-methylcytosine"
gcttccctagaaatatcagttgtaaaatatggtcctccagcagtagatgtttgcatctgccgattaagaaagaaggcaaccagcagccttctcacgttcaggttcaggtccttgtgggtgtg

SEQ ID NO: 16063 - DNA, 122 bp, Homo sapiens
  misc_feature (61)..(62): /note="This region represents a CpG dinucleotide"
  misc_feature (61)..(61): /note="Nucleotide may be methylated to form 5-methylcytosine"
gagcacaatggtctctcttctgtgagtgaaagctcataatttttcatgaaaaactggtgacggggttaccccataaagaatacatttatatggtggcaaggaaatgactccttgtgtcacta

SEQ ID NO: 16064 - DNA, 122 bp, Homo sapiens
  misc_feature (61)..(62): /note="This region represents a CpG dinucleotide"
  misc_feature (61)..(61): /note="Nucleotide may be methylated to form 5-methylcytosine"
gtgtctcctacaatcctattactcatcaactggcatcttgttcctccagtgactttggtacgttctgattcctgatgtcctgtcctggaataactgaaaatctgggctaaaaatgctaaaat

SEQ ID NO: 16065 - DNA, 122 bp, Homo sapiens
  misc_feature (61)..(62): /note="This region represents a CpG dinucleotide"
  misc_feature (61)..(61): /note="Nucleotide may be methylated to form 5-methylcytosine"
agagctttccaactcaggcccttctgacatttgggacaacattgttctctggggtggggccgttctgggccctgcagcgtgctgagcagcgtccccagcctccacccactccatgccaggag

SEQ ID NO: 16066 - DNA, 122 bp, Homo sapiens
  misc_feature (61)..(62): /note="This region represents a CpG dinucleotide"
  misc_feature (61)..(61): /note="Nucleotide may be methylated to form 5-methylcytosine"
atttttatgcctgtcttgtgaggaagaacaaagacatttcacatgtgagataacccatctcgtaaaaaccgcctgaatgctgaggactggaagatacatttgagaatgcattgtaagtatga

SEQ ID NO: 16067 - DNA, 122 bp, Homo sapiens
  misc_feature (61)..(62): /note="This region represents a CpG dinucleotide"
  misc_feature (61)..(61): /note="Nucleotide may be methylated to form 5-methylcytosine"
ctatatattcctccccccaatgaatgcctatcattctgataaactggaccacaaaatactcgtttcattttatactgttttaattggctcttgggatgtttcatgcaatctattggttctgt

SEQ ID NO: 16068 - DNA, 122 bp, Homo sapiens
  misc_feature (61)..(62): /note="This region represents a CpG dinucleotide"
  misc_feature (61)..(61): /note="Nucleotide may be methylated to form 5-methylcytosine"
tctcacagctcctatattctgcttcttcctacagatccatttcctgtctattggcagcttcgtctgcattatcattgtttcttgtctcttgaactttggttggcaacttgcaatccttttga

SEQ ID NO: 16069 - DNA, 122 bp, Homo sapiens
  misc_feature (61)..(62): /note="This region represents a CpG dinucleotide"
  misc_feature (61)..(61): /note="Nucleotide may be methylated to form 5-methylcytosine"
ttgtcgaggtgcaccagggtgtactttcagatctataatacacagtctggccatcacaaccgcattatttccctcatctcattccaaccctggtgtggtaaaaccaaagagacacaggatca

SEQ ID NO: 16070 - DNA, 122 bp, Homo sapiens
  misc_feature (61)..(62): /note="This region represents a CpG dinucleotide"
  misc_feature (61)..(61): /note="Nucleotide may be methylated to form 5-methylcytosine"
tctctgtggtgagtatcgttgtggtcaacatttggaataactcgtgttgagcacactgttcgtgttcctgcccctagttctctgggtgtgtggctgcgcggaactgctgggtaattctaccc

SEQ ID NO: 16071 - DNA, 122 bp, Homo sapiens
  misc_feature (61)..(62): /note="This region represents a CpG dinucleotide"
  misc_feature (61)..(61): /note="Nucleotide may be methylated to form 5-methylcytosine"
ggggaggcctgaagttcctttagcttgtccatgtgaaacagaggaagagcccacaaggaacgcattcatctcagagttaggtgaccttggctttgggatctagttgctcattacttccactt

SEQ ID NO: 16072 - DNA, 122 bp, Homo sapiens
  misc_feature (61)..(62): /note="This region represents a CpG dinucleotide"
  misc_feature (61)..(61): /note="Nucleotide may be methylated to form 5-methylcytosine"
gcctgacgcaccctcctccccagctcaggaaattgtgaggtgaactcttcccctccagagcgctgtctgctgtgaaggcggctcaggcccccaacacacacatagcaggtgacaggtagggc

SEQ ID NO: 16073 - DNA, 122 bp, Homo sapiens
  misc_feature (61)..(62): /note="This region represents a CpG dinucleotide"
  misc_feature (61)..(61): /note="Nucleotide may be methylated to form 5-methylcytosine"
agaaatgcttccacatcaagatgtttcaaaaggtactttataaacgaatctggattctaccgaaagctgttacacatctgctttgctttaccaatgaagaacacaaacatgttgatggtttc

SEQ ID NO: 16074 - DNA, 122 bp, Homo sapiens
  misc_feature (61)..(62): /note="This region represents a CpG dinucleotide"
  misc_feature (61)..(61): /note="Nucleotide may be methylated to form 5-methylcytosine"
gtctgtatcaactaaaatctcatgaaaatcctccctgataaaatagaaggcatggatttacgttctcccagtatacaaccagctgagcactgactttactacctcctggccactaaaagtat

SEQ ID NO: 16075 - DNA, 122 bp, Homo sapiens
  misc_feature (61)..(62): /note="This region represents a CpG dinucleotide"
  misc_feature (61)..(61): /note="Nucleotide may be methylated to form 5-methylcytosine"
cactctgcctttggggatgagaacgtgtaccatactcatattacatatacagattcaggccgggcacggtggctcatgcctgtaatcccagcactttgggaggctgaggcgggtggatcact

SEQ ID NO: 16076 - DNA, 122 bp, Homo sapiens
  misc_feature (61)..(62): /note="This region represents a CpG dinucleotide"
  misc_feature (61)..(61): /note="Nucleotide may be methylated to form 5-methylcytosine"
catttcctctctagtctgatattccactggctgaacttgctgctatttgaatactcaatgcgttaatgcctcctgaacttttcatggaatagtctccttttcctggaatgtagttcctccct

SEQ ID NO: 16077 - DNA, 122 bp, Homo sapiens
  misc_feature (61)..(62): /note="This region represents a CpG dinucleotide"
  misc_feature (61)..(61): /note="Nucleotide may be methylated to form 5-methylcytosine"
gggtacacttttactggcaccagagcagcccaggatggcagaaatgatgacaatgaagaccgtcaattaaattaacatttactgaatatcttccactgtgtcagggagcactcagagtagat

SEQ ID NO: 16078 - DNA, 122 bp, Homo sapiens
  misc_feature (61)..(62): /note="This region represents a CpG dinucleotide"
  misc_feature (61)..(61): /note="Nucleotide may be methylated to form 5-methylcytosine"
ctaacttatttgttttatgactttgcacagggacctgcataactagcctctctagctgggcgtttgtgtgctttccagtttttcaagattgtgagcaagttttgataaaaatactcgtctcg

SEQ ID NO: 16079 - DNA, 122 bp, Homo sapiens
  misc_feature (61)..(62): /note="This region represents a CpG dinucleotide"
  misc_feature (61)..(61): /note="Nucleotide may be methylated to form 5-methylcytosine"
agggccacctggtgaggcttctgttgcatcatcctgtttctctgctgccctccaggggggcgatgccgctccacgctcctgccatgctcctgccacagccacactggggagtccctctgcca

SEQ ID NO: 16080 - DNA, 122 bp, Homo sapiens
  misc_feature (61)..(62): /note="This region represents a CpG dinucleotide"
  misc_feature (61)..(61): /note="Nucleotide may be methylated to form 5-methylcytosine"
gaggaaaactaattttagaggaacaaggaagaagcagaaacagaggctgcaataatgatacgtggattccctagttgtcattttcattaaagaaagtcattccacgctatcaaaaaatggaa

SEQ ID NO: 16081 - DNA, 122 bp, Homo sapiens
  misc_feature (61)..(62): /note="This region represents a CpG dinucleotide"
  misc_feature (61)..(61): /note="Nucleotide may be methylated to form 5-methylcytosine"
gggagaaactggctgatggagggaagagcagctcagtgaaggatcaacgagaaggaagagcgcccatcacaaggcagctgaaagctgattcatcattaggacgaggttcaagggagaagtca

SEQ ID NO: 16082 - DNA, 122 bp, Homo sapiens
  misc_feature (61)..(62): /note="This region represents a CpG dinucleotide"
  misc_feature (61)..(61): /note="Nucleotide may be methylated to form 5-methylcytosine"
accagatgcctacctggtaagcccttggcaaaactgtgctgaatgtttaacatggtatcacggacagtgaattaggaacttggagaggaagtggctgctttcttctggaagatctaatcaag

SEQ ID NO: 16083 - DNA, 122 bp, Homo sapiens
  misc_feature (61)..(62): /note="This region represents a CpG dinucleotide"
  misc_feature (61)..(61): /note="Nucleotide may be methylated to form 5-methylcytosine"
tgccggctcttggcacagcactgccaagctgccgtttctcgggtgctgagccacggcgggcgcggggctgggccctgcacgtgcattgtcctgtttctgttcaaagtttgaaaaacccaaac

SEQ ID NO: 16084 - DNA, 122 bp, Homo sapiens
  misc_feature (61)..(62): /note="This region represents a CpG dinucleotide"
  misc_feature (61)..(61): /note="Nucleotide may be methylated to form 5-methylcytosine"
ccctgagtttcttttgaagccaacctctgacccacaatgggtggcagggactgtggctggcgcctgataaatgacacttatcttggtgtgcctcatgaggtcattgtggacaatcaggtttg

SEQ ID NO: 16085 - DNA, 122 bp, Homo sapiens
  misc_feature (61)..(62): /note="This region represents a CpG dinucleotide"
  misc_feature (61)..(61): /note="Nucleotide may be methylated to form 5-methylcytosine"
cttctcagggtttcccgttggtgcattctcatcttgaaatttggtgacagctccccaaagcgttaagtgtttagaggtctgtgctctattcatgcacctgccctcgcgattcagtgtatttt

SEQ ID NO: 16086 - DNA, 122 bp, Homo sapiens
  misc_feature (61)..(62): /note="This region represents a CpG dinucleotide"
  misc_feature (61)..(61): /note="Nucleotide may be methylated to form 5-methylcytosine"
cctgatgaacttagctgaagctaccagatacaactttcaacatccttctaggtggatcctcgttgtttttgttcactcagcttcaaggttaaaaaaaacaagcaaaaaaaaaaagaccaaag

SEQ ID NO: 16087 - DNA, 122 bp, Homo sapiens
  misc_feature (61)..(62): /note="This region represents a CpG dinucleotide"
  misc_feature (61)..(61): /note="Nucleotide may be methylated to form 5-methylcytosine"
cagctcttgacaaagcctctaaattataccttttataattccgttattctttttgtgctgcgaagtcttatgctgtgtgttaatgcaaggcaattagctttatcaggaagaaaagaaaaact

SEQ ID NO: 16088 - DNA, 122 bp, Homo sapiens
  misc_feature (61)..(62): /note="This region represents a CpG dinucleotide"
  misc_feature (61)..(61): /note="Nucleotide may be methylated to form 5-methylcytosine"
caaaacagttcctgccttcaaggagctcacaggctggtggtgcagacacctcagcagattcggagaggcaggacaaactgaaaagcgctctggcagagggagaagcaagcatggggctgcag

SEQ ID NO: 16089 - DNA, 122 bp, Homo sapiens
  misc_feature (61)..(62): /note="This region represents a CpG dinucleotide"
  misc_feature (61)..(61): /note="Nucleotide may be methylated to form 5-methylcytosine"
ggacaaaacctcagcgtgcaagcctggcaggctggcttccttctagcatgactaggaatgcgatggcttacaatgttcagcaaggtgtgcttctgtgccagctgtgtctagcagatactgcc

SEQ ID NO: 16090 - DNA, 122 bp, Homo sapiens
  misc_feature (61)..(62): /note="This region represents a CpG dinucleotide"
  misc_feature (61)..(61): /note="Nucleotide may be methylated to form 5-methylcytosine"
cagggtcgggaaaccttacagctgtttgggattcacctatagtgtgtgtgtgccccagggcgtcggcgccggtaagaagggtggaagatggttggggaggggttggcatccatcacactcca

SEQ ID NO: 16091 - DNA, 122 bp, Homo sapiens
  misc_feature (61)..(62): /note="This region represents a CpG dinucleotide"
  misc_feature (61)..(61): /note="Nucleotide may be methylated to form 5-methylcytosine"
ttcatataagagggggctggctggttgcatatgtaggatgtcccatctcccagcccacttcgtcatgacagacaccagaaacaccactctgcttcactgaagaacaataaaatctgcgtgtc

SEQ ID NO: 16092 - DNA, 122 bp, Homo sapiens
  misc_feature (61)..(62): /note="This region represents a CpG dinucleotide"
  misc_feature (61)..(61): /note="Nucleotide may be methylated to form 5-methylcytosine"
gaacatctcagaagagctgaaaataccagtttggaacttggtagagacgtcagagccaagcgtagatttgggagtttgatttatgtctgcagtaggcattcctttcatgcctatcatgtgcc

SEQ ID NO: 16093 - DNA, 122 bp, Homo sapiens
  misc_feature (61)..(62): /note="This region represents a CpG dinucleotide"
  misc_feature (61)..(61): /note="Nucleotide may be methylated to form 5-methylcytosine"
aagaaatcatttgagagaaggtcgggaaaggggtgtgctcatcctgcatcacaattactacgagaaaggggaaactggaaagtacagagggaaacttgcaaggatgaacaagaagagaaaac

SEQ ID NO: 16094 - DNA, 122 bp, Homo sapiens
  misc_feature (61)..(62): /note="This region represents a CpG dinucleotide"
  misc_feature (61)..(61): /note="Nucleotide may be methylated to form 5-methylcytosine"
tttgcattctgttaatgttgtactttcacaagtcatttccttcctcattctctaaaacaacgtagatacagcaacctacagatgagcaggacatagacacaatgctcccatatgccactttc

SEQ ID NO: 16095 - DNA, 122 bp, Homo sapiens
  misc_feature (61)..(62): /note="This region represents a CpG dinucleotide"
  misc_feature (61)..(61): /note="Nucleotide may be methylated to form 5-methylcytosine"
caggaggggcaaatgcaaaatccctgcagtaggagacacctggtgcacttcaatgtggctcgaactgaaaggagagatagcaagagacgagatcagagaggtaaaaatgagccagattgttt

SEQ ID NO: 16096 - DNA, 122 bp, Homo sapiens
  misc_feature (61)..(62): /note="This region represents a CpG dinucleotide"
  misc_feature (61)..(61): /note="Nucleotide may be methylated to form 5-methylcytosine"
cagcagccagctgccttggatggtcagaaggtgaaatttgaatgctggtgaatgggagagcggaagttcagcaaggctgagttaagcccattcatgaaaaagatctagtctcacttccttat

SEQ ID NO: 16097 - DNA, 122 bp, Homo sapiens
  misc_feature (61)..(62): /note="This region represents a CpG dinucleotide"
  misc_feature (61)..(61): /note="Nucleotide may be methylated to form 5-methylcytosine"
ttttgcttcacaatgccagtgctaacctttagccacctgatcaaacacttggaatatggacgccaagccaggccagagattagctgaacattccccttggactgctgactacccactcagag

SEQ ID NO: 16098 - DNA, 122 bp, Homo sapiens
  misc_feature (61)..(62): /note="This region represents a CpG dinucleotide"
  misc_feature (61)..(61): /note="Nucleotide may be methylated to form 5-methylcytosine"
caaaattaagccagcaaaatgttgctgtcatccatctgaacctgttagaaatctcaagctcgtcatagaatctttgacctcaccattcaatgttttacaaattgagtaactatgtccctgtc

SEQ ID NO: 16099 - DNA, 122 bp, Homo sapiens
  misc_feature (61)..(62): /note="This region represents a CpG dinucleotide"
  misc_feature (61)..(61): /note="Nucleotide may be methylated to form 5-methylcytosine"
accttctgctgatcactccattcaagctgctcaaatagtccttccaaggtcacaggccagcgacagcagggatgactaacaaaaacctgaaatgcatagtatgcaagaaggagtgttgtaag

SEQ ID NO: 16100 - DNA, 122 bp, Homo sapiens
  misc_feature (61)..(62): /note="This region represents a CpG dinucleotide"
  misc_feature (61)..(61): /note="Nucleotide may be methylated to form 5-methylcytosine"
gcaggcccagcattcaccccagagaagcccagggagcttggaggagaagtgcctgagtcacgtgctcctttcaagagagttctccagagataacattgcttttcattttacctcctcaggat

SEQ ID NO: 16101 - DNA, 122 bp, Homo sapiens
  misc_feature (61)..(62): /note="This region represents a CpG dinucleotide"
  misc_feature (61)..(61): /note="Nucleotide may be methylated to form 5-methylcytosine"
acatcaaagtttgggttcaagattacatcagctccagattacagaagtgtaaccactgaccgcgggtaattccaccacccagacatatggtgatggacgtttcctgatcatttgaggtcttc

SEQ ID NO: 16102 - DNA, 122 bp, Homo sapiens
  misc_feature (61)..(62): /note="This region represents a CpG dinucleotide"
  misc_feature (61)..(61): /note="Nucleotide may be methylated to form 5-methylcytosine"
cagaaacaggactctcttaatagtctgatttacattcatatcaatacaaacacacatatacgcacagctatcaacacagtcatccactctacatctaaaatgtctcatttcctcctcttcat

SEQ ID NO: 16103 - DNA, 122 bp, Homo sapiens
  misc_feature (61)..(62): /note="This region represents a CpG dinucleotide"
  misc_feature (61)..(61): /note="Nucleotide may be methylated to form 5-methylcytosine"
ctgcttacttcttaactggctcaagggatagtttctatttgttgtgcctattttccccttcgttgcaaagattcagctctaatttcatttccatcacaaaagaattggcaaataactaaagc

SEQ ID NO: 16104 - DNA, 122 bp, Homo sapiens
  misc_feature (61)..(62): /note="This region represents a CpG dinucleotide"
  misc_feature (61)..(61): /note="Nucleotide may be methylated to form 5-methylcytosine"
ggacttctagctcttcctggatccttatatgcccatttgctattgtaaatagctatatgacgttgtgatactattccaaaccctagtcatagcaaccacatacctaatagccaagggataac

SEQ ID NO: 16105 - DNA, 122 bp, Homo sapiens
  misc_feature (61)..(62): /note="This region represents a CpG dinucleotide"
  misc_feature (61)..(61): /note="Nucleotide may be methylated to form 5-methylcytosine"
agctacatttccaaagtggagaattcataggggaactctaataccacttacacttctattcgtcatctgtatatacatatatatatatatatacacatacatacatgatctgaccacatcct

SEQ ID NO: 16106 - DNA, 122 bp, Homo sapiens
  misc_feature (61)..(62): /note="This region represents a CpG dinucleotide"
  misc_feature (61)..(61): /note="Nucleotide may be methylated to form 5-methylcytosine"
ccattttgttgggccgaggctcaggcaggagaattggcgcgtcctccctctttctctttccgtcagccattggctacctcctccaaagcacagagtcttattggctacggaaattcaccttc

SEQ ID NO: 16107 - DNA, 122 bp, Homo sapiens
  misc_feature (61)..(62): /note="This region represents a CpG dinucleotide"
  misc_feature (61)..(61): /note="Nucleotide may be methylated to form 5-methylcytosine"
tcctggctgccactgcagagttagaaccacgtgcttgttttcagtaccatggagaggtgccgcattgctgagagctgcagacccgagggtcagccaatgtagagaaaaccaggagatccaca

SEQ ID NO: 16108 - DNA, 122 bp, Homo sapiens
  misc_feature (61)..(62): /note="This region represents a CpG dinucleotide"
  misc_feature (61)..(61): /note="Nucleotide may be methylated to form 5-methylcytosine"
ctctggtcttctgtgtttgctaattcattagtcaacaaatgtttactaagcacaaagactcgttctttgttctcaagggagggaggcagacagatgattgcagcaaggttgaggataaagag

SEQ ID NO: 16109 - DNA, 122 bp, Homo sapiens
  misc_feature (61)..(62): /note="This region represents a CpG dinucleotide"
  misc_feature (61)..(61): /note="Nucleotide may be methylated to form 5-methylcytosine"
gagactctgtctcaaaacaaacaaacaaacaccatccgttgagttcctgtgcatggcaggcgctgcaactacaaagatcaggaagttgtgcctgaccctggggacctgacaggctagtgtat

SEQ ID NO: 16110 - DNA, 122 bp, Homo sapiens
  misc_feature (61)..(62): /note="This region represents a CpG dinucleotide"
  misc_feature (61)..(61): /note="Nucleotide may be methylated to form 5-methylcytosine"
tcacccactcaaccaaccacatatatcctcgtccctacccacgtactcaagtgtaacgtccgtatgcatatctatttgcggccacctcccaacctgtcatttactggtagtgcctctgacag

SEQ ID NO: 16111 - DNA, 122 bp, Homo sapiens
  misc_feature (61)..(62): /note="This region represents a CpG dinucleotide"
  misc_feature (61)..(61): /note="Nucleotide may be methylated to form 5-methylcytosine"
gctactgtgatcgaagcagacaaattgaggagagcaaaatcatttaatcaaagaggaagacgtgacccagctcaacttcctggtggacgacctcagctgtgctgttgttactagtgtctaac

SEQ ID NO: 16112 - DNA, 122 bp, Homo sapiens
  misc_feature (61)..(62): /note="This region represents a CpG dinucleotide"
  misc_feature (61)..(61): /note="Nucleotide may be methylated to form 5-methylcytosine"
ccccgcccgtcaagcctttggcatcattatcctcatcactaaatcctacagagtacagggcggaaaacggtgcacaccattcacagaactggagaactccaaggggcgaaagttaaagggaa

SEQ ID NO: 16113 - DNA, 122 bp, Homo sapiens
  misc_feature (61)..(62): /note="This region represents a CpG dinucleotide"
  misc_feature (61)..(61): /note="Nucleotide may be methylated to form 5-methylcytosine"
ataaacagctgacagaatgaactaaacagcatccagtgactcaccaggggaccgttcaatcgctgctcactagattcagggagagagaagatggggccaaaccatcattccccattgacggg

SEQ ID NO: 16114 - DNA, 122 bp, Homo sapiens
  misc_feature (61)..(62): /note="This region represents a CpG dinucleotide"
  misc_feature (61)..(61): /note="Nucleotide may be methylated to form 5-methylcytosine"
ctttttctttctgaccaatacatgctcaagaaatcaaatatctgagatacacaaattgaacgcggtagggtgggggaggaagtagggagataaagcctatgctgctgattcctcaattatag

SEQ ID NO: 16115 - DNA, 122 bp, Homo sapiens
  misc_feature (61)..(62): /note="This region represents a CpG dinucleotide"
  misc_feature (61)..(61): /note="Nucleotide may be methylated to form 5-methylcytosine"
agatttttttctagcctgaaataagtgagctgtcatccagttctggcacttttgtgcttccgttagtactgcagggagtcatcctcaaagagcattatcaccactgacctgtcaccagaaag

SEQ ID NO: 16116 - DNA, 122 bp, Homo sapiens
  misc_feature (61)..(62): /note="This region represents a CpG dinucleotide"
  misc_feature (61)..(61): /note="Nucleotide may be methylated to form 5-methylcytosine"
ggaggccgcgccctcccggaaaagccgggtcctccagaccccgaggccttgctctcagagcgggaggccccacccactggagagccccgcccctaaggtactatgagtcctcaggggtcaag

SEQ ID NO: 16117 - DNA, 122 bp, Homo sapiens
  misc_feature (61)..(62): /note="This region represents a CpG dinucleotide"
  misc_feature (61)..(61): /note="Nucleotide may be methylated to form 5-methylcytosine"
gatgactacagcctagatgaaggtataaatgcctattacatctacctcattaaagaacttcgttgtaattcttgggcagtttccagactctgttacagaaacagagggctgtttctttttgt

SEQ ID NO: 16118 - DNA, 122 bp, Homo sapiens
  misc_feature (61)..(62): /note="This region represents a CpG dinucleotide"
  misc_feature (61)..(61): /note="Nucleotide may be methylated to form 5-methylcytosine"
tgtagcattttattagctccaagttcaagcaacttcaaaactatatttttatgaccctgacgtgctgcccacgttaaagcctgtaagtagggggaaaagaagattgtttaaagagaaggagt

SEQ ID NO: 16119 - DNA, 122 bp, Homo sapiens
  misc_feature (61)..(62): /note="This region represents a CpG dinucleotide"
  misc_feature (61)..(61): /note="Nucleotide may be methylated to form 5-methylcytosine"
acaggggtagccaccttattatgttgttctttgaaggataaacaggaaagaccattgttacgatgtgccttcattaaaatctttattatttacaggccagggagaggctagagattatggcc

SEQ ID NO: 16120 - DNA, 122 bp, Homo sapiens
  misc_feature (61)..(62): /note="This region represents a CpG dinucleotide"
  misc_feature (61)..(61): /note="Nucleotide may be methylated to form 5-methylcytosine"
acatgttccccctgcagtccccatcaccctcacactggaatgattgtcctttgtggcacacgttgttgcaagtattttcgtaatgtgtatcatttcatgtaaatgatgtgagctcaagatta

SEQ ID NO: 16121 - DNA, 122 bp, Homo sapiens
  misc_feature (61)..(62): /note="This region represents a CpG dinucleotide"
  misc_feature (61)..(61): /note="Nucleotide may be methylated to form 5-methylcytosine"
gaggctgaaataagttattgcagtttgaagagcaaatggaaatgtggaagagaaggcaggcggaagctgactgcagctagagaagcatgtggtgaatgcattttctaggttttgaacacgag

SEQ ID NO: 16122 - DNA, 122 bp, Homo sapiens
  misc_feature (61)..(62): /note="This region represents a CpG dinucleotide"
  misc_feature (61)..(61): /note="Nucleotide may be methylated to form 5-methylcytosine"
ttaatcacagcataaaggcatgaagatgccacaggcagactctcagtcttcatcagtgaccgtgcttggaggcagtcatggctcgagcctgtggtggaagtgtgagggacagggtgggtctc

SEQ ID NO: 16123 - DNA, 122 bp, Homo sapiens
  misc_feature (61)..(62): /note="This region represents a CpG dinucleotide"
  misc_feature (61)..(61): /note="Nucleotide may be methylated to form 5-methylcytosine"
aaatactaagttccttctttcatacttggaattctgtgaatcatgtaaaacacctgaaaacgtcactccaaggggcataaaactgatgctgtgagttcaatgcagataattcctaaccccta

SEQ ID NO: 16124 - DNA, 122 bp, Homo sapiens
  misc_feature (61)..(62): /note="This region represents a CpG dinucleotide"
  misc_feature (61)..(61): /note="Nucleotide may be methylated to form 5-methylcytosine"
gacactgtctcatgtgagtattgtaaagattaaatgagctaatgcatgtaaagctcttagcgtagtgcttggcatgcagtaagcactcagtacatgttagctggtacagctgtcttgtgaat

SEQ ID NO: 16125 - DNA, 122 bp, Homo sapiens
  misc_feature (61)..(62): /note="This region represents a CpG dinucleotide"
  misc_feature (61)..(61): /note="Nucleotide may be methylated to form 5-methylcytosine"
ctgacatttgagcaaaaggtggtgactcagccaactggagaactcacaacaagttctacccgtctggggttgttaccagctggcccttccagaatcacagtctaggctacatagtgaagatc

SEQ ID NO: 16126 - DNA, 122 bp, Homo sapiens
  misc_feature (61)..(62): /note="This region represents a CpG dinucleotide"
  misc_feature (61)..(61): /note="Nucleotide may be methylated to form 5-methylcytosine"
atataatgtaaacaatgttttaaaattctccctgtatcctattgccttctcacatcttagcgcctgaagcctttattatctttttaaaaaggaagactaacaaagtattagagacagactat

SEQ ID NO: 16127 - DNA, 122 bp, Homo sapiens
  misc_feature (61)..(62): /note="This region represents a CpG dinucleotide"
  misc_feature (61)..(61): /note="Nucleotide may be methylated to form 5-methylcytosine"
tcatttgttgacacaagtcagtaaatggatcatttgaagcctaatgccagttggacaactcgaattcaatagttgtatctccaaaacagggcaaataacataaccaataaaaactgttttct

SEQ ID NO: 16128 - DNA, 122 bp, Homo sapiens
  misc_feature (61)..(62): /note="This region represents a CpG dinucleotide"
  misc_feature (61)..(61): /note="Nucleotide may be methylated to form 5-methylcytosine"
ctcaggtaattagccataacctcatgtatagataatttgccttttcacatgagctctggccgccatgtctgggccctacctccaaaaaaaacttacaccaacattaaccggcaagatgtgtt

SEQ ID NO: 16129 - DNA, 122 bp, Homo sapiens
  misc_feature (61)..(62): /note="This region represents a CpG dinucleotide"
  misc_feature (61)..(61): /note="Nucleotide may be methylated to form 5-methylcytosine"
tcttttcctcacttacctaggttttgccacatgctgaaaatttcacaacccattgttacccgcatgtcaccatacctgaaatagaacaaaaaaccaaacctgatacaatgcctccagaacaa

SEQ ID NO: 16130 - DNA, 122 bp, Homo sapiens
  misc_feature (61)..(62): /note="This region represents a CpG dinucleotide"
  misc_feature (61)..(61): /note="Nucleotide may be methylated to form 5-methylcytosine"
aagttgaggtggtttcaatacagctcttcttagacaggcagatggactttacaacatatgcgtgtcctgcccaagcttatactacactggtaatcctcataaagtaaaaatacctcttagtc

SEQ ID NO: 16131 - DNA, 122 bp, Homo sapiens
  misc_feature (61)..(62): /note="This region represents a CpG dinucleotide"
  misc_feature (61)..(61): /note="Nucleotide may be methylated to form 5-methylcytosine"
tgctgcaatggaactaggcagccttgccagccatccggcggcagtgccggcccatgctggcggccacctccccgaggctctgactcttggaagggtagccccggagacctggccgtgtcgaa

SEQ ID NO: 16132 - DNA, 122 bp, Homo sapiens
  misc_feature (61)..(62): /note="This region represents a CpG dinucleotide"
  misc_feature (61)..(61): /note="Nucleotide may be methylated to form 5-methylcytosine"
ttagctttagttgagcctcatgggctggctttgtgtcaagtaaaagctctactacaatgccgtccagtaaattggttttgtctgtgcagcaggcaggacaaacccttccgacgattataagg

SEQ ID NO: 16133 - DNA, 122 bp, Homo sapiens
  misc_feature (61)..(62): /note="This region represents a CpG dinucleotide"
  misc_feature (61)..(61): /note="Nucleotide may be methylated to form 5-methylcytosine"
tgtgtaactcagccaaaggagatgccaaatcagagtggctgttcagcagcaccaagctgccggaggtttattcacaggatccctgggcaggaacccctagccaagtttccagcagtgcaaga

SEQ ID NO: 16134 - DNA, 122 bp, Homo sapiens
  misc_feature (61)..(62): /note="This region represents a CpG dinucleotide"
  misc_feature (61)..(61): /note="Nucleotide may be methylated to form 5-methylcytosine"
ctggggccccttgggagttgagtcagagttgcctcattcctcttcttgggttctgtctcccgtttgcttctagactttcccattctttggtgtagctcctgcaatcctgaatgagtccgggg

SEQ ID NO: 16135 - DNA, 122 bp, Homo sapiens
  misc_feature (61)..(62): /note="This region represents a CpG dinucleotide"
  misc_feature (61)..(61): /note="Nucleotide may be methylated to form 5-methylcytosine"
gaggtcaaggagattaaagataacctgatcaaaatacagccagtgaagaccagccagtcccgtagctccagtctacccagtgtctgcacattgcctggatttcttcccttggatcataaggg

SEQ ID NO: 16136 - DNA, 122 bp, Homo sapiens
  misc_feature (61)..(62): /note="This region represents a CpG dinucleotide"
  misc_feature (61)..(61): /note="Nucleotide may be methylated to form 5-methylcytosine"
aagatgtctagtctctctgctgagccactttccttaatgtcttgaatgaattttcacagacgtggcatgtagcagtgaaactgttgttaccagtggttaagtttacatttgaggcaccccga

SEQ ID NO: 16137 - DNA, 122 bp, Homo sapiens
  misc_feature (61)..(62): /note="This region represents a CpG dinucleotide"
  misc_feature (61)..(61): /note="Nucleotide may be methylated to form 5-methylcytosine"
cacatgaatttgacttgcaaaaagtgcaaaagggaatggtagaaccagaattactaagtacggcatcagtgtgaatgtgggggaaatttgtgtataacttgctttgttctgctgagctgata

SEQ ID NO: 16138 - DNA, 122 bp, Homo sapiens
  misc_feature (61)..(62): /note="This region represents a CpG dinucleotide"
  misc_feature (61)..(61): /note="Nucleotide may be methylated to form 5-methylcytosine"
ggtttccaacatgctcaggttaaccataatgattccaacttctgtttcatgtcacttcttcgtgtgtttacccaaaacacacagagttctattggaaagaaagtaaagcaaagtgtaaaatc

SEQ ID NO: 16139 - DNA, 122 bp, Homo sapiens
  misc_feature (61)..(62): /note="This region represents a CpG dinucleotide"
  misc_feature (61)..(61): /note="Nucleotide may be methylated to form 5-methylcytosine"
cctctccaaagcagtctgaacccagccttggggagtggcttccgagtgtgtccttccttgcgtatttttcttcagccttagggcacttattgagttttctttacatctttatagttactctc

SEQ ID NO: 16140 - DNA, 122 bp, Homo sapiens
  misc_feature (61)..(62): /note="This region represents a CpG dinucleotide"
  misc_feature (61)..(61): /note="Nucleotide may be methylated to form 5-methylcytosine"
tagtttttttcctgtccttctcatctgggacttgctgtcatgattctgggcttcagaaaccgtatccccagagcatgtaacacttatcttgtctgtgaaaaatattaaatgaatgcatatgt

SEQ ID NO: 16141 - DNA, 122 bp, Homo sapiens
  misc_feature (61)..(62): /note="This region represents a CpG dinucleotide"
  misc_feature (61)..(61): /note="Nucleotide may be methylated to form 5-methylcytosine"
aacaaaccaaaattccccagaaaaatcttgctcatcagtacatttaatgtaccacaatcccgcttcctccggcattcctacaaacaacagtctttcagaacacagaattcttatgaaataaa

SEQ ID NO: 16142 - DNA, 122 bp, Homo sapiens
  misc_feature (61)..(62): /note="This region represents a CpG dinucleotide"
  misc_feature (61)..(61): /note="Nucleotide may be methylated to form 5-methylcytosine"
ggatgtaatccactcgatgcttcagtaagcatgactcaggccaagcctctgaacgtgttacgttatccctggagaaaggcatttaactcttacccacccccaacaatctattctgaataggt

SEQ ID NO: 16143 - DNA, 122 bp, Homo sapiens
  misc_feature (61)..(62): /note="This region represents a CpG dinucleotide"
  misc_feature (61)..(61): /note="Nucleotide may be methylated to form 5-methylcytosine"
gtctcccgagttcccagggcaggaagaggaggacgaggatgaggatgatgaggaggaagacgaggacgaatgagagtcatctccacaagactgtgatttgcaggatgtgtgtgacaaggaga

SEQ ID NO: 16144 - DNA, 122 bp, Homo sapiens
  misc_feature (61)..(62): /note="This region represents a CpG dinucleotide"
  misc_feature (61)..(61): /note="Nucleotide may be methylated to form 5-methylcytosine"
gtttaaggttgtctaggagcaaggagaaagactctcctttgcctcaaggctctttagcatcggaaaagcccctttgctagcttttccatgtgagtctgagctctcatgaccatgttcattgc

SEQ ID NO: 16145 - DNA, 122 bp, Homo sapiens
  misc_feature (61)..(62): /note="This region represents a CpG dinucleotide"
  misc_feature (61)..(61): /note="Nucleotide may be methylated to form 5-methylcytosine"
aaggcagagggagcatgtgcaggagcacgagagcacttgtcacgttgagagaacgttacacggtttagaactggtagagtgtaggccgggcgcggtggctcacacctgtaatcccagcactt

SEQ ID NO: 16146 - DNA, 122 bp, Homo sapiens
  misc_feature (61)..(62): /note="This region represents a CpG dinucleotide"
  misc_feature (61)..(61): /note="Nucleotide may be methylated to form 5-methylcytosine"
ggtagagccagtccccttgggtggggcagcgaccttcattcgagcagtccagccaggtagcggcagcctcccaggatgagggagctacaggagtaaccacctgcctcctctgggggctcctc

SEQ ID NO: 16147 - DNA, 122 bp, Homo sapiens
  misc_feature (61)..(62): /note="This region represents a CpG dinucleotide"
  misc_feature (61)..(61): /note="Nucleotide may be methylated to form 5-methylcytosine"
ctggctgggtgtgaactcagcctttaggcttttggtgtctggcaatagtgttcgtaaatacgtactgaagtacaaaagtttgccaagttacatagtttaaacaaaacaaaacaaaacaaaac

SEQ ID NO: 16148 - DNA, 122 bp, Homo sapiens
  misc_feature (61)..(62): /note="This region represents a CpG dinucleotide"
  misc_feature (61)..(61): /note="Nucleotide may be methylated to form 5-methylcytosine"
cttactcatgggcagtacagggagtcagttctagtgagcagaatgtcatgtgttctctctcggcactttgcaaactatcgcgagtcatgctacagttttttctttctttttaaatttccaac

SEQ ID NO: 16149 - DNA, 122 bp, Homo sapiens
  misc_feature (61)..(62): /note="This region represents a CpG dinucleotide"
  misc_feature (61)..(61): /note="Nucleotide may be methylated to form 5-methylcytosine"
cagccaggctctgccgagtcatcctgagatcagccctatgcagagaagcgaatctcaaaacgccagcctccaagaatagaaggctccagagactgtgcaaccaagactaacaaactggaaaa

SEQ ID NO: 16150 - DNA, 122 bp, Homo sapiens
  misc_feature (61)..(62): /note="This region represents a CpG dinucleotide"
  misc_feature (61)..(61): /note="Nucleotide may be methylated to form 5-methylcytosine"
tttcacattgcactaatgagtcaacacctgttaagagtggagaaatctgaaccttgttagcgattgtgaagcctcttgggagctgggatgctgagcattgtcatactcaccgtcaaaatgtc

SEQ ID NO: 16151 - DNA, 122 bp, Homo sapiens
  misc_feature (61)..(62): /note="This region represents a CpG dinucleotide"
  misc_feature (61)..(61): /note="Nucleotide may be methylated to form 5-methylcytosine"
tctctgtcttgttccagttcacatttcctactcattcgctgtggtcgccccgcctactcccgcctttccagcctgtggccagcccctgcaggggctcctagcccactgccttagtgttcatg

SEQ ID NO: 16152 - DNA, 122 bp, Homo sapiens
  misc_feature (61)..(62): /note="This region represents a CpG dinucleotide"
  misc_feature (61)..(61): /note="Nucleotide may be methylated to form 5-methylcytosine"
tttgaatgttgggaaataacctaaatgcccaacaacaggtaacatatgaaacagttgtggcgttaagaggtattacaagaggaaccagtacctggatttcaacaaatctcttgaatctgcta

SEQ ID NO: 16153 - DNA, 122 bp, Homo sapiens
  misc_feature (61)..(62): /note="This region represents a CpG dinucleotide"
  misc_feature (61)..(61): /note="Nucleotide may be methylated to form 5-methylcytosine"
atttttagactcgtgtcaaactccccctcagaccctgggtggggagtcccggtagaggggcgtctgcgagggctctaatgagcctgcggccggcaggtcctgctctccaggcagctggccct

SEQ ID NO: 16154 - DNA, 122 bp, Homo sapiens
  misc_feature (61)..(62): /note="This region represents a CpG dinucleotide"
  misc_feature (61)..(61): /note="Nucleotide may be methylated to form 5-methylcytosine"
agcaaaccttctcactctgacaatttgatcgctgaagaggctgtctcagcacggctgcggcgtgcacccatcaggccacttgggtgccagggcacctgcggggcttgccaccgtctaccgcc

SEQ ID NO: 16155 - DNA, 122 bp, Homo sapiens
  misc_feature (61)..(62): /note="This region represents a CpG dinucleotide"
  misc_feature (61)..(61): /note="Nucleotide may be methylated to form 5-methylcytosine"
cactatttaaattaaaaatcagatggtctgctgtagataggtttccagagcctcttatgtcgtaacactgaccctgttccattgtgagcactgaggagatagacacagagtgaagattagtg

SEQ ID NO: 16156 - DNA, 122 bp, Homo sapiens
  misc_feature (61)..(62): /note="This region represents a CpG dinucleotide"
  misc_feature (61)..(61): /note="Nucleotide may be methylated to form 5-methylcytosine"
tcatccttagtcactggtttgtcagattaaaggagaactcacttatactttatgtaagtgcgtatgtttaagataaaatcaaactgcatggtgttaatgagttggaattaaaatcccttctt

SEQ ID NO: 16157 - DNA, 122 bp, Homo sapiens
  misc_feature (61)..(62): /note="This region represents a CpG dinucleotide"
  misc_feature (61)..(61): /note="Nucleotide may be methylated to form 5-methylcytosine"
gtggcctctttattctttcctttatgtggctcagtgatgatgacactgctccgttgcctccgtttccttgtgggagaaggaggtagggaagggttaaagtggacttgccccagatcaggcgt

SEQ ID NO: 16158 - DNA, 122 bp, Homo sapiens
  misc_feature (61)..(62): /note="This region represents a CpG dinucleotide"
  misc_feature (61)..(61): /note="Nucleotide may be methylated to form 5-methylcytosine"
atatgatgaccacccacacgagtgacgtgcccaccacacagcaaaccacggctatgatcacgacacccacagtggcccatccgtcatcgtctaacgatggggctgtcatctgaggggagtcg

SEQ ID NO: 16159 - DNA, 122 bp, Homo sapiens
  misc_feature (61)..(62): /note="This region represents a CpG dinucleotide"
  misc_feature (61)..(61): /note="Nucleotide may be methylated to form 5-methylcytosine"
atgcagataatgggtgaggcagtgagtcaggaacaaaatgcctttaaaccatggcccccacggccgggtgcggtagctcatgcctgtaatcccagcactttgggaggccgaggtgagtggat

SEQ ID NO: 16160 - DNA, 122 bp, Homo sapiens
  misc_feature (61)..(62): /note="This region represents a CpG dinucleotide"
  misc_feature (61)..(61): /note="Nucleotide may be methylated to form 5-methylcytosine"
cagaccccctctaggagatgttactgtcgctcattcgtatttccggttctactcctcttccgggcacactggagaattacacttccttgctgacttgagataagtcacagctttggccaatg

SEQ ID NO: 16161 - DNA, 122 bp, Homo sapiens
  misc_feature (61)..(62): /note="This region represents a CpG dinucleotide"
  misc_feature (61)..(61): /note="Nucleotide may be methylated to form 5-methylcytosine"
gaataaatattgttttaagccaccaagtttgtggtaatttattatagcagccacaggaaacgaatacaggttttcataccaggaaatgggatgctgctataaccaataactaaaaatgtaga

SEQ ID NO: 16162 - DNA, 122 bp, Homo sapiens
  misc_feature (61)..(62): /note="This region represents a CpG dinucleotide"
  misc_feature (61)..(61): /note="Nucleotide may be methylated to form 5-methylcytosine"
tatgaaccagaggctaacatttataaaatggagtgtatgagttacataagcacaggctatcggatgtgaagactgacagctaattgctaggtagtttgatactatatgactgaactcagaga

SEQ ID NO: 16163 - DNA, 122 bp, Homo sapiens
  misc_feature (61)..(62): /note="This region represents a CpG dinucleotide"
  misc_feature (61)..(61): /note="Nucleotide may be methylated to form 5-methylcytosine"
gattaacctgtgcattgattttgcatggggacccaaactggtttttcaggtgtttcctgacgtatttcatgttgtcatatctgttttatagctgccattactgtacttatccccaaatgtat

SEQ ID NO: 16164 - DNA, 122 bp, Homo sapiens
  misc_feature (61)..(62): /note="This region represents a CpG dinucleotide"
  misc_feature (61)..(61): /note="Nucleotide may be methylated to form 5-methylcytosine"
tcccagtgtcttgaagagctgtcaagaccacagcctcctgaagctgtgattaaaggcacacggtgccagcagcacttagaattccctgcctccagtagcttacacttcagtgtctccaccct

SEQ ID NO: 16165 - DNA, 122 bp, Homo sapiens
  misc_feature (61)..(62): /note="This region represents a CpG dinucleotide"
  misc_feature (61)..(61): /note="Nucleotide may be methylated to form 5-methylcytosine"
cctgggagaatcttacagtttcctcttgtcacagcttccttaggaggaagtagggggagacgtaggtttggggagaaaaaaaagtcatattcattgagcactctttgtgctatgcttaacaa

SEQ ID NO: 16166 - DNA, 122 bp, Homo sapiens
  misc_feature (61)..(62): /note="This region represents a CpG dinucleotide"
  misc_feature (61)..(61): /note="Nucleotide may be methylated to form 5-methylcytosine"
cactggctttttttttttttttaattcgttccgctgcttggtttggggtctcttcccttccgcagcttggtcttgttgctgctcttgagtgtgacaaactgcaagtcgagagctcttgtcca

SEQ ID NO: 16167 - DNA, 122 bp, Homo sapiens
  misc_feature (61)..(62): /note="This region represents a CpG dinucleotide"
  misc_feature (61)..(61): /note="Nucleotide may be methylated to form 5-methylcytosine"
agggcaagcgagggaggtctgggctggtaatcgagcaaggcaaatgaagtctccgggggccgcaggaaaatggagacagcagaaaccctagggctcctattcaatatgaacgtcactcccac

SEQ ID NO: 16168 - DNA, 122 bp, Homo sapiens
  misc_feature (61)..(62): /note="This region represents a CpG dinucleotide"
  misc_feature (61)..(61): /note="Nucleotide may be methylated to form 5-methylcytosine"
taaactttgtgacgcgggttacagcaatggcaaatgcgtatcaacacgtatctagcaccacgtgtgggttacaacagcagcaaatgcgtatcaacacgtagctagcaccacgtgccaccaca

SEQ ID NO: 16169 - DNA, 122 bp, Homo sapiens
  misc_feature (61)..(62): /note="This region represents a CpG dinucleotide"
  misc_feature (61)..(61): /note="Nucleotide may be methylated to form 5-methylcytosine"
cggtagggcaagagtcccgagcctcaggtcttcctcttcaggggccaaagcagaggctggcgagtcagggtgcttgcaaagaggaagcccaggagtttccctggggttaccagagggctggg

SEQ ID NO: 16170 - DNA, 122 bp, Homo sapiens
  misc_feature (61)..(62): /note="This region represents a CpG dinucleotide"
  misc_feature (61)..(61): /note="Nucleotide may be methylated to form 5-methylcytosine"
gatgagggggtgcagaatatcaggtgggtttgagggctatgaaggcaaaggggttctgggcgtcacttgctatatagcacaggttgacagcaagcatggtgagtgatcctccccactgtgaa

SEQ ID NO: 16171 - DNA, 122 bp, Homo sapiens
  misc_feature (61)..(62): /note="This region represents a CpG dinucleotide"
  misc_feature (61)..(61): /note="Nucleotide may be methylated to form 5-methylcytosine"
ctgggagaagcgtttctgttcgcggaacctgaacttcaggttcggagacgaggaggtggccgtcccccgtcccgcccccaacccgatgagggcgttgtcagccagggggcctgccaggtgtt

SEQ ID NO: 16172 - DNA, 122 bp, Homo sapiens
  misc_feature (61)..(62): /note="This region represents a CpG dinucleotide"
  misc_feature (61)..(61): /note="Nucleotide may be methylated to form 5-methylcytosine"
accaagagactgtgtcagtcttccccccacccatctgaggggggagctcaggagagctcccgacagggaagtttaatttattctgacaacgtccacttaggcaggaagagaaacccactgag

SEQ ID NO: 16173 - DNA, 122 bp, Homo sapiens
  misc_feature (61)..(62): /note="This region represents a CpG dinucleotide"
  misc_feature (61)..(61): /note="Nucleotide may be methylated to form 5-methylcytosine"
cacgggaagctgctacaggcactgggaggagaatgggcagcagcaaacggccttgggagacgaaaagcgtctcaaaaccaattgtggtgacggctgcaactccatgaatgtcctgaaaccca

SEQ ID NO: 16174 - DNA, 122 bp, Homo sapiens
  misc_feature (61)..(62): /note="This region represents a CpG dinucleotide"
  misc_feature (61)..(61): /note="Nucleotide may be methylated to form 5-methylcytosine"
aggtccaggatctgaccccactggctttcaccttgaatgagacagtcaaatattgagcctcggtttcttcattcataaaatggcaataatagtcgactgtctcgacattcttactttccact

SEQ ID NO: 16175 - DNA, 122 bp, Homo sapiens
  misc_feature (61)..(62): /note="This region represents a CpG dinucleotide"
  misc_feature (61)..(61): /note="Nucleotide may be methylated to form 5-methylcytosine"
ccagatggacccctgctcttctgggaggacaaactggaactggtctggatccagctgcgacgctgctagaggagaacgaggcatcttttgccctccaacatctggagcctgcctctccagga

SEQ ID NO: 16176 - DNA, 122 bp, Homo sapiens
  misc_feature (61)..(62): /note="This region represents a CpG dinucleotide"
  misc_feature (61)..(61): /note="Nucleotide may be methylated to form 5-methylcytosine"
tctgtcttaaatgctgtcccaagcactgaaacttgcagcttatcatcttatccccacgaacgcagcctctacatagtaggagctctgccagctctgccagatgctttaggtgcattgtctag

SEQ ID NO: 16177 - DNA, 122 bp, Homo sapiens
  misc_feature (61)..(62): /note="This region represents a CpG dinucleotide"
  misc_feature (61)..(61): /note="Nucleotide may be methylated to form 5-methylcytosine"
tgtgaccagttagcattgtttagatttcattcaacacacttccccagaaacacagtgcttcgtggcggctgcggtatgcaccagctgtctttaatctctcaggacccaattcacagaccaaa

SEQ ID NO: 16178 - DNA, 122 bp, Homo sapiens
  misc_feature (61)..(62): /note="This region represents a CpG dinucleotide"
  misc_feature (61)..(61): /note="Nucleotide may be methylated to form 5-methylcytosine"
gagagatgagaagtcttggttatttgtcaccttctgattttaacatctcagcagctaacacgtttgttttaaaatcttgagccagaaacgtgtatgtggatgggatgtggctcatcctgctg

SEQ ID NO: 16179 - DNA, 122 bp, Homo sapiens
  misc_feature (61)..(62): /note="This region represents a CpG dinucleotide"
  misc_feature (61)..(61): /note="Nucleotide may be methylated to form 5-methylcytosine"
tttttccttgatgccaggctgacatgttatgcctattatgtcttcctcaagcaggctgtacgtggctctactttcaagcagcacacataactctcaaagtaggatctttcaattgtggcata

SEQ ID NO: 16180 - DNA, 122 bp, Homo sapiens
  misc_feature (61)..(62): /note="This region represents a CpG dinucleotide"
  misc_feature (61)..(61): /note="Nucleotide may be methylated to form 5-methylcytosine"
caaagggacaaagccacatgtcaggaaagtggccaggcagttgccctgagggctgagcatcgtatctggagcccttcagggacctgcactattcagttggtcagccctcctcacagcggttc

SEQ ID NO: 16181 - DNA, 122 bp, Homo sapiens
  misc_feature (61)..(62): /note="This region represents a CpG dinucleotide"
  misc_feature (61)..(61): /note="Nucleotide may be methylated to form 5-methylcytosine"
gggaggagtttgctgggtatgacttggatgagccagagtaaacccaagggagtagtctctcggtccataatctgttgtctgggaactcaggggtgggctggggacggtgggtacaaaggtca

SEQ ID NO: 16182 - DNA, 122 bp, Homo sapiens
  misc_feature (61)..(62): /note="This region represents a CpG dinucleotide"
  misc_feature (61)..(61): /note="Nucleotide may be methylated to form 5-methylcytosine"
ttttaaattcacctggttttgtgcaaggattacaaatgatgatttagcagaattatcatacggaaggatgagaagagaaactagagagaacgaaatccaaccctggttacacccctgccatt

SEQ ID NO: 16183 - DNA, 122 bp, Homo sapiens
  misc_feature (61)..(62): /note="This region represents a CpG dinucleotide"
  misc_feature (61)..(61): /note="Nucleotide may be methylated to form 5-methylcytosine"
actgccagactactttgtggcgctgggaagcctgtttcaaagtgctgggcacatgggccacgcctgtctgcgactgctcagtaaactgacttccagggcagagtgccctctttgaactttgg

SEQ ID NO: 16184 - DNA, 122 bp, Homo sapiens
  misc_feature (61)..(62): /note="This region represents a CpG dinucleotide"
  misc_feature (61)..(61): /note="Nucleotide may be methylated to form 5-methylcytosine"
gtgtttcttcttgaagacggaattttgaaaagcttctgattcttctgttgcatcatcctccgtgacacctcataatgcagatggccaccacgcccagccagggcatggacaggcaaccacct

SEQ ID NO: 16185 - DNA, 122 bp, Homo sapiens
  misc_feature (61)..(62): /note="This region represents a CpG dinucleotide"
  misc_feature (61)..(61): /note="Nucleotide may be methylated to form 5-methylcytosine"
tgtaaatgttgaaccttttcggcctggtttgttggcaaaggccctggcctatggtgacatcgagagactcatcctaatgtaggggttggtggacctgctccagcagctgctgctgcatcaac

SEQ ID NO: 16186 - DNA, 122 bp, Homo sapiens
  misc_feature (61)..(62): /note="This region represents a CpG dinucleotide"
  misc_feature (61)..(61): /note="Nucleotide may be methylated to form 5-methylcytosine"
aagcattgcctcctttgtgaggcctttcttcttcctgctaagaactggccactccctcctcgatcctccccatggaagcagaggtagactctcatcgcagtgcccaccatacttctttgctc

SEQ ID NO: 16187 - DNA, 122 bp, Homo sapiens
  misc_feature (61)..(62): /note="This region represents a CpG dinucleotide"
  misc_feature (61)..(61): /note="Nucleotide may be methylated to form 5-methylcytosine"
ttcctgtttcgcctgtattgttagttctacaataaacacttatcaatatccaaaaggctgcgtggaatgtttggaaaggcaaactattgaatactccaaacacaactgctcatcttcttaat

SEQ ID NO: 16188 - DNA, 122 bp, Homo sapiens
  misc_feature (61)..(62): /note="This region represents a CpG dinucleotide"
  misc_feature (61)..(61): /note="Nucleotide may be methylated to form 5-methylcytosine"
cataaggctcaggtacttactaccttttgctcatctccaaatctccctgtgtttcccttacgaagctttcctggagaacccgtgaagttaaacaaacattctgccaaatgacaaccaagtat

SEQ ID NO: 16189 - DNA, 122 bp, Homo sapiens
  misc_feature (61)..(62): /note="This region represents a CpG dinucleotide"
  misc_feature (61)..(61): /note="Nucleotide may be methylated to form 5-methylcytosine"
aaataaggctcaccaccagcacaaacattgttttgaggcattctcaagcccagacaattgcgttgcctgaggctgccccagccgggcactgccctgtggtgtctgttcctccctgaccccag

SEQ ID NO: 16190 - DNA, 122 bp, Homo sapiens
  misc_feature (61)..(62): /note="This region represents a CpG dinucleotide"
  misc_feature (61)..(61): /note="Nucleotide may be methylated to form 5-methylcytosine"
gagtagatcgggcttgtgacacctgtgtgtgtaccttcactcaatattatctttctggaacggagcagaaaaaaataaacttcaattaggtgaaagtttgtgtatttgctcttctcttagca

SEQ ID NO: 16191 - DNA, 122 bp, Homo sapiens
  misc_feature (61)..(62): /note="This region represents a CpG dinucleotide"
  misc_feature (61)..(61): /note="Nucleotide may be methylated to form 5-methylcytosine"
ggcctctctgtctatcattttttgacctcaggtcagagcgatagaaagggggaaaactaccgacacagctcctgccatgaagtcctggagaagaataagtgactgtttgtcccgcatgggtt

SEQ ID NO: 16192 - DNA, 122 bp, Homo sapiens
  misc_feature (61)..(62): /note="This region represents a CpG dinucleotide"
  misc_feature (61)..(61): /note="Nucleotide may be methylated to form 5-methylcytosine"
caggtgaagtcacatgttccatcattgaatctcattactttcctacatcctttgtctaaccggattgtgattcatttgcaattgtcacatctgtgaactatttatttcacttgcaactattt

SEQ ID NO: 16193 - DNA, 122 bp, Homo sapiens
  misc_feature (61)..(62): /note="This region represents a CpG dinucleotide"
  misc_feature (61)..(61): /note="Nucleotide may be methylated to form 5-methylcytosine"
aggtatgacagagtggtttgccctttctgtcattctcccatgtgaggacacaacaagaggcgccatctataaagaaaagactgggccttcaccagacaccacatctgcctgcaccttgacct

SEQ ID NO: 16194 - DNA, 122 bp, Homo sapiens
  misc_feature (61)..(62): /note="This region represents a CpG dinucleotide"
  misc_feature (61)..(61): /note="Nucleotide may be methylated to form 5-methylcytosine"
ctctgtcatctgtttattgcatgagtacaaacatcctgcataccattagtgtttactgaacgaacctgcaaactagtcacttaagtcagcctgtcacgtagcagtggggtcaactggtaagc

SEQ ID NO: 16195 - DNA, 122 bp, Homo sapiens
  misc_feature (61)..(62): /note="This region represents a CpG dinucleotide"
  misc_feature (61)..(61): /note="Nucleotide may be methylated to form 5-methylcytosine"
tctttcacccatggcctggatgattcatttgaaggaggagcaaactgttaaagtggtttgcgaaagataattgctaagaaggaaagcttcattgcaagcttagcactaatcattttggaaaa

SEQ ID NO: 16196 - DNA, 122 bp, Homo sapiens
  misc_feature (61)..(62): /note="This region represents a CpG dinucleotide"
  misc_feature (61)..(61): /note="Nucleotide may be methylated to form 5-methylcytosine"
taagcacatatgtgctctgccacattgcaatattgtggactcattcacagtggaaaccaccggcagaccatctccctagagatctcacagagtattgctcattctgggattaactgaccatg

SEQ ID NO: 16197 - DNA, 122 bp, Homo sapiens
  misc_feature (61)..(62): /note="This region represents a CpG dinucleotide"
  misc_feature (61)..(61): /note="Nucleotide may be methylated to form 5-methylcytosine"
aatctgataggattggtgtcttcataagaacagacttgctctctctctgtggtcacatgacgacacagtgagcagacagccttctgcaagccaggaagagcaccctcactaacaacctaatt

SEQ ID NO: 16198 - DNA, 122 bp, Homo sapiens
  misc_feature (61)..(62): /note="This region represents a CpG dinucleotide"
  misc_feature (61)..(61): /note="Nucleotide may be methylated to form 5-methylcytosine"
acaccctcctccgcaaagcctcttgtgatctccagtctgactggacacggcttcttgctgcgcccgtgatcctaagcatggggtgtgggtggtagggaaaagcctggagcagggctgcttgg

SEQ ID NO: 16199 - DNA, 122 bp, Homo sapiens
  misc_feature (61)..(62): /note="This region represents a CpG dinucleotide"
  misc_feature (61)..(61): /note="Nucleotide may be methylated to form 5-methylcytosine"
tgtatctgttgacttcctgctgtggtgattttattaaccaccctttccccctttctcttccgcttttcatatatatatatatatatatattttttttttttttttgaaacagcgtctcgctc

SEQ ID NO: 16200 - DNA, 122 bp, Homo sapiens
  misc_feature (61)..(62): /note="This region represents a CpG dinucleotide"
  misc_feature (61)..(61): /note="Nucleotide may be methylated to form 5-methylcytosine"
gccgcgccgatggggaggcagcgggtctgcggccgccgagatgggaagtgggccctggagcgggcttgccgagcctacgaccggggctgggatgttggaggaagacgcggtcatgagggctg

SEQ ID NO: 16201 - DNA, 122 bp, Homo sapiens
  misc_feature (61)..(62): /note="This region represents a CpG dinucleotide"
  misc_feature (61)..(61): /note="Nucleotide may be methylated to form 5-methylcytosine"
caaacaccagggcagccccatttaaggtttttgatacactgaggatcattcagaaaacttcggattcctagttatagagttgaatccaaccaccaacacactccagaagtcctgacattagg

SEQ ID NO: 16202 - DNA, 122 bp, Homo sapiens
  misc_feature (61)..(62): /note="This region represents a CpG dinucleotide"
  misc_feature (61)..(61): /note="Nucleotide may be methylated to form 5-methylcytosine"
ttcaaagctctggtgattcagtagtggacgggtaaggttcctgcctctcctggggcttaccgtccaggggtggggaggacgtcactatatgaaattatcttatttatagcttaatgtcatta

SEQ ID NO: 16203 - DNA, 122 bp, Homo sapiens
  misc_feature (61)..(62): /note="This region represents a CpG dinucleotide"
  misc_feature (61)..(61): /note="Nucleotide may be methylated to form 5-methylcytosine"
aggatacattctgagaaatacacccttgggcagttttgttgttgtgcaaatatcacagagcgtacttaaacaaaccagatggtatagcctaggatatatggtagagccaaacctgtacagca

SEQ ID NO: 16204 - DNA, 122 bp, Homo sapiens
  misc_feature (61)..(62): /note="This region represents a CpG dinucleotide"
  misc_feature (61)..(61): /note="Nucleotide may be methylated to form 5-methylcytosine"
gtgattttaatttcaggaatgcccaacaggactcagaaagctgtgaatgtaaactgactacgtatcttggtctttgtgtgtgtaaatcagacagctaatcctgtgctctccttgctctgttc

SEQ ID NO: 16205 - DNA, 122 bp, Homo sapiens
  misc_feature (61)..(62): /note="This region represents a CpG dinucleotide"
  misc_feature (61)..(61): /note="Nucleotide may be methylated to form 5-methylcytosine"
ttgggtttatgcagactactgcagggggcagaacatgggcacgaatacgtaagattcagccgggcagccctccagcgtcaacgaagacattcttagaaggaaagtactttgtttgggacgga

SEQ ID NO: 16206 - DNA, 122 bp, Homo sapiens
  misc_feature (61)..(62): /note="This region represents a CpG dinucleotide"
  misc_feature (61)..(61): /note="Nucleotide may be methylated to form 5-methylcytosine"
cacagaactcaccctaatcccccaaagcatcgtgaccagcttcctgtccatgaggccacacggtgttgctgctgcactgctgcattcgtgtgaagccaacatttaactttcagagaggcttg

SEQ ID NO: 16207 - DNA, 122 bp, Homo sapiens
  misc_feature (61)..(62): /note="This region represents a CpG dinucleotide"
  misc_feature (61)..(61): /note="Nucleotide may be methylated to form 5-methylcytosine"
ctgtgtgtttcagctgttacaatatcccgtccagagtttctttcagtgggtttctgatctcgcaagctcagaactgaatctggagaccttcgcggtgttacagatcttaagacagcacgtac

SEQ ID NO: 16208 - DNA, 122 bp, Homo sapiens
  misc_feature (61)..(62): /note="This region represents a CpG dinucleotide"
  misc_feature (61)..(61): /note="Nucleotide may be methylated to form 5-methylcytosine"
aatgctttcagtgctttggcagataatttacaggcctgccttaaccttcattctaaagttcgtctttcacagatattgaagatccatcagcgatgagacattaggaccatttgtgccttttc

SEQ ID NO: 16209 - DNA, 122 bp, Homo sapiens
  misc_feature (61)..(62): /note="This region represents a CpG dinucleotide"
  misc_feature (61)..(61): /note="Nucleotide may be methylated to form 5-methylcytosine"
ctccccctcaaaagcattttctataactgacttggaaatcatttgggcaaccattattcccgtcactttccaagatagtctcttaataaaaacttttaaatttaaaaaattttaggcaagca

SEQ ID NO: 16210 - DNA, 122 bp, Homo sapiens
  misc_feature (61)..(62): /note="This region represents a CpG dinucleotide"
  misc_feature (61)..(61): /note="Nucleotide may be methylated to form 5-methylcytosine"
ccagaccagacagacactgcagagcaccgtgtgacatagactggggagaaaccagaaggtcgggggaagggaaaagcaaagtccagaggcctggacagagtccagaccaacatccttcctgc

SEQ ID NO: 16211 - DNA, 122 bp, Homo sapiens
  misc_feature (61)..(62): /note="This region represents a CpG dinucleotide"
  misc_feature (61)..(61): /note="Nucleotide may be methylated to form 5-methylcytosine"
aatgggactttgagagcctaagttacttgccccaggtcacacatctctttgtgaggtagacgggacagctatgtttattcccataagccaagggatgattacagagcaagtggtatgtttca

SEQ ID NO: 16212 - DNA, 122 bp, Homo sapiens
  misc_feature (61)..(62): /note="This region represents a CpG dinucleotide"
  misc_feature (61)..(61): /note="Nucleotide may be methylated to form 5-methylcytosine"
cacaagccaggtgaccagagacaaatgtcttacccactcagaaccacatggtcagaaccacgtgatcaggggaaccactgtccctgggttttagtgataatttattgaaacatgcccagtga

SEQ ID NO: 16213 - DNA, 122 bp, Homo sapiens
  misc_feature (61)..(62): /note="This region represents a CpG dinucleotide"
  misc_feature (61)..(61): /note="Nucleotide may be methylated to form 5-methylcytosine"
ttggaacattgtgtccaaagatgaggttcagagacttcatttccttgtagatgaacactacgctgttcctcatttcttggccacccacaacaccttgtaagggaggaaaaaataattttcct

SEQ ID NO: 16214 - DNA, 122 bp, Homo sapiens
  misc_feature (61)..(62): /note="This region represents a CpG dinucleotide"
  misc_feature (61)..(61): /note="Nucleotide may be methylated to form 5-methylcytosine"
ttagtctgttagaatggtggggagtcggctcagatttgagcatggcttaaagtgggagagcgttattagaagccagcctagtggggattgctgagatctcatctgctgaatgacagcaaagt

SEQ ID NO: 16215 - DNA, 122 bp, Homo sapiens
  misc_feature (61)..(62): /note="This region represents a CpG dinucleotide"
  misc_feature (61)..(61): /note="Nucleotide may be methylated to form 5-methylcytosine"
taaacagtattttattgtataggtatactacatgtctttctccattcaccagttggtaggcgttgggtttgtctccatctgttggttcttgagaatagtgctactatggacatttacctaaa

SEQ ID NO: 16216 - DNA, 122 bp, Homo sapiens
  misc_feature (61)..(62): /note="This region represents a CpG dinucleotide"
  misc_feature (61)..(61): /note="Nucleotide may be methylated to form 5-methylcytosine"
ctagccactgtagtctgcagatcaaagctctggcgaaaatccatgcctttgttcaagacacgtgagtgttgcccacttttcagaaaccacctatttcaagggaagatcttgcttttcctccc

SEQ ID NO: 16217 - DNA, 122 bp, Homo sapiens
  misc_feature (61)..(62): /note="This region represents a CpG dinucleotide"
  misc_feature (61)..(61): /note="Nucleotide may be methylated to form 5-methylcytosine"
tcctctgcacctgaaccctcctagtctttattctgggagcagcgcgggaggcagtggagacgtggaagcaggctccggctgctgggcctgcatgaccggtttccctgcagaagattctgcgc

SEQ ID NO: 16218 - DNA, 122 bp, Homo sapiens
  misc_feature (61)..(62): /note="This region represents a CpG dinucleotide"
  misc_feature (61)..(61): /note="Nucleotide may be methylated to form 5-methylcytosine"
tgcaagatccatgaaggcagggattcttttctgctttgtcatcatgtgactcaaattcctcgaacagtgcctggcacatactagcagttctttttcttttttttttgtttttgagacagagt

SEQ ID NO: 16219 - DNA, 122 bp, Homo sapiens
  misc_feature (61)..(62): /note="This region represents a CpG dinucleotide"
  misc_feature (61)..(61): /note="Nucleotide may be methylated to form 5-methylcytosine"
cagaaaatactttccttcagattgcctggtgattaaggtagtggacatctaccaagctcacgcttagggaggacgaacaacaggtttatcaacactatacttcacggagtgtcagtcatgag

SEQ ID NO: 16220 - DNA, 122 bp, Homo sapiens
  misc_feature (61)..(62): /note="This region represents a CpG dinucleotide"
  misc_feature (61)..(61): /note="Nucleotide may be methylated to form 5-methylcytosine"
gctttgggaagactctttgttctttcttccccattattttgggttttctggtctttattccgtgcttgtcaaattccaggcatgcaaggctttcaaacacactatcaaacccgccacttaca

SEQ ID NO: 16221 - DNA, 122 bp, Homo sapiens
  misc_feature (61)..(62): /note="This region represents a CpG dinucleotide"
  misc_feature (61)..(61): /note="Nucleotide may be methylated to form 5-methylcytosine"
tgaattcctgggctcaagcgatcctcctgcatcggcctcccaaagtgctgggattagaggcgtgaatcaccacgccctgccatggatccctttgaatggctgccagggcccaagagcctctg

SEQ ID NO: 16222 - DNA, 122 bp, Homo sapiens
  misc_feature (61)..(62): /note="This region represents a CpG dinucleotide"
  misc_feature (61)..(61): /note="Nucleotide may be methylated to form 5-methylcytosine"
gagtggacaaggaaagctggccgagttcacaggcacctggcattagctgactgaagccagcgtaccctgaagagccaaacaagtccatggcagggatgtctgcggtgtcgagatggttttaa

SEQ ID NO: 16223 - DNA, 122 bp, Homo sapiens
  misc_feature (61)..(62): /note="This region represents a CpG dinucleotide"
  misc_feature (61)..(61): /note="Nucleotide may be methylated to form 5-methylcytosine"
tccctgatcaatgttctttctcatttccaggtctcacattgcctttagtcgtcagttcctcggcctttctttgtctttcatgaccttgatatctgtgaacagtcctggtcaggtattgtgca

SEQ ID NO: 16224 - DNA, 122 bp, Homo sapiens
  misc_feature (61)..(62): /note="This region represents a CpG dinucleotide"
  misc_feature (61)..(61): /note="Nucleotide may be methylated to form 5-methylcytosine"
tttaaagactttgttaatgccagcagcaagtatgaaatcacgaccattcataatctcttccgtaagctgactcatcgcctcttcaggaggaattttgggtacacactgcggtcagtcaatga

SEQ ID NO: 16225 - DNA, 122 bp, Homo sapiens
  misc_feature (61)..(62): /note="This region represents a CpG dinucleotide"
  misc_feature (61)..(61): /note="Nucleotide may be methylated to form 5-methylcytosine"
ttagcaaagtgctttataatccttcattagctattttactctccctttattagtaccacccgttccacaaattaggtaactaaggcttgaagagacaatgcaatgcatattgggcttgtgac

SEQ ID NO: 16226 - DNA, 122 bp, Homo sapiens
  misc_feature (61)..(62): /note="This region represents a CpG dinucleotide"
  misc_feature (61)..(61): /note="Nucleotide may be methylated to form 5-methylcytosine"
gaaaccccatgtctactaaaactacaaaatgtagctgggcaggccgggccggtggcttgacgcctgtaatcccagcactttgggaggccgagcgggtggatcacgaggttaggagattgaga

SEQ ID NO: 16227 - DNA, 122 bp, Homo sapiens
  misc_feature (61)..(62): /note="This region represents a CpG dinucleotide"
  misc_feature (61)..(61): /note="Nucleotide may be methylated to form 5-methylcytosine"
cctaggcaggaaggatgagggacagtggggacacacaccatatgaatgtcaggtatatgacgggaagtttaagtataatcagacaaggaaaagtagcacagaagaaagcaagctttgagttt

SEQ ID NO: 16228 - DNA, 122 bp, Homo sapiens
  misc_feature (61)..(62): /note="This region represents a CpG dinucleotide"
  misc_feature (61)..(61): /note="Nucleotide may be methylated to form 5-methylcytosine"
ctgtctttgcccttatttacagttgtctctgccttacaaactctcgtgagctgggtttaccgtaaaacacgttaacaggaaacagatgctaaagcaaattgtgtgggagtagtctgcatttt

SEQ ID NO: 16229 - DNA, 122 bp, Homo sapiens
  misc_feature (61)..(62): /note="This region represents a CpG dinucleotide"
  misc_feature (61)..(61): /note="Nucleotide may be methylated to form 5-methylcytosine"
tctactgctgcctgcgaaaaaggaaggtggattaaaagaaatcttttttgcaagtctcagcggcccactgtggtctgcagtacaaagaaaggcacactctagaaaaaaagaatttctctctg

SEQ ID NO: 16230 - DNA, 122 bp, Homo sapiens
  misc_feature (61)..(62): /note="This region represents a CpG dinucleotide"
  misc_feature (61)..(61): /note="Nucleotide may be methylated to form 5-methylcytosine"
cgtttttatcccatttcttcctgtaggcgtttcaaagtttgcaaaggcagcaaacttttacgtagtgtagttatctgtgcaaagaaattttccaagctgccattgcccccagatggcagaca

SEQ ID NO: 16231 - DNA, 122 bp, Homo sapiens
  misc_feature (61)..(62): /note="This region represents a CpG dinucleotide"
  misc_feature (61)..(61): /note="Nucleotide may be methylated to form 5-methylcytosine"
gcagtgagtgcttggaagcacttttgctggtatgtttcttcattgtgccagactctcttacgccctctagtacattcagcatccttgggcttggccactgaatgtgggcagcagtcccatca

SEQ ID NO: 16232 - DNA, 122 bp, Homo sapiens
  misc_feature (61)..(62): /note="This region represents a CpG dinucleotide"
  misc_feature (61)..(61): /note="Nucleotide may be methylated to form 5-methylcytosine"
ctgaggctggggtgtccacctgagtccgtggagggaggagcgactacggtgcggtgggggcgaggccactcagggctttgtgacctagacagaggatttatgtgggtgattagctgtcacgt

SEQ ID NO: 16233 - DNA, 122 bp, Homo sapiens
  misc_feature (61)..(62): /note="This region represents a CpG dinucleotide"
  misc_feature (61)..(61): /note="Nucleotide may be methylated to form 5-methylcytosine"
accggaaggggcaggcagaggggtcacccagtgcgatgtcaagagtggggccggctggtccgggaatatgctggggagtggagcacgtttatattcgacgtaggaaaaacaatggagaggaa

SEQ ID NO: 16234 - DNA, 122 bp, Homo sapiens
  misc_feature (61)..(62): /note="This region represents a CpG dinucleotide"
  misc_feature (61)..(61): /note="Nucleotide may be methylated to form 5-methylcytosine"
gatttattcatttctctttgattctctaagttagcttgcaataagctcgttggatcagtacggtaagctcattggatctcagtaatttatggttgtttgtaaggcagtaagcaggtaatata

SEQ ID NO: 16235 - DNA, 122 bp, Homo sapiens
  misc_feature (61)..(62): /note="This region represents a CpG dinucleotide"
  misc_feature (61)..(61): /note="Nucleotide may be methylated to form 5-methylcytosine"
ttagcgactaatttagaacttgtagatttgagctgcctgaattggccagacagctgtaatcgcactcctctattcttaatctctttatctgggcagcagctgccatatggccacagtcagct

SEQ ID NO: 16236 - DNA, 122 bp, Homo sapiens
  misc_feature (61)..(62): /note="This region represents a CpG dinucleotide"
  misc_feature (61)..(61): /note="Nucleotide may be methylated to form 5-methylcytosine"
agagctagagggaaatgagcaatgcagcccagctggagtaccagcattaatcccatgattcgtagcccgtattttcagacagatcaattacttatggctgtaaccaatctctcatcgttttc

SEQ ID NO: 16237 - DNA, 122 bp, Homo sapiens
  misc_feature (61)..(62): /note="This region represents a CpG dinucleotide"
  misc_feature (61)..(61): /note="Nucleotide may be methylated to form 5-methylcytosine"
taagccaatttgagctagtttgttggtgacctgggcccagcaaacgcatgctaagtaatacggaatgtgtgcctggaagtaggcatgctgcaattaacaggcttatacttgatggaattggc

SEQ ID NO: 16238 - DNA, 122 bp, Homo sapiens
  misc_feature (61)..(62): /note="This region represents a CpG dinucleotide"
  misc_feature (61)..(61): /note="Nucleotide may be methylated to form 5-methylcytosine"
atgacacctgccagcctgatgccgcttgactccctgccaggtacttcctaagcaggagcacgctgactcctcatgtgctctattacccaccaccagatgaggcagcaagttaactttggcag

SEQ ID NO: 16239 - DNA, 122 bp, Homo sapiens
  misc_feature (61)..(62): /note="This region represents a CpG dinucleotide"
  misc_feature (61)..(61): /note="Nucleotide may be methylated to form 5-methylcytosine"
agcagtgaacaccaggttgtgtctggtcttctgcagtctgccatggtgaataatcccgtacgtgtgtcatttcacacgctgcaggtgaatctacagggtgaattcctagaagcgggattgct

SEQ ID NO: 16240 - DNA, 122 bp, Homo sapiens
  misc_feature (61)..(62): /note="This region represents a CpG dinucleotide"
  misc_feature (61)..(61): /note="Nucleotide may be methylated to form 5-methylcytosine"
gagaatcactaaagtgtttctaagatttttattgcttgtcaagtacatcctttagggctccgcgtctaaatatttaagattccagctttgctcttatcagagctcaaatgtggccacagttc

SEQ ID NO: 16241 - DNA, 122 bp, Homo sapiens
  misc_feature (61)..(62): /note="This region represents a CpG dinucleotide"
  misc_feature (61)..(61): /note="Nucleotide may be methylated to form 5-methylcytosine"
aacgaacgaacactcgcagtgatggtgatacgtcacagggacacagtagccagctgaaaacgctcccatacacaaagctggaacaattcaagaaaaagcaatattggatggtagcccagagt

SEQ ID NO: 16242 - DNA, 122 bp, Homo sapiens
  misc_feature (61)..(62): /note="This region represents a CpG dinucleotide"
  misc_feature (61)..(61): /note="Nucleotide may be methylated to form 5-methylcytosine"
atgctggactgtaccgtaagcaacaagtgaaatgagttcagtgatctcattctagtccttcgactcctgtccacatcactaagcgactgcacagcttggcacaggccaggatgagtcagcag

SEQ ID NO: 16243 - DNA, 122 bp, Homo sapiens
  misc_feature (61)..(62): /note="This region represents a CpG dinucleotide"
  misc_feature (61)..(61): /note="Nucleotide may be methylated to form 5-methylcytosine"
attgtcttaattaagcatgttgaacaaatgactaaatacatgttttgaaaagtggcaactcgcttgataatgccaaaacctttaaagaaccctactgggggcaggatttaagaccatttttg

SEQ ID NO: 16244 - DNA, 122 bp, Homo sapiens
  misc_feature (61)..(62): /note="This region represents a CpG dinucleotide"
  misc_feature (61)..(61): /note="Nucleotide may be methylated to form 5-methylcytosine"
aggtaatacttccccatttcactatagatttcagccccaacagccactacttccccagcacgagtacagaattaagcaaagcccagcaaaggttactgaacaagtttggggtcctcctctgc

SEQ ID NO: 16245 - DNA, 122 bp, Homo sapiens
  misc_feature (61)..(62): /note="This region represents a CpG dinucleotide"
  misc_feature (61)..(61): /note="Nucleotide may be methylated to form 5-methylcytosine"
cacaggtacattttatagactagaagtgcctgtatttcttctgtttaggtctaacagatacgtagagatatggagataaactaaacagccactctggctgggtttgttttaccaaacaaaca

SEQ ID NO: 16246 - DNA, 122 bp, Homo sapiens
  misc_feature (61)..(62): /note="This region represents a CpG dinucleotide"
  misc_feature (61)..(61): /note="Nucleotide may be methylated to form 5-methylcytosine"
tgaggaggaagaggggagtgctagtacccggggctagtggaagagggtagggtgtgggcccggctcgttgtggggcagctgtttacttcactgcagcctgcagccctcccatttccctacag

SEQ ID NO: 16247 - DNA, 122 bp, Homo sapiens
  misc_feature (61)..(62): /note="This region represents a CpG dinucleotide"
  misc_feature (61)..(61): /note="Nucleotide may be methylated to form 5-methylcytosine"
atgtagaaatgactgtagttctcccctcatccaacataaaagcatagggattaaacaatacgactaatgtccagaattcacagatggcacagatggcaatgacacattccctcacctgtgtg

SEQ ID NO: 16248 - DNA, 122 bp, Homo sapiens
  misc_feature (61)..(62): /note="This region represents a CpG dinucleotide"
  misc_feature (61)..(61): /note="Nucleotide may be methylated to form 5-methylcytosine"
ttcccaagcactctgagccctctctcatcagtcacgaggagaggagaaagtgctggactacgagcacaaaggcctggctctgacacaactgctgtgtgacactgagcaagtcctgccctctc

SEQ ID NO: 16249 - DNA, 122 bp, Homo sapiens
  misc_feature (61)..(62): /note="This region represents a CpG dinucleotide"
  misc_feature (61)..(61): /note="Nucleotide may be methylated to form 5-methylcytosine"
cagagtaccaaattcctttcttgcattgttttgcatcatgcaagcttctgatggattgtacgctcctagatagtgatagtgcattcaacactgtgctatatacagaataagcttttgaaaga

SEQ ID NO: 16250 - DNA, 122 bp, Homo sapiens
  misc_feature (61)..(62): /note="This region represents a CpG dinucleotide"
  misc_feature (61)..(61): /note="Nucleotide may be methylated to form 5-methylcytosine"
tttctaggttctgaatcccacctcaccccaacccttctgcatcctagctcataggatgtacgaatgactcccgtgcctggactagtggctttacataggtaatggtggctcctcagagcaca

SEQ ID NO: 16251 - DNA, 122 bp, Homo sapiens
  misc_feature (61)..(62): /note="This region represents a CpG dinucleotide"
  misc_feature (61)..(61): /note="Nucleotide may be methylated to form 5-methylcytosine"
taggatgtgcagtatttatctgatcatgggctctaaattcattgttggcgcggtggctcacgcctgtaatcccagcactttaggaggcggagttgggcggattgcctaaggtcaggagttca

SEQ ID NO: 16252 - DNA, 122 bp, Homo sapiens
  misc_feature (61)..(62): /note="This region represents a CpG dinucleotide"
  misc_feature (61)..(61): /note="Nucleotide may be methylated to form 5-methylcytosine"
gacggcagggccagtcacacaagacgtctcttgtgaggtcaggctggcactggtggtatccgtactgcgactccctgtatgtctactttcggcatccctggagaagaccaacgcacatacgc

SEQ ID NO: 16253 - DNA, 122 bp, Homo sapiens
  misc_feature (61)..(62): /note="This region represents a CpG dinucleotide"
  misc_feature (61)..(61): /note="Nucleotide may be methylated to form 5-methylcytosine"
cagcagggaggagaaagggtgttcactctgcagtcagaggtggtatgataattttcacagcgtagctttaccaacttgagagcctggtaagttctcaattaacacatgttgaggtacctagt

SEQ ID NO: 16254 - DNA, 122 bp, Homo sapiens
  misc_feature (61)..(62): /note="This region represents a CpG dinucleotide"
  misc_feature (61)..(61): /note="Nucleotide may be methylated to form 5-methylcytosine"
aaccatttcctgccacctgacaccttttctgctggtaatgtgtctgtaaggaactggtctcgaagcaaaatttatggtcagctaagcccggagaagaggtgactatgtgcactttcctgctc

SEQ ID NO: 16255 - DNA, 122 bp, Homo sapiens
  misc_feature (61)..(62): /note="This region represents a CpG dinucleotide"
  misc_feature (61)..(61): /note="Nucleotide may be methylated to form 5-methylcytosine"
ggtgaataattaatatctgacacctgtacttcaacagaaatttctcatttcctgtgaaaacgacaaggctggctctaaaatagagactacacggatgtggttaaatcatcaggctagatggt

SEQ ID NO: 16256 - DNA, 122 bp, Homo sapiens
  misc_feature (61)..(62): /note="This region represents a CpG dinucleotide"
  misc_feature (61)..(61): /note="Nucleotide may be methylated to form 5-methylcytosine"
ggcacattttctattgctcacatagcttcaagtgacaatgttactaactttcttccaccacgtaataagggtttgtcccctttcctcctgcttctaataaaaatttctcactttcctttaag

SEQ ID NO: 16257 - DNA, 122 bp, Homo sapiens
  misc_feature (61)..(62): /note="This region represents a CpG dinucleotide"
  misc_feature (61)..(61): /note="Nucleotide may be methylated to form 5-methylcytosine"
aatctcgttttgtcgctcaggctggagtgccctggcacgatctgggtttattgtaacctccgcctcccgcgttcaagcgattctcctgcctcagcctcctgagtagctgggactacagacac

SEQ ID NO: 16258 - DNA, 122 bp, Homo sapiens
  misc_feature (61)..(62): /note="This region represents a CpG dinucleotide"
  misc_feature (61)..(61): /note="Nucleotide may be methylated to form 5-methylcytosine"
taggagaccaaaggaagggggaagggtggcggcatgcggggaggctgctagtgctgtaggcggcagagggatattaatagtacctggggcccttccagtctcttatcagtcttttcaagctt

SEQ ID NO: 16259 - DNA, 122 bp, Homo sapiens
  misc_feature (61)..(62): /note="This region represents a CpG dinucleotide"
  misc_feature (61)..(61): /note="Nucleotide may be methylated to form 5-methylcytosine"
acaggaaggctggggatggtgttagcgcctcatgactgggataatctactgtggagttcacgggagggccaggccttcaaagatgcttttattgaaaacgtccctataggacctttttcact

SEQ ID NO: 16260 - DNA, 122 bp, Homo sapiens
  misc_feature (61)..(62): /note="This region represents a CpG dinucleotide"
  misc_feature (61)..(61): /note="Nucleotide may be methylated to form 5-methylcytosine"
agctacatttatgactatttttatggcttggcttgtaacactgtgggtggtccctggacacggggctcattcattcagctcacaggaatcatgaggttgagatctgcaaacagatctggctc

SEQ ID NO: 16261 - DNA, 122 bp, Homo sapiens
  misc_feature (61)..(62): /note="This region represents a CpG dinucleotide"
  misc_feature (61)..(61): /note="Nucleotide may be methylated to form 5-methylcytosine"
tctctcctggctggcagcggggatctgtgtctccaaggaaagtttgccccgagcccttcccggcccggcgtagggttctccggaaaccatcactcacatctagcacttggaggcctccaggg

SEQ ID NO: 16262 - DNA, 122 bp, Homo sapiens
  misc_feature (61)..(62): /note="This region represents a CpG dinucleotide"
  misc_feature (61)..(61): /note="Nucleotide may be methylated to form 5-methylcytosine"
tcaatcagtgtttgggcttaacccctgaggctcaggcaacatcagcagggcagtgagagccgttgctcagggagtggaggtacttagaaaactttgagataggtgccaggacttctgccagc

SEQ ID NO: 16263 - DNA, 122 bp, Homo sapiens
  misc_feature (61)..(62): /note="This region represents a CpG dinucleotide"
  misc_feature (61)..(61): /note="Nucleotide may be methylated to form 5-methylcytosine"
tgagaatgtgtgctcagaggaggacttttccccatcacactttgggcactgacagtttttcggctgtctcacagagtttgcagtggctatgttgtctggagtatataccctggggttcattg

SEQ ID NO: 16264 - DNA, 122 bp, Homo sapiens
  misc_feature (61)..(62): /note="This region represents a CpG dinucleotide"
  misc_feature (61)..(61): /note="Nucleotide may be methylated to form 5-methylcytosine"
ggatactggctgtttggaattattcatgctacctgttcccattagcagatagtggtatggcgtttgctgaccctagctgtcactcagtggtaggagcacagcgtttattcttcctgtttcag

SEQ ID NO: 16265 - DNA, 122 bp, Homo sapiens
  misc_feature (61)..(62): /note="This region represents a CpG dinucleotide"
  misc_feature (61)..(61): /note="Nucleotide may be methylated to form 5-methylcytosine"
caatgagataccactacacacctttgagaatgaacaaaacccagaactaacaacatcaaacgctgactaggatgtgaagcacaaggacccatttattgctggtaggaatgcaaaatagtaca

SEQ ID NO: 16266 - DNA, 122 bp, Homo sapiens
  misc_feature (61)..(62): /note="This region represents a CpG dinucleotide"
  misc_feature (61)..(61): /note="Nucleotide may be methylated to form 5-methylcytosine"
tgagcagtttcatgcagtgttacaccagtctgaagaaatatcctctgtactgcaaatttccggagccatatttcaactttaaggtattaaatccttttgtgtaagttcaaagtagttttata

SEQ ID NO: 16267 - DNA, 122 bp, Homo sapiens
  misc_feature (61)..(62): /note="This region represents a CpG dinucleotide"
  misc_feature (61)..(61): /note="Nucleotide may be methylated to form 5-methylcytosine"
atttttctaagagatggttgaattatttttgtctctccttttatcattcctctggttccccgcttcctgcttagcccttgagaaacacaaatatagccttttacccgcccctccttcaccag

SEQ ID NO: 16268 - DNA, 122 bp, Homo sapiens
  misc_feature (61)..(62): /note="This region represents a CpG dinucleotide"
  misc_feature (61)..(61): /note="Nucleotide may be methylated to form 5-methylcytosine"
ggaaagcttcctatatgaagtgaaatatgaattgagcatttcagagtgaaggacatgccacgcagagggattagcataaattgggtgtatctgtacagcacctggtaagttctgttaattat

SEQ ID NO: 16269 - DNA, 122 bp, Homo sapiens
  misc_feature (61)..(62): /note="This region represents a CpG dinucleotide"
  misc_feature (61)..(61): /note="Nucleotide may be methylated to form 5-methylcytosine"
cagcctcctggctttggagctcagatcctgcctcctcagctaactagcagtgtgaccttacgcaagttaacttaacctctctgtgcctcggtctcctcctgcataaagtgatgatactactg

SEQ ID NO: 16270 - DNA, 122 bp, Homo sapiens
  misc_feature (61)..(62): /note="This region represents a CpG dinucleotide"
  misc_feature (61)..(61): /note="Nucleotide may be methylated to form 5-methylcytosine"
gtgagtgaggctcaaagagtaccagctaattgttaaatcctgtggcaagtcactctgtgacgtgagtcattactcactgacttttttgaaaccaaatgtttctgtcttagacctgctcaaag

SEQ ID NO: 16271 - DNA, 122 bp, Homo sapiens
  misc_feature (61)..(62): /note="This region represents a CpG dinucleotide"
  misc_feature (61)..(61): /note="Nucleotide may be methylated to form 5-methylcytosine"
ggcaacgatctcatccagcccctgctgggatggggtgtcatggggaccttgagctgcagtcgtaagcaggactggggcagcctgagtcagacagtggccttggggaggagtggatttggtcc

SEQ ID NO: 16272 - DNA, 122 bp, Homo sapiens
  misc_feature (61)..(62): /note="This region represents a CpG dinucleotide"
  misc_feature (61)..(61): /note="Nucleotide may be methylated to form 5-methylcytosine"
agttattttatgcacatgtaaagatttgtattgatttaaagaggagagagctttacttcccgtgttggaaacagatatagttgtgtcttacagttttattgaaacattacaaaacatccaag

SEQ ID NO: 16273 - DNA, 122 bp, Homo sapiens
  misc_feature (61)..(62): /note="This region represents a CpG dinucleotide"
  misc_feature (61)..(61): /note="Nucleotide may be methylated to form 5-methylcytosine"
ttaatcctggcaataacctctgaatcatgcatcattatccacacttcacatatgaggaaacgaaagctcaaggagattgtgtgacttgcttagtctcatccagtttgtaagtggtggaggcc

SEQ ID NO: 16274 - DNA, 122 bp, Homo sapiens
  misc_feature (61)..(62): /note="This region represents a CpG dinucleotide"
  misc_feature (61)..(61): /note="Nucleotide may be methylated to form 5-methylcytosine"
gattcgattccttttcaggagaatgaaggaatctgcaaggggttgttgttacacaacttacgtgagattgtggtaaagtgccagcaatgagcctggagtagtccacttctcttcctctcctc

SEQ ID NO: 16275 - DNA, 122 bp, Homo sapiens
  misc_feature (61)..(62): /note="This region represents a CpG dinucleotide"
  misc_feature (61)..(61): /note="Nucleotide may be methylated to form 5-methylcytosine"
gctctggaacttctctacactgtctacaagttaaaaataagctgatgttccaggagagtacggttggatcctgagagtaagacctggtagaataaacagtatcgtcagtgttctcagattcc

SEQ ID NO: 16276 - DNA, 122 bp, Homo sapiens
  misc_feature (61)..(62): /note="This region represents a CpG dinucleotide"
  misc_feature (61)..(61): /note="Nucleotide may be methylated to form 5-methylcytosine"
ctctagactagcagagtcttggtatttttccttgggaatctcccctttcctagtcacacccgtccatacaggtagacaactgtcgacccatgaaaaggaaacacactcctctttgttctccc

SEQ ID NO: 16277 - DNA, 122 bp, Homo sapiens
  misc_feature (61)..(62): /note="This region represents a CpG dinucleotide"
  misc_feature (61)..(61): /note="Nucleotide may be methylated to form 5-methylcytosine"
atctgctttgtgacaataactcactttgcacctattaaaagagggagcattatatgtctgcggcggctcatcgaaattaccatgaacaagatcatcagcatttaaataacatgtgggcagtg

SEQ ID NO: 16278 - DNA, 122 bp, Homo sapiens
  misc_feature (61)..(62): /note="This region represents a CpG dinucleotide"
  misc_feature (61)..(61): /note="Nucleotide may be methylated to form 5-methylcytosine"
ctggactgacaggagctctgagcagttcataggacaagcagggacccgccgaacctctcccgtttctgtgctttctctaaatgcagcaggtcctctctttactgcccatgcttttaaactat

SEQ ID NO: 16279 - DNA, 122 bp, Homo sapiens
  misc_feature (61)..(62): /note="This region represents a CpG dinucleotide"
  misc_feature (61)..(61): /note="Nucleotide may be methylated to form 5-methylcytosine"
tcccttagagagtcccaaaagctctgagaatactgtaacagaaacctgctaaacctgatgcgtccaaactcatgagaccaggtggcacctactaacatctcaaagaatgggactcctatgga

SEQ ID NO: 16280 - DNA, 122 bp, Homo sapiens
  misc_feature (61)..(62): /note="This region represents a CpG dinucleotide"
  misc_feature (61)..(61): /note="Nucleotide may be methylated to form 5-methylcytosine"
actgtcttgttcagttcactgatgagtcaggagggactgtcaggtcggggagccatgggtcgccttgtttgctttctgagtcagtatgtccaggggaagtggtggctaacacaagacaagac

SEQ ID NO: 16281 - DNA, 122 bp, Homo sapiens
  misc_feature (61)..(62): /note="This region represents a CpG dinucleotide"
  misc_feature (61)..(61): /note="Nucleotide may be methylated to form 5-methylcytosine"
gatgtaaataggcagttgttgttacataggtctgaaactcagaggttgcctctgtgttggcgatgtcagttggaagccattaattcactgatggtatttaaaatagtgagaggggaggaaat

SEQ ID NO: 16282 - DNA, 122 bp, Homo sapiens
  misc_feature (61)..(62): /note="This region represents a CpG dinucleotide"
  misc_feature (61)..(61): /note="Nucleotide may be methylated to form 5-methylcytosine"
gggagtggaatagtcatctcttgaaaatagagatttcaatgtgcgattaatcttgtaaggcgacttagtttgggattcccagaagcagattctgagatgaagattcttgagcgagtgattta

SEQ ID NO: 16283 - DNA, 122 bp, Homo sapiens
  misc_feature (61)..(62): /note="This region represents a CpG dinucleotide"
  misc_feature (61)..(61): /note="Nucleotide may be methylated to form 5-methylcytosine"
gaatttactctagttgttctgaagattaaacaagaaaattcatgcaagatttaagtttaacgcctagcccagaaatgcccagcaattgttaactgagtgtagcagaaaaaaatagaatacca

SEQ ID NO: 16284 - DNA, 122 bp, Homo sapiens
  misc_feature (61)..(62): /note="This region represents a CpG dinucleotide"
  misc_feature (61)..(61): /note="Nucleotide may be methylated to form 5-methylcytosine"
cctctcccctcttttctgtcatctggtttctctccagtcccccctttgctttctaccttgcgtcgcaaggcctgagtcgccctctcgcccagcccccagtcttcagcccagcgtctgtgctt

SEQ ID NO: 16285 - DNA, 122 bp, Homo sapiens
  misc_feature (61)..(62): /note="This region represents a CpG dinucleotide"
  misc_feature (61)..(61): /note="Nucleotide may be methylated to form 5-methylcytosine"
ctgaatttgattttgtaaccctgaatttgatcctgtctttcctcttgaagtaatcatcatcgtcgtcatgatcatcatcaccattacctcttacaaaatgtttactatgtgtcagacctatg

SEQ ID NO: 16286 - DNA, 122 bp, Homo sapiens
  misc_feature (61)..(62): /note="This region represents a CpG dinucleotide"
  misc_feature (61)..(61): /note="Nucleotide may be methylated to form 5-methylcytosine"
aggttgagatctcctcattcttatcttctgagtcaggcagcacaagatggtataaacactcgttcaaaatgcacttgaatattccatcccttgtccttgcatttacactgttttcttgcagc

SEQ ID NO: 16287 - DNA, 122 bp, Homo sapiens
  misc_feature (61)..(62): /note="This region represents a CpG dinucleotide"
  misc_feature (61)..(61): /note="Nucleotide may be methylated to form 5-methylcytosine"
caaaagttgagccttggagaatcagtcaataggattttaaaagcttaggaagaaaataaacgacaataacaggtactctcaatagtgtgataaggataggggtgatatctccaggaaattaa

SEQ ID NO: 16288 - DNA, 122 bp, Homo sapiens
  misc_feature (61)..(62): /note="This region represents a CpG dinucleotide"
  misc_feature (61)..(61): /note="Nucleotide may be methylated to form 5-methylcytosine"
tagcttggtttggctcaagatgaccaagagtcaggcttcatccttgggcttacttcactccggaagctcatggagtgacaggagcaggctaccccctgccaggtaatttgcctcctaatatt

SEQ ID NO: 16289 - DNA, 122 bp, Homo sapiens
  misc_feature (61)..(62): /note="This region represents a CpG dinucleotide"
  misc_feature (61)..(61): /note="Nucleotide may be methylated to form 5-methylcytosine"
gcccacctccagatattctgattcagctggagtggagtggggccaatacgtgtgcatttccggcaagctcccagatgatgctggtgcttctggtccacagaccacacttgagagtctggctt

SEQ ID NO: 16290 - DNA, 122 bp, Homo sapiens
  misc_feature (61)..(62): /note="This region represents a CpG dinucleotide"
  misc_feature (61)..(61): /note="Nucleotide may be methylated to form 5-methylcytosine"
tgactaactcccacacatcagccttatagcttccatgattcaaatccatactgagtgcttcgtataatcagctcatttaatcctcccagcagccctgtgaggcagttgatataccatggacc

SEQ ID NO: 16291 - DNA, 122 bp, Homo sapiens
  misc_feature (61)..(62): /note="This region represents a CpG dinucleotide"
  misc_feature (61)..(61): /note="Nucleotide may be methylated to form 5-methylcytosine"
aggaacagaaaatccccacccccttccattctggagatttcgtatctaaagcctgagaggcgaggatgaagtataaaaatactatttacaaagggaaggaggtatctgttgcttaaccgtag

SEQ ID NO: 16292 - DNA, 122 bp, Homo sapiens
  misc_feature (61)..(62): /note="This region represents a CpG dinucleotide"
  misc_feature (61)..(61): /note="Nucleotide may be methylated to form 5-methylcytosine"
gccagctgggccctgccgtgcgcctggacccacagcacaaggagggctggccttgacctgcgacagctttgaggccaggcctgtcactcaccaaacacaggcttagcagcctgcatagctca

SEQ ID NO: 16293 - DNA, 122 bp, Homo sapiens
  misc_feature (61)..(62): /note="This region represents a CpG dinucleotide"
  misc_feature (61)..(61): /note="Nucleotide may be methylated to form 5-methylcytosine"
ttgaatgtcattggaacttcacagaggagccaacggaagagcgtgggagaggggatgcaccgtgtctgggtctcagcaggctcatgtgttggccctggctccagcaccagccccttcagcag

SEQ ID NO: 16294 - DNA, 122 bp, Homo sapiens
  misc_feature (61)..(62): /note="This region represents a CpG dinucleotide"
  misc_feature (61)..(61): /note="Nucleotide may be methylated to form 5-methylcytosine"
tgaaccagcttgtcaagatgagcactgagttaaaaatcctctctgccgcttctgtgggctcgcaagtggatctgactgtgacaggctgaagaacagcagtccctggccacctcccccaatta

SEQ ID NO: 16295 - DNA, 122 bp, Homo sapiens
  misc_feature (61)..(62): /note="This region represents a CpG dinucleotide"
  misc_feature (61)..(61): /note="Nucleotide may be methylated to form 5-methylcytosine"
aagtagacaaaatgactcacccagttgattttagtcatcccagaactgacacagtgggtacgtgaatgaagtagccccagtggcaggcatggaggctatatatatatgggcccaacagcatg

SEQ ID NO: 16296 - DNA, 122 bp, Homo sapiens
  misc_feature (61)..(62): /note="This region represents a CpG dinucleotide"
  misc_feature (61)..(61): /note="Nucleotide may be methylated to form 5-methylcytosine"
acagtaagattcttggctgggatgagccgaacaggacgaagaaccgaattctgccggggccgcttaaggaagactgcctaggcgaggtggcccaggctggggatgagccagtggaggaggaa

SEQ ID NO: 16297 - DNA, 122 bp, Homo sapiens
  misc_feature (61)..(62): /note="This region represents a CpG dinucleotide"
  misc_feature (61)..(61): /note="Nucleotide may be methylated to form 5-methylcytosine"
tggtctcggcatgttagttgcacacacgtatggtgtacggttcccgctgggagccgcgtgcgtgtgcatgttcccgtgtgtgtggtgggcggtgtgccaggtccactgcaaggcgtgtgcgc

SEQ ID NO: 16298 - DNA, 122 bp, Homo sapiens
  misc_feature (61)..(62): /note="This region represents a CpG dinucleotide"
  misc_feature (61)..(61): /note="Nucleotide may be methylated to form 5-methylcytosine"
tcgccgtcgttgttatttagtagtagtagtaacggctgacatttacagcgacgtcgatggcgccaggtgccaagctctttccttgtataatttcatggacactcacgcatcaactctaagcg

SEQ ID NO: 16299 - DNA, 122 bp, Homo sapiens
  misc_feature (61)..(62): /note="This region represents a CpG dinucleotide"
  misc_feature (61)..(61): /note="Nucleotide may be methylated to form 5-methylcytosine"
gggtaggaagtgggtgtggaaggaatggtaggttctatttaaagcctccctactgactcacggaggcatctagggaaatggcttaacttttctgagacttgggttccctcttgttaaaaaaa

SEQ ID NO: 16300 - DNA, 122 bp, Homo sapiens
  misc_feature (61)..(62): /note="This region represents a CpG dinucleotide"
  misc_feature (61)..(61): /note="Nucleotide may be methylated to form 5-methylcytosine"
ggccttgcctctacagtcctctttggcctagtggcctcctcccttgtggattggctgggtcgcaagaattcttgtgtcctcttctccctgacttactcactatgctgcttaaccaaactctc

SEQ ID NO: 16301 - DNA, 122 bp, Homo sapiens
  misc_feature (61)..(62): /note="This region represents a CpG dinucleotide"
  misc_feature (61)..(61): /note="Nucleotide may be methylated to form 5-methylcytosine"
agaaaggcaattccttgagcattaaataagcaacagtgaacttcatgcccattcctcattcgctttgaaaggcctaatttaatatgcatatactagaccaaaagactgaatcaagattaata

SEQ ID NO: 16302 - DNA, 122 bp, Homo sapiens
  misc_feature (61)..(62): /note="This region represents a CpG dinucleotide"
  misc_feature (61)..(61): /note="Nucleotide may be methylated to form 5-methylcytosine"
gactgtgtctgtcacttggctccagctgacttactctgacgtgcctggagaataagtgtccggcacgtgcagagccaagggagaaggaaacccagaccctgccctcagagctcccaggctgt

SEQ ID NO: 16303 - DNA, 122 bp, Homo sapiens
  misc_feature (61)..(62): /note="This region represents a CpG dinucleotide"
  misc_feature (61)..(61): /note="Nucleotide may be methylated to form 5-methylcytosine"
gcacgggaagcggaaacgaggccggccccgaaagctgagcaaagagtactgggactgtctcgagggcaagaagagcaagcacggtgagctccgggggcacgtgggtcctccctgcgccgggc

SEQ ID NO: 16304 - DNA, 122 bp, Homo sapiens
  misc_feature (61)..(62): /note="This region represents a CpG dinucleotide"
  misc_feature (61)..(61): /note="Nucleotide may be methylated to form 5-methylcytosine"
ctcctcacccctttgacaagggaaggattcctgccatagggttatgaggatggctgaacacgtcagttgggctcagcagcagttagttacctatgttcacagctaaggcaaagaggaccctg

SEQ ID NO: 16305 - DNA, 122 bp, Homo sapiens
  misc_feature (61)..(62): /note="This region represents a CpG dinucleotide"
  misc_feature (61)..(61): /note="Nucleotide may be methylated to form 5-methylcytosine"
ctgaattaccactgagcgttatctgaatacaggctgcccttgaagtccctaatttcattgcgctgacagaggctttagtgagtctataattggaaaaggaagcatttgtgcctcaggtacag

SEQ ID NO: 16306 - DNA, 122 bp, Homo sapiens
  misc_feature (61)..(62): /note="This region represents a CpG dinucleotide"
  misc_feature (61)..(61): /note="Nucleotide may be methylated to form 5-methylcytosine"
cacctgacccagctcccatcaaggtcaccacctcaaggtggccaattccagtggacacaacgtcatctttcctgatctctcagaaacacttttcgtgttggccactccttcttctttgaact

SEQ ID NO: 16307 - DNA, 122 bp, Homo sapiens
  misc_feature (61)..(62): /note="This region represents a CpG dinucleotide"
  misc_feature (61)..(61): /note="Nucleotide may be methylated to form 5-methylcytosine"
cttttggagggtggggtggctctggcctgcagacgcagaggtgctatgcagtgagatcatcgtcctcatattttaattctttagacatgctttcctttagtttatttagcatgttttaaaca

SEQ ID NO: 16308 - DNA, 122 bp, Homo sapiens
  misc_feature (61)..(62): /note="This region represents a CpG dinucleotide"
  misc_feature (61)..(61): /note="Nucleotide may be methylated to form 5-methylcytosine"
ggttaccaaggtgtaacaggaagtatacaaatacgcacagctagaatgtaaggcacaggccgcaggagaagtgcatggagaagggagagaaattgtacctggcctcctgaaagacgcagcct

SEQ ID NO: 16309 - DNA, 122 bp, Homo sapiens
  misc_feature (61)..(62): /note="This region represents a CpG dinucleotide"
  misc_feature (61)..(61): /note="Nucleotide may be methylated to form 5-methylcytosine"
caagacaaggtcctgactccgaaagcagctacagcttactctgtggatgaggcagagatccgtgcaaatttcaacaaacaggaacaagaaatgggaatatgactaataaccaaatggcacat

SEQ ID NO: 16310 - DNA, 122 bp, Homo sapiens
  misc_feature (61)..(62): /note="This region represents a CpG dinucleotide"
  misc_feature (61)..(61): /note="Nucleotide may be methylated to form 5-methylcytosine"
ctccggttcgcggacccccacctccaccgggatccctgctttgacgcggcttcgcccccgcggctggtgaggaccctccacagcccgggacccgcctgagtccttacctctgcgtgagggtc

SEQ ID NO: 16311 - DNA, 122 bp, Homo sapiens
  misc_feature (61)..(62): /note="This region represents a CpG dinucleotide"
  misc_feature (61)..(61): /note="Nucleotide may be methylated to form 5-methylcytosine"
gatgtctgttcttccagtttttggcagtgcagaggagcctggaaagagcttgatgagagacgcaaaaagctcaaagacaaaaatgcaaggccggccaggcgtggtggctcacgcctgtaatc

SEQ ID NO: 16312 - DNA, 122 bp, Homo sapiens
  misc_feature (61)..(62): /note="This region represents a CpG dinucleotide"
  misc_feature (61)..(61): /note="Nucleotide may be methylated to form 5-methylcytosine"
caagggtaacaatgctatctttgaaaaatcattttagtccatttccatatgaaaagaatacgaaatgtcctgtcaaacaccagaggtggtatttactcagtgtgtatgcaccatatgcctgg

SEQ ID NO: 16313 - DNA, 122 bp, Homo sapiens
  misc_feature (61)..(62): /note="This region represents a CpG dinucleotide"
  misc_feature (61)..(61): /note="Nucleotide may be methylated to form 5-methylcytosine"
cacctgtacatctctttcctcctccctgtgcccttgacagagctacctgttaggtggtgacgagcaaagctaactcttagtggagggacaccgagtaccagagaaattctcccagcctagaa

SEQ ID NO: 16314 - DNA, 122 bp, Homo sapiens
  misc_feature (61)..(62): /note="This region represents a CpG dinucleotide"
  misc_feature (61)..(61): /note="Nucleotide may be methylated to form 5-methylcytosine"
cctctagcttccttgacatcgcccctagtttcaggcacagcctctctcccagttacgaggcgagacaggattctgaagggggaaaggatatgtattctacacaacaggtcaacgccctctca

SEQ ID NO: 16315 - DNA, 122 bp, Homo sapiens
  misc_feature (61)..(62): /note="This region represents a CpG dinucleotide"
  misc_feature (61)..(61): /note="Nucleotide may be methylated to form 5-methylcytosine"
tgttgtttcctcttcacgaagagtgcatgtaacagtaagacacaactgtttcatattatacgtaaagagttcatgccaaaggttatagacagtcacatgctaaaactaggctacactttgaa

SEQ ID NO: 16316 - DNA, 122 bp, Homo sapiens
  misc_feature (61)..(62): /note="This region represents a CpG dinucleotide"
  misc_feature (61)..(61): /note="Nucleotide may be methylated to form 5-methylcytosine"
gggctagaggcgcgtttgccaggcagcgcgctgcccctgcgcatcgccagccctgacagacgtgcaccacggaagggacgtgattgtggctgccttctcgggagactcaaattctttggatc

SEQ ID NO: 16317 - DNA, 122 bp, Homo sapiens
  misc_feature (61)..(62): /note="This region represents a CpG dinucleotide"
  misc_feature (61)..(61): /note="Nucleotide may be methylated to form 5-methylcytosine"
agtagctgtgaagtcccaagataaactatggttgaaaattgtttatcaaactctcgtgttcggcttgcctgttatcactaaagacattaaagaatactatagaaattgacctatgttcagac

SEQ ID NO: 16318 - DNA, 122 bp, Homo sapiens
  misc_feature (61)..(62): /note="This region represents a CpG dinucleotide"
  misc_feature (61)..(61): /note="Nucleotide may be methylated to form 5-methylcytosine"
ccctattccacagatctatcttatgctagtaccacactgtcttgatttccgtagcattctcgtacattttaaaatcaggaagtgtgagtcctccaactttgttcctctttttcaagactttt

SEQ ID NO: 16319 - DNA, 122 bp, Homo sapiens
  misc_feature (61)..(62): /note="This region represents a CpG dinucleotide"
  misc_feature (61)..(61): /note="Nucleotide may be methylated to form 5-methylcytosine"
cgaagtgggacagggcagattcaaagaggactttgcagaagggtttgggaggatctgagacgaagtgcatataagagggcagagtcaaagatgactaagataattgaggaaggacacgcaga

SEQ ID NO: 16320 - DNA, 122 bp, Homo sapiens
  misc_feature (61)..(62): /note="This region represents a CpG dinucleotide"
  misc_feature (61)..(61): /note="Nucleotide may be methylated to form 5-methylcytosine"
tatcagcaaggctaggatcattatatatcaacaatttaaaatgtaagtctttagagttgacgtggagtaacctatggataatttttggcaagtagttcaggtgatttaatttttaatccctg

SEQ ID NO: 16321 - DNA, 122 bp, Homo sapiens
  misc_feature (61)..(62): /note="This region represents a CpG dinucleotide"
  misc_feature (61)..(61): /note="Nucleotide may be methylated to form 5-methylcytosine"
tgtataatgaatgttcaggtacttacagatgctgatcgagtttctcctcaacctttccttcgagagaccttgcatcatttggtgtagaaacactttaggaagcacttaggaagatggtgtaa

SEQ ID NO: 16322 - DNA, 122 bp, Homo sapiens
  misc_feature (61)..(62): /note="This region represents a CpG dinucleotide"
  misc_feature (61)..(61): /note="Nucleotide may be methylated to form 5-methylcytosine"
ggctacagttgaaaaaatgccttattgtttcataaactacacaccaattctttatttgatcgcatccatctttttaaacagctgggtccattttgaatgttctcgttttaaacttagcattt

SEQ ID NO: 16323 - DNA, 122 bp, Homo sapiens
  misc_feature (61)..(62): /note="This region represents a CpG dinucleotide"
  misc_feature (61)..(61): /note="Nucleotide may be methylated to form 5-methylcytosine"
gggctcccgtggatgctggtaccactcttccttaatctgggtgctggttactcaacgtttcgtgaaaattcacgtatctgtacactaatgagttatacatttttccgtatatatgtcatact

SEQ ID NO: 16324 - DNA, 122 bp, Homo sapiens
  misc_feature (61)..(62): /note="This region represents a CpG dinucleotide"
  misc_feature (61)..(61): /note="Nucleotide may be methylated to form 5-methylcytosine"
cagtccgttggtgtgagggaggctgctgacaccccccagattcatttccagtttgtttgacgttggcatgtatgtctgtgtaacatgactgaagaacgagtcattagtgagctgtccaaagt

SEQ ID NO: 16325 - DNA, 122 bp, Homo sapiens
  misc_feature (61)..(62): /note="This region represents a CpG dinucleotide"
  misc_feature (61)..(61): /note="Nucleotide may be methylated to form 5-methylcytosine"
gagtagtggagcaaccaatcagttttggtgaaacaaccttggacaagacgaaagagcacacggcctggatggaggagcccaccatggcagcagagcctaaccacctcattgtgcaggaaaag

SEQ ID NO: 16326 - DNA, 122 bp, Homo sapiens
  misc_feature (61)..(62): /note="This region represents a CpG dinucleotide"
  misc_feature (61)..(61): /note="Nucleotide may be methylated to form 5-methylcytosine"
atcttcgtatctttatttgcaagtagagcatttgctttacacatagttacaaagtcaacacgtgcagaaggtagagcaaacctgtttaccatcctgctctggggctcccaattgcctgtgcc

SEQ ID NO: 16327 - DNA, 122 bp, Homo sapiens
  misc_feature (61)..(62): /note="This region represents a CpG dinucleotide"
  misc_feature (61)..(61): /note="Nucleotide may be methylated to form 5-methylcytosine"
aataaaggactcctgaattagtctcagagtgtggcattctctctatgacttgctcggttacgacatttggaagccccagagagattcgccaccgggtgaagacctgactcattccgggcttc

SEQ ID NO: 16328 - DNA, 122 bp, Homo sapiens
  misc_feature (61)..(62): /note="This region represents a CpG dinucleotide"
  misc_feature (61)..(61): /note="Nucleotide may be methylated to form 5-methylcytosine"
gaagaagagaaagttaatattcacagagttccttctaggagccaggccctgtactgacagcgtaaaaacacggtctttcatttaatcctacaacaaacctgacaaagcagtaccactgcata

SEQ ID NO: 16329 - DNA, 122 bp, Homo sapiens
  misc_feature (61)..(62): /note="This region represents a CpG dinucleotide"
  misc_feature (61)..(61): /note="Nucleotide may be methylated to form 5-methylcytosine"
gctattcctacgctttgtgcaaaaagccttcttcctattatgacagtgctagctgcagaccgcaatttagttacaactgtggtaagcaaaatgtgtgtccaaattgattaatcttatatcca

SEQ ID NO: 16330 - DNA, 122 bp, Homo sapiens
  misc_feature (61)..(62): /note="This region represents a CpG dinucleotide"
  misc_feature (61)..(61): /note="Nucleotide may be methylated to form 5-methylcytosine"
aaccacattctcttcagttacctattcactctcaactagaaaaatgacaccatttctggccgggcgaggtagctcatgcctgtaataccagcactttgggaggccgaggcgggtggatcaca

SEQ ID NO: 16331 - DNA, 122 bp, Homo sapiens
  misc_feature (61)..(62): /note="This region represents a CpG dinucleotide"
  misc_feature (61)..(61): /note="Nucleotide may be methylated to form 5-methylcytosine"
gcactcacttttttttcaacattgctggctaacaagtactcagttgttgcaacaactacccgtaaataaatagcgagcaggtgaatatctgtttctatggtttctatttacagtagagagag

SEQ ID NO: 16332 - DNA, 122 bp, Homo sapiens
  misc_feature (61)..(62): /note="This region represents a CpG dinucleotide"
  misc_feature (61)..(61): /note="Nucleotide may be methylated to form 5-methylcytosine"
tgctctggtggacggggcaggtcaatgaaagcagcaacttgagctccttccagcaggtgccgccttgcatcacctatgatcccatgtgtcattcacgtgtatgattgtatatgatcctctga

SEQ ID NO: 16333 - DNA, 122 bp, Homo sapiens
  misc_feature (61)..(62): /note="This region represents a CpG dinucleotide"
  misc_feature (61)..(61): /note="Nucleotide may be methylated to form 5-methylcytosine"
tcatgcaattgagtgctatgaaagtgcaatgagagaatataggaggagaacctaagtctacgggaaagcagaatatcacggaaacacccttggagaaagaatatttaagaactgaaaaatac

SEQ ID NO: 16334 - DNA, 122 bp, Homo sapiens
  misc_feature (61)..(62): /note="This region represents a CpG dinucleotide"
  misc_feature (61)..(61): /note="Nucleotide may be methylated to form 5-methylcytosine"
ttattctcctaattgtttctctttgtaccagttcattgcttgttgggatcaccaccagttcgatttagctaaatgttgacacagtatttggtatctacgtgaaagatttggcagtgatcttt

SEQ ID NO: 16335 - DNA, 122 bp, Homo sapiens
  misc_feature (61)..(62): /note="This region represents a CpG dinucleotide"
  misc_feature (61)..(61): /note="Nucleotide may be methylated to form 5-methylcytosine"
aaacaacataaagcacttaaaatagtgtctggtgcctagacttcggcaggtacaagccatcgtgaactggtttcattatcactgttgactcataagcctctgttgtgtttccattattagca

SEQ ID NO: 16336 - DNA, 122 bp, Homo sapiens
  misc_feature (61)..(62): /note="This region represents a CpG dinucleotide"
  misc_feature (61)..(61): /note="Nucleotide may be methylated to form 5-methylcytosine"
tgtcctctcggtttttcttggtcacctcgacagacagacacatcttgtccaggggccactcgttcttcctggccatggactgcatgatggccgtgaggaacgactgggggttgaagaagccg

SEQ ID NO: 16337 - DNA, 122 bp, Homo sapiens
  misc_feature (61)..(62): /note="This region represents a CpG dinucleotide"
  misc_feature (61)..(61): /note="Nucleotide may be methylated to form 5-methylcytosine"
agcagaaggatacatttttagtattttattgcctgtcaatgctctgcgccttgccagaaacggataacgataattttaaattatttatgtgtttatttttatgagacagtttcactctgtca

SEQ ID NO: 16338 - DNA, 122 bp, Homo sapiens
  misc_feature (61)..(62): /note="This region represents a CpG dinucleotide"
  misc_feature (61)..(61): /note="Nucleotide may be methylated to form 5-methylcytosine"
gctgggcgtccgcctgtgtttgccaaagcacgagttgaaacgtgaagtgttgggccagcccgtgtggcaccaatacctgccgcctacgactgttgtgaacactgaatgggccaacaaaccta

SEQ ID NO: 16339 - DNA, 122 bp, Homo sapiens
  misc_feature (61)..(62): /note="This region represents a CpG dinucleotide"
  misc_feature (61)..(61): /note="Nucleotide may be methylated to form 5-methylcytosine"
ggtgacttttttgagtcatgttgagttgctcagaagctggcaaggaagaggaaggactgacggggcccattgcacaaggacaggtggaaacccaagttgaaggaaacatggatcaagctgcc

SEQ ID NO: 16340 - DNA, 122 bp, Homo sapiens
  misc_feature (61)..(62): /note="This region represents a CpG dinucleotide"
  misc_feature (61)..(61): /note="Nucleotide may be methylated to form 5-methylcytosine"
aagagtgggcttagtgaatgggtggtcagaatgcatttacgtttttcattgaagccttgccgctatttccctgctgccttggatgatccaggaaactaagtgtttgaacagtgagctcactc

SEQ ID NO: 16341 - DNA, 122 bp, Homo sapiens
  misc_feature (61)..(62): /note="This region represents a CpG dinucleotide"
  misc_feature (61)..(61): /note="Nucleotide may be methylated to form 5-methylcytosine"
aaggctccccgtccagccccgccctgcctcccagcaacgcggagcgagagggaacccacacgcccacctgctcaggtagaaggagaagatgttctggtccaccagcttctgctgcatcaggt

SEQ ID NO: 16342 - DNA, 122 bp, Homo sapiens
  misc_feature (61)..(62): /note="This region represents a CpG dinucleotide"
  misc_feature (61)..(61): /note="Nucleotide may be methylated to form 5-methylcytosine"
atttacactcagtatcacactaagggctctttgtcactcagtctttgagacagaagggggcgagataacaaatctagactgcttgtgttgactttgtggataaagtaaagggctggagtcaa

SEQ ID NO: 16343 - DNA, 122 bp, Homo sapiens
  misc_feature (61)..(62): /note="This region represents a CpG dinucleotide"
  misc_feature (61)..(61): /note="Nucleotide may be methylated to form 5-methylcytosine"
cacttcctctttatctgcaaagcgagggcatctgtgcatgaacagggtaggcaagcctgacgttgagggagtcgttgtgctgaaccaaggatgtctgctggtaatggagcactagctccttc

SEQ ID NO: 16344 - DNA, 122 bp, Homo sapiens
  misc_feature (61)..(62): /note="This region represents a CpG dinucleotide"
  misc_feature (61)..(61): /note="Nucleotide may be methylated to form 5-methylcytosine"
aatgaacttaaaaatagttaagaagtcaattttacctctttgccaagaggtaaaatcagacggctcaaacagctgcattgcatggcaggttccacaagatgcaatgcaccgtatataaaaca

SEQ ID NO: 16345 - DNA, 122 bp, Homo sapiens
  misc_feature (61)..(62): /note="This region represents a CpG dinucleotide"
  misc_feature (61)..(61): /note="Nucleotide may be methylated to form 5-methylcytosine"
agataaaggatatctacaaaaacccccagctaacatcatacttccttgtgaaagactggacgctttccccgaagatcccttgttaagattaatggttgcatgcggtggtgggggggaacagg

SEQ ID NO: 16346 - DNA, 122 bp, Homo sapiens
  misc_feature (61)..(62): /note="This region represents a CpG dinucleotide"
  misc_feature (61)..(61): /note="Nucleotide may be methylated to form 5-methylcytosine"
ttcactttcaaacctgtccacgttgtttccctgtcagagccaatgtttgcttacaagtctcgtctcatcagtacgagaaaggcaatccttaacttttacctaaccccggagaaagtttcatt

SEQ ID NO: 16347 - DNA, 122 bp, Homo sapiens
  misc_feature (61)..(62): /note="This region represents a CpG dinucleotide"
  misc_feature (61)..(61): /note="Nucleotide may be methylated to form 5-methylcytosine"
aggtgaagttacaatgaaactctgatgttgggggggaaactgacacctgttctatttccacgtcaggtcacaaaaggcagtaccatctgttgccaagtatcagaaacctctctcatccagcc

SEQ ID NO: 16348 - DNA, 122 bp, Homo sapiens
  misc_feature (61)..(62): /note="This region represents a CpG dinucleotide"
  misc_feature (61)..(61): /note="Nucleotide may be methylated to form 5-methylcytosine"
tgatgcaacaaggaggaatcacctacatcaaggccagcaaactagtttggtaaaggccagcgagtcagcattttaggctttgtgggccagtctctgtctctgcgacagtctgtcacaactat

SEQ ID NO: 16349 - DNA, 122 bp, Homo sapiens
  misc_feature (61)..(62): /note="This region represents a CpG dinucleotide"
  misc_feature (61)..(61): /note="Nucleotide may be methylated to form 5-methylcytosine"
agtctgggcccatagtggacctgagcctttgccacagggggcagggaggctgcaatgccacgctaagacctggcctcagtgcctggagctgaggtcacagaggaaagccagggccagccagc

SEQ ID NO: 16350 - DNA, 122 bp, Homo sapiens
  misc_feature (61)..(62): /note="This region represents a CpG dinucleotide"
  misc_feature (61)..(61): /note="Nucleotide may be methylated to form 5-methylcytosine"
tcttgttgctgtgctttggacagaggatcctccaagtacatgtgagtgagccttcctggacgtgaggctttaccttcctctacagtggagactcagcacagctcccaccccacccggcagac

SEQ ID NO: 16351 - DNA, 122 bp, Homo sapiens
  misc_feature (61)..(62): /note="This region represents a CpG dinucleotide"
  misc_feature (61)..(61): /note="Nucleotide may be methylated to form 5-methylcytosine"
cactcacttcatgtggacttggagctacagaccttttacatccatcacagattggctggacgggttgcaattgctatgcacagcctgattggcactgcaggtttttagagccattttgagtt

SEQ ID NO: 16352 - DNA, 122 bp, Homo sapiens
  misc_feature (61)..(62): /note="This region represents a CpG dinucleotide"
  misc_feature (61)..(61): /note="Nucleotide may be methylated to form 5-methylcytosine"
taccagatcaaagcctgtgggtaatggaaacctcggggtagagggggtggtgccatgcagcggggcctacagagcctacttagctgaatgtcttactctgtatattctggagcttgaactgc

SEQ ID NO: 16353 - DNA, 122 bp, Homo sapiens
  misc_feature (61)..(62): /note="This region represents a CpG dinucleotide"
  misc_feature (61)..(61): /note="Nucleotide may be methylated to form 5-methylcytosine"
agatggcagcatctctcgccataaaccatcttttgaacagaatttcttagatgcagaagacgtttgagacagaaggatggtctatctgcatcaccccatcatgacacagtggtggaactggg

SEQ ID NO: 16354 - DNA, 122 bp, Homo sapiens
  misc_feature (61)..(62): /note="This region represents a CpG dinucleotide"
  misc_feature (61)..(61): /note="Nucleotide may be methylated to form 5-methylcytosine"
gtctgtgccttcatgctttgctgtctccacacagcaagcaagctcttgcttggaagtgtgcgtgagagacttgttgtctctagccagcttgaaatgctcctcccgtttcttcccgtgatttg

SEQ ID NO: 16355 - DNA, 122 bp, Homo sapiens
  misc_feature (61)..(62): /note="This region represents a CpG dinucleotide"
  misc_feature (61)..(61): /note="Nucleotide may be methylated to form 5-methylcytosine"
acccaggtctatctcacagccacagcatagtattttcttttttttcttgctgtgactgcacgttacgccatacatggcattcaggacgcagaggaattagtatttactgtttttaacattcc

SEQ ID NO: 16356 - DNA, 122 bp, Homo sapiens
  misc_feature (61)..(62): /note="This region represents a CpG dinucleotide"
  misc_feature (61)..(61): /note="Nucleotide may be methylated to form 5-methylcytosine"
ttgaactttattcttcaaataatggtaagtctctgcaggtttttgaggaagtgaattatacgatctgaatgagtttcaggaggctatctctgccagtaataccaaagatcagtaacagagaa

SEQ ID NO: 16357 - DNA, 122 bp, Homo sapiens
  misc_feature (61)..(62): /note="This region represents a CpG dinucleotide"
  misc_feature (61)..(61): /note="Nucleotide may be methylated to form 5-methylcytosine"
gcactgtgttcccctgatggcatatttctgaagcacagcatgctcaaaattttatcttcccgtgttacatgcttttgcagacagcacaatatggaaccagtcaggctcctaattatgacagc

SEQ ID NO: 16358 - DNA, 122 bp, Homo sapiens
  misc_feature (61)..(62): /note="This region represents a CpG dinucleotide"
  misc_feature (61)..(61): /note="Nucleotide may be methylated to form 5-methylcytosine"
ctcacgctgtcctgcaacacaggatacgaatcattccctttgtccatctattctacctgccggctagtcccttagtggccatcttgatgatcagatctactgtcacagtatcacactgtttt

SEQ ID NO: 16359 - DNA, 122 bp, Homo sapiens
  misc_feature (61)..(62): /note="This region represents a CpG dinucleotide"
  misc_feature (61)..(61): /note="Nucleotide may be methylated to form 5-methylcytosine"
gtaactggaaggccccgaagccagcttccagcaggcagggctgggaggttgaacttgagccggtttgggagccaggagcgagtgggtgacaggtcattcctgactgggaaggttgcttgaca

SEQ ID NO: 16360 - DNA, 122 bp, Homo sapiens
  misc_feature (61)..(62): /note="This region represents a CpG dinucleotide"
  misc_feature (61)..(61): /note="Nucleotide may be methylated to form 5-methylcytosine"
catagtcaacctggggttctaatccaaccatgatttgacaaaaatcaaactatgaactaacgtttgattactatcccattcagcaaagtcactcaaagcattaacaaatgagtgtagttcta

SEQ ID NO: 16361 - DNA, 122 bp, Homo sapiens
  misc_feature (61)..(62): /note="This region represents a CpG dinucleotide"
  misc_feature (61)..(61): /note="Nucleotide may be methylated to form 5-methylcytosine"
gaagataagaaaaaaagaggaagaggagtgactcaaattctttggagcactcaccagctacgctccagatagagcaagagcgctgaatcaacccagcatcacacctctcagttaagcaagtt

SEQ ID NO: 16362 - DNA, 122 bp, Homo sapiens
  misc_feature (61)..(62): /note="This region represents a CpG dinucleotide"
  misc_feature (61)..(61): /note="Nucleotide may be methylated to form 5-methylcytosine"
gtcagcgttgagtaaggcagggagggaggctgctgggcactgtcatgacgctgagagactcgtcacttagccatgaggacgtctcgcttctactgaggctgtggctctgctgaaagccacat

SEQ ID NO: 16363 - DNA, 122 bp, Homo sapiens
  misc_feature (61)..(62): /note="This region represents a CpG dinucleotide"
  misc_feature (61)..(61): /note="Nucleotide may be methylated to form 5-methylcytosine"
attgtagatcttcccagaagccctagcgggaaggaggttcccccccgcctcccgcctccccgctttatgaatagcaagagagccagctcccatggtgccctccgtctcatgaataactaaca

SEQ ID NO: 16364 - DNA, 122 bp, Homo sapiens
  misc_feature (61)..(62): /note="This region represents a CpG dinucleotide"
  misc_feature (61)..(61): /note="Nucleotide may be methylated to form 5-methylcytosine"
acatgtatctcttcagaaacaacccatgttgccagtttcaccaaggcatgaagtagttttcgtgatgactggaagagataatcaacctagcatatttacactggaacacagcttcatatatt

SEQ ID NO: 16365 - DNA, 122 bp, Homo sapiens
  misc_feature (61)..(62): /note="This region represents a CpG dinucleotide"
  misc_feature (61)..(61): /note="Nucleotide may be methylated to form 5-methylcytosine"
ttttggatttaccagcgtggtgaacctcatcataggactggagcaagatggaatcattgacgggttcatgacacactacttgagagaggtatgggatcacttagtgattatgaggtttcaac

SEQ ID NO: 16366 - DNA, 122 bp, Homo sapiens
  misc_feature (61)..(62): /note="This region represents a CpG dinucleotide"
  misc_feature (61)..(61): /note="Nucleotide may be methylated to form 5-methylcytosine"
cctgtgtggagggtgcaggaagcccagaggcctgtggctgccagcattgctcagagtttccgctgagctcttcctgcagggccctcctcagggctctgctagccagcgccccctgtcttgag

SEQ ID NO: 16367 - DNA, 122 bp, Homo sapiens
  misc_feature (61)..(62): /note="This region represents a CpG dinucleotide"
  misc_feature (61)..(61): /note="Nucleotide may be methylated to form 5-methylcytosine"
tcctgggtgcccacgcagctgccatcacggcctatgccctgacactgaccaaggcccctgcggacctgcggggtgttgcccacaacaacctcatggcaatggcccaggagactggaggtgag

SEQ ID NO: 16368 - DNA, 122 bp, Homo sapiens
  misc_feature (61)..(62): /note="This region represents a CpG dinucleotide"
  misc_feature (61)..(61): /note="Nucleotide may be methylated to form 5-methylcytosine"
gactggaaatcctaagtaccatcttccttcaacacagctaatccattcttacatgcctgtcgcacaaaagagagcaacaagtcatggtgtgggtgtggccctcatgggagttggtggcagca

SEQ ID NO: 16369 - DNA, 122 bp, Homo sapiens
  misc_feature (61)..(62): /note="This region represents a CpG dinucleotide"
  misc_feature (61)..(61): /note="Nucleotide may be methylated to form 5-methylcytosine"
tcttccttaaatatctgccattaacctgcagggtagaatgagagggggaaaaacaaaagacgtgagaatcaaactaaagacacaaacagccactcagaggcacagcatgcactgtctaattt

SEQ ID NO: 16370 - DNA, 122 bp, Homo sapiens
  misc_feature (61)..(62): /note="This region represents a CpG dinucleotide"
  misc_feature (61)..(61): /note="Nucleotide may be methylated to form 5-methylcytosine"
cccatttatggagggaggaggtgagtttcaaagatattaagtgatttgccctagttcatacggctagtaaaggacagagccaggatttgcactcaagtctattgactctaaattgtagaatg

SEQ ID NO: 16371 - DNA, 122 bp, Homo sapiens
  misc_feature (61)..(62): /note="This region represents a CpG dinucleotide"
  misc_feature (61)..(61): /note="Nucleotide may be methylated to form 5-methylcytosine"
cctactgacagtacttcctaagagaaacttccttactcctgtacctcccctcagtagtcacgactggctagattaggaatggctacctgactcaagggtgagccattaatcagctttccagt

SEQ ID NO: 16372 - DNA, 122 bp, Homo sapiens
  misc_feature (61)..(62): /note="This region represents a CpG dinucleotide"
  misc_feature (61)..(61): /note="Nucleotide may be methylated to form 5-methylcytosine"
tgatttctatcaccataaattagtgttacgggatccctggggtgtccattttctttctggcgacctctgtggccagtggcatgtttgcacaagttcttgtcctgtgtccaggaagaatgagg

SEQ ID NO: 16373 - DNA, 122 bp, Homo sapiens
  misc_feature (61)..(62): /note="This region represents a CpG dinucleotide"
  misc_feature (61)..(61): /note="Nucleotide may be methylated to form 5-methylcytosine"
tacagagaacttgcaaaggagtagagagaatgtttgaggtccagccttggtgtagagaagcggcagaaacagaaatcccaaaaggtgtcatgcttggctccagctctgtgctctcagaactc

SEQ ID NO: 16374 - DNA, 122 bp, Homo sapiens
  misc_feature (61)..(62): /note="This region represents a CpG dinucleotide"
  misc_feature (61)..(61): /note="Nucleotide may be methylated to form 5-methylcytosine"
gtcagtcatttcagcattgcttttcctatgaccttagtagcccttgtctgcttgatctcacgccgtttgaattttgctagctgccaccttcaaccacttccctctgttttttattttcactt

SEQ ID NO: 16375 - DNA, 122 bp, Homo sapiens
  misc_feature (61)..(62): /note="This region represents a CpG dinucleotide"
  misc_feature (61)..(61): /note="Nucleotide may be methylated to form 5-methylcytosine"
cagaatttctctttaaggaaaactatgggggagatttgctgtctgtggtcagtggcatcacgggctattgataattaagaattaacttgagcaattgctgtggttaaacacaagaaacgtgc

SEQ ID NO: 16376 - DNA, 122 bp, Homo sapiens
  misc_feature (61)..(62): /note="This region represents a CpG dinucleotide"
  misc_feature (61)..(61): /note="Nucleotide may be methylated to form 5-methylcytosine"
atgcaggaagacgtctgactctgtggcaagcagctctatgttgcaatctccctgtgaaatcgcctcataagaagagttaaaaggaggaactaaaggaggctgtggagagagacatgtgccct

SEQ ID NO: 16377 - DNA, 122 bp, Homo sapiens
  misc_feature (61)..(62): /note="This region represents a CpG dinucleotide"
  misc_feature (61)..(61): /note="Nucleotide may be methylated to form 5-methylcytosine"
aggaagatgcagcctctgagcaagttgatggctatctcaaaacctcgaaacctgtctctacgtgaacaaagagaggttctgagagcagatatgtcttggcagcaggaaaccaaccccgtcgt

SEQ ID NO: 16378 - DNA, 122 bp, Homo sapiens
  misc_feature (61)..(62): /note="This region represents a CpG dinucleotide"
  misc_feature (61)..(61): /note="Nucleotide may be methylated to form 5-methylcytosine"
gttaatccttacaacagagcataacatggggattattactgattatccttattttacacacgggaaagactcaagtacagagaaactaaggatcttgcttgaggtcatgtgactagtagaca

SEQ ID NO: 16379 - DNA, 122 bp, Homo sapiens
  misc_feature (61)..(62): /note="This region represents a CpG dinucleotide"
  misc_feature (61)..(61): /note="Nucleotide may be methylated to form 5-methylcytosine"
tcccagcttctggtgattccaggaaatccttggtgttccttgacttgtgtcttcttaacccgtctctacctccatttcctccattttaactgggtcatcttccctgtgtctgtctacacatg

SEQ ID NO: 16380 - DNA, 122 bp, Homo sapiens
  misc_feature (61)..(62): /note="This region represents a CpG dinucleotide"
  misc_feature (61)..(61): /note="Nucleotide may be methylated to form 5-methylcytosine"
aagaagttcttgtttatttactttgatacaagaatgagcagcactgtttgcccatgcttgcgtgcactctctctctctctctctctctctctctctcacacacacacacacacacacacaca

SEQ ID NO: 16381 - DNA, 122 bp, Homo sapiens
  misc_feature (61)..(62): /note="This region represents a CpG dinucleotide"
  misc_feature (61)..(61): /note="Nucleotide may be methylated to form 5-methylcytosine"
ctagtttctaatgagactctctacagccttcgtttcttgcagcatgtctgagtgtccattcgctctgctgaagaaatagtgatgggtgtgatcaaggaatactgcctgagatgagtggtatt

SEQ ID NO: 16382 - DNA, 122 bp, Homo sapiens
  misc_feature (61)..(62): /note="This region represents a CpG dinucleotide"
  misc_feature (61)..(61): /note="Nucleotide may be methylated to form 5-methylcytosine"
ggagggcgcagaggagaaggttgacctcacaggtgcctggtgtggaggacagtgctgggacgaggtagcgatcaactcctagcaatgggcatgttctagcaagcagcattcctgaggcaaga

SEQ ID NO: 16383 - DNA, 122 bp, Homo sapiens
  misc_feature (61)..(62): /note="This region represents a CpG dinucleotide"
  misc_feature (61)..(61): /note="Nucleotide may be methylated to form 5-methylcytosine"
catagccttgattcttctgctcagctcagctctgcacttcccaataggaaccactgttctcgctccctcaaactgagcctgagctctctatcatgttgtcctgggttattttaccactggct

SEQ ID NO: 16384 - DNA, 122 bp, Homo sapiens
  misc_feature (61)..(62): /note="This region represents a CpG dinucleotide"
  misc_feature (61)..(61): /note="Nucleotide may be methylated to form 5-methylcytosine"
agaattaagaagtaagcaaacaaggcttccaaccaattgaaataaataccatgaagcaaacgcataagacaaaggccatacatctagtcatcaggcacctcctcagaacctatttgctcttc

SEQ ID NO: 16385 - DNA, 122 bp, Homo sapiens
  misc_feature (61)..(62): /note="This region represents a CpG dinucleotide"
  misc_feature (61)..(61): /note="Nucleotide may be methylated to form 5-methylcytosine"
cacacgtgcacacacacacgtgcacacacacacgtgtacacacacacgtgtacacacacacgtgtgttactgtacgtggagactgtacatcttaggtcacacaccacccctgaaccaatcct

SEQ ID NO: 16386 - DNA, 122 bp, Homo sapiens
  misc_feature (61)..(62): /note="This region represents a CpG dinucleotide"
  misc_feature (61)..(61): /note="Nucleotide may be methylated to form 5-methylcytosine"
ctctgtagtaggtgggtgacctggcacttctctgctgaatcagaggatgctgcatgctcacgtttcctgtgggctgagtgaatacatgaagctctatcatgcatacttcttattcatgcaac

SEQ ID NO: 16387 - DNA, 122 bp, Homo sapiens
  misc_feature (61)..(62): /note="This region represents a CpG dinucleotide"
  misc_feature (61)..(61): /note="Nucleotide may be methylated to form 5-methylcytosine"
tcaaaaaacaaacaaaaaataggttgttacttaactatggatcccagagaactattagaccgttcctgatgcaaatccacctcatccaacagctttttcttgacttttcttccagcagcttg

SEQ ID NO: 16388 - DNA, 122 bp, Homo sapiens
  misc_feature (61)..(62): /note="This region represents a CpG dinucleotide"
  misc_feature (61)..(61): /note="Nucleotide may be methylated to form 5-methylcytosine"
agcagcactcattcaagtagcaacagctgaaaccagccttattgtgcccctcagtgactccgttaccagccagttggaggcctctcctcaaagagctgagcctgagctcctctttcaaattc

SEQ ID NO: 16389 - DNA, 122 bp, Homo sapiens
  misc_feature (61)..(62): /note="This region represents a CpG dinucleotide"
  misc_feature (61)..(61): /note="Nucleotide may be methylated to form 5-methylcytosine"
acctactttttatagcactctttgtaaaaacaaaacactggaaacacaaaagtccttcagcgtagaactggctgaataaatgatggaacattcaaaggggagcattttgcaattatagaaaa

SEQ ID NO: 16390 - DNA, 122 bp, Homo sapiens
  misc_feature (61)..(62): /note="This region represents a CpG dinucleotide"
  misc_feature (61)..(61): /note="Nucleotide may be methylated to form 5-methylcytosine"
acagcctggggcagacattcttgtttcttttgttcacttgtccattagcagtgctctaagcgcagagcccagcacacaggaagtgctcaagaaaaggattgttgaatgaatgaatgagcctc

SEQ ID NO: 16391 - DNA, 122 bp, Homo sapiens
  misc_feature (61)..(62): /note="This region represents a CpG dinucleotide"
  misc_feature (61)..(61): /note="Nucleotide may be methylated to form 5-methylcytosine"
ggctgaagaaggggcccacagcctccggtagcggccagctgcagatgtctgcaaaagcagcgcccacttgggcctgccgaccttgaagtcagacaggccagtgacactagtcagtcatcact

SEQ ID NO: 16392 - DNA, 122 bp, Homo sapiens
  misc_feature (61)..(62): /note="This region represents a CpG dinucleotide"
  misc_feature (61)..(61): /note="Nucleotide may be methylated to form 5-methylcytosine"
atgtctctgggtatgctgttgccatttgttgcagttcaccagatgctggcctgcctttgccggtttaggaagagattatagcttgaaccattgtctgaatgctgctttgacctagtaaatcc

SEQ ID NO: 16393 - DNA, 122 bp, Homo sapiens
  misc_feature (61)..(62): /note="This region represents a CpG dinucleotide"
  misc_feature (61)..(61): /note="Nucleotide may be methylated to form 5-methylcytosine"
cagatcatccattcataaattcagcccatttcaatttaagtgaatgactatgattcattccgagtacattgtgtaatagtctcaggatgtcccagagagctattaaatgttacttttcaaga

SEQ ID NO: 16394 - DNA, 122 bp, Homo sapiens
  misc_feature (61)..(62): /note="This region represents a CpG dinucleotide"
  misc_feature (61)..(61): /note="Nucleotide may be methylated to form 5-methylcytosine"
ttcctgcaccctccccttaagtggcttccagtaagctaccaaaccctggtggcgcctgcacgccccagggcaagccagcctgaccttctcctcagagcctgagtcagggctttccccatctc

SEQ ID NO: 16395 - DNA, 122 bp, Homo sapiens
  misc_feature (61)..(62): /note="This region represents a CpG dinucleotide"
  misc_feature (61)..(61): /note="Nucleotide may be methylated to form 5-methylcytosine"
caactagcagtgacggacacaaactcgatatataactgggaatcctgatgggcttcaaaccgcctggtttccaccacccccttcccttagggaagcctcctgggccacaccctaggccaccc

SEQ ID NO: 16396 - DNA, 122 bp, Homo sapiens
  misc_feature (61)..(62): /note="This region represents a CpG dinucleotide"
  misc_feature (61)..(61): /note="Nucleotide may be methylated to form 5-methylcytosine"
gtaacagggggttggtgcaggatggagccaggccacgcagcaaggctggcatgtagcatacgggaagcggagcttgcagtgagccgagattgcgccactgcagtccgcagtccggcctgggc

SEQ ID NO: 16397 - DNA, 122 bp, Homo sapiens
  misc_feature (61)..(62): /note="This region represents a CpG dinucleotide"
  misc_feature (61)..(61): /note="Nucleotide may be methylated to form 5-methylcytosine"
atttgaatcccaactccactactttgtgaagtaaggcgagttacccaatcaccttgcacacgtaatcacctcctcaaaatggttttgcaagaacaagtaagtgaaagcacctgatgcagaac

SEQ ID NO: 16398 - DNA, 122 bp, Homo sapiens
  misc_feature (61)..(62): /note="This region represents a CpG dinucleotide"
  misc_feature (61)..(61): /note="Nucleotide may be methylated to form 5-methylcytosine"
tttggttttctagttattgaggtcaacttcccccaagtcaaacattaagggaattataagcgctcttttgtgaatttgtttgctttagtgtggcacatatttggttagccctcttacttaaa

SEQ ID NO: 16399 - DNA, 122 bp, Homo sapiens
  misc_feature (61)..(62): /note="This region represents a CpG dinucleotide"
  misc_feature (61)..(61): /note="Nucleotide may be methylated to form 5-methylcytosine"
caaactagacacgggcatcaagggagactggcagacgtccatcctggtgccttcagcaggcgagcatctccagccgggaacaatgccagtgcctgagcctcaagataagagccctctgcctt

SEQ ID NO: 16400 - DNA, 122 bp, Homo sapiens
  misc_feature (61)..(62): /note="This region represents a CpG dinucleotide"
  misc_feature (61)..(61): /note="Nucleotide may be methylated to form 5-methylcytosine"
taactaaccacagcaactcacaccatgccatggaaggcactcaaaaattttatgttgaagcgataagtggatggcaaaggcaccccaattttcaggattgatttcctccaactgtaattagt

SEQ ID NO: 16401 - DNA, 122 bp, Homo sapiens
  misc_feature (61)..(62): /note="This region represents a CpG dinucleotide"
  misc_feature (61)..(61): /note="Nucleotide may be methylated to form 5-methylcytosine"
gcttctctgcgggaagccctaaagaaatgagtgtcctgaagtgtagaacattcgcttttacggtaggtggtgttattgttacatgttcatacagacagtgctaattaacaatcctaaaggcc

SEQ ID NO: 16402 - DNA, 122 bp, Homo sapiens
  misc_feature (61)..(62): /note="This region represents a CpG dinucleotide"
  misc_feature (61)..(61): /note="Nucleotide may be methylated to form 5-methylcytosine"
attgttattcattttgtaaaatactagtctttattttcattttttgtaaaatttaaacatcgtatgcgcataaagaaaaaggaaacaagaattaggggaaaataacattttccaaataatta

SEQ ID NO: 16403 - DNA, 122 bp, Homo sapiens
  misc_feature (61)..(62): /note="This region represents a CpG dinucleotide"
  misc_feature (61)..(61): /note="Nucleotide may be methylated to form 5-methylcytosine"
agtccccactggctttgtcatatattcatatactggaagacagatgtcatgtccacccttcgtaagtcttttctaattaaacattccccaattcctaaaccattctcctaacagtaaatctg

SEQ ID NO: 16404 - DNA, 122 bp, Homo sapiens
  misc_feature (61)..(62): /note="This region represents a CpG dinucleotide"
  misc_feature (61)..(61): /note="Nucleotide may be methylated to form 5-methylcytosine"
tagccctgagctaccatacctggcctgttgaaactttcaaagttgcgatagatttatcagcgcagtgtttgttagaatgcttcgcaaatatttatttgttaaaatacaatgccaacctattt

SEQ ID NO: 16405 - DNA, 122 bp, Homo sapiens
  misc_feature (61)..(62): /note="This region represents a CpG dinucleotide"
  misc_feature (61)..(61): /note="Nucleotide may be methylated to form 5-methylcytosine"
cagacaccacatctatcttgattacatttgtgccatcagtgtctgcagcaggtcttcaaacgtctttgctgaagaaataagtgaagaaataaatggatagacattttgcaagaaggcaggac

SEQ ID NO: 16406 - DNA, 122 bp, Homo sapiens
  misc_feature (61)..(62): /note="This region represents a CpG dinucleotide"
  misc_feature (61)..(61): /note="Nucleotide may be methylated to form 5-methylcytosine"
gaaggtagtaatagtcatacctgattcatacagttcttgtgaggattaattgggatactacgcatgaattacttagaatcatgcctagcgtctagcgacatgggtgagctggcagtcaccgc

SEQ ID NO: 16407 - DNA, 122 bp, Homo sapiens
  misc_feature (61)..(62): /note="This region represents a CpG dinucleotide"
  misc_feature (61)..(61): /note="Nucleotide may be methylated to form 5-methylcytosine"
aatgcctcgttggagaaatgtacacatccaaaactaactgaaatctaaggaaaatcctagcgtatctgcctgacaagcttccaggaaagtgcttccagtcaaggcggagggcatggccggaa

SEQ ID NO: 16408 - DNA, 122 bp, Homo sapiens
  misc_feature (61)..(62): /note="This region represents a CpG dinucleotide"
  misc_feature (61)..(61): /note="Nucleotide may be methylated to form 5-methylcytosine"
ttcaacaaattcgagcgcctggcaggccctgcaccaagcctagggtgatggcgacccaggcgggtttttactctcaaggagctcaattctagggcagggagaagtaaaattaaaaaaaaaaa

SEQ ID NO: 16409 - DNA, 122 bp, Homo sapiens
  misc_feature (61)..(62): /note="This region represents a CpG dinucleotide"
  misc_feature (61)..(61): /note="Nucleotide may be methylated to form 5-methylcytosine"
agctttggcactaatcctagagaataaggaacttactcttaccttcattaagtaagcacacgtaaagtttatgtagctgagaattaaaccttgtaacttcatgttgtagttaaatctgtctc

SEQ ID NO: 16410 - DNA, 122 bp, Homo sapiens
  misc_feature (61)..(62): /note="This region represents a CpG dinucleotide"
  misc_feature (61)..(61): /note="Nucleotide may be methylated to form 5-methylcytosine"
gggaacaatgctctaattcctgtgagtcactcgttagaggagttcaaagaaaccaggtggcgggagggtgtctgggatttcaggtttcagggtgattcgctcattctgctctgattactaat

SEQ ID NO: 16411 - DNA, 122 bp, Homo sapiens
  misc_feature (61)..(62): /note="This region represents a CpG dinucleotide"
  misc_feature (61)..(61): /note="Nucleotide may be methylated to form 5-methylcytosine"
aacacatcaatcaaaactggaccagccaggagaaacagctataagagccggatggtgaggcggagcaagaaatccaagaagaaagaaagtctcgaaaggttagtaaaatcagtattcttttt

SEQ ID NO: 16412 - DNA, 122 bp, Homo sapiens
  misc_feature (61)..(62): /note="This region represents a CpG dinucleotide"
  misc_feature (61)..(61): /note="Nucleotide may be methylated to form 5-methylcytosine"
aggcttggctcagacaccccacatctttaggtgagtggcttttaaattgccatttggtcacgcctacttggcagagttgcaaacacgggctgcagagttcacacccgcaccctcctctctgg

SEQ ID NO: 16413 - DNA, 122 bp, Homo sapiens
  misc_feature (61)..(62): /note="This region represents a CpG dinucleotide"
  misc_feature (61)..(61): /note="Nucleotide may be methylated to form 5-methylcytosine"
aatggaaggtgcaagagctttagaacagccagacctgagtttcagatcttggactagctacgaataatttgtgactttgggtaaattacaattcttcttggaacctcaggttcttgagttaa

SEQ ID NO: 16414 - DNA, 122 bp, Homo sapiens
  misc_feature (61)..(62): /note="This region represents a CpG dinucleotide"
  misc_feature (61)..(61): /note="Nucleotide may be methylated to form 5-methylcytosine"
acatattggcttcattctagtccaatttgttttcttttatgcctacacaccaagggtgttcgcttgaaaacaagtcttccttcacctcctgctttttctcctcacctgctctttaaaaaata

SEQ ID NO: 16415 - DNA, 122 bp, Homo sapiens
  misc_feature (61)..(62): /note="This region represents a CpG dinucleotide"
  misc_feature (61)..(61): /note="Nucleotide may be methylated to form 5-methylcytosine"
aaaatgatacaacagaggactcactcagcacaactgaaacatgagatgaacctaagatagcgccagtcactgagaactcaatcagctaaaggaaatgaaaataaaattactagggaagctag

SEQ ID NO: 16416 - DNA, 122 bp, Homo sapiens
  misc_feature (61)..(62): /note="This region represents a CpG dinucleotide"
  misc_feature (61)..(61): /note="Nucleotide may be methylated to form 5-methylcytosine"
gtcgtttcctccgcaaatgcagcagtgcatgaaaggcccaggtgggaatgctggccaagacgccctcccgtggccccccacgcggcagcgcctctcatgccaccctccgaagagatgaacag

SEQ ID NO: 16417 - DNA, 122 bp, Homo sapiens
  misc_feature (61)..(62): /note="This region represents a CpG dinucleotide"
  misc_feature (61)..(61): /note="Nucleotide may be methylated to form 5-methylcytosine"
cagtgaagtggggagacaacaggcatctgaggccactgcagtgctgcttctgattatgaacgtttcaccatgttgtgaaggtgcagctgaatcaagccaggattaactggtcagcacctgga

SEQ ID NO: 16418 - DNA, 122 bp, Homo sapiens
  misc_feature (61)..(62): /note="This region represents a CpG dinucleotide"
  misc_feature (61)..(61): /note="Nucleotide may be methylated to form 5-methylcytosine"
aacagctgaggccagtcttggagcagaatttgcaggcttttgtagagatctacagccgtccgtctctgggtacttgactcaaattcatagatgacttgaaggaagtcttcatacttgccagg

SEQ ID NO: 16419 - DNA, 122 bp, Homo sapiens
  misc_feature (61)..(62): /note="This region represents a CpG dinucleotide"
  misc_feature (61)..(61): /note="Nucleotide may be methylated to form 5-methylcytosine"
aattctgttaaatgggacttttaatactctctcaagtcttgtttttattcctcctctctccgctgtaattcataacctcatcctctctaccctgaactatttatttattttgtgtgtgtgtg

SEQ ID NO: 16420 - DNA, 122 bp, Homo sapiens
  misc_feature (61)..(62): /note="This region represents a CpG dinucleotide"
  misc_feature (61)..(61): /note="Nucleotide may be methylated to form 5-methylcytosine"
tgagctaggcttggttgaggctgggcaacaggcctggtggcagcacatgtagctatttatcggttttgctctatgtgtaatgtctgaatgccaacagacacactcagctcttctagacatct

SEQ ID NO: 16421 - DNA, 122 bp, Homo sapiens
  misc_feature (61)..(62): /note="This region represents a CpG dinucleotide"
  misc_feature (61)..(61): /note="Nucleotide may be methylated to form 5-methylcytosine"
ctaccaagcttgcaagaccagttgaagctgactcaaaaatcctaacattcagctgattgccggcaggcttagagtcaggcatctgctgcttcggtgggggcccaacgcgcatgctgggcgcc

SEQ ID NO: 16422 - DNA, 122 bp, Homo sapiens
  misc_feature (61)..(62): /note="This region represents a CpG dinucleotide"
  misc_feature (61)..(61): /note="Nucleotide may be methylated to form 5-methylcytosine"
gccaggagaggtgtggctggctgtgtgaccctgggctggccacctttctgcaccaggcctcggtcctctcatctgcccaatgggaggctggcttctcctggggtcaggcacctaggcacccc

SEQ ID NO: 16423 - DNA, 122 bp, Homo sapiens
  misc_feature (61)..(62): /note="This region represents a CpG dinucleotide"
  misc_feature (61)..(61): /note="Nucleotide may be methylated to form 5-methylcytosine"
gggtgactctggaggacccctcaactgccccacagaggatggtggctggcaggtccatggcgtgaccagctttgtttctgcctttggctgcaacacccgcaggaagcccacggtgttcactc

SEQ ID NO: 16424 - DNA, 122 bp, Homo sapiens
  misc_feature (61)..(62): /note="This region represents a CpG dinucleotide"
  misc_feature (61)..(61): /note="Nucleotide may be methylated to form 5-methylcytosine"
ttatctacggtttattatgaaatcaggaagtgaatcatgttttgtttgttattcctcttccgagtactatttgctgcagaaccaagtcattgcttaggattgatttcgctggtcttgtagag

SEQ ID NO: 16425 - DNA, 122 bp, Homo sapiens
  misc_feature (61)..(62): /note="This region represents a CpG dinucleotide"
  misc_feature (61)..(61): /note="Nucleotide may be methylated to form 5-methylcytosine"
ttctccccaactctgaggttgatcagtggccacaagctcctgaaggccttgccttgccaccggcatcctgctgcccctgccacctgcctctagcctctccagaggcggaccacagctgccca

SEQ ID NO: 16426 - DNA, 122 bp, Homo sapiens
  misc_feature (61)..(62): /note="This region represents a CpG dinucleotide"
  misc_feature (61)..(61): /note="Nucleotide may be methylated to form 5-methylcytosine"
gaacctcacctcataatacactccatggccatggtgagtcagaacaccactgcagcttggcgctagtgagcttaatgatacaggtccatatcactacttttgtaaaataagaagtacatttc

SEQ ID NO: 16427 - DNA, 122 bp, Homo sapiens
  misc_feature (61)..(62): /note="This region represents a CpG dinucleotide"
  misc_feature (61)..(61): /note="Nucleotide may be methylated to form 5-methylcytosine"
gaggacctgtgtaaagtacttcctacagggtgatgctgctgaacaaccactctgctttggcgtctcctttggctgagctacagagcagagtttccctggctgaggatggtagtcccatctcc

SEQ ID NO: 16428 - DNA, 122 bp, Homo sapiens
  misc_feature (61)..(62): /note="This region represents a CpG dinucleotide"
  misc_feature (61)..(61): /note="Nucleotide may be methylated to form 5-methylcytosine"
tctgaggaatgcaagcccctctaaattatcaggcccagagaggcatttaaaatgtaaaagcggttatgtctcactttccctgtgcttaatagttacctctggaagccacttgctttgcaggc

SEQ ID NO: 16429 - DNA, 122 bp, Homo sapiens
  misc_feature (61)..(62): /note="This region represents a CpG dinucleotide"
  misc_feature (61)..(61): /note="Nucleotide may be methylated to form 5-methylcytosine"
cctccttccggccagtcagaagtcagtggtgaggcacgccccagtttctctggtcaaagacgtaattcttagttcatgatgggtagctccagtaaattaaaaagaataaaaagaagatactg

SEQ ID NO: 16430 - DNA, 122 bp, Homo sapiens
  misc_feature (61)..(62): /note="This region represents a CpG dinucleotide"
  misc_feature (61)..(61): /note="Nucleotide may be methylated to form 5-methylcytosine"
tgacttaaaagggaaactggaatgttcagactttatgcagtctcaggagaaacgagcatgcgtacttccatgtgggaatgaaaccttgcggcatagtctatactgaatgtatgatgcattta

SEQ ID NO: 16431 - DNA, 122 bp, Homo sapiens
  misc_feature (61)..(62): /note="This region represents a CpG dinucleotide"
  misc_feature (61)..(61): /note="Nucleotide may be methylated to form 5-methylcytosine"
ttaaaaaattccaaactcatgggtcatgatttgaagaaaatttcccttcctcctgcctggcgcacagaaggtaacgtcaaaagctgggaaagggaacagggcagcagcagacattgaccttt

SEQ ID NO: 16432 - DNA, 122 bp, Homo sapiens
  misc_feature (61)..(62): /note="This region represents a CpG dinucleotide"
  misc_feature (61)..(61): /note="Nucleotide may be methylated to form 5-methylcytosine"
agagagagagtgggtaagaggaatagaccaaaacttgaactatgagaaagagaagtaagacggtagggaagactgtagttcagaatctgtaagttataactgacttctcacagcctggcaaa

SEQ ID NO: 16433 - DNA, 122 bp, Homo sapiens
  misc_feature (61)..(62): /note="This region represents a CpG dinucleotide"
  misc_feature (61)..(61): /note="Nucleotide may be methylated to form 5-methylcytosine"
ttccctttgtggcctaggtgcagtggaggcttgcctcttgcatcagctgagacgccgtgccgctggcttcctgcgcagtgacaagatggcagccctgttcaccaaggtggggaagacgtgcc

SEQ ID NO: 16434 - DNA, 122 bp, Homo sapiens
  misc_feature (61)..(62): /note="This region represents a CpG dinucleotide"
  misc_feature (61)..(61): /note="Nucleotide may be methylated to form 5-methylcytosine"
tatctaataccttcctttatagcaaaaggccattcagaattacacattgcacttagttgtcgtatctcagtttgaaatagttccttgtcttcctttgatttttataaccttgactttttaaa

SEQ ID NO: 16435 - DNA, 122 bp, Homo sapiens
  misc_feature (61)..(62): /note="This region represents a CpG dinucleotide"
  misc_feature (61)..(61): /note="Nucleotide may be methylated to form 5-methylcytosine"
ccacccttaaaatcttctgcataaagtcagtactggataaaatagtcatattctttcccccgtcaaaccccagtaagtacttagtcatattactagggaaacatttaccatagtctttcaaa

SEQ ID NO: 16436 - DNA, 122 bp, Homo sapiens
  misc_feature (61)..(62): /note="This region represents a CpG dinucleotide"
  misc_feature (61)..(61): /note="Nucleotide may be methylated to form 5-methylcytosine"
tcccttcacaattacttcttatttctactctcctcaacttgtttcaggtctgtattacctcgtaactacatgattaagtagaattttcacctctgcagtgaggtagagagtcaggttatact

SEQ ID NO: 16437 - DNA, 122 bp, Homo sapiens
  misc_feature (61)..(62): /note="This region represents a CpG dinucleotide"
  misc_feature (61)..(61): /note="Nucleotide may be methylated to form 5-methylcytosine"
ttccggtgcaactggattcaggaactcaaacaatgtcatcagaaatctgtctatctctatcgcttggatctgatttccttgtgtttgctcaaatctcaagcaggtaaatatgccacagcagc

SEQ ID NO: 16438 - DNA, 122 bp, Homo sapiens
  misc_feature (61)..(62): /note="This region represents a CpG dinucleotide"
  misc_feature (61)..(61): /note="Nucleotide may be methylated to form 5-methylcytosine"
atgttgggtctctgagcctctgtttacttaggcaggagttcctgggtgcccagactgcatcgtgtctgtcttctctccgcagatgagcggggctgacaccgttggggatgatgacgaagcct

SEQ ID NO: 16439 - DNA, 122 bp, Homo sapiens
  misc_feature (61)..(62): /note="This region represents a CpG dinucleotide"
  misc_feature (61)..(61): /note="Nucleotide may be methylated to form 5-methylcytosine"
tttcattcagccagatttacccagagttcagaacaggcatccttgtacatagccatacagcgtttgtttctgacttcagtggtggagaaagtgctactttgcaagatagttgacttccttgt

SEQ ID NO: 16440 - DNA, 122 bp, Homo sapiens
  misc_feature (61)..(62): /note="This region represents a CpG dinucleotide"
  misc_feature (61)..(61): /note="Nucleotide may be methylated to form 5-methylcytosine"
gtgggggttgggcagagaaggccaaggacagacttgaattcacactttataaatctggcacggtatatgtgaactgcttcatgaactggctgatatcaggcaaataagaaagttaaagcaaa

SEQ ID NO: 16441 - DNA, 122 bp, Homo sapiens
  misc_feature (61)..(62): /note="This region represents a CpG dinucleotide"
  misc_feature (61)..(61): /note="Nucleotide may be methylated to form 5-methylcytosine"
cacagagattgggagatacagaactgacgcatcagaaatgtggtgatgcaggaccatgggcgtgagttaccaaagcccatggccatcagcaggaactgtgaccggccaaacaaagacaaatg

SEQ ID NO: 16442 - DNA, 122 bp, Homo sapiens
  misc_feature (61)..(62): /note="This region represents a CpG dinucleotide"
  misc_feature (61)..(61): /note="Nucleotide may be methylated to form 5-methylcytosine"
taaactcctgatcttaggtaatctgcccgcctcggcctcccaaagtgctgggattacaggcgttaagccaccacgcctggccggttatataagcttttaactttatgtaaaataacattaat

SEQ ID NO: 16443 - DNA, 122 bp, Homo sapiens
  misc_feature (61)..(62): /note="This region represents a CpG dinucleotide"
  misc_feature (61)..(61): /note="Nucleotide may be methylated to form 5-methylcytosine"
aaatagagaatttctgtcttgcaaaaattagtgtatgaaggtcacaaaggcttcctcatacggttcacagcacacagaacagtctttttataaaggatgtggggttgcagaaacaggaaatg

SEQ ID NO: 16444 - DNA, 122 bp, Homo sapiens
  misc_feature (61)..(62): /note="This region represents a CpG dinucleotide"
  misc_feature (61)..(61): /note="Nucleotide may be methylated to form 5-methylcytosine"
aacttacgcacagctcgagggaagtttcctgtcttaacacgccgagggctgagtgaggagcgcagccgtctacccagcaacctctgcacgtggcttttgaaagacatgagttatgaatgatt

SEQ ID NO: 16445 - DNA, 122 bp, Homo sapiens
  misc_feature (61)..(62): /note="This region represents a CpG dinucleotide"
  misc_feature (61)..(61): /note="Nucleotide may be methylated to form 5-methylcytosine"
gctggagctggccaagcccctcctctcctcctcctgcttccccctccatccaggctccaccgggaacctgtcccagacgcctaccccgcctgagccagaggaagggaggaaaacaatagcaa

SEQ ID NO: 16446 - DNA, 122 bp, Homo sapiens
  misc_feature (61)..(62): /note="This region represents a CpG dinucleotide"
  misc_feature (61)..(61): /note="Nucleotide may be methylated to form 5-methylcytosine"
aacatgggatttgggcggggacaaatatccaactctatcatttacttgactacaacaaagcgtgttgaggattagcagccagctctgacacataggaactagggtcccctgtttgcttctga

SEQ ID NO: 16447 - DNA, 122 bp, Homo sapiens
  misc_feature (61)..(62): /note="This region represents a CpG dinucleotide"
  misc_feature (61)..(61): /note="Nucleotide may be methylated to form 5-methylcytosine"
tcaccaccagccctgccttcctcccccaaagatacccagaccctgtcccacctctcacagcggtgctctgtaagaacccagggtagcctttgctcaaaccggagcccttccttttttccatg

SEQ ID NO: 16448 - DNA, 122 bp, Homo sapiens
  misc_feature (61)..(62): /note="This region represents a CpG dinucleotide"
  misc_feature (61)..(61): /note="Nucleotide may be methylated to form 5-methylcytosine"
cttagtctcctagagtcttgtgcagtgacagtgcccaggcagaaaggcgcccagaggaagcgtgtgtttattggatcagtcagacacatctaaggagcatgtggtttatgccatgtgctgtg

SEQ ID NO: 16449 - DNA, 122 bp, Homo sapiens
  misc_feature (61)..(62): /note="This region represents a CpG dinucleotide"
  misc_feature (61)..(61): /note="Nucleotide may be methylated to form 5-methylcytosine"
gcaaaaagagagcaattgatgaaacttctgcttaggctttccaatgctgcagggctcttccggggccctcttttttaaaggaagacttcacattgaggtgaaaggcatttatctgtgagcag

SEQ ID NO: 16450 - DNA, 122 bp, Homo sapiens
  misc_feature (61)..(62): /note="This region represents a CpG dinucleotide"
  misc_feature (61)..(61): /note="Nucleotide may be methylated to form 5-methylcytosine"
ccagtcagcctacagcacgatgcaccgatgcgtccagtcagcagatgtgtgtcaccatgacgcaggctgaggctggttaaacagtaacagagctcagtgacctaatgctcacactcagccct

SEQ ID NO: 16451 - DNA, 122 bp, Homo sapiens
  misc_feature (61)..(62): /note="This region represents a CpG dinucleotide"
  misc_feature (61)..(61): /note="Nucleotide may be methylated to form 5-methylcytosine"
gtggcttaatagaaggcaaatgaagagagcattccaagcacagaaggaagtggtaaacagcgtcaaatgttgagagctcaagtcagataagaaatgagaactgtttattagatgtagcaata

SEQ ID NO: 16452 - DNA, 122 bp, Homo sapiens
  misc_feature (61)..(62): /note="This region represents a CpG dinucleotide"
  misc_feature (61)..(61): /note="Nucleotide may be methylated to form 5-methylcytosine"
aagaaattacagcttttctttaaaatcagaaatacagaaatactcaggctttgtcagctacgaaagggtgacaaggcaagtgatttaagatgggggaaaaaccacctctcctccactaaatc

SEQ ID NO: 16453 - DNA, 122 bp, Homo sapiens
  misc_feature (61)..(62): /note="This region represents a CpG dinucleotide"
  misc_feature (61)..(61): /note="Nucleotide may be methylated to form 5-methylcytosine"
gctgtcaccaaatcctgttatctgtctggatagaaaagtgctcaacaaaaacactgatagcgtaggagatagagaattgaattaaggccaaagaaacctttcagtgaatggcagattgaaga

SEQ ID NO: 16454 - DNA, 122 bp, Homo sapiens
  misc_feature (61)..(62): /note="This region represents a CpG dinucleotide"
  misc_feature (61)..(61): /note="Nucleotide may be methylated to form 5-methylcytosine"
tgaccttgagctttctttctggtactgcacacataaatggaaaaaaatgagaattgtgtacgtgtgggctggggccagccatcccaatctggcatgagaagcatgtgcaaacgactatggga

SEQ ID NO: 16455 - DNA, 122 bp, Homo sapiens
  misc_feature (61)..(62): /note="This region represents a CpG dinucleotide"
  misc_feature (61)..(61): /note="Nucleotide may be methylated to form 5-methylcytosine"
cagaagacttgatggatttttgatagctggataaacgagtctctgcctcttcaaaggacacgctgccaaagcttactgcagtgtttttctgtcgttggaggaaaactctagaaagaatgcaa

SEQ ID NO: 16456 - DNA, 122 bp, Homo sapiens
  misc_feature (61)..(62): /note="This region represents a CpG dinucleotide"
  misc_feature (61)..(61): /note="Nucleotide may be methylated to form 5-methylcytosine"
gccttactaggtttcctgactcagtctgttagtattatatcatatccttttttgcctaatcgtatttctacctggttatcttcaatcatgtctatccaatggagtcttgctaagagacccaa

SEQ ID NO: 16457 - DNA, 122 bp, Homo sapiens
  misc_feature (61)..(62): /note="This region represents a CpG dinucleotide"
  misc_feature (61)..(61): /note="Nucleotide may be methylated to form 5-methylcytosine"
tttccattatttcaaatgattaacatagtatctcatttcaatcactcaaattaccttttccgtaaaagctgcatcctgtatatttatggcttgttttggttttaataatccagttatgtaca

SEQ ID NO: 16458 - DNA, 122 bp, Homo sapiens
  misc_feature (61)..(62): /note="This region represents a CpG dinucleotide"
  misc_feature (61)..(61): /note="Nucleotide may be methylated to form 5-methylcytosine"
atttcttcagaagtacagctttgcctaccattcacattaggtgatcagaaccaccatgtacgtgttttctgccatcccagaagtgagaatagtgaatagagaggaagacagagttgatcaga

SEQ ID NO: 16459 - DNA, 122 bp, Homo sapiens
  misc_feature (61)..(62): /note="This region represents a CpG dinucleotide"
  misc_feature (61)..(61): /note="Nucleotide may be methylated to form 5-methylcytosine"
actgttgtcattattttcattttaaaactaagaacatgaaggcccagagagtttaagcagcgtgcccaaggccacacagcaagtcctagtggcatgagtcactgggacttgactcagacagc

SEQ ID NO: 16460 - DNA, 122 bp, Homo sapiens
  misc_feature (61)..(62): /note="This region represents a CpG dinucleotide"
  misc_feature (61)..(61): /note="Nucleotide may be methylated to form 5-methylcytosine"
cagcattttcttctaagtgtcccaactcttggttttccattacacagacagagtgcaagacgatgacttgcaaaatgtcgcagctggaacgcaacatagagaccatcatcaacaccttccac

SEQ ID NO: 16461 - DNA, 122 bp, Homo sapiens
  misc_feature (61)..(62): /note="This region represents a CpG dinucleotide"
  misc_feature (61)..(61): /note="Nucleotide may be methylated to form 5-methylcytosine"
cccaggctgtcaggaagcctgcagggagggccccaggccactcacctcctcttgcagggccgagagctcaggccacatccagcttggcctttgcacaagctggtctgccagtctggcagctg

SEQ ID NO: 16462 - DNA, 122 bp, Homo sapiens
  misc_feature (61)..(62): /note="This region represents a CpG dinucleotide"
  misc_feature (61)..(61): /note="Nucleotide may be methylated to form 5-methylcytosine"
aggaacaaggaaatgatgtcttctggttatgaattaagttgacataacagtgctacacctcgtccaatccagtgttccttgggttggtcagagggaagagtcatggcaatcacaaaattcgt

SEQ ID NO: 16463 - DNA, 122 bp, Homo sapiens
  misc_feature (61)..(62): /note="This region represents a CpG dinucleotide"
  misc_feature (61)..(61): /note="Nucleotide may be methylated to form 5-methylcytosine"
atttttccttgggaatctcccctttcctagtcacacccgtccatacaggtagacaactgtcgacccatgaaaaggaaacacactcctctttgttctccctgaccttagctgtcctcaggata

SEQ ID NO: 16464 - DNA, 122 bp, Homo sapiens
  misc_feature (61)..(62): /note="This region represents a CpG dinucleotide"
  misc_feature (61)..(61): /note="Nucleotide may be methylated to form 5-methylcytosine"
gaggcagagagggaaaagttccatgttgatcccaggggacaattccttaccttccttgttcgcctgatagtcaagtgagaaatggcttgcatgacaagatactgcatggaaaaagcctgggc

SEQ ID NO: 16465 - DNA, 122 bp, Homo sapiens
  misc_feature (61)..(62): /note="This region represents a CpG dinucleotide"
  misc_feature (61)..(61): /note="Nucleotide may be methylated to form 5-methylcytosine"
atcccctgccaaggtattatagggcaaaggacacaataaccagttctgcaggaaggtgagcgaagccttccactaagtaacatttgggctgggtattgaaagatgtgtaggagttcaccaag

SEQ ID NO: 16466 - DNA, 122 bp, Homo sapiens
  misc_feature (61)..(62): /note="This region represents a CpG dinucleotide"
  misc_feature (61)..(61): /note="Nucleotide may be methylated to form 5-methylcytosine"
gggccccagaggtacggccccgccccacccgcacacctcccatgttgcatctgtggcaggcgaggctgcgccgcggggcccctctattggtgtctgctgaaatcatttgagacaaagttaca

SEQ ID NO: 16467 - DNA, 122 bp, Homo sapiens
  misc_feature (61)..(62): /note="This region represents a CpG dinucleotide"
  misc_feature (61)..(61): /note="Nucleotide may be methylated to form 5-methylcytosine"
ggcctcccaaagtgctgggattacaggggtgagccaccgcgccctgccgaggagcttaagcgatcagttagtcaaagggagaaaagagggtatcagtagatgacagaaaaattttttagaga

SEQ ID NO: 16468 - DNA, 122 bp, Homo sapiens
  misc_feature (61)..(62): /note="This region represents a CpG dinucleotide"
  misc_feature (61)..(61): /note="Nucleotide may be methylated to form 5-methylcytosine"
catttcaaagcccttgaatggcagctcaaaagtctccatctctttcagaataaaagccagcgtgcaaacgctctagtgtttctttgatcctacctttatctcccactctgtttcagccacac

SEQ ID NO: 16469 - DNA, 122 bp, Homo sapiens
  misc_feature (61)..(62): /note="This region represents a CpG dinucleotide"
  misc_feature (61)..(61): /note="Nucleotide may be methylated to form 5-methylcytosine"
tagctaatgtgaaacagagcacaggacttgtctaacaaggaatttgcatattctcatccacgtagcctggtgtaggttctgcctggggccatgggtaatgaatgcctgcacagcctctccag

SEQ ID NO: 16470 - DNA, 122 bp, Homo sapiens
  misc_feature (61)..(62): /note="This region represents a CpG dinucleotide"
  misc_feature (61)..(61): /note="Nucleotide may be methylated to form 5-methylcytosine"
tagagaaagaaggccatattcaagagatgcttttaaggcagatggaatagacagtgatatcgataggatataagtagtgaggaggaaaaaagaattaaggataacacccagatttttagctt

SEQ ID NO: 16471 - DNA, 122 bp, Homo sapiens
  misc_feature (61)..(62): /note="This region represents a CpG dinucleotide"
  misc_feature (61)..(61): /note="Nucleotide may be methylated to form 5-methylcytosine"
cttctggggcttgagtcataatgaaaagctcactgtcttctttgccgctcttggtggcctcgtggcttctctaattccctggccttagcatggaagcctctttatcattctgctctgtatga

SEQ ID NO: 16472 - DNA, 122 bp, Homo sapiens
  misc_feature (61)..(62): /note="This region represents a CpG dinucleotide"
  misc_feature (61)..(61): /note="Nucleotide may be methylated to form 5-methylcytosine"
tttttttttttactgcatttttctcccttcagaatgtgagctcagctagggcagggaccacgtctatctcatccatcactgtttctccaccatgtagaacaatgcccagtgcatattggtac

SEQ ID NO: 16473 - DNA, 122 bp, Homo sapiens
  misc_feature (61)..(62): /note="This region represents a CpG dinucleotide"
  misc_feature (61)..(61): /note="Nucleotide may be methylated to form 5-methylcytosine"
tcaaaacgtatttcctgtccacatgagtatgtgaaaccaaacttaatagccagacatagccgcaagaccagctcactatttccattttatccctcattttgttttcttcccctgaccctgag

SEQ ID NO: 16474 - DNA, 122 bp, Homo sapiens
  misc_feature (61)..(62): /note="This region represents a CpG dinucleotide"
  misc_feature (61)..(61): /note="Nucleotide may be methylated to form 5-methylcytosine"
tggtaccaggagctgtcaggaggcgggaatgcagagaatgtggctcactgtgctcccgcccgcccaggctgaatccgcagagaggtttggaaggtgaatgacacaatgtttgtcaagggttt

SEQ ID NO: 16475 - DNA, 122 bp, Homo sapiens
  misc_feature (61)..(62): /note="This region represents a CpG dinucleotide"
  misc_feature (61)..(61): /note="Nucleotide may be methylated to form 5-methylcytosine"
tctcttccaggttctcgcttatgtaaattctaattcacagtgccctggccccacatgtctcgtaaaccaggcctgatattgtaaaccttcgccattcacagagggttttagctttgcctttg

SEQ ID NO: 16476 - DNA, 122 bp, Homo sapiens
  misc_feature (61)..(62): /note="This region represents a CpG dinucleotide"
  misc_feature (61)..(61): /note="Nucleotide may be methylated to form 5-methylcytosine"
agggtacagggacactcaaagagtgatttgcttctctcagctcttgcattggcaggagctcggaaggacaacctctgagttcctcctcccaaaactagagtccttgaatctgacaacttgac

SEQ ID NO: 16477 - DNA, 122 bp, Homo sapiens
  misc_feature (61)..(62): /note="This region represents a CpG dinucleotide"
  misc_feature (61)..(61): /note="Nucleotide may be methylated to form 5-methylcytosine"
ttcaaatcaaagaactcgtctgcgggagtgtctggattttgtgagttttgtgcctgtggccgagtggaagcggagaggagtgagagcgctgggcgacgcggccagccaaggcgaggccggtc

SEQ ID NO: 16478 - DNA, 122 bp, Homo sapiens
  misc_feature (61)..(62): /note="This region represents a CpG dinucleotide"
  misc_feature (61)..(61): /note="Nucleotide may be methylated to form 5-methylcytosine"
actcagttgatgtatgaagggcagttgccttggaaagtcaatccacctgcattggacttacgagagcaggaaacaaacgcctgttattttaagccattgagatattgggattgtcttttctg

SEQ ID NO: 16479 - DNA, 122 bp, Homo sapiens
  misc_feature (61)..(62): /note="This region represents a CpG dinucleotide"
  misc_feature (61)..(61): /note="Nucleotide may be methylated to form 5-methylcytosine"
agaaaacatcatccttttatctgatcctgtgcaaaatgagtggagcagacactgtaccagcgataagatgattgctaaatgactcttctcacattctatcgatgggctgatgaaagaaatta

SEQ ID NO: 16480 - DNA, 122 bp, Homo sapiens
  misc_feature (61)..(62): /note="This region represents a CpG dinucleotide"
  misc_feature (61)..(61): /note="Nucleotide may be methylated to form 5-methylcytosine"
ggggagaagttaccactcttgaagcaaccagctttcacctgaactaatagagtgagaatgcgttacctcagcacaagtcattcatgagggagccgcccccatgactcaaatgtttcccatta

SEQ ID NO: 16481 - DNA, 122 bp, Homo sapiens
  misc_feature (61)..(62): /note="This region represents a CpG dinucleotide"
  misc_feature (61)..(61): /note="Nucleotide may be methylated to form 5-methylcytosine"
aaagcctgcttaggtagcattttcatgaaccagtaatacccaccactttatcccctatagcgtttcccgccacagctccgctccagctgatatccctttatatttcctccccatttcccttg

SEQ ID NO: 16482 - DNA, 122 bp, Homo sapiens
  misc_feature (61)..(62): /note="This region represents a CpG dinucleotide"
  misc_feature (61)..(61): /note="Nucleotide may be methylated to form 5-methylcytosine"
cagtctctggaaattctgctcactttgtgggtcccgtcctcgccctttccagctgcactgcgcaggctatttatgattcatggcatgatgtcactaaaatggacagtgctcctcactgagcc

SEQ ID NO: 16483 - DNA, 122 bp, Homo sapiens
  misc_feature (61)..(62): /note="This region represents a CpG dinucleotide"
  misc_feature (61)..(61): /note="Nucleotide may be methylated to form 5-methylcytosine"
ttaccccacccaaacctgacagtcatgcagccttgggcttggctctaacctgtcaactggcggtgtgaccttgagcaagtcctggcctctcagcagcctctgtaaaaatgaggttgttgcat

SEQ ID NO: 16484 - DNA, 122 bp, Homo sapiens
  misc_feature (61)..(62): /note="This region represents a CpG dinucleotide"
  misc_feature (61)..(61): /note="Nucleotide may be methylated to form 5-methylcytosine"
ctaatgtcaagggcagtgttttgctttctcattgtaacccccaggagtgattaagatcttcgtttagaatctgcaggattggccgggcgtggtggctcatgcctgtaattccagtactttgg

SEQ ID NO: 16485 - DNA, 122 bp, Homo sapiens
  misc_feature (61)..(62): /note="This region represents a CpG dinucleotide"
  misc_feature (61)..(61): /note="Nucleotide may be methylated to form 5-methylcytosine"
ccggcactgtaccttgaatttacaagccaagaaaaagactcagactgaaaagaagaccttcggtatcatcttcctgaaatacatcagactctacaaatgagttagaagacccagatccaatt

SEQ ID NO: 16486 - DNA, 122 bp, Homo sapiens
  misc_feature (61)..(62): /note="This region represents a CpG dinucleotide"
  misc_feature (61)..(61): /note="Nucleotide may be methylated to form 5-methylcytosine"
cctaaagaagttgtttccgtgccctggggcacgggcatccagggacaacatattacaaggcggtctgttggggtgtggaagacactagaacctttatctgtatttaacccatccatttctaa

SEQ ID NO: 16487 - DNA, 122 bp, Homo sapiens
  misc_feature (61)..(62): /note="This region represents a CpG dinucleotide"
  misc_feature (61)..(61): /note="Nucleotide may be methylated to form 5-methylcytosine"
ccagtaacaggcagaccaaatatactttgaaggtcacggaagggttctctgtggaaatgacgttgagactgaatcctggagaatgggtcagatttagctaggtaaacagtagttgcctaaga

SEQ ID NO: 16488 - DNA, 122 bp, Homo sapiens
  misc_feature (61)..(62): /note="This region represents a CpG dinucleotide"
  misc_feature (61)..(61): /note="Nucleotide may be methylated to form 5-methylcytosine"
gtgtccctgtcataccctagcacttgcacaggggctggcccatgtgggtctcagtgagcacgcaaatgacagaagacagagaagacaagagtacagaaacagatgagacctctagttccgga

SEQ ID NO: 16489 - DNA, 122 bp, Homo sapiens
  misc_feature (61)..(62): /note="This region represents a CpG dinucleotide"
  misc_feature (61)..(61): /note="Nucleotide may be methylated to form 5-methylcytosine"
ttctggtctcttcctcctgagcacggttctcctggttgagctccaggccatgccattcaacgccctccaggacaggccgaagggcttgtctgtttggtggttgctaaggtttgaaaaaagcc

SEQ ID NO: 16490 - DNA, 122 bp, Homo sapiens
  misc_feature (61)..(62): /note="This region represents a CpG dinucleotide"
  misc_feature (61)..(61): /note="Nucleotide may be methylated to form 5-methylcytosine"
tagggacgggatggcgtccacacagaagcaatgtgaacaatgccccctggagttgtacaacgtggggccttgttgagcagtactgtttcgcaacacatagtagcaagaatcctctttgtaag

SEQ ID NO: 16491 - DNA, 122 bp, Homo sapiens
  misc_feature (61)..(62): /note="This region represents a CpG dinucleotide"
  misc_feature (61)..(61): /note="Nucleotide may be methylated to form 5-methylcytosine"
agtctgcagtgagctatgattgcatcaccatacactagactgagcaacagtgtgagaccccgtctctaaacaaataaattaaatagttaaataaataaatgtaggacattgccatgagaaca

SEQ ID NO: 16492 - DNA, 122 bp, Homo sapiens
  misc_feature (61)..(62): /note="This region represents a CpG dinucleotide"
  misc_feature (61)..(61): /note="Nucleotide may be methylated to form 5-methylcytosine"
tgtgaaaggatcataccataaccaaaaaccatcacctggggatgcactcttcctatggaacgtgagtaattcccaagaattcatgtagaacaagaggcatagattaaagtcttggcaagact

SEQ ID NO: 16493 - DNA, 122 bp, Homo sapiens
  misc_feature (61)..(62): /note="This region represents a CpG dinucleotide"
  misc_feature (61)..(61): /note="Nucleotide may be methylated to form 5-methylcytosine"
gattctgttcagcagtgtacagaattggagccatagtagaaggaggtggagattggagagcgcctagctcagcacccttggcgactagttgtagccctgactccttggagtgatctgtatgt

SEQ ID NO: 16494 - DNA, 122 bp, Homo sapiens
  misc_feature (61)..(62): /note="This region represents a CpG dinucleotide"
  misc_feature (61)..(61): /note="Nucleotide may be methylated to form 5-methylcytosine"
cactctaatacagtgttgaatagaagtggtgagagtaagcacctctgtcgtgttcctgatcgtagaaggaattagttcagtcacttaccattaatcaagtatgatgttagctgtggggtttt

SEQ ID NO: 16495 - DNA, 122 bp, Homo sapiens
  misc_feature (61)..(62): /note="This region represents a CpG dinucleotide"
  misc_feature (61)..(61): /note="Nucleotide may be methylated to form 5-methylcytosine"
atatttttcaaatgagtgaatggtgactaagacacgcatttggaaccagacagacccaggcgtgaatactgttatgccaaccatgaccatgcagcctctctgtgactaatttcctcactggg

SEQ ID NO: 16496 - DNA, 122 bp, Homo sapiens
  misc_feature (61)..(62): /note="This region represents a CpG dinucleotide"
  misc_feature (61)..(61): /note="Nucleotide may be methylated to form 5-methylcytosine"
ctcaagtgatgtgcctgcctcagcctcccaaggtgcagggattacaggcgtgagccattgcgcccagcccaggcttagcatttttagtgcagtcaggtttgctgatgcagagagttgcgtaa

SEQ ID NO: 16497 - DNA, 122 bp, Homo sapiens
  misc_feature (61)..(62): /note="This region represents a CpG dinucleotide"
  misc_feature (61)..(61): /note="Nucleotide may be methylated to form 5-methylcytosine"
tagtagaggtggtgacaggaggatacctgaaaccttggttatataataaacttccttctacgacagtgagtcatttcagaatagaaatgatggaataattggaaatcaagttgaaggcttaa

SEQ ID NO: 16498 - DNA, 122 bp, Homo sapiens
  misc_feature (61)..(62): /note="This region represents a CpG dinucleotide"
  misc_feature (61)..(61): /note="Nucleotide may be methylated to form 5-methylcytosine"
cggtatctcttctacccagtctctctacctgactcttccattctctgttgctgcctttgacggttcatgtgactatgtgggggcacacccagataatccaggatcatcctcattttaaagcc

SEQ ID NO: 16499 - DNA, 122 bp, Homo sapiens
  misc_feature (61)..(62): /note="This region represents a CpG dinucleotide"
  misc_feature (61)..(61): /note="Nucleotide may be methylated to form 5-methylcytosine"
ttgataagcaaggggatgaaagtaccaagaggtgaaagcttataaaattgtggttatatgcgtggaatattaaggtttatgatttcagagatggagaaccattgcattataataagaaacct

SEQ ID NO: 16500 - DNA, 122 bp, Homo sapiens
  misc_feature (61)..(62): /note="This region represents a CpG dinucleotide"
  misc_feature (61)..(61): /note="Nucleotide may be methylated to form 5-methylcytosine"
ccatttaaatgatcatctttcattcttacaacaaccctacaaagtagtgattcttatgcccgtttaacaaatgaagaaacagagattaagtaacttgacaaaggttactcagctaataacct

SEQ ID NO: 16501 - DNA, 122 bp, Homo sapiens
  misc_feature (61)..(62): /note="This region represents a CpG dinucleotide"
  misc_feature (61)..(61): /note="Nucleotide may be methylated to form 5-methylcytosine"
atgccgggagatttatggaaaccccctctgatagctcaatctaattgcagctccctccagcgtgccaaatgctgctaatggacagccgctcctgccgctctgatgttgctagacctcctcag

SEQ ID NO: 16502 - DNA, 122 bp, Homo sapiens
  misc_feature (61)..(62): /note="This region represents a CpG dinucleotide"
  misc_feature (61)..(61): /note="Nucleotide may be methylated to form 5-methylcytosine"
caaaagaatgaggaaaccctttatgtgcaggtaactcatgacaatgagcaaggagcagaacgctaccatctgtgcaaaaaggaggttaaaaaagagaacacatccgtgtatttgcttgtata

SEQ ID NO: 16503 - DNA, 122 bp, Homo sapiens
  misc_feature (61)..(62): /note="This region represents a CpG dinucleotide"
  misc_feature (61)..(61): /note="Nucleotide may be methylated to form 5-methylcytosine"
ttctgctccatgtaagtcttccattttgagatctgcagccatcacaacaacaggcatgcacgtgtgctgtgtgtgtgcctatgtatataggtgtgagcatgcaggtgtgagcatgcaggtgt

SEQ ID NO: 16504 - DNA, 122 bp, Homo sapiens
  misc_feature (61)..(62): /note="This region represents a CpG dinucleotide"
  misc_feature (61)..(61): /note="Nucleotide may be methylated to form 5-methylcytosine"
aaggaaaaccagggtacggttatgaaagtaggtaaaaggcatggaggcagagccccagagcgcaggcagaaatgattcacctcaggttacaccagtagttgcagggtcaggctgtggacatc

SEQ ID NO: 16505 - DNA, 122 bp, Homo sapiens
  misc_feature (61)..(62): /note="This region represents a CpG dinucleotide"
  misc_feature (61)..(61): /note="Nucleotide may be methylated to form 5-methylcytosine"
tcacgccactgcactccagcctggaagacagagctagacctgggcgacagagggagactccgtttcaaaaaaaaaggcaatcagctttatcaggaaatcctaggggccagaagcggtggctc

SEQ ID NO: 16506 - DNA, 122 bp, Homo sapiens
  misc_feature (61)..(62): /note="This region represents a CpG dinucleotide"
  misc_feature (61)..(61): /note="Nucleotide may be methylated to form 5-methylcytosine"
agtcacggtccaggggacctctgcagggcgggggcctgggggctgggggggcgatggcctcgggcctgggtgaaaagggcaatgccaggcctgcccgggcagccaggagggccccaagcccc

SEQ ID NO: 16507 - DNA, 122 bp, Homo sapiens
  misc_feature (61)..(62): /note="This region represents a CpG dinucleotide"
  misc_feature (61)..(61): /note="Nucleotide may be methylated to form 5-methylcytosine"
actttttgtttttaaacttttcaggggtaaccactgtgaaacttggagtgtatttccttccgtctttttctatgcatctataaatagaccatagatttgtagagatacatttttatattcta

SEQ ID NO: 16508 - DNA, 122 bp, Homo sapiens
  misc_feature (61)..(62): /note="This region represents a CpG dinucleotide"
  misc_feature (61)..(61): /note="Nucleotide may be methylated to form 5-methylcytosine"
ccccaagcacagtcaggagcagatctttgccaggctctgtgactcactcacagcccaacacgggtcaagttcacagttcgtctgtgcactcagcacatgcaaaggtaaattattctttccta

SEQ ID NO: 16509 - DNA, 122 bp, Homo sapiens
  misc_feature (61)..(62): /note="This region represents a CpG dinucleotide"
  misc_feature (61)..(61): /note="Nucleotide may be methylated to form 5-methylcytosine"
gcggccggccccgcagcagcagagcgtgagcctgcaggggaggcacccggcgtcagtgtacgagcggcggcggaaccgtcgcgaaaacgcctcgcggaatctgagcaggtctaggttccagt

SEQ ID NO: 16510 - DNA, 122 bp, Homo sapiens
  misc_feature (61)..(62): /note="This region represents a CpG dinucleotide"
  misc_feature (61)..(61): /note="Nucleotide may be methylated to form 5-methylcytosine"
ggaacgattagagttttctgaaaaacagtgtgaattacaaccagctgctccctggctcagcgagtctcccatgctgtgccattttgttaagcctgataacaatagttattttgccccattga

SEQ ID NO: 16511 - DNA, 122 bp, Homo sapiens
  misc_feature (61)..(62): /note="This region represents a CpG dinucleotide"
  misc_feature (61)..(61): /note="Nucleotide may be methylated to form 5-methylcytosine"
gtaatgacaggcattggtggcagctcttcctcctctgtgtgaggtgctggaactgtgctgcggacacatctgtaggtcaggaatgtgatccaggggtccacttaccaagtcaccataaacct

SEQ ID NO: 16512 - DNA, 122 bp, Homo sapiens
  misc_feature (61)..(62): /note="This region represents a CpG dinucleotide"
  misc_feature (61)..(61): /note="Nucleotide may be methylated to form 5-methylcytosine"
cacaaagaaagacaagaaaaataaaacaggaatgacacttcccttaagcaacttacgttacgcaataaggcatatacaaaaccagttgcagtgtatagtgacgatgatgtacaatatcagag

SEQ ID NO: 16513 - DNA, 122 bp, Homo sapiens
  misc_feature (61)..(62): /note="This region represents a CpG dinucleotide"
  misc_feature (61)..(61): /note="Nucleotide may be methylated to form 5-methylcytosine"
cctggacggagagacagagacagacagcgggtcagcgggggcggggggagatgacagacacgttccagcagatcccaaagggtggcgggcatttgtcccgtgccgttttagaggctgagctc

SEQ ID NO: 16514 - DNA, 122 bp, Homo sapiens
  misc_feature (61)..(62): /note="This region represents a CpG dinucleotide"
  misc_feature (61)..(61): /note="Nucleotide may be methylated to form 5-methylcytosine"
tgtttttgcttcctcttcattcacttgaaaaaccaacttccttcagtaatattcattcaacgtcatttttgatgagattaatatttgccagacgctttcaaacaccaaggatacagtagtga

SEQ ID NO: 16515 - DNA, 122 bp, Homo sapiens
  misc_feature (61)..(62): /note="This region represents a CpG dinucleotide"
  misc_feature (61)..(61): /note="Nucleotide may be methylated to form 5-methylcytosine"
ataaataacaagtttattttgtcacagttctggaggctgggaagttcaagatcaaggctccgctaggctcagtgtttgacaagggctgctctctgcttccaaaatggagccttgttgctgtg

SEQ ID NO: 16516 - DNA, 122 bp, Homo sapiens
  misc_feature (61)..(62): /note="This region represents a CpG dinucleotide"
  misc_feature (61)..(61): /note="Nucleotide may be methylated to form 5-methylcytosine"
tgtctgcgtgcagagcaagagctggaggagcttaaccccttgcaagccctccgcagtcagcgctgcccaggaaaggactcagggaacaaactcctgacgtcctgggcttgggatcatctcag

SEQ ID NO: 16517 - DNA, 122 bp, Homo sapiens
  misc_feature (61)..(62): /note="This region represents a CpG dinucleotide"
  misc_feature (61)..(61): /note="Nucleotide may be methylated to form 5-methylcytosine"
accaaacaacaatgaagcagctcctcacttgagacttcaccaatagtaatttaaactatgcgttctcattaaactctaataccttaattctgttattgtattaacaagttatgagattctaa

SEQ ID NO: 16518 - DNA, 122 bp, Homo sapiens
  misc_feature (61)..(62): /note="This region represents a CpG dinucleotide"
  misc_feature (61)..(61): /note="Nucleotide may be methylated to form 5-methylcytosine"
ccacttggcagctatgtggccttgatatgttactgtacttctctgagcttctgtttcatccgtaaagagtgaggttgttgtgagaactaactgcaaacactcccatcagtgcctggcacaca

SEQ ID NO: 16519 - DNA, 122 bp, Homo sapiens
  misc_feature (61)..(62): /note="This region represents a CpG dinucleotide"
  misc_feature (61)..(61): /note="Nucleotide may be methylated to form 5-methylcytosine"
ctcaatctcctgaccttgtgatccacccacatcagcctcccaaagtgctgggattacaggcgtgaggcaccgcgcccagcccaaaggcagtttttcaaagggttccaagtaggactgtcttg

SEQ ID NO: 16520 - DNA, 122 bp, Homo sapiens
  misc_feature (61)..(62): /note="This region represents a CpG dinucleotide"
  misc_feature (61)..(61): /note="Nucleotide may be methylated to form 5-methylcytosine"
ctcccatcccacctcccaggcttctctccccttgacctctagacagcccgaacttccctgcggctgctgttcctggtgaacatcgtgacagatgacagcactagtcaggtgattaatcagct

SEQ ID NO: 16521 - DNA, 122 bp, Homo sapiens
  misc_feature (61)..(62): /note="This region represents a CpG dinucleotide"
  misc_feature (61)..(61): /note="Nucleotide may be methylated to form 5-methylcytosine"
agcctactccacagcttctccgcagccaggaaggttcctttctgcttgcttgcttttctacgcggccactgaaagcagctgtgacgatatgtaggtcatactaaccacaaatattaccaaga

SEQ ID NO: 16522 - DNA, 122 bp, Homo sapiens
  misc_feature (61)..(62): /note="This region represents a CpG dinucleotide"
  misc_feature (61)..(61): /note="Nucleotide may be methylated to form 5-methylcytosine"
cttatgtaactcatgtgctcctgagtaagtcagccacttgacctccaagaggctgagttccgtcactggaaaatgagagtgtttacaatacacttccttttcggcctcacaattaactctga

SEQ ID NO: 16523 - DNA, 122 bp, Homo sapiens
  misc_feature (61)..(62): /note="This region represents a CpG dinucleotide"
  misc_feature (61)..(61): /note="Nucleotide may be methylated to form 5-methylcytosine"
agccacagagccagaccacacaatgcacactggttggaatctgctgggcaggtatctccccgtctgtccaggcaagccaaatcaaataaggccctgagttaaaaaggaaggaaaagtaacag

SEQ ID NO: 16524 - DNA, 122 bp, Homo sapiens
  misc_feature (61)..(62): /note="This region represents a CpG dinucleotide"
  misc_feature (61)..(61): /note="Nucleotide may be methylated to form 5-methylcytosine"
aaggacaagttgctatgactagtcaacttttcatgggacaggccagcagaaagtcatcgccgctggctgcccaaggtacctcaaatgactcatgcaagtcctttagatctctgtgtatctct

SEQ ID NO: 16525 - DNA, 122 bp, Homo sapiens
  misc_feature (61)..(62): /note="This region represents a CpG dinucleotide"
  misc_feature (61)..(61): /note="Nucleotide may be methylated to form 5-methylcytosine"
actggtatgtatgcctgagcaattcttgcttcctttcaagagtatataatcttggccaggcgcggtggcttatgcctgtaatcacagcactgttggaggccaaggtggatggaccggatcac

SEQ ID NO: 16526 - DNA, 122 bp, Homo sapiens
  misc_feature (61)..(62): /note="This region represents a CpG dinucleotide"
  misc_feature (61)..(61): /note="Nucleotide may be methylated to form 5-methylcytosine"
gtggctgcccattgttgcatcataaaaccacgtgtcttcttgacctcttgactcaggagccgtgtaccagattcattccaaaccaagatacagaaaacctgagagaaaggaaatgaatttaa

SEQ ID NO: 16527 - DNA, 122 bp, Homo sapiens
  misc_feature (61)..(62): /note="This region represents a CpG dinucleotide"
  misc_feature (61)..(61): /note="Nucleotide may be methylated to form 5-methylcytosine"
gcccttgtgaagacctttctgactcaagtgactgtggctctgacaggagtatctttccttcgtctgctgaatcatctttcacttcacagccctgcactggggctgtggtgcccacacaatgg

SEQ ID NO: 16528 - DNA, 122 bp, Homo sapiens
  misc_feature (61)..(62): /note="This region represents a CpG dinucleotide"
  misc_feature (61)..(61): /note="Nucleotide may be methylated to form 5-methylcytosine"
gagagaatcacaattgcgatagtcatacttagtcttgatgtatcacctttcttctgagaacgtaaaaacatatcataagtggtaattaagcttcccaacacccactgggaaatggatattat

SEQ ID NO: 16529 - DNA, 122 bp, Homo sapiens
  misc_feature (61)..(62): /note="This region represents a CpG dinucleotide"
  misc_feature (61)..(61): /note="Nucleotide may be methylated to form 5-methylcytosine"
gagaggccattgaaaggtttcaagccagagaaatgatgtgagctggctgctgcattgaggcgtaaccacaggggattagggcagaaacaacacttaaaaggcttttgcagtaatccaagtga

SEQ ID NO: 16530 - DNA, 122 bp, Homo sapiens
  misc_feature (61)..(62): /note="This region represents a CpG dinucleotide"
  misc_feature (61)..(61): /note="Nucleotide may be methylated to form 5-methylcytosine"
aaggaccctttaaaataattctcttcctggtggtggtaaccactgtttcaactagtatgacgtaagacaataactatgacatcactgggttgctcctaggatcaggaatggggcgtggccca

SEQ ID NO: 16531 - DNA, 122 bp, Homo sapiens
  misc_feature (61)..(62): /note="This region represents a CpG dinucleotide"
  misc_feature (61)..(61): /note="Nucleotide may be methylated to form 5-methylcytosine"
aagtgaatcaccctgtccctgtatggcctctgagagatggtgctgctgctatgtgtctttcgaattgtatttgcagggttcatgggggttgaccttttcctctcaggaactgtatctgaaac

SEQ ID NO: 16532 - DNA, 122 bp, Homo sapiens
  misc_feature (61)..(62): /note="This region represents a CpG dinucleotide"
  misc_feature (61)..(61): /note="Nucleotide may be methylated to form 5-methylcytosine"
agcaaaataaagcttactgagcacaagctctgcaatgccaccacagttggatttgataaccgagatggctgctaagtgactcatgggtgggacagtattcagcatggatctgctggacaaag

SEQ ID NO: 16533 - DNA, 122 bp, Homo sapiens
  misc_feature (61)..(62): /note="This region represents a CpG dinucleotide"
  misc_feature (61)..(61): /note="Nucleotide may be methylated to form 5-methylcytosine"
aggccacaagatctgtgacttccccacttgctcctatagataacaccactgttgtagaaacgaatactgggtttgtagttgtttcagactgacctcacctggatttgtgactcataactcaa

SEQ ID NO: 16534 - DNA, 122 bp, Homo sapiens
  misc_feature (61)..(62): /note="This region represents a CpG dinucleotide"
  misc_feature (61)..(61): /note="Nucleotide may be methylated to form 5-methylcytosine"
agcccttctagaaactccaaggacgtattaaattcactcactaaaatattttgggcatagcgtagttgctgatcatctccatgattacttctttgaagtctttcctttgaacattttttaag

SEQ ID NO: 16535 - DNA, 122 bp, Homo sapiens
  misc_feature (61)..(62): /note="This region represents a CpG dinucleotide"
  misc_feature (61)..(61): /note="Nucleotide may be methylated to form 5-methylcytosine"
acctcaggtgatccacccacctcagcctcccaaagtgctgggattacaggtgtgagccatcgtgcccagccaagacagactttcaatacacaggaaatggtgagtcccttagaggtttctga

SEQ ID NO: 16536 - DNA, 122 bp, Homo sapiens
  misc_feature (61)..(62): /note="This region represents a CpG dinucleotide"
  misc_feature (61)..(61): /note="Nucleotide may be methylated to form 5-methylcytosine"
ggcttcgaggttgtggggtatgagtcagaggctgtgtcatggaggggcccccagattatgcgccccccccttctctctctttctctctgagtgtatctgctcataccaagaggagaggcatc

SEQ ID NO: 16537 - DNA, 122 bp, Homo sapiens
  misc_feature (61)..(62): /note="This region represents a CpG dinucleotide"
  misc_feature (61)..(61): /note="Nucleotide may be methylated to form 5-methylcytosine"
gctcaaaagttgctcacagttagtgggcacttactatgtgctgggcactggactaaaggtcgtggtctacgccatctcatgcggtcctcaggacaattctgtgaggtaggtgatctgcccat

SEQ ID NO: 16538 - DNA, 122 bp, Homo sapiens
  misc_feature (61)..(62): /note="This region represents a CpG dinucleotide"
  misc_feature (61)..(61): /note="Nucleotide may be methylated to form 5-methylcytosine"
attctgaacacaacaatatttaactatcttttccccaaaatactccagggattactcaaacgcaagggtaaggcatagaaaactacttttctgtttggtgaatggcatttccttggtcaaaa

SEQ ID NO: 16539 - DNA, 122 bp, Homo sapiens
  misc_feature (61)..(62): /note="This region represents a CpG dinucleotide"
  misc_feature (61)..(61): /note="Nucleotide may be methylated to form 5-methylcytosine"
ctttcactcagcataatcctgtcaacattattccatttgtgccatgtagcatcacttgatcgtattgttgagtaggattccattttatggctagatcacaatttgtttctccatttgtctat

SEQ ID NO: 16540 - DNA, 122 bp, Homo sapiens
  misc_feature (61)..(62): /note="This region represents a CpG dinucleotide"
  misc_feature (61)..(61): /note="Nucleotide may be methylated to form 5-methylcytosine"
ttctcaacgcagacctacattctgagaccacagtgctctacttgctatttcttaaaatgccgtggccaattcctgcctccacatcgttgttgatatataggaagttcaacacctttgtgaca

SEQ ID NO: 16541 - DNA, 122 bp, Homo sapiens
  misc_feature (61)..(62): /note="This region represents a CpG dinucleotide"
  misc_feature (61)..(61): /note="Nucleotide may be methylated to form 5-methylcytosine"
gttttctttatccaggatcccttctatccccagctagagccactagatcactaaatcaatcgtatgtgcaggctgcctctgatttatttccctcgctgctgctggcctgcccctgcctttta

SEQ ID NO: 16542 - DNA, 122 bp, Homo sapiens
  misc_feature (61)..(62): /note="This region represents a CpG dinucleotide"
  misc_feature (61)..(61): /note="Nucleotide may be methylated to form 5-methylcytosine"
aaaaaacactatttacaacatgttccttctatgctgctggtttcctagccacaaaacatccgtctccaagggtaagacagtcactgaaacctaaagatatgcatgcttacagtgcaattcta

SEQ ID NO: 16543 - DNA, 122 bp, Homo sapiens
  misc_feature (61)..(62): /note="This region represents a CpG dinucleotide"
  misc_feature (61)..(61): /note="Nucleotide may be methylated to form 5-methylcytosine"
tgctttttaacattccttttgtcctacagatcatataaatgggctgggtacagaggctcacgcctgtaatcccagcactttgggaggccaaggcaggtggattacttgaggtcaggagttca

SEQ ID NO: 16544 - DNA, 122 bp, Homo sapiens
  misc_feature (61)..(62): /note="This region represents a CpG dinucleotide"
  misc_feature (61)..(61): /note="Nucleotide may be methylated to form 5-methylcytosine"
actagcttttattcattcattcaatcaatcatttgttcaatacttattgagtacctgctgcgtgttaagcactgagccaagcagtcagcatacaaggaaacaagtataatgttcttgtcttc

SEQ ID NO: 16545 - DNA, 122 bp, Homo sapiens
  misc_feature (61)..(62): /note="This region represents a CpG dinucleotide"
  misc_feature (61)..(61): /note="Nucleotide may be methylated to form 5-methylcytosine"
gtaactcctctaactccacctccatatataagaggccaaggaagtggccaaggaattagccgtaggggttcctggtttccctatcagggccctctctcagcttcaacaccttgttacctggc

SEQ ID NO: 16546 - DNA, 122 bp, Homo sapiens
  misc_feature (61)..(62): /note="This region represents a CpG dinucleotide"
  misc_feature (61)..(61): /note="Nucleotide may be methylated to form 5-methylcytosine"
tgagagggaaataattttctggatgtgacagggggtctctaagagcaaccccaggttctgcgattcactaggagaactcacaggactcagcatatagttgtattcatggctaagatttacta

SEQ ID NO: 16547 - DNA, 122 bp, Homo sapiens
  misc_feature (61)..(62): /note="This region represents a CpG dinucleotide"
  misc_feature (61)..(61): /note="Nucleotide may be methylated to form 5-methylcytosine"
aaaagacttcatctgacaggaagaatagcacagaaaccctcaactcttaaccactgctgtcgaaatggccccaatttgttcaggccacctgcacgcacactctgcagtgtggctttgcctcc

SEQ ID NO: 16548 - DNA, 122 bp, Homo sapiens
  misc_feature (61)..(62): /note="This region represents a CpG dinucleotide"
  misc_feature (61)..(61): /note="Nucleotide may be methylated to form 5-methylcytosine"
ccctcctaccgaatatagtgcgagcctcaatggtgggtctgtcctggggcctgggcagggcgccgggtctccggactcaggcaagcaccttctcctaaccgcaagcgaagcgaggaggagcg

SEQ ID NO: 16549 - DNA, 122 bp, Homo sapiens
  misc_feature (61)..(62): /note="This region represents a CpG dinucleotide"
  misc_feature (61)..(61): /note="Nucleotide may be methylated to form 5-methylcytosine"
tgaacgacagccgtttggccgggagttcaaacctcaacacgatgagccatagcaggatcacggtttgatttgctgtggccatgaagtctgaatcaccaaatacagaagcagaggcaagggtg

SEQ ID NO: 16550 - DNA, 122 bp, Homo sapiens
  misc_feature (61)..(62): /note="This region represents a CpG dinucleotide"
  misc_feature (61)..(61): /note="Nucleotide may be methylated to form 5-methylcytosine"
gggagttttctgcccaataaatcatttctggtcagttcctctcacgtgttccttcctggtcggatgtctgggcatatttgcataaacgagttagtgctcactccatcagagtcaacctccac

SEQ ID NO: 16551 - DNA, 122 bp, Homo sapiens
  misc_feature (61)..(62): /note="This region represents a CpG dinucleotide"
  misc_feature (61)..(61): /note="Nucleotide may be methylated to form 5-methylcytosine"
ggttatgaataattactttccctttactctgaaagagattctgatcatttcagtgttcctcgccaccaaggaagtggtgaaactcttagctagatgtggttaaggggttactcttgaatctg

SEQ ID NO: 16552 - DNA, 122 bp, Homo sapiens
  misc_feature (61)..(62): /note="This region represents a CpG dinucleotide"
  misc_feature (61)..(61): /note="Nucleotide may be methylated to form 5-methylcytosine"
gtttttaactcaattccatgcagtttccagtaccttaactaatataaagttaatttgggacggcagagtggaggggaagttggtgtcatttgcttttaagagtatagaagaaaactacttcc

SEQ ID NO: 16553 - DNA, 122 bp, Homo sapiens
  misc_feature (61)..(62): /note="This region represents a CpG dinucleotide"
  misc_feature (61)..(61): /note="Nucleotide may be methylated to form 5-methylcytosine"
caaatgattcatcctgagaaggcagtcaagtcccatttgtttctcaggactcccaaaagacgtccaggcagaagagttctgggacccgagtcagcatcaagtgccttggacatttactgagc

SEQ ID NO: 16554 - DNA, 122 bp, Homo sapiens
  misc_feature (61)..(62): /note="This region represents a CpG dinucleotide"
  misc_feature (61)..(61): /note="Nucleotide may be methylated to form 5-methylcytosine"
ccttccagattgcctcgtgtgatttccagtacagctagtgatgtgtcatattcctgcctacgctgttttctcaatccctggtgattaattaggtccatttggcttggtcagtacccagatct

SEQ ID NO: 16555 - DNA, 122 bp, Homo sapiens
  misc_feature (61)..(62): /note="This region represents a CpG dinucleotide"
  misc_feature (61)..(61): /note="Nucleotide may be methylated to form 5-methylcytosine"
agtatcaatgcaactaaataatgaagacatttttctgttggttatgctaacaccatgctgcgttctcccaagttgtgtgttttaagtgtatttttaactcccagatctggcattggccaaaa

SEQ ID NO: 16556 - DNA, 122 bp, Homo sapiens
  misc_feature (61)..(62): /note="This region represents a CpG dinucleotide"
  misc_feature (61)..(61): /note="Nucleotide may be methylated to form 5-methylcytosine"
aaaccaggaatctattctctccctctcaatttacatgaccatgaggaaactgaaacctagcgaagttaaatgacttgcccggggacggacagctagctagttcctgcttgaactgaggacca

SEQ ID NO: 16557 - DNA, 122 bp, Homo sapiens
  misc_feature (61)..(62): /note="This region represents a CpG dinucleotide"
  misc_feature (61)..(61): /note="Nucleotide may be methylated to form 5-methylcytosine"
ctggcccaagctcctgtgaccggaagagcttgttttgccctgttcccccagagccagcagcgcagaccacagggggcttgcattatgttagcaaatgaagaaatgctttaacaggaataggc

SEQ ID NO: 16558 - DNA, 122 bp, Homo sapiens
  misc_feature (61)..(62): /note="This region represents a CpG dinucleotide"
  misc_feature (61)..(61): /note="Nucleotide may be methylated to form 5-methylcytosine"
cttggctaactagtgctagcagcctagtttgggacctatctcagctttcaacatgctttccgtactaagcttaatcatttctagcttttttgtttttttttatttgtttgtttattttttga

SEQ ID NO: 16559 - DNA, 122 bp, Homo sapiens
  misc_feature (61)..(62): /note="This region represents a CpG dinucleotide"
  misc_feature (61)..(61): /note="Nucleotide may be methylated to form 5-methylcytosine"
gtaatgaacaaagcccagggagtcaggtgacctggatctattcttggctgtgccactgaccgtgtgtgaccttgggcaagtcacttttaatctcccatctcagttttctccactgtataact

SEQ ID NO: 16560 - DNA, 122 bp, Homo sapiens
  misc_feature (61)..(62): /note="This region represents a CpG dinucleotide"
  misc_feature (61)..(61): /note="Nucleotide may be methylated to form 5-methylcytosine"
aaactcctaagtgccaagctgtactgcttctcccaaagcaaacagcctaaggagtatgtccgccccagggccctccattgcttagctgagtatgggactcagctgcagttaggagcctcacc

SEQ ID NO: 16561 - DNA, 122 bp, Homo sapiens
  misc_feature (61)..(62): /note="This region represents a CpG dinucleotide"
  misc_feature (61)..(61): /note="Nucleotide may be methylated to form 5-methylcytosine"
gtatcttgtcaaaaagatctttgtgtaactgttttcccgtttgtgaaggcctcacctacacgcacattaagcacagaatgacaggcattgtgagaacctgggtcatttcatatgggttaacc

SEQ ID NO: 16562 - DNA, 122 bp, Homo sapiens
  misc_feature (61)..(62): /note="This region represents a CpG dinucleotide"
  misc_feature (61)..(61): /note="Nucleotide may be methylated to form 5-methylcytosine"
ctctgcagcctcatggttagtggtaggcccagaggaggccaagggcagtaggcaagacaacggatagagaagagtagtgaattccagctatgtggagtttccagcttggcgaattccagcca

SEQ ID NO: 16563 - DNA, 122 bp, Homo sapiens
  misc_feature (61)..(62): /note="This region represents a CpG dinucleotide"
  misc_feature (61)..(61): /note="Nucleotide may be methylated to form 5-methylcytosine"
gtcaaggttacaaaaggatcttatagtcttatctgcttcctgtctgtgctttgtaaaatccgctaccaccactacccccaacccagctcgtgaactctgataatggcctaatattggccttt

SEQ ID NO: 16564 - DNA, 122 bp, Homo sapiens
  misc_feature (61)..(62): /note="This region represents a CpG dinucleotide"
  misc_feature (61)..(61): /note="Nucleotide may be methylated to form 5-methylcytosine"
ttcaaaaagttaccaaaccaccacctcaaacctcaacactttgtctacttggaaagaggacgtgggactgggatttactcggccaccaaaacactcacagggtattatcctatcgcccttca

SEQ ID NO: 16565 - DNA, 122 bp, Homo sapiens
  misc_feature (61)..(62): /note="This region represents a CpG dinucleotide"
  misc_feature (61)..(61): /note="Nucleotide may be methylated to form 5-methylcytosine"
tcttcccagagcttcctcaccaagagcagggctggaaagccccagagaaggtgaaggagacgtattcagggggaagcaggagctgctgtaaacagccacctgatttgctaagagattcaagt

SEQ ID NO: 16566 - DNA, 122 bp, Homo sapiens
  misc_feature (61)..(62): /note="This region represents a CpG dinucleotide"
  misc_feature (61)..(61): /note="Nucleotide may be methylated to form 5-methylcytosine"
caatccagggaaactgttgggtgcctgcccttatgtacaagcagagctctgaatttgaggcgggaaagaagacagctcacattccatgttcacacgaacatggctgggagtcaatttctctg

SEQ ID NO: 16567 - DNA, 122 bp, Homo sapiens
  misc_feature (61)..(62): /note="This region represents a CpG dinucleotide"
  misc_feature (61)..(61): /note="Nucleotide may be methylated to form 5-methylcytosine"
tctgttgattactaactgaagcctcaattccccaatctttaaaatagggataataatacccgtatcataggagtgttatgttaaacaagaaaatctatgtgagaatgtcactgtctgcttgc

SEQ ID NO: 16568 - DNA, 122 bp, Homo sapiens
  misc_feature (61)..(62): /note="This region represents a CpG dinucleotide"
  misc_feature (61)..(61): /note="Nucleotide may be methylated to form 5-methylcytosine"
tgggctagctgccctggaagatcacctgtctgatagcttgcaatctgaggtgtgtgtgcgcgcccgcgtgagagagagggagcggaacgtgcctgagcatggggggaattgggccatgcccc

SEQ ID NO: 16569 - DNA, 122 bp, Homo sapiens
  misc_feature (61)..(62): /note="This region represents a CpG dinucleotide"
  misc_feature (61)..(61): /note="Nucleotide may be methylated to form 5-methylcytosine"
gttctggtctagatcacagcccagttatttaatacaagtgctcatcattgcattaaatctcgtggcttcctgaaacgacagctgccttctggctgggactgatcttagatgaagcctcattc

SEQ ID NO: 16570 - DNA, 122 bp, Homo sapiens
  misc_feature (61)..(62): /note="This region represents a CpG dinucleotide"
  misc_feature (61)..(61): /note="Nucleotide may be methylated to form 5-methylcytosine"
tcaggtggcatttaatccttcataaaaccagtgtagcctgcagtgtcaaaccagcaatcacgttgtatgcgcaatgaaaagagcaggcctttgcataaaaaaaaattgtacagaaggtgttt

SEQ ID NO: 16571 - DNA, 122 bp, Homo sapiens
  misc_feature (61)..(62): /note="This region represents a CpG dinucleotide"
  misc_feature (61)..(61): /note="Nucleotide may be methylated to form 5-methylcytosine"
gatggagctgcctgttcaaatccttgtggatgtcataagattagcagctttcctctgagtcggcctcaaagacttcctttgcaattgttcctaagctagctcaagggataggcagtgaagtt

SEQ ID NO: 16572 - DNA, 122 bp, Homo sapiens
  misc_feature (61)..(62): /note="This region represents a CpG dinucleotide"
  misc_feature (61)..(61): /note="Nucleotide may be methylated to form 5-methylcytosine"
tataaccttatttaaccttaattacttccttaaagtcctcatctctgaatatagccacatcgggggatagggcttcaacataagaattggttgagggggcagcagatacaaacattcagtca

SEQ ID NO: 16573 - DNA, 122 bp, Homo sapiens
  misc_feature (61)..(62): /note="This region represents a CpG dinucleotide"
  misc_feature (61)..(61): /note="Nucleotide may be methylated to form 5-methylcytosine"
ctaatgcatctcttaccaatctacgaagttacaggatggggcatgaaaaaatatatttgacggcacaaaagtatgaagcataggattaagtaaagcagattgaatatgactgttacgggctg

SEQ ID NO: 16574 - DNA, 122 bp, Homo sapiens
  misc_feature (61)..(62): /note="This region represents a CpG dinucleotide"
  misc_feature (61)..(61): /note="Nucleotide may be methylated to form 5-methylcytosine"
aaaacttgcaaaggtggaattagagcactaacttgaactttctcagtgacaaataagctgcgatccatcagcttactcagacacgtttttgtaacattttgtagacactgaggaatactttt

SEQ ID NO: 16575 - DNA, 122 bp, Homo sapiens
  misc_feature (61)..(62): /note="This region represents a CpG dinucleotide"
  misc_feature (61)..(61): /note="Nucleotide may be methylated to form 5-methylcytosine"
ctgtactataaaataagattcatctataaaactcttgccatgctcaaagccagcttaatgcggttaagattagaaaaaggggcagataatcttcaagttaaaaggaagaagaagtaggccag

SEQ ID NO: 16576 - DNA, 122 bp, Homo sapiens
  misc_feature (61)..(62): /note="This region represents a CpG dinucleotide"
  misc_feature (61)..(61): /note="Nucleotide may be methylated to form 5-methylcytosine"
gctggaactgcccccagattttaggctggctctagatctcgggttgcggggtaagcctcacgggatgacaggacattccagtgagccaatgaaagattctgtggaaacctccctgcaggtaa

SEQ ID NO: 16577 - DNA, 122 bp, Homo sapiens
  misc_feature (61)..(62): /note="This region represents a CpG dinucleotide"
  misc_feature (61)..(61): /note="Nucleotide may be methylated to form 5-methylcytosine"
taagtgacagagctgggttttaaacctaagcaatctagttccggaggctatgctctcaaccgcaaactctcattttcatgactaaatctatgataattatttcaccactcccttctttctgt

SEQ ID NO: 16578 - DNA, 122 bp, Homo sapiens
  misc_feature (61)..(62): /note="This region represents a CpG dinucleotide"
  misc_feature (61)..(61): /note="Nucleotide may be methylated to form 5-methylcytosine"
cacacaaagtaatgcttctattcagagctggagtacttttcttcctggaagtaaagtagacgtttcacaggggagacactaaaagaggccttatgatcccaggaacactgataccaggaaga

SEQ ID NO: 16579 - DNA, 122 bp, Homo sapiens
  misc_feature (61)..(62): /note="This region represents a CpG dinucleotide"
  misc_feature (61)..(61): /note="Nucleotide may be methylated to form 5-methylcytosine"
gtgtgtgtctgatatcctgacatgtcctacagttcagtccaggaaatatattttctggcacgccttcgagacagagttgtagcatatggactcaattcaacttcagactcttagattattag

SEQ ID NO: 16580 - DNA, 122 bp, Homo sapiens
  misc_feature (61)..(62): /note="This region represents a CpG dinucleotide"
  misc_feature (61)..(61): /note="Nucleotide may be methylated to form 5-methylcytosine"
gggccaggctttgatgtctgcatcgtgccatttccagaaacccaaggttttcagtcctatcggttatgtgctattccctctaccaaatttataatcttaggtatatttattgtattttttaa

SEQ ID NO: 16581 - DNA, 122 bp, Homo sapiens
  misc_feature (61)..(62): /note="This region represents a CpG dinucleotide"
  misc_feature (61)..(61): /note="Nucleotide may be methylated to form 5-methylcytosine"
acttgtaaactgtccatgaatcacactatacagctcacttctcaggctatccatgtgaagcgcaaagctttctaagccatctagccacaggctctcccctaagaccacttctgtatattcca

SEQ ID NO: 16582 - DNA, 122 bp, Homo sapiens
  misc_feature (61)..(62): /note="This region represents a CpG dinucleotide"
  misc_feature (61)..(61): /note="Nucleotide may be methylated to form 5-methylcytosine"
gatgcccttggctcgattttgcttataggtagattttcaccaagatggacgcaggagactcgcctgtcacctgctggagaaatcacagcatgcaaatcactttgtgccttctgcctttttat

SEQ ID NO: 16583 - DNA, 122 bp, Homo sapiens
  misc_feature (61)..(62): /note="This region represents a CpG dinucleotide"
  misc_feature (61)..(61): /note="Nucleotide may be methylated to form 5-methylcytosine"
gtgtctgctgccactgggaaccagatgcagctgctattgctgctgtggccctggccagagcggattctgcatcatccctgatgctctgagtcaccagccccgaaccaaagtcaacagaggat

SEQ ID NO: 16584 - DNA, 122 bp, Homo sapiens
  misc_feature (61)..(62): /note="This region represents a CpG dinucleotide"
  misc_feature (61)..(61): /note="Nucleotide may be methylated to form 5-methylcytosine"
aatattgcctctgtgtaatgttctgagaccattcagagcccggttaagaaaacacagcgacgactctcctcagagctggggctgttgattttgttaggtgagatcacttgaggaatataaaa

SEQ ID NO: 16585 - DNA, 122 bp, Homo sapiens
  misc_feature (61)..(62): /note="This region represents a CpG dinucleotide"
  misc_feature (61)..(61): /note="Nucleotide may be methylated to form 5-methylcytosine"
agagagtgctaatgcattgagataatcccctgggggctcttccaggaaaacaactgacatcgtgctgttttgtcattgtagttggctgatatttttaatatgaaatcagattgtaagacttt

SEQ ID NO: 16586 - DNA, 122 bp, Homo sapiens
  misc_feature (61)..(62): /note="This region represents a CpG dinucleotide"
  misc_feature (61)..(61): /note="Nucleotide may be methylated to form 5-methylcytosine"
atctctcatcctttctgggaatcaagtttttaaaagattccatggagattttatgttagacgaattccacagggggtgtgtcccatagtcctgtgacagagatactaagaacatgactcatt

SEQ ID NO: 16587 - DNA, 122 bp, Homo sapiens
  misc_feature (61)..(62): /note="This region represents a CpG dinucleotide"
  misc_feature (61)..(61): /note="Nucleotide may be methylated to form 5-methylcytosine"
tttccagttctagtgcacccgaaagacaggacaaggttaaaactggtaagtaaatgtagacgagagttgtaaaattcttacaaggaaagtcttaagactgatgaacatttatattcatgatt

SEQ ID NO: 16588 - DNA, 122 bp, Homo sapiens
  misc_feature (61)..(62): /note="This region represents a CpG dinucleotide"
  misc_feature (61)..(61): /note="Nucleotide may be methylated to form 5-methylcytosine"
ggggtttgacgaaggttgttgagatctggtggtccccggggtgaagcaaggagcctataacgcatacggagggctacgtggggacagcctgcgtgaactcatcagtggacgcatcgaagggg

SEQ ID NO: 16589 - DNA, 122 bp, Homo sapiens
  misc_feature (61)..(62): /note="This region represents a CpG dinucleotide"
  misc_feature (61)..(61): /note="Nucleotide may be methylated to form 5-methylcytosine"
aacggaaagatagctgtatgacactgggataggggatgttttctctaacaaagtataaaacgtgcaaaacataaaggaaaagatggtatggaccgggcgcagggactcacgcctgtaacccc

SEQ ID NO: 16590 - DNA, 122 bp, Homo sapiens
  misc_feature (61)..(62): /note="This region represents a CpG dinucleotide"
  misc_feature (61)..(61): /note="Nucleotide may be methylated to form 5-methylcytosine"
accacctctctagcttcctcttcctccagtccccctgaccaccatgctcctgcagccaaacgtgacacatgctttcatacaaactgctgcttctgctgggaatgcccttcttcctcatctgc

SEQ ID NO: 16591 - DNA, 122 bp, Homo sapiens
  misc_feature (61)..(62): /note="This region represents a CpG dinucleotide"
  misc_feature (61)..(61): /note="Nucleotide may be methylated to form 5-methylcytosine"
tacatgcaaatttgttagctaattgtgggaagctgagggaagttccccagctgatgcctccgttttctctgacagaaaacatgagactgagggaagagatatccaagttagagacaggggta

SEQ ID NO: 16592 - DNA, 122 bp, Homo sapiens
  misc_feature (61)..(62): /note="This region represents a CpG dinucleotide"
  misc_feature (61)..(61): /note="Nucleotide may be methylated to form 5-methylcytosine"
gtagaagtcttccatgtcaaaatgctgcaggattaagttccaactgcttagatcagcatacgaagtctatctcaatctctctagtctagtgattcataaagttggaggcaggttatttcacc

SEQ ID NO: 16593 - DNA, 122 bp, Homo sapiens
  misc_feature (61)..(62): /note="This region represents a CpG dinucleotide"
  misc_feature (61)..(61): /note="Nucleotide may be methylated to form 5-methylcytosine"
actcgcagcacctggattatatcaccgagaagctctggcgcaacgcgttgctcgctggggcggtgccggtggtgctgggcccagaccgtgccaactacgagcgctttgtgccccgcggcgcc

SEQ ID NO: 16594 - DNA, 122 bp, Homo sapiens
  misc_feature (61)..(62): /note="This region represents a CpG dinucleotide"
  misc_feature (61)..(61): /note="Nucleotide may be methylated to form 5-methylcytosine"
actgcctcttcagtgagttttttgttctgttttgtttttccctagttcaccaagtcagagcgttgcccttcagcttgtctggttttcagtctgacatctcattttgctggggccttgaggtt

SEQ ID NO: 16595 - DNA, 122 bp, Homo sapiens
  misc_feature (61)..(62): /note="This region represents a CpG dinucleotide"
  misc_feature (61)..(61): /note="Nucleotide may be methylated to form 5-methylcytosine"
ggtgtttttaaagagcagtctgatcctggttcagctctgtcaccggtttggaaatactgccgtgcagtcggtgggtcattgcctctcagtttcttcctagcaatttgctggtgtctgctacc

SEQ ID NO: 16596 - DNA, 122 bp, Homo sapiens
  misc_feature (61)..(62): /note="This region represents a CpG dinucleotide"
  misc_feature (61)..(61): /note="Nucleotide may be methylated to form 5-methylcytosine"
aagattgcaaatctccaaaaatacaacaaacaacatgggaaagtctcatcagattttcctcgcatttgttggcactaagcctgttttgtcagggaatacttacaacagggccactttcaaag

SEQ ID NO: 16597 - DNA, 122 bp, Homo sapiens
  misc_feature (61)..(62): /note="This region represents a CpG dinucleotide"
  misc_feature (61)..(61): /note="Nucleotide may be methylated to form 5-methylcytosine"
gaggaatctccatttgtaaaagctgagttagggaactagagggttcctgaagctttaaagcgcctcaaagccctcaccctgcacgtgacctgtcacctggagcctgccccagcccccacgcc

SEQ ID NO: 16598 - DNA, 122 bp, Homo sapiens
  misc_feature (61)..(62): /note="This region represents a CpG dinucleotide"
  misc_feature (61)..(61): /note="Nucleotide may be methylated to form 5-methylcytosine"
gaagaagttacaaaagaaggaaagccctggagcaggtgagggagttggaaaggctgaactcgcacatgctgtgcagaagcagaagacaacagacctttgtggtttccaaatcagtattttct

SEQ ID NO: 16599 - DNA, 122 bp, Homo sapiens
  misc_feature (61)..(62): /note="This region represents a CpG dinucleotide"
  misc_feature (61)..(61): /note="Nucleotide may be methylated to form 5-methylcytosine"
catgtcccctgccctatccatccatacctgatgtaaatatacataggttcaaaagcttctcggccagatgctggctcaatgcagcctgaacctttgccccgcaggaagactttggcacctgt

SEQ ID NO: 16600 - DNA, 122 bp, Homo sapiens
  misc_feature (61)..(62): /note="This region represents a CpG dinucleotide"
  misc_feature (61)..(61): /note="Nucleotide may be methylated to form 5-methylcytosine"
gattacaggcataagccaccaggcccagcctgaaatgctttcaacagttacattaaacatcgctaaaataaggggaaatttggctagtggcatttcataaggggctcatgggaaagtccctt

SEQ ID NO: 16601 - DNA, 122 bp, Homo sapiens
  misc_feature (61)..(62): /note="This region represents a CpG dinucleotide"
  misc_feature (61)..(61): /note="Nucleotide may be methylated to form 5-methylcytosine"
aaaaaacccttggaggtgaacttgttcatttcctcccctgaaagtgtgaattttttcagccgtatccccataaggtgctacccagcccttttccccacattgatggtgatgacacatacttg

SEQ ID NO: 16602 - DNA, 122 bp, Homo sapiens
  misc_feature (61)..(62): /note="This region represents a CpG dinucleotide"
  misc_feature (61)..(61): /note="Nucleotide may be methylated to form 5-methylcytosine"
atggggtacgtagccttctcagcctgggctccacctcccaggcatcgcctctgcccgtgacgcctgtcactgtgctccagacgtcccaggccatttggttcccatgcacgccccgccttctc

SEQ ID NO: 16603 - DNA, 122 bp, Homo sapiens
  misc_feature (61)..(62): /note="This region represents a CpG dinucleotide"
  misc_feature (61)..(61): /note="Nucleotide may be methylated to form 5-methylcytosine"
ctcgccattttcactgtcagtaaatatacaacactccacaagctgaaacctatgtaacttcgctggagccttcacaggtgtttatgaatggcgtaatctgctggctcactgaatgctgacgc

SEQ ID NO: 16604 - DNA, 122 bp, Homo sapiens
  misc_feature (61)..(62): /note="This region represents a CpG dinucleotide"
  misc_feature (61)..(61): /note="Nucleotide may be methylated to form 5-methylcytosine"
actagtacttgacagcatggtgcagtctcattcctcatgccttcgcattgtggcccgccacgctcctgagaaggacacacctccatagcatggagaggaaacagaggcacagagaggctaat

SEQ ID NO: 16605 - DNA, 122 bp, Homo sapiens
  misc_feature (61)..(62): /note="This region represents a CpG dinucleotide"
  misc_feature (61)..(61): /note="Nucleotide may be methylated to form 5-methylcytosine"
aggtcaagctaaacaaggtctagacaaaacttaaacaacaaaacaaagtcaggcactgtacgtaggtcacaatgactgtataactagcttgaagaagaaatgaacaaaactttctttgctac

SEQ ID NO: 16606 - DNA, 122 bp, Homo sapiens
  misc_feature (61)..(62): /note="This region represents a CpG dinucleotide"
  misc_feature (61)..(61): /note="Nucleotide may be methylated to form 5-methylcytosine"
gtgctcacagacctgtgcaggcgggaagaggtcagggtggccctcctctgtgcagtcaggcgactccccagctgtgtctcccaagatggcctggggcctctcctgccgcctacagggagggg

SEQ ID NO: 16607 - DNA, 122 bp, Homo sapiens
  misc_feature (61)..(62): /note="This region represents a CpG dinucleotide"
  misc_feature (61)..(61): /note="Nucleotide may be methylated to form 5-methylcytosine"
ggataacaaataattcctatctcaaagggttattgtgaggattaaatgagaaaaagcaggcgagggtcatgtgactgactagaaaagttcattattagtcagtgttgtctgactgctttagc

SEQ ID NO: 16608 - DNA, 122 bp, Homo sapiens
  misc_feature (61)..(62): /note="This region represents a CpG dinucleotide"
  misc_feature (61)..(61): /note="Nucleotide may be methylated to form 5-methylcytosine"
tgtatggtgatactaatatgatggctagtgtgattattctatagctagttggagcagtcacgatacacacacccaaagaatgagaagttggattgatccaaggaaggattttgccagacagg

SEQ ID NO: 16609 - DNA, 122 bp, Homo sapiens
  misc_feature (61)..(62): /note="This region represents a CpG dinucleotide"
  misc_feature (61)..(61): /note="Nucleotide may be methylated to form 5-methylcytosine"
atcaggggaaggagggaagggaaaagtatacatcctgccaccttcttctccaattagctgcgttgacactctgggcttccattagctttctagaaagagtccttaggaaggagagagaggct

SEQ ID NO: 16610 - DNA, 122 bp, Homo sapiens
  misc_feature (61)..(62): /note="This region represents a CpG dinucleotide"
  misc_feature (61)..(61): /note="Nucleotide may be methylated to form 5-methylcytosine"
gcaccgtactggcagccacaaagaccaatattcctctttgttgctgttttaaaagcaaagcgagaatggtaatatggaaacacaaaaacacggacacgctcacactatgggaaaaccatatt

SEQ ID NO: 16611 - DNA, 122 bp, Homo sapiens
  misc_feature (61)..(62): /note="This region represents a CpG dinucleotide"
  misc_feature (61)..(61): /note="Nucleotide may be methylated to form 5-methylcytosine"
ctgctgccgagcaaacacaagtggagagcccctgcctgctcagcacccctgaagctcatgcggaaaacccacaaaggggtgcccacagatggcccacatgaaaggcatgtttctcttttttt

SEQ ID NO: 16612 - DNA, 122 bp, Homo sapiens
  misc_feature (61)..(62): /note="This region represents a CpG dinucleotide"
  misc_feature (61)..(61): /note="Nucleotide may be methylated to form 5-methylcytosine"
caatgggtaccagatatcaccttcttcctacatgcctgccagagccaacatatacagatacgcagattttgaacttcagaattcagcaaggcaccttcagacagactactcacagagtttta

SEQ ID NO: 16613 - DNA, 122 bp, Homo sapiens
  misc_feature (61)..(62): /note="This region represents a CpG dinucleotide"
  misc_feature (61)..(61): /note="Nucleotide may be methylated to form 5-methylcytosine"
cgggaactggagaagaagaagatcctggtgttcacaccatcacgacgcgtgggtggcaagcgggtggtgtgctatgacgacagattcattgtgaagctggcctacgagtctgacgggatcgt

SEQ ID NO: 16614 - DNA, 122 bp, Homo sapiens
  misc_feature (61)..(62): /note="This region represents a CpG dinucleotide"
  misc_feature (61)..(61): /note="Nucleotide may be methylated to form 5-methylcytosine"
tgatggaaggtttgggtctgtttgagctctaccctgaatcatgtctctagcaggaaactacgtggaaagttgggaagaatcaagttcatcttagttaacaacctggggaaaatgtcctattg

SEQ ID NO: 16615 - DNA, 122 bp, Homo sapiens
  misc_feature (61)..(62): /note="This region represents a CpG dinucleotide"
  misc_feature (61)..(61): /note="Nucleotide may be methylated to form 5-methylcytosine"
gcttgaatgctacaaatgagactgactcatgggtgcagtgttgagaattcaaataccaggcgtgttgacatcagtgactttgaaatgttgacagctcagggtaaacattttgaataaagcaa

SEQ ID NO: 16616 - DNA, 122 bp, Homo sapiens
  misc_feature (61)..(62): /note="This region represents a CpG dinucleotide"
  misc_feature (61)..(61): /note="Nucleotide may be methylated to form 5-methylcytosine"
agaatggctcaaatgacacacagtgataatatagtcacaggactagaaaaccacagctgtcgtgaagtcaagactgaaaggatccagtccagagagtagactctttcctgtccataggggcc

SEQ ID NO: 16617 - DNA, 122 bp, Homo sapiens
  misc_feature (61)..(62): /note="This region represents a CpG dinucleotide"
  misc_feature (61)..(61): /note="Nucleotide may be methylated to form 5-methylcytosine"
tttgttcatctcacattttctctcatctagtcgttaccccaactctccttatgaccaggacgtgaccaggacgtgaccaggacacatactctgcaaagaaggagtagtttttatttaaatat

SEQ ID NO: 16618 - DNA, 122 bp, Homo sapiens
  misc_feature (61)..(62): /note="This region represents a CpG dinucleotide"
  misc_feature (61)..(61): /note="Nucleotide may be methylated to form 5-methylcytosine"
gctaggctagacgattgggtttcctgtcacattttagtgtctgccgtgctgtgaagactgcgatggcagagatacacattgcggaaggaagtcaagcttgttttcagcatcagttgatttat

SEQ ID NO: 16619 - DNA, 122 bp, Homo sapiens
  misc_feature (61)..(62): /note="This region represents a CpG dinucleotide"
  misc_feature (61)..(61): /note="Nucleotide may be methylated to form 5-methylcytosine"
atgatgacttcatagtttcactcacagagggttgtttttccccagttcttacatgttatacgcaataccttcaagcctcataccagcaacacaaattatatttcatttatttccagtgttgc

SEQ ID NO: 16620 - DNA, 122 bp, Homo sapiens
  misc_feature (61)..(62): /note="This region represents a CpG dinucleotide"
  misc_feature (61)..(61): /note="Nucleotide may be methylated to form 5-methylcytosine"
gcgtgctgagcctccccgccgctttggagacggggctagattttcgttgcctccggctctcgacaggtgcaaaacaatgaattccaagcctcggaagcaaagaagcttaggatccgacggtg

SEQ ID NO: 16621 - DNA, 122 bp, Homo sapiens
  misc_feature (61)..(62): /note="This region represents a CpG dinucleotide"
  misc_feature (61)..(61): /note="Nucleotide may be methylated to form 5-methylcytosine"
ttcaggcacttatttcttgcttagactaatgaggtagtctcctaactcatcagcctgtctcggtctcttctcccttcagtaggtctttctctaccctgtcactgattgatcattctgaaaca

SEQ ID NO: 16622 - DNA, 122 bp, Homo sapiens
  misc_feature (61)..(62): /note="This region represents a CpG dinucleotide"
  misc_feature (61)..(61): /note="Nucleotide may be methylated to form 5-methylcytosine"
acaagcatctgagtggtgcggggaaagaaagctcagcgttgtttataacaagagtcatcacggaccaggaagaacaaagcagcaagaactgacaaagaagatgatacccagagcacaaggaa

SEQ ID NO: 16623 - DNA, 122 bp, Homo sapiens
  misc_feature (61)..(62): /note="This region represents a CpG dinucleotide"
  misc_feature (61)..(61): /note="Nucleotide may be methylated to form 5-methylcytosine"
aaggattcatttctaggacgaagattaccagctgcttcctccaaacagcctttcctgatccgtctcccaattagaactgatagctcccatggatgggtgtggtggctcacgcctgtaatccc

SEQ ID NO: 16624 - DNA, 122 bp, Homo sapiens
  misc_feature (61)..(62): /note="This region represents a CpG dinucleotide"
  misc_feature (61)..(61): /note="Nucleotide may be methylated to form 5-methylcytosine"
agtatggtataaaaggtaaaaatgccacacctgcctggggtgcccatcacgagtgggtctcgcgggactggaggttgctctggcgaggcagtgggtgagcgtgaggggttgcgaaggcctag

SEQ ID NO: 16625 - DNA, 122 bp, Homo sapiens
  misc_feature (61)..(62): /note="This region represents a CpG dinucleotide"
  misc_feature (61)..(61): /note="Nucleotide may be methylated to form 5-methylcytosine"
gagaaatacttggagatcttagcagcatgaaagcctctttgtatcactgggattgcagcacgcatgatcaaggcccaggggtgatcaccaggccacactgctcctaagacagaggtactcag

SEQ ID NO: 16626 - DNA, 122 bp, Homo sapiens
  misc_feature (61)..(62): /note="This region represents a CpG dinucleotide"
  misc_feature (61)..(61): /note="Nucleotide may be methylated to form 5-methylcytosine"
ctcaaggcaaattctatctggtagaggaaacaagtctccttagtgttctagccactataacgtagagtagaaagtcagcaggtgaagaaatcatattaccattttgctgttctgcttattaa

SEQ ID NO: 16627 - DNA, 122 bp, Homo sapiens
  misc_feature (61)..(62): /note="This region represents a CpG dinucleotide"
  misc_feature (61)..(61): /note="Nucleotide may be methylated to form 5-methylcytosine"
ggagagaatggggaagtattgttcaaggagtaaagagtctcagttttgcaggatgaaaagcgttctgtggatagatgctggtgatgttgtgcaacaatgtaaatattcttaatgtcactgaa

SEQ ID NO: 16628 - DNA, 122 bp, Homo sapiens
  misc_feature (61)..(62): /note="This region represents a CpG dinucleotide"
  misc_feature (61)..(61): /note="Nucleotide may be methylated to form 5-methylcytosine"
atgattttcctcctaaagcctcctttgctcccagcttcagaagcaaactctgcaagggtacgagtgtggcaaaaagagaaatggagatttctctcttttgctgcaatcccaaggcgtcaacg

SEQ ID NO: 16629 - DNA, 122 bp, Homo sapiens
  misc_feature (61)..(62): /note="This region represents a CpG dinucleotide"
  misc_feature (61)..(61): /note="Nucleotide may be methylated to form 5-methylcytosine"
gcagttctataatgatcacttgacagtggaagaaacaacttagttaagtaacttgctcaacgtcacaaagcttgcaagtggtataattaggtttaaacaggaagtctgagccctgagtcctc

SEQ ID NO: 16630 - DNA, 122 bp, Homo sapiens
  misc_feature (61)..(62): /note="This region represents a CpG dinucleotide"
  misc_feature (61)..(61): /note="Nucleotide may be methylated to form 5-methylcytosine"
cgcatctgcgtactgccctggcgactgacgtgagcatgaagggagctttagtcagccgctcggcccgcgggaaggaagaggcgagcaggagtgactcacaccaggctcgggctccaggcttc

SEQ ID NO: 16631 - DNA, 122 bp, Homo sapiens
  misc_feature (61)..(62): /note="This region represents a CpG dinucleotide"
  misc_feature (61)..(61): /note="Nucleotide may be methylated to form 5-methylcytosine"
tcacagaagtagctcataaataataaagtcccagcctagcaacacagcatgtgatggcagcgtgggtgtgttccagtattatctttcacgtaggccctgaaagcttgaattatctcagaaat

SEQ ID NO: 16632 - DNA, 122 bp, Homo sapiens
  misc_feature (61)..(62): /note="This region represents a CpG dinucleotide"
  misc_feature (61)..(61): /note="Nucleotide may be methylated to form 5-methylcytosine"
aaagcacatatttttttctgtctgggaaagtcaggatattggggcttaaagtataagttgcggttcaccaggcagagagggacacaaaaaatattccaggaagacagaacagtatgttcaag

SEQ ID NO: 16633 - DNA, 122 bp, Homo sapiens
  misc_feature (61)..(62): /note="This region represents a CpG dinucleotide"
  misc_feature (61)..(61): /note="Nucleotide may be methylated to form 5-methylcytosine"
cttgatgaacttcctcttcttctcatgtctccggtaggccacgtgcatggccactaggagcgctggcgtggacacgaagatcagctgcagggcccatagccggatgtgggagatggggaagt

SEQ ID NO: 16634 - DNA, 122 bp, Homo sapiens
  misc_feature (61)..(62): /note="This region represents a CpG dinucleotide"
  misc_feature (61)..(61): /note="Nucleotide may be methylated to form 5-methylcytosine"
attgttggctggattagttgcctgccttgaccaccttacaaggatttagtgaaactgctccgtctttagcccatgtcttccattcccagagataatggttcacacatccttgtctccgcccc

SEQ ID NO: 16635 - DNA, 122 bp, Homo sapiens
  misc_feature (61)..(62): /note="This region represents a CpG dinucleotide"
  misc_feature (61)..(61): /note="Nucleotide may be methylated to form 5-methylcytosine"
cgggcgccgggaggggatgctgaggctgatggagctgcctccagggctagggccactcaccggaggagggcggggcctgcacttgaagtcaggccgcacctgtctgtttttggaagggtagc

SEQ ID NO: 16636 - DNA, 122 bp, Homo sapiens
  misc_feature (61)..(62): /note="This region represents a CpG dinucleotide"
  misc_feature (61)..(61): /note="Nucleotide may be methylated to form 5-methylcytosine"
gagagctgcttgtttaaaagtgtgtagcagaggctcgctgtcttcctcctgcttcagctacgtaagtcgtgcctgcttcttcctcaccttctgccatgattgtaagtttcctgaggcctccc

SEQ ID NO: 16637 - DNA, 122 bp, Homo sapiens
  misc_feature (61)..(62): /note="This region represents a CpG dinucleotide"
  misc_feature (61)..(61): /note="Nucleotide may be methylated to form 5-methylcytosine"
gaccattaagagcctgccaccaccaatgacccagatgcggtaaagcttgcaaaaccttgacgccctttgatgctcacagcaactgaggtggcaggcagagccagtttcattatcctcattgt

SEQ ID NO: 16638 - DNA, 122 bp, Homo sapiens
  misc_feature (61)..(62): /note="This region represents a CpG dinucleotide"
  misc_feature (61)..(61): /note="Nucleotide may be methylated to form 5-methylcytosine"
ggtctgtcttcccctaccctgagaagtcattcaaatgacattataattaaacacctcagccggaatcccaggggcaaatttcaggagagatttgcatgtcacatttccattgggttgagagg

SEQ ID NO: 16639 - DNA, 122 bp, Homo sapiens
  misc_feature (61)..(62): /note="This region represents a CpG dinucleotide"
  misc_feature (61)..(61): /note="Nucleotide may be methylated to form 5-methylcytosine"
gctgactcagcactgagcccaggctaggggttcctggatggctttctgggccatccaggtcgtgctgaggagttggggatatagccctgccacctgcccgagtcacagggaggagactttaa

SEQ ID NO: 16640 - DNA, 122 bp, Homo sapiens
  misc_feature (61)..(62): /note="This region represents a CpG dinucleotide"
  misc_feature (61)..(61): /note="Nucleotide may be methylated to form 5-methylcytosine"
accaggcacctgcttcagagctggagctggagaagcacggagccggggtggggctggacacgcacggagccggggtggggctggacacgcagccctggggcccgcctcattgctctggctca

SEQ ID NO: 16641 - DNA, 122 bp, Homo sapiens
  misc_feature (61)..(62): /note="This region represents a CpG dinucleotide"
  misc_feature (61)..(61): /note="Nucleotide may be methylated to form 5-methylcytosine"
agctttcctctgtggcaggccaactggtctgacccaaggttgtctgtggccatgttaggacgtatattcttactcgccgagcgacgcagcccagagggttcaggaaaaggaggtggtgagtg

SEQ ID NO: 16642 - DNA, 122 bp, Homo sapiens
  misc_feature (61)..(62): /note="This region represents a CpG dinucleotide"
  misc_feature (61)..(61): /note="Nucleotide may be methylated to form 5-methylcytosine"
cctccatcacatgatttcttgactgcagtactgcagtagcttccttgctagacttgcctgcggtcttgccactctccaaaccactcctcccagggcagccagagtaaccttttaaaaatgga

SEQ ID NO: 16643 - DNA, 122 bp, Homo sapiens
  misc_feature (61)..(62): /note="This region represents a CpG dinucleotide"
  misc_feature (61)..(61): /note="Nucleotide may be methylated to form 5-methylcytosine"
cgtggtggggaaagtccaagaggcaggtaggtgttttgaggctcagtgccatggggctggcggttggaggctcttacacagaggaatggcatttaatggtttgccttttcaaagggtggccc

SEQ ID NO: 16644 - DNA, 122 bp, Homo sapiens
  misc_feature (61)..(62): /note="This region represents a CpG dinucleotide"
  misc_feature (61)..(61): /note="Nucleotide may be methylated to form 5-methylcytosine"
agaagctggcagcccagtggagggctgggctagtgtgaccattgtcaagtttgggctatgcgtctgcagatgcattgttttgagttttgttccacatgctcaggttggggcccagaagtaag

SEQ ID NO: 16645 - DNA, 122 bp, Homo sapiens
  misc_feature (61)..(62): /note="This region represents a CpG dinucleotide"
  misc_feature (61)..(61): /note="Nucleotide may be methylated to form 5-methylcytosine"
taaattattcttctgggttcaggctgactgtctcgctatctcttaaaatctgtgttgttacgaacaaacaatcatctaaggcatttatgagtcgtgagctgtaatgttgttaaaactgaatc

SEQ ID NO: 16646 - DNA, 122 bp, Homo sapiens
  misc_feature (61)..(62): /note="This region represents a CpG dinucleotide"
  misc_feature (61)..(61): /note="Nucleotide may be methylated to form 5-methylcytosine"
tctaaacatatctaagcatagaaaaggtacaggaaaatcttataggaccaccattatatacgctgttcgtcactgaccaaaatgctatgaggtacatgactgtatagatatcctattggttc

SEQ ID NO: 16647 - DNA, 122 bp, Homo sapiens
  misc_feature (61)..(62): /note="This region represents a CpG dinucleotide"
  misc_feature (61)..(61): /note="Nucleotide may be methylated to form 5-methylcytosine"
acttccttctccaaacagccccatgaagcagcactgggcttcccaagagaggtcctgccacgtgactggcctctgtcattggcagaaccctgcataggccgtagctctgcagctgttttcct

SEQ ID NO: 16648 - DNA, 122 bp, Homo sapiens
  misc_feature (61)..(62): /note="This region represents a CpG dinucleotide"
  misc_feature (61)..(61): /note="Nucleotide may be methylated to form 5-methylcytosine"
cagggagccaagaggtgctagcaccctcctcagcccttcactttgatgaccgtccttcctcgtgatcatcaaagaggttagggttctctgccagcgtggctctcactttcttcttctccttg

SEQ ID NO: 16649 - DNA, 122 bp, Homo sapiens
  misc_feature (61)..(62): /note="This region represents a CpG dinucleotide"
  misc_feature (61)..(61): /note="Nucleotide may be methylated to form 5-methylcytosine"
cctgtttttcttcttaccattctggctaatttctacttgtctttcaaggctcagcaaggacgagttgggtagaaagccttgcagggtcgtccacttactttcacactgcattgagtcgcctg

SEQ ID NO: 16650 - DNA, 122 bp, Homo sapiens
  misc_feature (61)..(62): /note="This region represents a CpG dinucleotide"
  misc_feature (61)..(61): /note="Nucleotide may be methylated to form 5-methylcytosine"
ccgggatgaagcctgaagaaccccaatctcaagaactgacgaggtagactttcaaggttacgttccatcaatcactggaaaacttctcctggagcctctgctcctcagctgttttcatgtga

SEQ ID NO: 16651 - DNA, 122 bp, Homo sapiens
  misc_feature (61)..(62): /note="This region represents a CpG dinucleotide"
  misc_feature (61)..(61): /note="Nucleotide may be methylated to form 5-methylcytosine"
atcatatataaattcagccatttccagtgtgaatcacccagaagggagaaaaagtacacacgtaagtggctataatacatggtagaatgtactgtgatgagtcatacaaatacatttttcta

SEQ ID NO: 16652 - DNA, 122 bp, Homo sapiens
  misc_feature (61)..(62): /note="This region represents a CpG dinucleotide"
  misc_feature (61)..(61): /note="Nucleotide may be methylated to form 5-methylcytosine"
gtcgcggctgtgtcccagtcattctcggggtaagttccgaagttggaggtgtcgccttcgcgggctatcttgggcacgatgggaggcttcagttttctctgaggaacagcttcccagtccac

SEQ ID NO: 16653 - DNA, 122 bp, Homo sapiens
  misc_feature (61)..(62): /note="This region represents a CpG dinucleotide"
  misc_feature (61)..(61): /note="Nucleotide may be methylated to form 5-methylcytosine"
ggaggaagtaaccactgtaacagatacagcagatagtggaataaggtaaggactgatcatcggttattgatggagatcactggagaccttgataaacagcagttttggtggtgtggtaggga

SEQ ID NO: 16654 - DNA, 122 bp, Homo sapiens
  misc_feature (61)..(62): /note="This region represents a CpG dinucleotide"
  misc_feature (61)..(61): /note="Nucleotide may be methylated to form 5-methylcytosine"
caactgtctgtaattgcagaagtggcctgatacagcagagtttccgtattctgctgtgggcggtgagaggaagttgcgaagggtcttgcagggcgataacaatccacaaagcatcagagtct

SEQ ID NO: 16655 - DNA, 122 bp, Homo sapiens
  misc_feature (61)..(62): /note="This region represents a CpG dinucleotide"
  misc_feature (61)..(61): /note="Nucleotide may be methylated to form 5-methylcytosine"
cttaagtgaaatttaggttgccagatgtcttgtgcacacatggccgttctgtttctgtgccgtattccattttcatctgtattggaatacataatagtacatttgagccaagtcaaatgcat

SEQ ID NO: 16656 - DNA, 122 bp, Homo sapiens
  misc_feature (61)..(62): /note="This region represents a CpG dinucleotide"
  misc_feature (61)..(61): /note="Nucleotide may be methylated to form 5-methylcytosine"
ttcccttatttaaccacatgttccatgcacagatggtatttatcttcaggagatgactcacgcccttgtcaacatacctttctatattaaatatccctatcacatacaaactggacctcaga

SEQ ID NO: 16657 - DNA, 122 bp, Homo sapiens
  misc_feature (61)..(62): /note="This region represents a CpG dinucleotide"
  misc_feature (61)..(61): /note="Nucleotide may be methylated to form 5-methylcytosine"
gtatccagaccaaaaatatggctgggttctcacatcaaggaagtgatttcaactaggaagcgccactctttgattacgatctcaagcttgcggggcttgctctcagattgcttatcctactg

SEQ ID NO: 16658 - DNA, 122 bp, Homo sapiens
  misc_feature (61)..(62): /note="This region represents a CpG dinucleotide"
  misc_feature (61)..(61): /note="Nucleotide may be methylated to form 5-methylcytosine"
ggtactgagtgcacaagttactaggtgccaggctgtctcctaagcactttccatatgcttcgtcactcagtctcacagggattaggaggagatagtgatgatccccgtctgcatttctcttt

SEQ ID NO: 16659 - DNA, 122 bp, Homo sapiens
  misc_feature (61)..(62): /note="This region represents a CpG dinucleotide"
  misc_feature (61)..(61): /note="Nucleotide may be methylated to form 5-methylcytosine"
gaggtgacataggacaatgcagagttgaagagaggataatttctccttgtctgcacagaacgcagcacaccttcagcccttcaaagacgggcagctttggctgcacccctgggcagttccct

SEQ ID NO: 16660 - DNA, 122 bp, Homo sapiens
  misc_feature (61)..(62): /note="This region represents a CpG dinucleotide"
  misc_feature (61)..(61): /note="Nucleotide may be methylated to form 5-methylcytosine"
tgtcagaggctgtttgtagacaaacagctgggcacacgccccctgggctctgattagagacgcttcactgtgggaacagcagttcactcctggcttgggggtacagcagcccagactctcaa

SEQ ID NO: 16661 - DNA, 122 bp, Homo sapiens
  misc_feature (61)..(62): /note="This region represents a CpG dinucleotide"
  misc_feature (61)..(61): /note="Nucleotide may be methylated to form 5-methylcytosine"
aaagcctttcctctcagaatggttgtctagaccgtagggctacggggctcagcagtttcccgagtgctctctctacaaaggaggggacattggaaattgtagtgtaggagggtgaacatctc

SEQ ID NO: 16662 - DNA, 122 bp, Homo sapiens
  misc_feature (61)..(62): /note="This region represents a CpG dinucleotide"
  misc_feature (61)..(61): /note="Nucleotide may be methylated to form 5-methylcytosine"
cagagtagttctgaaaaggaggaagaattcacaaagcatcagttatgggtgcagggaagtcgccatctgccaatgggcaccagagtgtcactgtactggaaggggaaaaggagtgggctgga

SEQ ID NO: 16663 - DNA, 122 bp, Homo sapiens
  misc_feature (61)..(62): /note="This region represents a CpG dinucleotide"
  misc_feature (61)..(61): /note="Nucleotide may be methylated to form 5-methylcytosine"
gggtctgcccaacgttgagcctccgaggacctcattgaacaagaccttgcctgcaggtcccggccagcctgtgctcaggaataactaaggagtggagccgcatcaacctccttcccaaatcc

SEQ ID NO: 16664 - DNA, 122 bp, Homo sapiens
  misc_feature (61)..(62): /note="This region represents a CpG dinucleotide"
  misc_feature (61)..(61): /note="Nucleotide may be methylated to form 5-methylcytosine"
gcactaggaatccccagttctgactttttttgcctggaaagctcaagtggacaagccctacggcctacccaatgtctgctgacccggcacttagttgaaacagggtgtgctggttccctctc

SEQ ID NO: 16665 - DNA, 122 bp, Homo sapiens
  misc_feature (61)..(62): /note="This region represents a CpG dinucleotide"
  misc_feature (61)..(61): /note="Nucleotide may be methylated to form 5-methylcytosine"
agtactcctgggctccagtgatctgcccgcctccgccttccaaagtgctgggattataggcgtgagccaccaagcctggctgagatgggaacttctgaagaacacagggaaccctccagaaa

SEQ ID NO: 16666 - DNA, 122 bp, Homo sapiens
  misc_feature (61)..(62): /note="This region represents a CpG dinucleotide"
  misc_feature (61)..(61): /note="Nucleotide may be methylated to form 5-methylcytosine"
gtctagaacaccctttgggctatctccacctttcattgtctttgagctattttataactccgtaagatataaaatacagatagtgatacaaatgattcttatctgcagaaatgcaaattgtg

SEQ ID NO: 16667 - DNA, 122 bp, Homo sapiens
  misc_feature (61)..(62): /note="This region represents a CpG dinucleotide"
  misc_feature (61)..(61): /note="Nucleotide may be methylated to form 5-methylcytosine"
ttttgttttgtttgtcctaccagagctccaaataaaaacacagatatatggtttgacatacggaatgggatagctaaaactgtgactgcctaagacaagctgaaacctaaggtgccgaacca

SEQ ID NO: 16668 - DNA, 122 bp, Homo sapiens
  misc_feature (61)..(62): /note="This region represents a CpG dinucleotide"
  misc_feature (61)..(61): /note="Nucleotide may be methylated to form 5-methylcytosine"
gctctttaattaactttaatcctccaaaaatccatgctgcaatctgttctgacaatcccacgctccttaggaggccctcggcacgacctggcacatcctgtgggctggaggtggccggaatg

SEQ ID NO: 16669 - DNA, 122 bp, Homo sapiens
  misc_feature (61)..(62): /note="This region represents a CpG dinucleotide"
  misc_feature (61)..(61): /note="Nucleotide may be methylated to form 5-methylcytosine"
gaccagtaggtcaccggaatgagtcaccgaggtaacacactagcagtgccgaatgaacagcggctgtcatattgacccactaaaacaccaggtggacaggggattatcattggaggcccaga

SEQ ID NO: 16670 - DNA, 122 bp, Homo sapiens
  misc_feature (61)..(62): /note="This region represents a CpG dinucleotide"
  misc_feature (61)..(61): /note="Nucleotide may be methylated to form 5-methylcytosine"
tccataggaaagcatcttggaagagttgtatgagctaactgaatctgtttcagtagctcacgctgtctccccacactctagctggcttccttcctcatcctcccactggacatgctcttgtc

SEQ ID NO: 16671 - DNA, 122 bp, Homo sapiens
  misc_feature (61)..(62): /note="This region represents a CpG dinucleotide"
  misc_feature (61)..(61): /note="Nucleotide may be methylated to form 5-methylcytosine"
cagcttgtgcctaatagaaggttgagaccagcagagactgctgtgagtttctcccggctccgaggctgaacggggactgtgagcgatccccctgctgcagggcgagtggcctgtccagaccc

SEQ ID NO: 16672 - DNA, 122 bp, Homo sapiens
  misc_feature (61)..(62): /note="This region represents a CpG dinucleotide"
  misc_feature (61)..(61): /note="Nucleotide may be methylated to form 5-methylcytosine"
tttaataaagaattaaaacattgcaaagaataaaaacatacatactagaatatcttcctacggtaaattgttactaggcaaagaaactggccatgattaaggcactactgccacctgatggc

SEQ ID NO: 16673 - DNA, 122 bp, Homo sapiens
  misc_feature (61)..(62): /note="This region represents a CpG dinucleotide"
  misc_feature (61)..(61): /note="Nucleotide may be methylated to form 5-methylcytosine"
agcatgccagaccacagaccaaggtctcagcttccctctggaactccactacaagcagatcgtatcggtgagtgcttaaacacagtggcatgaatagagcagcccactgtctcattacttta

SEQ ID NO: 16674 - DNA, 122 bp, Homo sapiens
  misc_feature (61)..(62): /note="This region represents a CpG dinucleotide"
  misc_feature (61)..(61): /note="Nucleotide may be methylated to form 5-methylcytosine"
ctcaagtgatccacccgccttggcctcccaaattgctgggattacaggcgtgaaccacagcgcccggcctaagccctagctgttcattgccacaatgagaggaagtacaggaaggtgttgag

SEQ ID NO: 16675 - DNA, 122 bp, Homo sapiens
  misc_feature (61)..(62): /note="This region represents a CpG dinucleotide"
  misc_feature (61)..(61): /note="Nucleotide may be methylated to form 5-methylcytosine"
agatgaaagagtttaggacatttttgctctgttcttccactgttccagcatcacttctctcgcactagctgtgttccccataaatacaacccccaccaagctacaggatcatgattttcttc

SEQ ID NO: 16676 - DNA, 122 bp, Homo sapiens
  misc_feature (61)..(62): /note="This region represents a CpG dinucleotide"
  misc_feature (61)..(61): /note="Nucleotide may be methylated to form 5-methylcytosine"
agtactaggaatccaaaccagaccaaagagggttactcaatattcattctctaaagctcacgtattattggaagtctttgagagatctttttttaaagtcactgttaccattatcaacaaca

SEQ ID NO: 16677 - DNA, 122 bp, Homo sapiens
  misc_feature (61)..(62): /note="This region represents a CpG dinucleotide"
  misc_feature (61)..(61): /note="Nucleotide may be methylated to form 5-methylcytosine"
agtgcacatagagaacaaacttgttatatattcaaagaaggcagaggaaaaagacatggacgataaaaaggagaaaatgggaaaccagtgtggacgaacaagcaattccacacaggggtatt

SEQ ID NO: 16678 - DNA, 122 bp, Homo sapiens
  misc_feature (61)..(62): /note="This region represents a CpG dinucleotide"
  misc_feature (61)..(61): /note="Nucleotide may be methylated to form 5-methylcytosine"
gggaattcttagaaatgataaattgcaggggtcctctgcttcaccccggagagtttcccccgactggcctatgtgtgagtgttttcctcctgcgcgggtctggccttgtgcaagaggcaaca

SEQ ID NO: 16679 - DNA, 122 bp, Homo sapiens
  misc_feature (61)..(62): /note="This region represents a CpG dinucleotide"
  misc_feature (61)..(61): /note="Nucleotide may be methylated to form 5-methylcytosine"
aataaccccatttcatcccaatgcgctggaagcaccccttgccacgccctctcttcaggacgtctccacgacgccacacgccacgccctctctccgggacgcagcagcctgccccttccatt

SEQ ID NO: 16680 - DNA, 122 bp, Homo sapiens
  misc_feature (61)..(62): /note="This region represents a CpG dinucleotide"
  misc_feature (61)..(61): /note="Nucleotide may be methylated to form 5-methylcytosine"
agccctgctctttgtcgtggctgagtcatgttccgtgatgtggaggcaccgggttttgtgcgtctccttattcagtggacgttggtgctgtttccagtgtctgcctgttgtgagttgagctg

SEQ ID NO: 16681 - DNA, 122 bp, Homo sapiens
  misc_feature (61)..(62): /note="This region represents a CpG dinucleotide"
  misc_feature (61)..(61): /note="Nucleotide may be methylated to form 5-methylcytosine"
atgatggggcggtaatttattcaagcagagacgatcaccgggctcctgtgtctgccctcgcgtcagaggagccgtgcaatggcagggggagggcaggtgtgtctgactgcacgcaggaatgg

SEQ ID NO: 16682 - DNA, 122 bp, Homo sapiens
  misc_feature (61)..(62): /note="This region represents a CpG dinucleotide"
  misc_feature (61)..(61): /note="Nucleotide may be methylated to form 5-methylcytosine"
acacctctaccctcagatgtttatctcagggccacgcccaagggccaggcaggagccaggcgggaggagatctgttcaagaccaatcccagccaaggatagataagaatcctggctactcag

SEQ ID NO: 16683 - DNA, 122 bp, Homo sapiens
  misc_feature (61)..(62): /note="This region represents a CpG dinucleotide"
  misc_feature (61)..(61): /note="Nucleotide may be methylated to form 5-methylcytosine"
acctcagtttaactccttctcactttaaaaaaaagtgttggtacagccattatgtcaggacgtgcagctgtcgtatgtctactgataattttgaatgaatgactgagctagctatgttcagt

SEQ ID NO: 16684 - DNA, 122 bp, Homo sapiens
  misc_feature (61)..(62): /note="This region represents a CpG dinucleotide"
  misc_feature (61)..(61): /note="Nucleotide may be methylated to form 5-methylcytosine"
gtacgaggaggcaaacacataaggcacgaggcgagaaacgtgcagagcggaggacgaggccgacggacggggaggctgggggggacactaggcagcctggccaactctgcttgtccccctgc

SEQ ID NO: 16685 - DNA, 122 bp, Homo sapiens
  misc_feature (61)..(62): /note="This region represents a CpG dinucleotide"
  misc_feature (61)..(61): /note="Nucleotide may be methylated to form 5-methylcytosine"
ctgcccacgtggacaagactctcatttctcttctgctttctggtcctacagggttttatccgtactccctctcactgtgaaacaccagagataaaatctccaaagataagtgcttaagaggt

SEQ ID NO: 16686 - DNA, 122 bp, Homo sapiens
  misc_feature (61)..(62): /note="This region represents a CpG dinucleotide"
  misc_feature (61)..(61): /note="Nucleotide may be methylated to form 5-methylcytosine"
tgtttaaggcaacaatcaccaacatttggtacacatgagccatcctgtgaaacatcaaggcgcttcgttggcagcaagtcaacttcggtttcagaagaaagctgcactatttcctgaggtta

SEQ ID NO: 16687 - DNA, 122 bp, Homo sapiens
  misc_feature (61)..(62): /note="This region represents a CpG dinucleotide"
  misc_feature (61)..(61): /note="Nucleotide may be methylated to form 5-methylcytosine"
ccatgatctttagagtagtaaaaggtagaaacaactccctttgttccatctctgctcacacgacacctccttagagagggtcttgacctggacaaataaagtggcccctgtcttcttaccat

SEQ ID NO: 16688 - DNA, 122 bp, Homo sapiens
  misc_feature (61)..(62): /note="This region represents a CpG dinucleotide"
  misc_feature (61)..(61): /note="Nucleotide may be methylated to form 5-methylcytosine"
cctattcaggatggagttgctctggttcacaggcctctgacacatcctcttgtgttttggcgtgtgggaggaaagaggggtgagggaaggaaactcaaaaccaagctctgaccacacagggc

SEQ ID NO: 16689 - DNA, 122 bp, Homo sapiens
  misc_feature (61)..(62): /note="This region represents a CpG dinucleotide"
  misc_feature (61)..(61): /note="Nucleotide may be methylated to form 5-methylcytosine"
ggcagctagaacactcctggtatcccagaaggaacagaaacaagagtttgctctgcctctcgatctgtactctgggcttggaagcagcagctatcttaataagtctgcccagtcttgcttct

SEQ ID NO: 16690 - DNA, 122 bp, Homo sapiens
  misc_feature (61)..(62): /note="This region represents a CpG dinucleotide"
  misc_feature (61)..(61): /note="Nucleotide may be methylated to form 5-methylcytosine"
agccgctgggccggccacacccgccttcggagtcactgtcagctctgcatcatcatcccacggaggctcacagggtcacaaggccccggcccaagagcagtcccacactagagcctccctct

SEQ ID NO: 16691 - DNA, 122 bp, Homo sapiens
  misc_feature (61)..(62): /note="This region represents a CpG dinucleotide"
  misc_feature (61)..(61): /note="Nucleotide may be methylated to form 5-methylcytosine"
tttcttagactgcaatgaaccatgaacttcagcacactatcactaaaacattgcttttgtcgtcctgttggtggaagatttaaggagggttacatttttgtccatttcttttcttttccttt

SEQ ID NO: 16692 - DNA, 122 bp, Homo sapiens
  misc_feature (61)..(62): /note="This region represents a CpG dinucleotide"
  misc_feature (61)..(61): /note="Nucleotide may be methylated to form 5-methylcytosine"
gatcactacatttaaagcagtccaatagtggaacaggctgcctcacaaatagtgagctctcgtttcctctacacagattctactatgggccaggatctcagccaagcagtggagccagaggc

SEQ ID NO: 16693 - DNA, 122 bp, Homo sapiens
  misc_feature (61)..(62): /note="This region represents a CpG dinucleotide"
  misc_feature (61)..(61): /note="Nucleotide may be methylated to form 5-methylcytosine"
atataccttgacctgtagggatgtgtccatgagggaatgaatgtcccagtgttgctccagcgatacccctggccacaaagacacgcctgaaattgctgagggcttaaggcactggaaggcct

SEQ ID NO: 16694 - DNA, 122 bp, Homo sapiens
  misc_feature (61)..(62): /note="This region represents a CpG dinucleotide"
  misc_feature (61)..(61): /note="Nucleotide may be methylated to form 5-methylcytosine"
atagtgtgcttctgggtggggccacaggaccagtgggcggtccaggtagagccatgcgaacgcccgaaaagacgtctcaaaaggccaatcttaggttaaaccacagtgatgttatctgtagg

SEQ ID NO: 16695 - DNA, 122 bp, Homo sapiens
  misc_feature (61)..(62): /note="This region represents a CpG dinucleotide"
  misc_feature (61)..(61): /note="Nucleotide may be methylated to form 5-methylcytosine"
ggcaaaacaggttacaggagggaaaaagaggagacatggctagcaaagatggttttgttacgtaggtggaaacccacaggtagcaaccctcaaaagatgtagtaaatgtttctttgagatct

SEQ ID NO: 16696 - DNA, 122 bp, Homo sapiens
  misc_feature (61)..(62): /note="This region represents a CpG dinucleotide"
  misc_feature (61)..(61): /note="Nucleotide may be methylated to form 5-methylcytosine"
tgatgtgatacaaccagaaaactgcatgggttggcacacaatgagagactcctggggacacgtccctaaaagtagctccaaggcaggaattaaaaatggttctggaagcttttgagcaactg

SEQ ID NO: 16697 - DNA, 122 bp, Homo sapiens
  misc_feature (61)..(62): /note="This region represents a CpG dinucleotide"
  misc_feature (61)..(61): /note="Nucleotide may be methylated to form 5-methylcytosine"
cctggcttggagaaatggcacttaagtgctgtgaaacagctgaattattaaaaggagatgcgaaagagagaaaccaaaaggaggtatttgtgttttgagaaaaataggagggagggtggggg

SEQ ID NO: 16698 - DNA, 122 bp, Homo sapiens
  misc_feature (61)..(62): /note="This region represents a CpG dinucleotide"
  misc_feature (61)..(61): /note="Nucleotide may be methylated to form 5-methylcytosine"
taaaataaggcttagaacaatgcccagcacacagtaagcacctagtgctgtaactgtcatcgttgctgttatgtacctattaaatgttcgtagagttatataaactaacatgaaaccacttt

SEQ ID NO: 16699 - DNA, 122 bp, Homo sapiens
  misc_feature (61)..(62): /note="This region represents a CpG dinucleotide"
  misc_feature (61)..(61): /note="Nucleotide may be methylated to form 5-methylcytosine"
ctctctacaggggaaattccctactggagacagctttgctgaatgagcttgactgcagtgcgaatgctggggcttattgtggtgactatgaggtcaccaaggttgccaaatcccaagggcat

SEQ ID NO: 16700 - DNA, 122 bp, Homo sapiens
  misc_feature (61)..(62): /note="This region represents a CpG dinucleotide"
  misc_feature (61)..(61): /note="Nucleotide may be methylated to form 5-methylcytosine"
taggccgaagccagtaagcagtggtttttccttgcagatgactcagaggctggagctaagcggccccggaccaccatcacagccaagcagctggagacattaaagaatgcatacaagaactc

SEQ ID NO: 16701 - DNA, 122 bp, Homo sapiens
  misc_feature (61)..(62): /note="This region represents a CpG dinucleotide"
  misc_feature (61)..(61): /note="Nucleotide may be methylated to form 5-methylcytosine"
gtaataaactaatcgtgtctgtacatttcccaacagaatttgggccaccaaatattttcacgtacattatcccattgattctcacaacaacactgtcaaatagtaaagggattcttcttttc

SEQ ID NO: 16702 - DNA, 122 bp, Homo sapiens
  misc_feature (61)..(62): /note="This region represents a CpG dinucleotide"
  misc_feature (61)..(61): /note="Nucleotide may be methylated to form 5-methylcytosine"
tcgccctgcacgcacttgtgagctaagctaatatgattcaatgcagaacacaacacaggtcgaggagtgaatcattctgccagggacgtgcaagtgacacagctggagggcgtgtgaagcat

SEQ ID NO: 16703 - DNA, 122 bp, Homo sapiens
  misc_feature (61)..(62): /note="This region represents a CpG dinucleotide"
  misc_feature (61)..(61): /note="Nucleotide may be methylated to form 5-methylcytosine"
tctcaacacacccattcatatcttttgcctattgttccatggggcaatggctttattttgcgtatttatttctaggagctatttatattttagggaggttagcttattatctataatatgaa

SEQ ID NO: 16704 - DNA, 122 bp, Homo sapiens
  misc_feature (61)..(62): /note="This region represents a CpG dinucleotide"
  misc_feature (61)..(61): /note="Nucleotide may be methylated to form 5-methylcytosine"
ttagggctggaagggatgtgacagacgatcttgccaagcccggcccttcttctacaaggacgtcttcagagatctggaggaggaaagggccttgccctgagttcgctgagccagaacaatag

SEQ ID NO: 16705 - DNA, 122 bp, Homo sapiens
  misc_feature (61)..(62): /note="This region represents a CpG dinucleotide"
  misc_feature (61)..(61): /note="Nucleotide may be methylated to form 5-methylcytosine"
gggccttcaacaacctctacagggcagagcaggcctggctgcttccccaggccagctgcacggggaccttccatgtgggttaaatgtccacaccccaggcaaagcctaaagcacacactgga

SEQ ID NO: 16706 - DNA, 122 bp, Homo sapiens
  misc_feature (61)..(62): /note="This region represents a CpG dinucleotide"
  misc_feature (61)..(61): /note="Nucleotide may be methylated to form 5-methylcytosine"
tttatgagtagtttacagctgttgtctctttgtgcccaagaccatggagaatccaggagccgatctgatcctcctgggactgctattaatatcactttcactttagacagctttgccttcaa

SEQ ID NO: 16707 - DNA, 122 bp, Homo sapiens
  misc_feature (61)..(62): /note="This region represents a CpG dinucleotide"
  misc_feature (61)..(61): /note="Nucleotide may be methylated to form 5-methylcytosine"
aatacctggagaggtaatatgatttacaacttaatgagaaaaataaaataatttgctgagcgtgagtgaagctactttagagaatgagaacagtaaagattttactgtgttgataaagactg

SEQ ID NO: 16708 - DNA, 122 bp, Homo sapiens
  misc_feature (61)..(62): /note="This region represents a CpG dinucleotide"
  misc_feature (61)..(61): /note="Nucleotide may be methylated to form 5-methylcytosine"
tactgtggttaccattcttgggaggccattttaagatttcttaaagtgacccagagaaatcgtagcttggtatttactaaatgtgtttgtgtatgttatttcatagctgtatacgctcacct

SEQ ID NO: 16709 - DNA, 122 bp, Homo sapiens
  misc_feature (61)..(62): /note="This region represents a CpG dinucleotide"
  misc_feature (61)..(61): /note="Nucleotide may be methylated to form 5-methylcytosine"
atgaatgtttgttgagtgaataatataggccatgtcagaagcatactcatattcttctcacggtgtctgaggttgaaatgcagtgagcctgacataagctcaaacctgtctggagccaagta

SEQ ID NO: 16710 - DNA, 122 bp, Homo sapiens
  misc_feature (61)..(62): /note="This region represents a CpG dinucleotide"
  misc_feature (61)..(61): /note="Nucleotide may be methylated to form 5-methylcytosine"
aatacgtgtgctatgcacgtaaagcagctggcgtcctaacagagcagccactgggtaagtcgctgcttcctcccagccccactcccactgtgaaggagggctgccacacctgtctcatggac

SEQ ID NO: 16711 - DNA, 122 bp, Homo sapiens
  misc_feature (61)..(62): /note="This region represents a CpG dinucleotide"
  misc_feature (61)..(61): /note="Nucleotide may be methylated to form 5-methylcytosine"
gaaatacaggaggaggctgttttacaatgagcatgagcatgtcagagcaaggttcagagacgcggagagatattaatatggagcctttgtttacatacagaagacaaggacgtcatgccaga

SEQ ID NO: 16712 - DNA, 122 bp, Homo sapiens
  misc_feature (61)..(62): /note="This region represents a CpG dinucleotide"
  misc_feature (61)..(61): /note="Nucleotide may be methylated to form 5-methylcytosine"
taagccaaatttgccttcctggatacctcctgctggcgggtgatgaactgccttcagaagcggctgccctgggtttgttagtgtttgtactatcgggtgctgcatctctgtctctgcatgag

SEQ ID NO: 16713 - DNA, 122 bp, Homo sapiens
  misc_feature (61)..(62): /note="This region represents a CpG dinucleotide"
  misc_feature (61)..(61): /note="Nucleotide may be methylated to form 5-methylcytosine"
tctcatgagccatctggatcttaatggttattttcttataagactgttgagtttacagtacgacagaactgtgtttaccttggaatgagggctgtcctctattaagaagctttcagtacagc

SEQ ID NO: 16714 - DNA, 122 bp, Homo sapiens
  misc_feature (61)..(62): /note="This region represents a CpG dinucleotide"
  misc_feature (61)..(61): /note="Nucleotide may be methylated to form 5-methylcytosine"
gttgaatttgaggtgtccttcttgtctctaggatcacatgagagtcgttggtaaccctgtcgtgtccagaaagccagtgctgggcctttagctctagtccatcagggtaatgccaaaccccg

SEQ ID NO: 16715 - DNA, 122 bp, Homo sapiens
  misc_feature (61)..(62): /note="This region represents a CpG dinucleotide"
  misc_feature (61)..(61): /note="Nucleotide may be methylated to form 5-methylcytosine"
tttctgccggtttctccattttatcctgtctggaccacatcctgttttggtcagcagtgtcgtgaccaaaaagcaagtcctgctggtctgttacctcatgagaaaggatgccttttcaccat

SEQ ID NO: 16716 - DNA, 122 bp, Homo sapiens
  misc_feature (61)..(62): /note="This region represents a CpG dinucleotide"
  misc_feature (61)..(61): /note="Nucleotide may be methylated to form 5-methylcytosine"
ggcccctgccagccagatgtttggggccaaagtccatgcttccctgccctgtgggtaacacgggggagattactgtttgaagtactttggacagtcacaccaggtcaaaaggtctgtgtggt

SEQ ID NO: 16717 - DNA, 122 bp, Homo sapiens
  misc_feature (61)..(62): /note="This region represents a CpG dinucleotide"
  misc_feature (61)..(61): /note="Nucleotide may be methylated to form 5-methylcytosine"
agccaggttttgaacccagttctgtttggttttaatgccagatacttaaccattgtagcacgttggcttcctcattgatctgcctagtaaacaggtatatgatatgtgtaaaatactttaca

SEQ ID NO: 16718 - DNA, 122 bp, Homo sapiens
  misc_feature (61)..(62): /note="This region represents a CpG dinucleotide"
  misc_feature (61)..(61): /note="Nucleotide may be methylated to form 5-methylcytosine"
tgctctgcagcaccctctgaacccgatatcccaggcctgggaggtgctgaaggctcaggacgcctcttattgctctgaagtctttgtgaccaagtggagtgctgtgactgtggggccaagag

SEQ ID NO: 16719 - DNA, 122 bp, Homo sapiens
  misc_feature (61)..(62): /note="This region represents a CpG dinucleotide"
  misc_feature (61)..(61): /note="Nucleotide may be methylated to form 5-methylcytosine"
tattaagaggcatcccaagaatgatgacatcacatgtccttctaaggaatcgaacactagcgattgtgaactccagcaagaagatgttttgtctttgagatgagtaatgaggagaaaatggc

SEQ ID NO: 16720 - DNA, 122 bp, Homo sapiens
  misc_feature (61)..(62): /note="This region represents a CpG dinucleotide"
  misc_feature (61)..(61): /note="Nucleotide may be methylated to form 5-methylcytosine"
gatgaacggagatgattcattaggccattctagcttaatggatgcatcactgtgcaaccacgcaaatgcctcatttctgattcactcatttaatatttattgaggagtgctgggtactaggc

SEQ ID NO: 16721 - DNA, 122 bp, Homo sapiens
  misc_feature (61)..(62): /note="This region represents a CpG dinucleotide"
  misc_feature (61)..(61): /note="Nucleotide may be methylated to form 5-methylcytosine"
ggctgtttggctgttggcattgggtgtttgccttgtgatatacccagaaaaggattcatacgttacatatgatgaagtctggggatgggactggattctgagagtataaagatggcaatgca

SEQ ID NO: 16722 - DNA, 122 bp, Homo sapiens
  misc_feature (61)..(62): /note="This region represents a CpG dinucleotide"
  misc_feature (61)..(61): /note="Nucleotide may be methylated to form 5-methylcytosine"
ccacgccaagccccagccggcgtggggttccagccctttccggggaaggattggccgaggcgctcacctgtttgccctggtgaccaatgggctcgagctgcccgggctaggtcccgggctcg

SEQ ID NO: 16723 - DNA, 122 bp, Homo sapiens
  misc_feature (61)..(62): /note="This region represents a CpG dinucleotide"
  misc_feature (61)..(61): /note="Nucleotide may be methylated to form 5-methylcytosine"
tcaaggagagggccccatgacagcacagcaatacacaagcacacctgacacaggctggcacgcctccccccaaggtggggctggtgggtctacatgacttctctgcatcctgaggatcggcc

SEQ ID NO: 16724 - DNA, 122 bp, Homo sapiens
  misc_feature (61)..(62): /note="This region represents a CpG dinucleotide"
  misc_feature (61)..(61): /note="Nucleotide may be methylated to form 5-methylcytosine"
taagagggtgtgagagtgccaagcatgcgacaggctctccatgcctgcctggggctggggcgggagaccccagggaacatggggtgtcagaggcctatctgcccccttgccaccacgacaag

SEQ ID NO: 16725 - DNA, 122 bp, Homo sapiens
  misc_feature (61)..(62): /note="This region represents a CpG dinucleotide"
  misc_feature (61)..(61): /note="Nucleotide may be methylated to form 5-methylcytosine"
tcgaaccggggaactctgcatattttcctcctgggtttgtggggtgtggacagcacggagcgtgatgaaaggatacaggcggctgggcgtggtggctcacgcctgtaatcccagcactttgg

SEQ ID NO: 16726 - DNA, 122 bp, Homo sapiens
  misc_feature (61)..(62): /note="This region represents a CpG dinucleotide"
  misc_feature (61)..(61): /note="Nucleotide may be methylated to form 5-methylcytosine"
caagaggccccagacttgctggaaaggcagatgtgtttaaaaatgaaaagaaaaccggaacggaaaggtctgttcactggcaaaagaagtatttacaaatcattgtggaaatatagagaccg

SEQ ID NO: 16727 - DNA, 122 bp, Homo sapiens
  misc_feature (61)..(62): /note="This region represents a CpG dinucleotide"
  misc_feature (61)..(61): /note="Nucleotide may be methylated to form 5-methylcytosine"
aaattgtggtcgctcataagaatgcaatattaacactcattcgaaaagacagcagcacatcgagggtttttcttatgggaccccagctggccccacccagaagacagagctcagtgactcca

SEQ ID NO: 16728 - DNA, 122 bp, Homo sapiens
  misc_feature (61)..(62): /note="This region represents a CpG dinucleotide"
  misc_feature (61)..(61): /note="Nucleotide may be methylated to form 5-methylcytosine"
acacttttgaattgtacagcctcttggttgaagatctacgtcctcaaagtgcgggcttgccgtggagtaacacagatcccctctggcaactcgtctgggacgaagggcgtttttgcttagtg

SEQ ID NO: 16729 - DNA, 122 bp, Homo sapiens
  misc_feature (61)..(62): /note="This region represents a CpG dinucleotide"
  misc_feature (61)..(61): /note="Nucleotide may be methylated to form 5-methylcytosine"
cagagcgagactctgtctcaaaagaaacaaacaaaagaactggaggtggcccggcccctgcgtctaacagtcctgggccctccacaccagcacaggaactcaagcctgcagtcactggggcc

SEQ ID NO: 16730 - DNA, 122 bp, Homo sapiens
  misc_feature (61)..(62): /note="This region represents a CpG dinucleotide"
  misc_feature (61)..(61): /note="Nucleotide may be methylated to form 5-methylcytosine"
ctcacatgaagtagaaaatgtgcctggatatcctcctcctttctttgttaatcttcaagacgttggccaggcttcccttcatccatcatttctccctaaagagtctagctctcagtgattgc

SEQ ID NO: 16731 - DNA, 122 bp, Homo sapiens
  misc_feature (61)..(62): /note="This region represents a CpG dinucleotide"
  misc_feature (61)..(61): /note="Nucleotide may be methylated to form 5-methylcytosine"
ggtcacacgttaaagagcgtccactacccaaagaacaggcctctctgagcactcagaggacgcggttcccacacgcacacaacagtcggccccggggaaatgctctgcaaagtgagctttaa

SEQ ID NO: 16732 - DNA, 122 bp, Homo sapiens
  misc_feature (61)..(62): /note="This region represents a CpG dinucleotide"
  misc_feature (61)..(61): /note="Nucleotide may be methylated to form 5-methylcytosine"
tcatcataaaacccaccacctaggagaaaatattaaatgatgcatgtcttggagaatcaacgtagttagcagaggagagctttcctaacacaatagaaaaatgcctttggacggtgtcggta

SEQ ID NO: 16733 - DNA, 122 bp, Homo sapiens
  misc_feature (61)..(62): /note="This region represents a CpG dinucleotide"
  misc_feature (61)..(61): /note="Nucleotide may be methylated to form 5-methylcytosine"
ttaaaggcaggctcgagccaagagacgtgatgaattgcaagaatgtgttgtgttcatagccggggagctggcagaaatagcccagctaaaggactaggatggaagggttttttttgttgttg

SEQ ID NO: 16734 - DNA, 122 bp, Homo sapiens
  misc_feature (61)..(62): /note="This region represents a CpG dinucleotide"
  misc_feature (61)..(61): /note="Nucleotide may be methylated to form 5-methylcytosine"
cagtctggtaacactggtgcattgtatgcggcagtaagaaatgacaactccaaatgaggccggcttctctcttaatgtgatcagcttgctatgccctcaacgattccatgagattttgcatt

SEQ ID NO: 16735 - DNA, 122 bp, Homo sapiens
  misc_feature (61)..(62): /note="This region represents a CpG dinucleotide"
  misc_feature (61)..(61): /note="Nucleotide may be methylated to form 5-methylcytosine"
agacagcagtgtaaacactcagacaaaaacagagagcccggggaaaggccactgaattaacgtgtgtgttacctagacaggggtgaaagtagtttaaataaaattaaaagtatatggccaaa

SEQ ID NO: 16736 - DNA, 122 bp, Homo sapiens
  misc_feature (61)..(62): /note="This region represents a CpG dinucleotide"
  misc_feature (61)..(61): /note="Nucleotide may be methylated to form 5-methylcytosine"
gaactaaataaaagagctcccacatgaaaattgttatgtgaaaaattctagaagacaaagcggtgtccagtatttgtacaggtaagatgacttcagatggaaccaaggcaaacctgttttgc

SEQ ID NO: 16737 - DNA, 122 bp, Homo sapiens
  misc_feature (61)..(62): /note="This region represents a CpG dinucleotide"
  misc_feature (61)..(61): /note="Nucleotide may be methylated to form 5-methylcytosine"
tttcatagttctgattccctctgtaatgactgcggccctctgtttccatctgatatcgaacgctagtaacactgagaaggaagcagaaaacaatgctcccaagtgcgagaaagagtgagttt

SEQ ID NO: 16738 - DNA, 122 bp, Homo sapiens
  misc_feature (61)..(62): /note="This region represents a CpG dinucleotide"
  misc_feature (61)..(61): /note="Nucleotide may be methylated to form 5-methylcytosine"
aggaatctgacgactgctactgatcattccagtcgtacctggccacactgacagcgcacacgcacacatgcagacaccacaggttctgattactgggggacgtcttctaataagaactaacc

SEQ ID NO: 16739 - DNA, 122 bp, Homo sapiens
  misc_feature (61)..(62): /note="This region represents a CpG dinucleotide"
  misc_feature (61)..(61): /note="Nucleotide may be methylated to form 5-methylcytosine"
ggaggcatgtccagcttctgatttctttgtaaaaatctctggtacctcaggctcatccagcgtctgcttttcagatgtttttccctccgggacagggaggtctagctcatttggacaaggtg

SEQ ID NO: 16740 - DNA, 122 bp, Homo sapiens
  misc_feature (61)..(62): /note="This region represents a CpG dinucleotide"
  misc_feature (61)..(61): /note="Nucleotide may be methylated to form 5-methylcytosine"
ggaagcacggactggtcctcctcagctctcccacctatgtgcttttaacaagtcaccgcacggctctgccatctacttacaccaggtggccacaaggccctaactgccacccaagcagacac

SEQ ID NO: 16741 - DNA, 122 bp, Homo sapiens
  misc_feature (61)..(62): /note="This region represents a CpG dinucleotide"
  misc_feature (61)..(61): /note="Nucleotide may be methylated to form 5-methylcytosine"
cttagtcatctctagccttgggcacatttcataacgcatgagtctcagtttccacatatacggaaaggagataaacatccgggctcagcttatctccaaagagttcctgggaaggtcaagca

SEQ ID NO: 16742 - DNA, 122 bp, Homo sapiens
  misc_feature (61)..(62): /note="This region represents a CpG dinucleotide"
  misc_feature (61)..(61): /note="Nucleotide may be methylated to form 5-methylcytosine"
cttaacaatgtaaacactgaatattggtttatccaccccaaatacattataactatattgcggggagtttcctgggggacagcgagagggtggaggctgtaaacagtctaaatcttcaactt

SEQ ID NO: 16743 - DNA, 122 bp, Homo sapiens
  misc_feature (61)..(62): /note="This region represents a CpG dinucleotide"
  misc_feature (61)..(61): /note="Nucleotide may be methylated to form 5-methylcytosine"
tgaagagctaattcttccctctaataataatactctttgaccatttactatatgtcaaaccgtattttaaggactttaaaggtattaattcgtttaatcttcacagcaatcctgtgagtagg

SEQ ID NO: 16744 - DNA, 122 bp, Homo sapiens
  misc_feature (61)..(62): /note="This region represents a CpG dinucleotide"
  misc_feature (61)..(61): /note="Nucleotide may be methylated to form 5-methylcytosine"
agtgttttccagcagagggcatccttatgcaacgaatttctctaccctcagaattatttgcggatattgaagtgcattagggaacagattttgcttttaaaggctttgcagttcagtttgtt

SEQ ID NO: 16745 - DNA, 122 bp, Homo sapiens
  misc_feature (61)..(62): /note="This region represents a CpG dinucleotide"
  misc_feature (61)..(61): /note="Nucleotide may be methylated to form 5-methylcytosine"
aagaattctataaatgttaaaatggaatctacaaaaacactctcctggcttccttgggaacgtaatggggcctagaagctgcctgtggctatgctagatcttacatggcctaaaaggatcca

SEQ ID NO: 16746 - DNA, 122 bp, Homo sapiens
  misc_feature (61)..(62): /note="This region represents a CpG dinucleotide"
  misc_feature (61)..(61): /note="Nucleotide may be methylated to form 5-methylcytosine"
agatctcctttctgtttcagtttcttctattcatcatttccttcacaaggcatttgtacacgctgttctttggcctggaatgttcttccctcttccctttatctagttaatgcctgcttttc

SEQ ID NO: 16747 - DNA, 122 bp, Homo sapiens
  misc_feature (61)..(62): /note="This region represents a CpG dinucleotide"
  misc_feature (61)..(61): /note="Nucleotide may be methylated to form 5-methylcytosine"
gtgattgaggggcaggtggctggagagatgggcagggcctcctaggcatggggtgactgacgcaccagtggtctgcaaaaacggagcatcacaccagtgcgcatgagctctcctgccccttg

SEQ ID NO: 16748 - DNA, 122 bp, Homo sapiens
  misc_feature (61)..(62): /note="This region represents a CpG dinucleotide"
  misc_feature (61)..(61): /note="Nucleotide may be methylated to form 5-methylcytosine"
agtagtccgtgttcccctgacagcagtccagaatgtggcggtgtcacttccttctgctgtcggccattctcttctgcacacaagtcttcttagacagaatttataggacactggaaatcaag

SEQ ID NO: 16749 - DNA, 122 bp, Homo sapiens
  misc_feature (61)..(62): /note="This region represents a CpG dinucleotide"
  misc_feature (61)..(61): /note="Nucleotide may be methylated to form 5-methylcytosine"
ggtgatccgccctcctcggcctcccaaagtgctgggattacaggtgtgagccacggtgcacggcccctggagaggttttaatggcccagcctcacacccaggtctggcctcccaggccacca

SEQ ID NO: 16750 - DNA, 122 bp, Homo sapiens
  misc_feature (61)..(62): /note="This region represents a CpG dinucleotide"
  misc_feature (61)..(61): /note="Nucleotide may be methylated to form 5-methylcytosine"
agctagcctgaactcaggggcctagcagagatctcatgacaacagcttccagagtctcaacgccctgtgcttgccccaggccaagtcactgctgcccagagaggattatgggcaaaatagaa

SEQ ID NO: 16751 - DNA, 122 bp, Homo sapiens
  misc_feature (61)..(62): /note="This region represents a CpG dinucleotide"
  misc_feature (61)..(61): /note="Nucleotide may be methylated to form 5-methylcytosine"
actcacatatggctcattcaaagccactggcttgtacatggcatttatcgttaatctagccgtgcccccagcatcataaaaagaccccatggaaactcatccatcagatcccagcccttgac

SEQ ID NO: 16752 - DNA, 122 bp, Homo sapiens
  misc_feature (61)..(62): /note="This region represents a CpG dinucleotide"
  misc_feature (61)..(61): /note="Nucleotide may be methylated to form 5-methylcytosine"
aagaagttggagtcccagagatgtttgctttccctatagaaattaaagatagtatcttcacgtatgtccctgagttgtctttcagaggcttggaccccctaactgaggaccccccaaactga

SEQ ID NO: 16753 - DNA, 122 bp, Homo sapiens
  misc_feature (61)..(62): /note="This region represents a CpG dinucleotide"
  misc_feature (61)..(61): /note="Nucleotide may be methylated to form 5-methylcytosine"
gacccaggagccccctgggaggtggcggggtgcagctggaccctggacccccgccgagagcgccctgggacgcgggctgtggtcacgtcccctgaggccctgggctgtgtccagcaggtctc

SEQ ID NO: 16754 - DNA, 122 bp, Homo sapiens
  misc_feature (61)..(62): /note="This region represents a CpG dinucleotide"
  misc_feature (61)..(61): /note="Nucleotide may be methylated to form 5-methylcytosine"
tttcgctgcatatttttcttactctttgttccctgactccagtgatttgataagaggaatcgacagagatccaaagaaaagcaagagacctcattaaggttcacttgaagcatgttctccca

SEQ ID NO: 16755 - DNA, 122 bp, Homo sapiens
  misc_feature (61)..(62): /note="This region represents a CpG dinucleotide"
  misc_feature (61)..(61): /note="Nucleotide may be methylated to form 5-methylcytosine"
atgtgcctatagcacactttgtttatccactcgtctgttattgggcatttagattgttcccgctttttggctattgtgaatcatgctcttgggaacataggtgtacaaatatctgtttgagt

SEQ ID NO: 16756 - DNA, 122 bp, Homo sapiens
  misc_feature (61)..(62): /note="This region represents a CpG dinucleotide"
  misc_feature (61)..(61): /note="Nucleotide may be methylated to form 5-methylcytosine"
ttcattctctaaggcccatcttctgagtcagcttcctcattcttgcaagtcaaatgcttccgttcattcctctagagtctcataccattttttacttctgctttggcatttaatcaattttc

SEQ ID NO: 16757 - DNA, 122 bp, Homo sapiens
  misc_feature (61)..(62): /note="This region represents a CpG dinucleotide"
  misc_feature (61)..(61): /note="Nucleotide may be methylated to form 5-methylcytosine"
ggtttatgtgattagccctatttcttcagggcagctccatttcattagttcccaattactcgttaaacaaccttgacaatgagttacacatgcttagtcatttccatggaactctcatttat

SEQ ID NO: 16758 - DNA, 122 bp, Homo sapiens
  misc_feature (61)..(62): /note="This region represents a CpG dinucleotide"
  misc_feature (61)..(61): /note="Nucleotide may be methylated to form 5-methylcytosine"
cacataatattgttgaaaagccaagtctgcattgctcttaaacccagccttatggatgaacgcggaggagtgcaaaaggcagaatgagctcatttgggagaggcagctggtcagagagtcct

SEQ ID NO: 16759 - DNA, 122 bp, Homo sapiens
  misc_feature (61)..(62): /note="This region represents a CpG dinucleotide"
  misc_feature (61)..(61): /note="Nucleotide may be methylated to form 5-methylcytosine"
gccagactgacttcatttcctttttgataggattgcatgatagggagatgccataataatcgtatcttgagttcagaaaagcaaattgtgagactctctcatgatattcttgtagacaacaa

SEQ ID NO: 16760 - DNA, 122 bp, Homo sapiens
  misc_feature (61)..(62): /note="This region represents a CpG dinucleotide"
  misc_feature (61)..(61): /note="Nucleotide may be methylated to form 5-methylcytosine"
tctctgagaccaagtgagtctctggggatgggtggagtcgaaaacctctcccttgctgggcgatactgtcttgtgttgacgttcaaaaatatctcctttaagttatcaaaagaaccatctct

SEQ ID NO: 16761 - DNA, 122 bp, Homo sapiens
  misc_feature (61)..(62): /note="This region represents a CpG dinucleotide"
  misc_feature (61)..(61): /note="Nucleotide may be methylated to form 5-methylcytosine"
tcttcttaaattaagctatctcaaacaaaaaatatgtgctcactagtgcgatttctgtagcggatctatgccaaatattttcagtccttctctatgtatttatcacaattgcacttgtcaaa

SEQ ID NO: 16762 - DNA, 122 bp, Homo sapiens
  misc_feature (61)..(62): /note="This region represents a CpG dinucleotide"
  misc_feature (61)..(61): /note="Nucleotide may be methylated to form 5-methylcytosine"
tctccctggctgtcccttcaagcagggggaggtcctagccgtagcatccaccttctgctgcggccagaaaagagccagtgaaaaccactcagaacttccctgtcactgaaaggccattaaat

SEQ ID NO: 16763 - DNA, 122 bp, Homo sapiens
  misc_feature (61)..(62): /note="This region represents a CpG dinucleotide"
  misc_feature (61)..(61): /note="Nucleotide may be methylated to form 5-methylcytosine"
cagtgactccatcttgggctattgactccatgctgagctgctgctaaactttgaggcccacgaagaaactgtgaaaaatatttccttcacaaacaactgttataaataaagttttggtgttg

SEQ ID NO: 16764 - DNA, 122 bp, Homo sapiens
  misc_feature (61)..(62): /note="This region represents a CpG dinucleotide"
  misc_feature (61)..(61): /note="Nucleotide may be methylated to form 5-methylcytosine"
tctctcctccgtaatcctagcacacaggcccagtgcctggcccatttggggtgcttagtacgttttggaggtcacttccaagtgtttcaggtatagtaaattgttcctttacagagaactcc

SEQ ID NO: 16765 - DNA, 122 bp, Homo sapiens
  misc_feature (61)..(62): /note="This region represents a CpG dinucleotide"
  misc_feature (61)..(61): /note="Nucleotide may be methylated to form 5-methylcytosine"
atgtagctatgagagcatgaaaccgtgcgctcacgccgcacacgagttgggtaaatggagcgcctcattttccagatgtgttacagaaactgtgctggaggatgtgactggccagtgagaca

SEQ ID NO: 16766 - DNA, 122 bp, Homo sapiens
  misc_feature (61)..(62): /note="This region represents a CpG dinucleotide"
  misc_feature (61)..(61): /note="Nucleotide may be methylated to form 5-methylcytosine"
gcagtttcacttccagatctcaacaatcatcttgtgtagtgtgtttcagccctaactgcacgcaatctgcttgcaagaggcaatgaatatttgctgactgagaagtgcctgatatttctctt

SEQ ID NO: 16767 - DNA, 122 bp, Homo sapiens
  misc_feature (61)..(62): /note="This region represents a CpG dinucleotide"
  misc_feature (61)..(61): /note="Nucleotide may be methylated to form 5-methylcytosine"
ttccttggtctctcttgaccacaaagtccacgattcagtcactctatgatttctatcaaacgttagtctttgatacaggaaaggaatgtaaagatagcatattttattttcagcattgttat

SEQ ID NO: 16768 - DNA, 122 bp, Homo sapiens
  misc_feature (61)..(62): /note="This region represents a CpG dinucleotide"
  misc_feature (61)..(61): /note="Nucleotide may be methylated to form 5-methylcytosine"
tgttttataagtgctccatgaaatcaatcactgttcttttaagcgagttgtcatgttctgcgaaataatcactatgaactaagataaaggaacctgagatctgattacaaaaaaaaaggtga

SEQ ID NO: 16769 - DNA, 122 bp, Homo sapiens
  misc_feature (61)..(62): /note="This region represents a CpG dinucleotide"
  misc_feature (61)..(61): /note="Nucleotide may be methylated to form 5-methylcytosine"
ttcttggggttgatcttgaacttggccccatgaggcctatagtgcacgggagtgggcgtccgctcctcctccagggagcgcaggtagtggccgggcaggcgggaacagatgccctcccgcag

SEQ ID NO: 16770 - DNA, 122 bp, Homo sapiens
  misc_feature (61)..(62): /note="This region represents a CpG dinucleotide"
  misc_feature (61)..(61): /note="Nucleotide may be methylated to form 5-methylcytosine"
aggtatctgctccagtttctaccttcggtagtgacaatgtgtttgtttgcatttcccacacgtgtgtccaatgtttgcttgttttcttcttcaggaaatcaactttttgtgagtgtgctgaa

SEQ ID NO: 16771 - DNA, 122 bp, Homo sapiens
  misc_feature (61)..(62): /note="This region represents a CpG dinucleotide"
  misc_feature (61)..(61): /note="Nucleotide may be methylated to form 5-methylcytosine"
tgcacttcgaagctgaggcctgaacagatcccaaccttttttggaagctgctttctcttacgtaaaacatagacactggtaatcctactaccaacacttgtgataagaacagcatatatttg

SEQ ID NO: 16772 - DNA, 122 bp, Homo sapiens
  misc_feature (61)..(62): /note="This region represents a CpG dinucleotide"
  misc_feature (61)..(61): /note="Nucleotide may be methylated to form 5-methylcytosine"
ctttgacctttgtcttttccctttgcttttagattttggctctctatttgacttggagcacgacttaccagatgaattaatcaactctacagaattgggactaaccaatggtggtgatatta

SEQ ID NO: 16773 - DNA, 122 bp, Homo sapiens
  misc_feature (61)..(62): /note="This region represents a CpG dinucleotide"
  misc_feature (61)..(61): /note="Nucleotide may be methylated to form 5-methylcytosine"
aaagagggagaagcattccaggcaaagaaaacagaatatgcaacagggcagaagcatgaacgagcattatgcctttgggaagctataaatagttcagcttggctgaagcacaggatatgtgt

SEQ ID NO: 16774 - DNA, 122 bp, Homo sapiens
  misc_feature (61)..(62): /note="This region represents a CpG dinucleotide"
  misc_feature (61)..(61): /note="Nucleotide may be methylated to form 5-methylcytosine"
gagaaagctgagtcaggctgaatcagcccaagtaagtctaagaaatccactgaaagacatcgaaacctaatgttcaactttgtctataaattgtatgacttttcacacacttacataataat

SEQ ID NO: 16775 - DNA, 122 bp, Homo sapiens
  misc_feature (61)..(62): /note="This region represents a CpG dinucleotide"
  misc_feature (61)..(61): /note="Nucleotide may be methylated to form 5-methylcytosine"
acttcctctttttaaagtaaaggcgatctgaagaaagcataaatgcacaaaaatattgtacgatagtcaaaaataagagggcatagaagatggaataagctgaatgcctttctggatgcaat

SEQ ID NO: 16776 - DNA, 122 bp, Homo sapiens
  misc_feature (61)..(62): /note="This region represents a CpG dinucleotide"
  misc_feature (61)..(61): /note="Nucleotide may be methylated to form 5-methylcytosine"
accgaatcaaagttcagcaaccacatgcaaaacaaaccctccgtgagggcagcaagtctccgtgaggacggctgggattggctgcacagcaaagccaggagaggctccatgaggagaacagc

SEQ ID NO: 16777 - DNA, 122 bp, Homo sapiens
  misc_feature (61)..(62): /note="This region represents a CpG dinucleotide"
  misc_feature (61)..(61): /note="Nucleotide may be methylated to form 5-methylcytosine"
ttggaacctgcccaggcctggattcctccagactttgcacatcaccacctgtacccgtcacgttccttggcttggtttttgggctcctggaaagactctgggattgtcccttggctgacctg

SEQ ID NO: 16778 - DNA, 122 bp, Homo sapiens
  misc_feature (61)..(62): /note="This region represents a CpG dinucleotide"
  misc_feature (61)..(61): /note="Nucleotide may be methylated to form 5-methylcytosine"
ttttcataaagcagaaaccttctcatactctttcacctggtcttcaaggctctccctattcgaccccacacccacaccaacaagagtgatcacacatgagtcacaccttcatgttactgtgc

SEQ ID NO: 16779 - DNA, 122 bp, Homo sapiens
  misc_feature (61)..(62): /note="This region represents a CpG dinucleotide"
  misc_feature (61)..(61): /note="Nucleotide may be methylated to form 5-methylcytosine"
caattttgccagctgctccaataacatccttcatagcaaaacatgttttaaaatccaggccgccagtgtctaagccgcggagggatgcagccagggacagctcccctgtgacaagcaagcag

SEQ ID NO: 16780 - DNA, 122 bp, Homo sapiens
  misc_feature (61)..(62): /note="This region represents a CpG dinucleotide"
  misc_feature (61)..(61): /note="Nucleotide may be methylated to form 5-methylcytosine"
ttctcctgcatgcagagccccggatatctcatcttcatgcagcagaagtgcatctaaatgcgatgcactgtattccctacggcccggtcacctgcctgttcttgtgacaaatgccaagatgc

SEQ ID NO: 16781 - DNA, 122 bp, Homo sapiens
  misc_feature (61)..(62): /note="This region represents a CpG dinucleotide"
  misc_feature (61)..(61): /note="Nucleotide may be methylated to form 5-methylcytosine"
ctcctgttgtcctgggaaacatctgtgtagctgggcaggtggccctctccattctcactacgggtaaccaggctagccatacctgccagagcttccagtccgatgatccctcttctgtctga

SEQ ID NO: 16782 - DNA, 122 bp, Homo sapiens
  misc_feature (61)..(62): /note="This region represents a CpG dinucleotide"
  misc_feature (61)..(61): /note="Nucleotide may be methylated to form 5-methylcytosine"
aggaatttgacaaacccaagcccaacattcttctgacccacatgggattacaaaacaatgcggaaaaactaccagtaaatgcctgcccattatttgggggcattgtgccatccaaataaagt

SEQ ID NO: 16783 - DNA, 122 bp, Homo sapiens
  misc_feature (61)..(62): /note="This region represents a CpG dinucleotide"
  misc_feature (61)..(61): /note="Nucleotide may be methylated to form 5-methylcytosine"
ggctcgcacctcccccattcccatgcccagggctgcactgttcacagactagcccagggccgcagtcaggaccagcccagcagcccagccacagaggagccagcgaacctctcccggcgcct

SEQ ID NO: 16784 - DNA, 122 bp, Homo sapiens
  misc_feature (61)..(62): /note="This region represents a CpG dinucleotide"
  misc_feature (61)..(61): /note="Nucleotide may be methylated to form 5-methylcytosine"
agagtccttttcctcttccagtttctgggggctcaggtgttcctgggcttgtgggtgcatcgctctaatctctgcttctatctgcacaagactttcccgtcttctgtgtctcgattctgtct

SEQ ID NO: 16785 - DNA, 122 bp, Homo sapiens
  misc_feature (61)..(62): /note="This region represents a CpG dinucleotide"
  misc_feature (61)..(61): /note="Nucleotide may be methylated to form 5-methylcytosine"
tcttgcatcctagcttctgagaggcgtgcttcttggtgcccggcctttctgccacctccccggctcccctggattgagccctgtttgtctgggagagcccagagtgtcctgtagacacaggt

SEQ ID NO: 16786 - DNA, 122 bp, Homo sapiens
  misc_feature (61)..(62): /note="This region represents a CpG dinucleotide"
  misc_feature (61)..(61): /note="Nucleotide may be methylated to form 5-methylcytosine"
taatttaatgaattcgcaattgaggatatgagtcaggaggaattcaggagattggggttacgaaacttctaagagagaattttgttgtccattccaaagctggcattcttcctttgcaagag

SEQ ID NO: 16787 - DNA, 122 bp, Homo sapiens
  misc_feature (61)..(62): /note="This region represents a CpG dinucleotide"
  misc_feature (61)..(61): /note="Nucleotide may be methylated to form 5-methylcytosine"
tctaatcaagtctttagacctaactttacatttataggaaatgtaaataacaagtaacaccgtgagtaaataatcaggtgaacccagaatgtcagacattcaacaaaggcctgggctcttca

SEQ ID NO: 16788 - DNA, 122 bp, Homo sapiens
  misc_feature (61)..(62): /note="This region represents a CpG dinucleotide"
  misc_feature (61)..(61): /note="Nucleotide may be methylated to form 5-methylcytosine"
acacctctttctgtgggtgtggagggaggggactgagcaaagcctcagggaggccacatacgttctcagcgccatgcttggctggtgactggtcatgcaccattggcagggcctggagcacg

SEQ ID NO: 16789 - DNA, 122 bp, Homo sapiens
  misc_feature (61)..(62): /note="This region represents a CpG dinucleotide"
  misc_feature (61)..(61): /note="Nucleotide may be methylated to form 5-methylcytosine"
tggcttttgtgtcactgggtgctcttcctgaggccagctatgggcagattatgaaactgccgcatctgccctttctctccccagcctcacctcatgcctatacggtccttcctcctgtacct

SEQ ID NO: 16790 - DNA, 122 bp, Homo sapiens
  misc_feature (61)..(62): /note="This region represents a CpG dinucleotide"
  misc_feature (61)..(61): /note="Nucleotide may be methylated to form 5-methylcytosine"
gttggctgcaggtctatgtgaatagatctttgttaaactctggagtaaaaatatgctgcccgtaggagccttgttgataataacgcttcaaatgcgttactcaccttgcaatcatcaaatgc

SEQ ID NO: 16791 - DNA, 122 bp, Homo sapiens
  misc_feature (61)..(62): /note="This region represents a CpG dinucleotide"
  misc_feature (61)..(61): /note="Nucleotide may be methylated to form 5-methylcytosine"
ctagggaatcttgcagaagatacttcctcccctgtagttaataagccatcgcttataccacggtattttgttgtttgactcacgtctccagtgtaacagtggaaagtcattatctctggctt

SEQ ID NO: 16792 - DNA, 122 bp, Homo sapiens
  misc_feature (61)..(62): /note="This region represents a CpG dinucleotide"
  misc_feature (61)..(61): /note="Nucleotide may be methylated to form 5-methylcytosine"
aacttccttgggttgttatgaggattaaatgagttaacattagtaatgctcttggaacagcgtctgacacatcataagcacaaaagtgtttgttagataaaaagtgattttttttcctgcct

SEQ ID NO: 16793 - DNA, 122 bp, Homo sapiens
  misc_feature (61)..(62): /note="This region represents a CpG dinucleotide"
  misc_feature (61)..(61): /note="Nucleotide may be methylated to form 5-methylcytosine"
tcatataacattcaaaatttacagcactgaattttaaaaatcacaaattatgtgaagaaacgggaaaaacagaccaacccacaactgaaaaggaaggaaataacgccagtttatcacaaact

SEQ ID NO: 16794 - DNA, 122 bp, Homo sapiens
  misc_feature (61)..(62): /note="This region represents a CpG dinucleotide"
  misc_feature (61)..(61): /note="Nucleotide may be methylated to form 5-methylcytosine"
tccctgaccttagctgtcctcaggataaaacttcccacaagatcaacttcagaagctgtacgtgttttgtgtggcttatacaacatggttaaaaaaaatctgagcccagatttaataatggt

SEQ ID NO: 16795 - DNA, 122 bp, Homo sapiens
  misc_feature (61)..(62): /note="This region represents a CpG dinucleotide"
  misc_feature (61)..(61): /note="Nucleotide may be methylated to form 5-methylcytosine"
gtcattgtacatctcagctttctcatgtgaagcttgcataagtgtggtgcctcggctgggcgtggtggctcacgcctgtaatcccagcactttggaacgccaaagcaggtggatcactggag

SEQ ID NO: 16796 - DNA, 122 bp, Homo sapiens
  misc_feature (61)..(62): /note="This region represents a CpG dinucleotide"
  misc_feature (61)..(61): /note="Nucleotide may be methylated to form 5-methylcytosine"
aataaattgcgaaaataacaaaaacaaaatccatctactggctagctctttaaaatcctgcgggggagcccagtggcccaacggcgaagtttagcccatcttgccctttctggtcagtgtac

SEQ ID NO: 16797 - DNA, 122 bp, Homo sapiens
  misc_feature (61)..(62): /note="This region represents a CpG dinucleotide"
  misc_feature (61)..(61): /note="Nucleotide may be methylated to form 5-methylcytosine"
aatgtgaccctgaggaggccgggccagggaagagagaatgcagctttattctttcagagccgaggaatgccctggaagggaaccgaagcctgagtattggggttaaactaggtgagaggaga

SEQ ID NO: 16798 - DNA, 122 bp, Homo sapiens
  misc_feature (61)..(62): /note="This region represents a CpG dinucleotide"
  misc_feature (61)..(61): /note="Nucleotide may be methylated to form 5-methylcytosine"
atcctccttttccaggatcatggtgtagaccaagagtacctgcagtcacgccaggaatgacgtccattcttacctcacccatctgtttttgcacaatttgcatttagatgtagcaaactaaa

SEQ ID NO: 16799 - DNA, 122 bp, Homo sapiens
  misc_feature (61)..(62): /note="This region represents a CpG dinucleotide"
  misc_feature (61)..(61): /note="Nucleotide may be methylated to form 5-methylcytosine"
ataaagcaggattacctatatattccttccacaaggatgagaattttcttccagggccttcgtgtccgaggctgaccataaacaatggcatctttcaatagcttctctaggctttgcatatc

SEQ ID NO: 16800 - DNA, 122 bp, Homo sapiens
  misc_feature (61)..(62): /note="This region represents a CpG dinucleotide"
  misc_feature (61)..(61): /note="Nucleotide may be methylated to form 5-methylcytosine"
agagaggaactgaacagtgtgtgttaagaatggagcctgtgaatcactccttgtgaatcacggcactttatcactgccctttccttagacctactgaagacagcctggacaacctggcatgg

SEQ ID NO: 16801 - DNA, 122 bp, Homo sapiens
  misc_feature (61)..(62): /note="This region represents a CpG dinucleotide"
  misc_feature (61)..(61): /note="Nucleotide may be methylated to form 5-methylcytosine"
tcgcccagctctaggtgctttcaaagcaaaccagactaaactcttggacaaaggccattgcgcagatcaggaagtctaactgaccattccagaatctctgcttccattccccactttaaatc

SEQ ID NO: 16802 - DNA, 122 bp, Homo sapiens
  misc_feature (61)..(62): /note="This region represents a CpG dinucleotide"
  misc_feature (61)..(61): /note="Nucleotide may be methylated to form 5-methylcytosine"
gacatggaaagaattttgatgacatcactgagccactgatcttaccatgcctggaacctacgctggactacttagttatgtgaaaaaaagtaaatttcttcccttaccatttcagtctgttt

SEQ ID NO: 16803 - DNA, 122 bp, Homo sapiens
  misc_feature (61)..(62): /note="This region represents a CpG dinucleotide"
  misc_feature (61)..(61): /note="Nucleotide may be methylated to form 5-methylcytosine"
tccagacttgaagaaatttccattctgttaaatttctagccaactcatcacaatcaactacgcaagcaaacaataccccataagaacaacaataagtaatcacatattgctggctccaggaa

SEQ ID NO: 16804 - DNA, 122 bp, Homo sapiens
  misc_feature (61)..(62): /note="This region represents a CpG dinucleotide"
  misc_feature (61)..(61): /note="Nucleotide may be methylated to form 5-methylcytosine"
ttctcggtcttagttctactccatataaaacagtagtgcctacctcatgagatttcaatgcgcttgtgtgtgtaaagtttactgcctgcctggaacatagtaaatgctatataaatatttga

SEQ ID NO: 16805 - DNA, 122 bp, Homo sapiens
  misc_feature (61)..(62): /note="This region represents a CpG dinucleotide"
  misc_feature (61)..(61): /note="Nucleotide may be methylated to form 5-methylcytosine"
atagttgctaaacatagaacattgagtgtgaatcagtactgtgactaaagtttcttgtgtcgtagcaggtttggagaagataattaataaacgtcatcggagtgacatcaaagggtgttctt

SEQ ID NO: 16806 - DNA, 122 bp, Homo sapiens
  misc_feature (61)..(62): /note="This region represents a CpG dinucleotide"
  misc_feature (61)..(61): /note="Nucleotide may be methylated to form 5-methylcytosine"
atgccttgcattactgcttgcaaacagccatgaccgttgggctttaaagccctgcctccacgctgtctcagctttagacagctgacttcagagccactcatctgctgctcagcagctgggta

SEQ ID NO: 16807 - DNA, 122 bp, Homo sapiens
  misc_feature (61)..(62): /note="This region represents a CpG dinucleotide"
  misc_feature (61)..(61): /note="Nucleotide may be methylated to form 5-methylcytosine"
gcatttttcctttcacctatctgatgctgctcaaatgccagagtgctttaatgtgtctttcgcagtatagacggcccaggccctagcctgagattcagaccctgcccagttgagcaaaagga

SEQ ID NO: 16808 - DNA, 122 bp, Homo sapiens
  misc_feature (61)..(62): /note="This region represents a CpG dinucleotide"
  misc_feature (61)..(61): /note="Nucleotide may be methylated to form 5-methylcytosine"
ggtccttgcttggcctccgtgggcattttcagtgagggctaaaccagatgccttgtctaccgcaaagggcacttgttggatcagcccgagccatgctaaatcaggcagcttctgagcaggat

SEQ ID NO: 16809 - DNA, 122 bp, Homo sapiens
  misc_feature (61)..(62): /note="This region represents a CpG dinucleotide"
  misc_feature (61)..(61): /note="Nucleotide may be methylated to form 5-methylcytosine"
attattagaactaatcagcctctacctccctcgaggcagaggctcatctgtcattgaccccgggacacgtctgctccaggcatgctgactctggccttgacgttccccaagcacatggtatc

SEQ ID NO: 16810 - DNA, 122 bp, Homo sapiens
  misc_feature (61)..(62): /note="This region represents a CpG dinucleotide"
  misc_feature (61)..(61): /note="Nucleotide may be methylated to form 5-methylcytosine"
cttatctggaagtggtcacgaggaactcatctggggtgatggaaatgttctgtctccatacgtatgtgtcgaaactgattaaacagcacacttaagatctgtgctgtatgtaaattacacct

SEQ ID NO: 16811 - DNA, 122 bp, Homo sapiens
  misc_feature (61)..(62): /note="This region represents a CpG dinucleotide"
  misc_feature (61)..(61): /note="Nucleotide may be methylated to form 5-methylcytosine"
gaaatgcagagaggaaataaggagtcagaaaggatgacctggagtagcaggaaagtagcacgaaagacacagagggagcagcatatgcaaagttacaggttaagtgcatgatgcattcagga

SEQ ID NO: 16812 - DNA, 122 bp, Homo sapiens
  misc_feature (61)..(62): /note="This region represents a CpG dinucleotide"
  misc_feature (61)..(61): /note="Nucleotide may be methylated to form 5-methylcytosine"
ataaattatcgtgctgtcattgctgttggaatgccaacagagccaggtactgccagctgacgcctagtagcacaaggtgctgcttgcttgttgtgggttgaatttacgtttcccccagaaac

SEQ ID NO: 16813 - DNA, 122 bp, Homo sapiens
  misc_feature (61)..(62): /note="This region represents a CpG dinucleotide"
  misc_feature (61)..(61): /note="Nucleotide may be methylated to form 5-methylcytosine"
gaggagagactagacgcacgaaactgctagggcagatgggaactcctggcagtggcagcacgaggcaaaggagaggacaagccagacacgcttaaaaggccactgctgtgtcctctgccctg

SEQ ID NO: 16814 - DNA, 122 bp, Homo sapiens
  misc_feature (61)..(62): /note="This region represents a CpG dinucleotide"
  misc_feature (61)..(61): /note="Nucleotide may be methylated to form 5-methylcytosine"
tgttagtcaccttagagtaggtgactgacccgtccacctgtttagatcataaaccctacacgggcaagggcctactctgacatggtatcatgttcttagcacccagcagggagccctgcccc

SEQ ID NO: 16815 - DNA, 122 bp, Homo sapiens
  misc_feature (61)..(62): /note="This region represents a CpG dinucleotide"
  misc_feature (61)..(61): /note="Nucleotide may be methylated to form 5-methylcytosine"
acaatcaaaaaagttatgtcccagcaaaaccacagacatgaatactcacagcaatttattcgtaataaccaaaaacaggaaacaaccaaggtgtcctacaataagtaaaaaattaaactggt

SEQ ID NO: 16816 - DNA, 122 bp, Homo sapiens
  misc_feature (61)..(62): /note="This region represents a CpG dinucleotide"
  misc_feature (61)..(61): /note="Nucleotide may be methylated to form 5-methylcytosine"
ccagtgttgctatggagagggtgtgctggcatcagaagcaagagaagggagttcttggagcggtgagagacatgcagcttcttgactcacacatcaggcccttgagagtctggctaatgtga

SEQ ID NO: 16817 - DNA, 122 bp, Homo sapiens
  misc_feature (61)..(62): /note="This region represents a CpG dinucleotide"
  misc_feature (61)..(61): /note="Nucleotide may be methylated to form 5-methylcytosine"
gggtttctatatcaaagacaagagtcatgagcctggaagggaataaataagggacaatgacgcaaacattagcagtattggtgagtcattaccatcctccaggctggccagtccaaggagag

SEQ ID NO: 16818 - DNA, 122 bp, Homo sapiens
  misc_feature (61)..(62): /note="This region represents a CpG dinucleotide"
  misc_feature (61)..(61): /note="Nucleotide may be methylated to form 5-methylcytosine"
caccaagccctgcccttgtgggaagtatgataagcctcaaggcaaacaattcttccttcgcgattgcagtctgggcacctgatgatatagaatgactcattggactcctgcctcttctactt

SEQ ID NO: 16819 - DNA, 122 bp, Homo sapiens
  misc_feature (61)..(62): /note="This region represents a CpG dinucleotide"
  misc_feature (61)..(61): /note="Nucleotide may be methylated to form 5-methylcytosine"
tcttgcagcatagtttccactggtagtaattccattcagctactcagacaacacgctcctcggccgaatgggacgacccttcttaagatggaaaatgttacaaaagaaaaaggatgaaggtc

SEQ ID NO: 16820 - DNA, 122 bp, Homo sapiens
  misc_feature (61)..(62): /note="This region represents a CpG dinucleotide"
  misc_feature (61)..(61): /note="Nucleotide may be methylated to form 5-methylcytosine"
gagctgtgcggctcctggtgagaggcacacttatctgggatgcagtctggggagtcctggcgaggcagcttccacctgctggaggaggggccggggcggagctaagatgcggaggagggtga

SEQ ID NO: 16821 - DNA, 122 bp, Homo sapiens
  misc_feature (61)..(62): /note="This region represents a CpG dinucleotide"
  misc_feature (61)..(61): /note="Nucleotide may be methylated to form 5-methylcytosine"
gcccgtccgcccacccgtcgcctgctgcagggcctggagccgctgctgggagaggaagtgcgttcagttaccaatcgggttattttcataacggctgtctcaggctgcagggaggagggtga

SEQ ID NO: 16822 - DNA, 122 bp, Homo sapiens
  misc_feature (61)..(62): /note="This region represents a CpG dinucleotide"
  misc_feature (61)..(61): /note="Nucleotide may be methylated to form 5-methylcytosine"
tgggggtggccagtgagtgttcaggcagcacacatgctacagcagtgtgtcagccaccaccgtgggcagctgctgagtctgaaatgaaggccctcctggcttcactgtggggcttccacttg

SEQ ID NO: 16823 - DNA, 122 bp, Homo sapiens
  misc_feature (61)..(62): /note="This region represents a CpG dinucleotide"
  misc_feature (61)..(61): /note="Nucleotide may be methylated to form 5-methylcytosine"
agcgggtattaggtggtgatggctgcccaacttctgggcatttgggtgccagccccgggacgccctccaggctctgcctgtgaggaccccaggattggcccaagaaagggcaggcctgggac

SEQ ID NO: 16824 - DNA, 122 bp, Homo sapiens
  misc_feature (61)..(62): /note="This region represents a CpG dinucleotide"
  misc_feature (61)..(61): /note="Nucleotide may be methylated to form 5-methylcytosine"
taaaagtcacggggtggaagctggatgattctgagtggtttgcaacataatagtatttatcgcactgtaagttgagctggtcatgtgaaccatccagcaggaagcttgttaggaattccaag

SEQ ID NO: 16825 - DNA, 122 bp, Homo sapiens
  misc_feature (61)..(62): /note="This region represents a CpG dinucleotide"
  misc_feature (61)..(61): /note="Nucleotide may be methylated to form 5-methylcytosine"
ttaatacgcactgaatgagcaaacgacagacaggcattagctcatttcctgtagtcttgccggggtaggtctgctgcagctttatcacctgctctaccaaggttaaatcacaggactgctca

SEQ ID NO: 16826 - DNA, 122 bp, Homo sapiens
  misc_feature (61)..(62): /note="This region represents a CpG dinucleotide"
  misc_feature (61)..(61): /note="Nucleotide may be methylated to form 5-methylcytosine"
ctggcagcctaattcttctgtagtttatgatggctagtggcagggttgtctttccctgtccggagtgtataagataaggcatttctgtgaataatgctgttctcctcagtacctggaggtca

SEQ ID NO: 16827 - DNA, 122 bp, Homo sapiens
  misc_feature (61)..(62): /note="This region represents a CpG dinucleotide"
  misc_feature (61)..(61): /note="Nucleotide may be methylated to form 5-methylcytosine"
gcttttcactgcctactgaattaagcctctgccaagcattcaagactttccacaatatgacgccgagcaatccttccagctctgtattttattatttctccaaatgtacagatgcagaccaa

SEQ ID NO: 16828 - DNA, 122 bp, Homo sapiens
  misc_feature (61)..(62): /note="This region represents a CpG dinucleotide"
  misc_feature (61)..(61): /note="Nucleotide may be methylated to form 5-methylcytosine"
cctttcctccctcacatatccaattgcctatcctaattttcatatctcagttgttttgtacgtctttaaagagcctttactagaatcttaatttcctagtatccatccccaagaagaatgga

SEQ ID NO: 16829 - DNA, 122 bp, Homo sapiens
  misc_feature (61)..(62): /note="This region represents a CpG dinucleotide"
  misc_feature (61)..(61): /note="Nucleotide may be methylated to form 5-methylcytosine"
tcactgtctatattgcactgattgatcttatctatcctggcaggaagcttgagcagcgcccgcctcttcctggctgtgcctcggcagtgcccccaccccagcctcccaccccatcttggtct

SEQ ID NO: 16830 - DNA, 122 bp, Homo sapiens
  misc_feature (61)..(62): /note="This region represents a CpG dinucleotide"
  misc_feature (61)..(61): /note="Nucleotide may be methylated to form 5-methylcytosine"
ccaagcagactataaagtctctaaatgcaggacctgtattttactcatctctgaatagcacggtaattacttctgagcctccttggaattcagtcagattctggcttgaatattgatcccac

SEQ ID NO: 16831 - DNA, 122 bp, Homo sapiens
  misc_feature (61)..(62): /note="This region represents a CpG dinucleotide"
  misc_feature (61)..(61): /note="Nucleotide may be methylated to form 5-methylcytosine"
gagctttgggaagtaaacaagtcccggcgctttacgcaggcgctgggggcccagccaggccgccacactcgcttcgctggtgacgggaggcacaggcttccagatgtgaaacgctaacaggc

SEQ ID NO: 16832 - DNA, 122 bp, Homo sapiens
  misc_feature (61)..(62): /note="This region represents a CpG dinucleotide"
  misc_feature (61)..(61): /note="Nucleotide may be methylated to form 5-methylcytosine"
tttgattggagcccggccatgcttgtgacatattgtctgtgactgttaaccacactgccgcggcaggactgagtcattgccaggaaatttacggccagcaaagctgaatatatttgctactt

SEQ ID NO: 16833 - DNA, 122 bp, Homo sapiens
  misc_feature (61)..(62): /note="This region represents a CpG dinucleotide"
  misc_feature (61)..(61): /note="Nucleotide may be methylated to form 5-methylcytosine"
aacaagactgttttacagataatactaaagataatgttgatggaactgttcttccccactcgtgatgtttccttccaagtggcaggaactgtactattgcagcactcctgtctgctttctca

SEQ ID NO: 16834 - DNA, 122 bp, Homo sapiens
  misc_feature (61)..(62): /note="This region represents a CpG dinucleotide"
  misc_feature (61)..(61): /note="Nucleotide may be methylated to form 5-methylcytosine"
cccagcagacgtgactccacggttgctgcctctcagtgtcagacaattgtgagtcagatgcgtcatgaagtttctgcttccctgctctgccactcatttcccagacacgctctggcttgatg

SEQ ID NO: 16835 - DNA, 122 bp, Homo sapiens
  misc_feature (61)..(62): /note="This region represents a CpG dinucleotide"
  misc_feature (61)..(61): /note="Nucleotide may be methylated to form 5-methylcytosine"
attaaagagacaactcatttctagtcacctctctgcaggtctccagcagctctgctatgacgtaggtgaatcatccttctccccaacttgttttattttccttagtatgtgctagtcatgtt

SEQ ID NO: 16836 - DNA, 122 bp, Homo sapiens
  misc_feature (61)..(62): /note="This region represents a CpG dinucleotide"
  misc_feature (61)..(61): /note="Nucleotide may be methylated to form 5-methylcytosine"
tagcctccacacctactgctttggccactttgtcatcggtccattgagcaagcaatgggacgattgggaaagaggctgactgacatccgtaagacaagtcatcttgaccacatgattattga

SEQ ID NO: 16837 - DNA, 122 bp, Homo sapiens
  misc_feature (61)..(62): /note="This region represents a CpG dinucleotide"
  misc_feature (61)..(61): /note="Nucleotide may be methylated to form 5-methylcytosine"
tctctgtgcaaactctctgaggagcagaaaccagttcagtctctctgggtgtggagaggccggcctagcagaacacccgtccaccatgcaaaccgggtggggccacctgtcaactgtcacgt

SEQ ID NO: 16838 - DNA, 122 bp, Homo sapiens
  misc_feature (61)..(62): /note="This region represents a CpG dinucleotide"
  misc_feature (61)..(61): /note="Nucleotide may be methylated to form 5-methylcytosine"
tattatcagcacttacatctgtaaacaaaaaatttaagtcagatcatactcctcctctgacgagaagtctccaaagacagtctctcagagtaaaggccaaagtccttactgaggccaccaag

SEQ ID NO: 16839 - DNA, 122 bp, Homo sapiens
  misc_feature (61)..(62): /note="This region represents a CpG dinucleotide"
  misc_feature (61)..(61): /note="Nucleotide may be methylated to form 5-methylcytosine"
aaggccagcccaggttcacagggcagagacatagactccacctcgggattgggggcctggcgtggcagtgtcattgttgcaaaggaatttatggccactaaatggtttaccacaggtgactg

SEQ ID NO: 16840 - DNA, 122 bp, Homo sapiens
  misc_feature (61)..(62): /note="This region represents a CpG dinucleotide"
  misc_feature (61)..(61): /note="Nucleotide may be methylated to form 5-methylcytosine"
atggaattaaactgaaagacccaaactttctgaccctttatagaaagctcacttcatttacgctaactagaatgattcattgtgcctgtgactcagtgtgtcagcaagtgcttagatgtgag

SEQ ID NO: 16841 - DNA, 122 bp, Homo sapiens
  misc_feature (61)..(62): /note="This region represents a CpG dinucleotide"
  misc_feature (61)..(61): /note="Nucleotide may be methylated to form 5-methylcytosine"
cctttatttcccattcagtaacactgccagtttcatcatctttcctttcaactttatttacgagacgatgctgattgcagacagcatataacagaggcatttcaaatcaaacagtagagtta

SEQ ID NO: 16842 - DNA, 122 bp, Homo sapiens
  misc_feature (61)..(62): /note="This region represents a CpG dinucleotide"
  misc_feature (61)..(61): /note="Nucleotide may be methylated to form 5-methylcytosine"
ggcattggaagagcgggaagcagaaagtgcctgcacgggaagctgcaagggcaaaggtcccgatgccgggaagatcttggagggtttgtgacacggaagggctggtgtggctggatttagtg

SEQ ID NO: 16843 - DNA, 122 bp, Homo sapiens
  misc_feature (61)..(62): /note="This region represents a CpG dinucleotide"
  misc_feature (61)..(61): /note="Nucleotide may be methylated to form 5-methylcytosine"
caatccaaaaacctgcaggccagcaccctggaaaccaaacctcacattttccaggaaggccgtgaagatgcctgtgggccttctgctgttacatttatcaaaaactgtaaaattaagaacat

SEQ ID NO: 16844 - DNA, 122 bp, Homo sapiens
  misc_feature (61)..(62): /note="This region represents a CpG dinucleotide"
  misc_feature (61)..(61): /note="Nucleotide may be methylated to form 5-methylcytosine"
caaccccatgaccatatatgaaatcccaattacctgtacttatccatcgctagttcacttcgctgcagtccttcgtaaaccaaagagcaggtagaacgagttcaccctgaacacagcatccc

SEQ ID NO: 16845 - DNA, 122 bp, Homo sapiens
  misc_feature (61)..(62): /note="This region represents a CpG dinucleotide"
  misc_feature (61)..(61): /note="Nucleotide may be methylated to form 5-methylcytosine"
gttaccttgacactgtttttttttttttaagtaacttttttctccatgctaaactttccacgtcttctatctaaaaggtccccaaaggcaccactatttggtgtgaagattttgagcagcac

SEQ ID NO: 16846 - DNA, 122 bp, Homo sapiens
  misc_feature (61)..(62): /note="This region represents a CpG dinucleotide"
  misc_feature (61)..(61): /note="Nucleotide may be methylated to form 5-methylcytosine"
ctgctgttacacacactctgttgacttaaaacacaacctcaccagaaaacactttgttctcgcaggtcctttttttttttttttttttttaagatggagtctagctctgtcgcccagggtgg

SEQ ID NO: 16847 - DNA, 122 bp, Homo sapiens
  misc_feature (61)..(62): /note="This region represents a CpG dinucleotide"
  misc_feature (61)..(61): /note="Nucleotide may be methylated to form 5-methylcytosine"
agttttaaatttttgtaccaggactcagagccagagggcactgactgcctattaagtagacgttactgattcctcaggagggtgtgacaggctcttaaggtgagctactgaaacagttttca

SEQ ID NO: 16848 - DNA, 122 bp, Homo sapiens
  misc_feature (61)..(62): /note="This region represents a CpG dinucleotide"
  misc_feature (61)..(61): /note="Nucleotide may be methylated to form 5-methylcytosine"
gtcacaagacaatgccccattgtgcttgcttatccagaagatcaatcaggaagagaagcacgccatgggctgaactgcagtttctgttacctgacttagtttagatgtatttctcctctccc

SEQ ID NO: 16849 - DNA, 122 bp, Homo sapiens
  misc_feature (61)..(62): /note="This region represents a CpG dinucleotide"
  misc_feature (61)..(61): /note="Nucleotide may be methylated to form 5-methylcytosine"
gttcactgcactcctgatccagcgaggcgcccactgccactccctatcaggctaaaggcacgccattgttcctgcatgactaagggcccaggatttgtcctaatcgagctgaacactagttg

SEQ ID NO: 16850 - DNA, 122 bp, Homo sapiens
  misc_feature (61)..(62): /note="This region represents a CpG dinucleotide"
  misc_feature (61)..(61): /note="Nucleotide may be methylated to form 5-methylcytosine"
ggaatctctgtatggcctcgcagtttgcagagtgcttcaccttctaaatgaagcctggagcgccatttcagactgaatcaaaccgtagatgccatgtgtacctacgcaacaaatctgcgcat

SEQ ID NO: 16851 - DNA, 122 bp, Homo sapiens
  misc_feature (61)..(62): /note="This region represents a CpG dinucleotide"
  misc_feature (61)..(61): /note="Nucleotide may be methylated to form 5-methylcytosine"
gaaacaggagtcttaccagggtcatgctgagtgtacggcccatgacagcatggaacaggtcgtgtgcagctgggccagacacaacaaaaaattcacagatgaaaaggtattcgcggcaggaa

SEQ ID NO: 16852 - DNA, 122 bp, Homo sapiens
  misc_feature (61)..(62): /note="This region represents a CpG dinucleotide"
  misc_feature (61)..(61): /note="Nucleotide may be methylated to form 5-methylcytosine"
ctcgtagataaagcatataaaacatgaaagcttttataactttatagaatgtaaatattacgtattaacataaactctagagtgcacaggtgcatcaaagcagaatgggattgagaaccttt

SEQ ID NO: 16853 - DNA, 122 bp, Homo sapiens
  misc_feature (61)..(62): /note="This region represents a CpG dinucleotide"
  misc_feature (61)..(61): /note="Nucleotide may be methylated to form 5-methylcytosine"
tgggacggtcactgtggctgagttagcagttggctgcttgttgttttcttccgtttgtggcgatcctttctttcccagatgacccctgttttgtgacgttcattcttcccatttgtcattga

SEQ ID NO: 16854 - DNA, 122 bp, Homo sapiens
  misc_feature (61)..(62): /note="This region represents a CpG dinucleotide"
  misc_feature (61)..(61): /note="Nucleotide may be methylated to form 5-methylcytosine"
ccgttgccagggccgaggctgaggagcctacagcgtgtgttcaggactgagggccagggacgggccacaggctccctgcctggggtccaagcctagatcgctcgctccccacccgcaccaaa

SEQ ID NO: 16855 - DNA, 122 bp, Homo sapiens
  misc_feature (61)..(62): /note="This region represents a CpG dinucleotide"
  misc_feature (61)..(61): /note="Nucleotide may be methylated to form 5-methylcytosine"
cttttgctggtgttgagcctgtttttattgcattttttggggtgtgtgtgcgcgtgcacgcgcatgtgtgttttttcaggagggggcacattattgctgctacttgcttattaacctctcaa

SEQ ID NO: 16856 - DNA, 122 bp, Homo sapiens
  misc_feature (61)..(62): /note="This region represents a CpG dinucleotide"
  misc_feature (61)..(61): /note="Nucleotide may be methylated to form 5-methylcytosine"
taagatcaacagcactgaatatcagtaacacgcttctggggaaattttattatttcccaacgtaagctaaggaaacagccaaggtactggtccagaactcctggaactgaagaatagcccac

SEQ ID NO: 16857 - DNA, 122 bp, Homo sapiens
  misc_feature (61)..(62): /note="This region represents a CpG dinucleotide"
  misc_feature (61)..(61): /note="Nucleotide may be methylated to form 5-methylcytosine"
ctacgttgtatctgtatcttgtattgtattcccccttcctgctgatgcgaaatgcctctacgttgtatctgtatcttgtattgtgttcctgtttttagatgaaagtcttgtggctttttttt

SEQ ID NO: 16858 - DNA, 122 bp, Homo sapiens
  misc_feature (61)..(62): /note="This region represents a CpG dinucleotide"
  misc_feature (61)..(61): /note="Nucleotide may be methylated to form 5-methylcytosine"
atgtgctcgtacatattgaataaccagctctctggaagaaaaaagaggcttgattggtagcgtattccgatgtccaaggggtaaatactcccactgtggctgacatggagctatcagtgtga

SEQ ID NO: 16859 - DNA, 122 bp, Homo sapiens
  misc_feature (61)..(62): /note="This region represents a CpG dinucleotide"
  misc_feature (61)..(61): /note="Nucleotide may be methylated to form 5-methylcytosine"
ttgctgttgtcatccaccagaagagaaaagtcactgcccttggtgacataattgagactgcgtgtaacaatgtatgatatgatcaggtcatttcctgccttaaatgaatactttaggttacc

SEQ ID NO: 16860 - DNA, 122 bp, Homo sapiens
  misc_feature (61)..(62): /note="This region represents a CpG dinucleotide"
  misc_feature (61)..(61): /note="Nucleotide may be methylated to form 5-methylcytosine"
agtgatccgcctgcctcggcttcccaaagtgctgggattactggcatgagccactgcgcccgacctccattttttgattattatcattggggtcactgtggcaggtgtgaagcaataccaca

SEQ ID NO: 16861 - DNA, 122 bp, Homo sapiens
  misc_feature (61)..(62): /note="This region represents a CpG dinucleotide"
  misc_feature (61)..(61): /note="Nucleotide may be methylated to form 5-methylcytosine"
cttcctctctctccttccggactgagattcaagccgagatgccttgtggggcaaaggagccggcggtgaggttccctccttcagttgcttcagcaggcacatagctccttctgatcttggac

SEQ ID NO: 16862 - DNA, 122 bp, Homo sapiens
  misc_feature (61)..(62): /note="This region represents a CpG dinucleotide"
  misc_feature (61)..(61): /note="Nucleotide may be methylated to form 5-methylcytosine"
cataatgtttaaggggagtcataatgatttttgtgataacatttctagtgacattaagaccgcctaatggctggggaagttcatagacctagaaggaatggaatttccttttaaatttgtaa

SEQ ID NO: 16863 - DNA, 122 bp, Homo sapiens
  misc_feature (61)..(62): /note="This region represents a CpG dinucleotide"
  misc_feature (61)..(61): /note="Nucleotide may be methylated to form 5-methylcytosine"
ggctaggtatcagagacatctcctctgtctccatcaggttgtttttccatggaattaaggcgtgtatctgtccactgataggggtgttttctctcacaccctgtccttaaacatagtcagtc

SEQ ID NO: 16864 - DNA, 122 bp, Homo sapiens
  misc_feature (61)..(62): /note="This region represents a CpG dinucleotide"
  misc_feature (61)..(61): /note="Nucleotide may be methylated to form 5-methylcytosine"
ccaagacctgggagccttagtccatatgagtcaacctttccttgttgtgcttaaacctgacgctgactgactgtcaactgacagaacagaagcttcttcatagcacactataaaagtgctaa

SEQ ID NO: 16865 - DNA, 122 bp, Homo sapiens
  misc_feature (61)..(62): /note="This region represents a CpG dinucleotide"
  misc_feature (61)..(61): /note="Nucleotide may be methylated to form 5-methylcytosine"
ctcctctaagtctcagctgagtgattgacttccctttactgggtattgaagttagtcattcgtgacctttcccattggggttctgatttcgcaaacatgcattgggctctttaatgcatatt

SEQ ID NO: 16866 - DNA, 122 bp, Homo sapiens
  misc_feature (61)..(62): /note="This region represents a CpG dinucleotide"
  misc_feature (61)..(61): /note="Nucleotide may be methylated to form 5-methylcytosine"
gggcactgggaggcataaagtgctctgggcatcctccctgggctgggtgtgagtctggggcggggctgtggctggtccagtttccaggcctgtttggcatcttgggcattaatttaaatggc

SEQ ID NO: 16867 - DNA, 122 bp, Homo sapiens
  misc_feature (61)..(62): /note="This region represents a CpG dinucleotide"
  misc_feature (61)..(61): /note="Nucleotide may be methylated to form 5-methylcytosine"
catcccctctgcctgggacaggaagcagagcctccctgccatcatcagctgattgccaagcgccagacctgagcctgacccaagtgttgccataacacaggggctgtggctgtgcccttgtc

SEQ ID NO: 16868 - DNA, 122 bp, Homo sapiens
  misc_feature (61)..(62): /note="This region represents a CpG dinucleotide"
  misc_feature (61)..(61): /note="Nucleotide may be methylated to form 5-methylcytosine"
aaggctgcagggatatcaaaatgataacaatctcttctctggaggaaatggagacagatacggttacaagtcattatagaacaatgcagacttacagaaatgtgttagatgcatagggcact

SEQ ID NO: 16869 - DNA, 122 bp, Homo sapiens
  misc_feature (61)..(62): /note="This region represents a CpG dinucleotide"
  misc_feature (61)..(61): /note="Nucleotide may be methylated to form 5-methylcytosine"
ttggaaagattttatttcagcttgcactgtgagatctttgtcgttttcaccacacatttccgtcaaggaagcccttggatgactgccatgatttgcctctgctggacgcttccttcaagggc

SEQ ID NO: 16870 - DNA, 122 bp, Homo sapiens
  misc_feature (61)..(62): /note="This region represents a CpG dinucleotide"
  misc_feature (61)..(61): /note="Nucleotide may be methylated to form 5-methylcytosine"
agcacaaactgagctttcatcaaacgtaacccttaccgaaacaattgttcagatgagcaacgccaagtttaaagaaaggaagtaaaccgtctcaagaactgtcaatctgtttgtgttcgata

SEQ ID NO: 16871 - DNA, 122 bp, Homo sapiens
  misc_feature (61)..(62): /note="This region represents a CpG dinucleotide"
  misc_feature (61)..(61): /note="Nucleotide may be methylated to form 5-methylcytosine"
acaatctcacggtatcctgacaattactgttagtcatttcttacagtgctgcacaagacacgtctgtcattgttttgccagaggactgtgtgagataagatgctgagcattcccccacaagg

SEQ ID NO: 16872 - DNA, 122 bp, Homo sapiens
  misc_feature (61)..(62): /note="This region represents a CpG dinucleotide"
  misc_feature (61)..(61): /note="Nucleotide may be methylated to form 5-methylcytosine"
cacgcactgcgtccagcaaaaccactaagtcagggaggccagggcgggcagcccattcatcgtcctcaccgcgctgttccttccgggcccttggctggaacgctcaggatgccccaccgctc

SEQ ID NO: 16873 - DNA, 122 bp, Homo sapiens
  misc_feature (61)..(62): /note="This region represents a CpG dinucleotide"
  misc_feature (61)..(61): /note="Nucleotide may be methylated to form 5-methylcytosine"
gaggagtgtaaagggaattagattgtgtgggagtcaagctgggtccaaaaaaaacaggaacgggaatgtttcaagaagggatctgaagagatacaatgagttactaagtgaagaagggaaag

SEQ ID NO: 16874 - DNA, 122 bp, Homo sapiens
  misc_feature (61)..(62): /note="This region represents a CpG dinucleotide"
  misc_feature (61)..(61): /note="Nucleotide may be methylated to form 5-methylcytosine"
ccttcaagattcagaaacctgcccaaaatggattaagtctcatctgtacattccccatgtcgcaccaaagctaagggacatccaaaagcactctgcccttggtttatgcctagaggtcaata

SEQ ID NO: 16875 - DNA, 122 bp, Homo sapiens
  misc_feature (61)..(62): /note="This region represents a CpG dinucleotide"
  misc_feature (61)..(61): /note="Nucleotide may be methylated to form 5-methylcytosine"
aataatctgtggcaggtactgagctaggcttccgggttgtagagctgcctaagtcctggccgctgcccttaggagctcacatcctaagaggggaggatgaagattaatctcctactcactgc

SEQ ID NO: 16876 - DNA, 122 bp, Homo sapiens
  misc_feature (61)..(62): /note="This region represents a CpG dinucleotide"
  misc_feature (61)..(61): /note="Nucleotide may be methylated to form 5-methylcytosine"
gtttagtgatgacaagatggcaactgatttggcttagtgactcgacagacttaataatgacgaaatgttttcaaaagctgaactattcatacaaactaagaacatggcatgtgttcttctga

SEQ ID NO: 16877 - DNA, 122 bp, Homo sapiens
  misc_feature (61)..(62): /note="This region represents a CpG dinucleotide"
  misc_feature (61)..(61): /note="Nucleotide may be methylated to form 5-methylcytosine"
cacttgcccttaaccagctgtacttgagctcaagtccagcttacttggactgagctgttacgttcatccctgattcattcattgaacaaatagttattgagtgcctgtcatgtgccagccct

SEQ ID NO: 16878 - DNA, 122 bp, Homo sapiens
  misc_feature (61)..(62): /note="This region represents a CpG dinucleotide"
  misc_feature (61)..(61): /note="Nucleotide may be methylated to form 5-methylcytosine"
cagtggctcagcctcaaggaaagggagagttgggactacgtcatttcataggaggggaggcgtgccatgaattatacaccctggcttctctgggattagagggcaagtcccatatgcttaaa

SEQ ID NO: 16879 - DNA, 122 bp, Homo sapiens
  misc_feature (61)..(62): /note="This region represents a CpG dinucleotide"
  misc_feature (61)..(61): /note="Nucleotide may be methylated to form 5-methylcytosine"
caaaaataaacatataattgcaagtcacattcatttctctttctctgctattcctgctctcgccttccctcttctgcttctcctctctccgtcacagacacccacaacgtccctctgcagtc

SEQ ID NO: 16880 - DNA, 122 bp, Homo sapiens
  misc_feature (61)..(62): /note="This region represents a CpG dinucleotide"
  misc_feature (61)..(61): /note="Nucleotide may be methylated to form 5-methylcytosine"
ctcatctgtgaaatggggatgacgtgtcatctagggcggtgttgagctgcaattggaagacgtgtatgcagtgcctggggtgtagcggtgtgccatggatgagggtttgtatcagatcacct

SEQ ID NO: 16881 - DNA, 122 bp, Homo sapiens
  misc_feature (61)..(62): /note="This region represents a CpG dinucleotide"
  misc_feature (61)..(61): /note="Nucleotide may be methylated to form 5-methylcytosine"
tgactgtccttcagcacgtacacggttcagcctcagctacagaccatcactgctacagagcgacaacttcccattcggacttaggcagcgtttcagttcattacagagaagtggttttctca

SEQ ID NO: 16882 - DNA, 122 bp, Homo sapiens
  misc_feature (61)..(62): /note="This region represents a CpG dinucleotide"
  misc_feature (61)..(61): /note="Nucleotide may be methylated to form 5-methylcytosine"
acatactcaggtactctctccagagagcatgacaaggcagctttctaattgctgggtggccgccgagtgctgtgaccctctgagacacgtcacccagcaggttctccaagaagcaccaattg

SEQ ID NO: 16883 - DNA, 122 bp, Homo sapiens
  misc_feature (61)..(62): /note="This region represents a CpG dinucleotide"
  misc_feature (61)..(61): /note="Nucleotide may be methylated to form 5-methylcytosine"
gcctagattttatttcaatttctacattgctcagacttctatcagctgcccaactcttttcgtatctccaggattagatgcaggtgaggcagcatgcagtctatgcttagtttactatgtga

SEQ ID NO: 16884 - DNA, 122 bp, Homo sapiens
  misc_feature (61)..(62): /note="This region represents a CpG dinucleotide"
  misc_feature (61)..(61): /note="Nucleotide may be methylated to form 5-methylcytosine"
agtgttaatcgcgtggacaccagactgcttgagtgaaatacaggttctaccatttattaacggagtaatgttgggtaagctatttagccagggtccttatctgtaacatggtgataataata

SEQ ID NO: 16885 - DNA, 122 bp, Homo sapiens
  misc_feature (61)..(62): /note="This region represents a CpG dinucleotide"
  misc_feature (61)..(61): /note="Nucleotide may be methylated to form 5-methylcytosine"
gtacaccaaaataccataaactggatggcttatcaacaaatttatttctcacagttcttccgactggagtgcccaaaatcagggtgtggtcagatatggtgtctgatgagggcccacttcct

SEQ ID NO: 16886 - DNA, 122 bp, Homo sapiens
  misc_feature (61)..(62): /note="This region represents a CpG dinucleotide"
  misc_feature (61)..(61): /note="Nucleotide may be methylated to form 5-methylcytosine"
ggagaaagggatgttctcaccgttcacagtggcggcactggattagtaggtcctcttctacgtaaggagcatgacagatagggcaggtcaccaggctggcacagggcccacagtgtgtgtaa

SEQ ID NO: 16887 - DNA, 122 bp, Homo sapiens
  misc_feature (61)..(62): /note="This region represents a CpG dinucleotide"
  misc_feature (61)..(61): /note="Nucleotide may be methylated to form 5-methylcytosine"
ccagtgcccatctcacagaagtggggtttatggctagagcggtaggggagccaagtcagccgcttcaggcaattataaggaaatgccctcacataaatcataattgctttggatggggagag

SEQ ID NO: 16888 - DNA, 122 bp, Homo sapiens
  misc_feature (61)..(62): /note="This region represents a CpG dinucleotide"
  misc_feature (61)..(61): /note="Nucleotide may be methylated to form 5-methylcytosine"
gacatttatgaaaagcattgtataatacccacttccccatttgtgagctctgtgagctttcggggtgtggtgactgtttctgccccatttaccgttgatctgccagtacctagcacagtgtc

SEQ ID NO: 16889 - DNA, 122 bp, Homo sapiens
  misc_feature (61)..(62): /note="This region represents a CpG dinucleotide"
  misc_feature (61)..(61): /note="Nucleotide may be methylated to form 5-methylcytosine"
gggaaagagtactgcagtttcttacaaactaaatatgcacttaccatatgacccagcaagcgcagtcctgggcattaatccagagaaataaaagcttatgttcacacaaaatcctgtaactg

SEQ ID NO: 16890 - DNA, 122 bp, Homo sapiens
  misc_feature (61)..(62): /note="This region represents a CpG dinucleotide"
  misc_feature (61)..(61): /note="Nucleotide may be methylated to form 5-methylcytosine"
gcacccttccctggaatgtgtcacagtttttatccatggcttggtaattgacacaaacaccgtagcctactgtataccctgaatgaggtgccagcagctgccagcttttgttgatgttttgg

SEQ ID NO: 16891 - DNA, 122 bp, Homo sapiens
  misc_feature (61)..(62): /note="This region represents a CpG dinucleotide"
  misc_feature (61)..(61): /note="Nucleotide may be methylated to form 5-methylcytosine"
agtttgagtacaacttagcgaggtcctctgcaagacagcaatcaaggtgtcagacaggagcgtggtttcatctgaggaaaaatctccttgccaactcacatggccttgagcagcattcagtt

SEQ ID NO: 16892 - DNA, 122 bp, Homo sapiens
  misc_feature (61)..(62): /note="This region represents a CpG dinucleotide"
  misc_feature (61)..(61): /note="Nucleotide may be methylated to form 5-methylcytosine"
catgcgtgatactcaaagctattgggtagctcctacatggaatgagccttggggcaccctcgttttgaatctctggcagagaaggcaaagctggcaaaagaaactaagaaggagcccccagg

SEQ ID NO: 16893 - DNA, 122 bp, Homo sapiens
  misc_feature (61)..(62): /note="This region represents a CpG dinucleotide"
  misc_feature (61)..(61): /note="Nucleotide may be methylated to form 5-methylcytosine"
taaaccgaagcttgtggaacttgaacgccattttgaagctagttccttagacgattcggtcgaagatctgtctctcggctgccctctatagagctctaaacctggcttcaaggagttctttc

SEQ ID NO: 16894 - DNA, 122 bp, Homo sapiens
  misc_feature (61)..(62): /note="This region represents a CpG dinucleotide"
  misc_feature (61)..(61): /note="Nucleotide may be methylated to form 5-methylcytosine"
ctagaaagatgatggattgaaggcacaatcctactcctatgaaactcatgaagatctcctcgagcaatggcaggaaacagagctgctgactagcagtttcgcgggaggttaaaagaagagaa

SEQ ID NO: 16895 - DNA, 122 bp, Homo sapiens
  misc_feature (61)..(62): /note="This region represents a CpG dinucleotide"
  misc_feature (61)..(61): /note="Nucleotide may be methylated to form 5-methylcytosine"
agcccagggtgtggacgagtgggctgggcttggtcgtcagagccaaggcggctgcagcagcgtcttcctcctcctaagaggcggctgtagtggccatgcgggacgagggacttccttgctgc

SEQ ID NO: 16896 - DNA, 122 bp, Homo sapiens
  misc_feature (61)..(62): /note="This region represents a CpG dinucleotide"
  misc_feature (61)..(61): /note="Nucleotide may be methylated to form 5-methylcytosine"
aatggagcgagactccgtctaaaaaaaaaaaagtttcttaactgtcgtttcttaatgacacgcaatcagaacctcccctgcagctgaggtcccctgtggagagtatgtctcattgtctgtat

SEQ ID NO: 16897 - DNA, 122 bp, Homo sapiens
  misc_feature (61)..(62): /note="This region represents a CpG dinucleotide"
  misc_feature (61)..(61): /note="Nucleotide may be methylated to form 5-methylcytosine"
cactgtttctgttttccatgtgtacccttgcagaatgtttttaagcaacaggcacatgcacgcacacacatatcttgttaaatgaaaacagcaacacactctacatgctgttctgtaacctg

SEQ ID NO: 16898 - DNA, 122 bp, Homo sapiens
  misc_feature (61)..(62): /note="This region represents a CpG dinucleotide"
  misc_feature (61)..(61): /note="Nucleotide may be methylated to form 5-methylcytosine"
gttatcagatagacatgaaaaacctacttcctaactgaaggggaattctgcagataactacggcatctgagaatagggattgaggatgtctgcatgaagtccaaaaacatgtattcatttac

SEQ ID NO: 16899 - DNA, 122 bp, Homo sapiens
  misc_feature (61)..(62): /note="This region represents a CpG dinucleotide"
  misc_feature (61)..(61): /note="Nucleotide may be methylated to form 5-methylcytosine"
caccactagagggtaattgacattttggacttccccagtagaaagcaattaagcaccctccgtagatcaaaggttagtcttaccaccacatgagtaaacaagctagctaggtaacttcccca

SEQ ID NO: 16900 - DNA, 122 bp, Homo sapiens
  misc_feature (61)..(62): /note="This region represents a CpG dinucleotide"
  misc_feature (61)..(61): /note="Nucleotide may be methylated to form 5-methylcytosine"
ctggatcaaccacatactggtggacgatgagccagcggtggatcaaaacagattccctaacgatggacagacaggcaatggcgcctaggtactattgttgaagatttcctattttaaatctt

SEQ ID NO: 16901 - DNA, 122 bp, Homo sapiens
  misc_feature (61)..(62): /note="This region represents a CpG dinucleotide"
  misc_feature (61)..(61): /note="Nucleotide may be methylated to form 5-methylcytosine"
atcaggtctcggtctctgtagaggaaatgtccttggtctagaaggctctgaaggcctttgcggtgagatgctgggtgatgcctgtgttaccttcataaatgcacattagtccctccagggca

SEQ ID NO: 16902 - DNA, 122 bp, Homo sapiens
  misc_feature (61)..(62): /note="This region represents a CpG dinucleotide"
  misc_feature (61)..(61): /note="Nucleotide may be methylated to form 5-methylcytosine"
acctagtggggttggtgctcagccagctaatgcttactcagggcaaattatgtgcgaggccgttacaaatgtcaacgcacttcatcctcaccataatcctttgagatagcagctgctgccgc

SEQ ID NO: 16903 - DNA, 122 bp, Homo sapiens
  misc_feature (61)..(62): /note="This region represents a CpG dinucleotide"
  misc_feature (61)..(61): /note="Nucleotide may be methylated to form 5-methylcytosine"
ctaccagatgacaaaacactattaccaaacagctgggtgaccttaggaaaatcactcaaccgctcctgcctacggatttcctcatctgcggggccctgcagagctgttgcaaggatgaaatg

SEQ ID NO: 16904 - DNA, 122 bp, Homo sapiens
  misc_feature (61)..(62): /note="This region represents a CpG dinucleotide"
  misc_feature (61)..(61): /note="Nucleotide may be methylated to form 5-methylcytosine"
gtgtaatatgattcagtcatgattgagtactagtgattcatgtggtgctgttaactagtgcgatgatcgacaggaactgcagtactttccttacaccctgggtcaactactctccaatgcat

SEQ ID NO: 16905 - DNA, 122 bp, Homo sapiens
  misc_feature (61)..(62): /note="This region represents a CpG dinucleotide"
  misc_feature (61)..(61): /note="Nucleotide may be methylated to form 5-methylcytosine"
agagttgagaactccccttcctggacaggtccacttaaacatgtattaattgaatacctacgaggtggcgagaactggggatgaattgaaaaggaaaaaaaaagaagaaactataggcaggc

SEQ ID NO: 16906 - DNA, 122 bp, Homo sapiens
  misc_feature (61)..(62): /note="This region represents a CpG dinucleotide"
  misc_feature (61)..(61): /note="Nucleotide may be methylated to form 5-methylcytosine"
ttgctctctctctcatccaccctgttagcagcctctcggctgagcgggagaccacacactcggaccacacagcgccagctgaactccctcgcacgcaacatctacaagctgtcactctgcag

SEQ ID NO: 16907 - DNA, 122 bp, Homo sapiens
  misc_feature (61)..(62): /note="This region represents a CpG dinucleotide"
  misc_feature (61)..(61): /note="Nucleotide may be methylated to form 5-methylcytosine"
cactttttaaagtgaccctttgagccttgcttcctctgtgcatgtcaggattggctttcacggccacagaatctggactgtgattagtcttcctgtttcatctgtggttttgctcattgatt

SEQ ID NO: 16908 - DNA, 122 bp, Homo sapiens
  misc_feature (61)..(62): /note="This region represents a CpG dinucleotide"
  misc_feature (61)..(61): /note="Nucleotide may be methylated to form 5-methylcytosine"
ggctgagtagtttccttcccctactgaaataggaagatcctacaattatgtgcttccccacggtcgagatgtcagggattagactcataaaaggcaaatcttagccaattggatgaatatca

SEQ ID NO: 16909 - DNA, 122 bp, Homo sapiens
  misc_feature (61)..(62): /note="This region represents a CpG dinucleotide"
  misc_feature (61)..(61): /note="Nucleotide may be methylated to form 5-methylcytosine"
ttctaaagagaaattggagaagataaaactggacactggggagaccacaacttcatgctgcgtgggatctcccagctacctgcagtggccaccatgtcttgggtcctgctgcctgtactttg

SEQ ID NO: 16910 - DNA, 122 bp, Homo sapiens
  misc_feature (61)..(62): /note="This region represents a CpG dinucleotide"
  misc_feature (61)..(61): /note="Nucleotide may be methylated to form 5-methylcytosine"
gcctccatctgggtgttggacagttggttctgctcagcccagttttggggtaaacgatgacgcagttagggtggcctaggaagggagtttttctacctctgtccccagctgggtctctggcg

SEQ ID NO: 16911 - DNA, 122 bp, Homo sapiens
  misc_feature (61)..(62): /note="This region represents a CpG dinucleotide"
  misc_feature (61)..(61): /note="Nucleotide may be methylated to form 5-methylcytosine"
ggggaaagagcagaaaaaaaaaaccaaccataacaacaacaacaacagaaagcagagaaacgaaggtctggtgctagtacaaggaaagaaagcaacatggcagaggaccatattgactagtg

SEQ ID NO: 16912 - DNA, 122 bp, Homo sapiens
  misc_feature (61)..(62): /note="This region represents a CpG dinucleotide"
  misc_feature (61)..(61): /note="Nucleotide may be methylated to form 5-methylcytosine"
aagaattagagaatggaattcagagtgaccacagaacctggaaagtgtggaaggaaactgcgaaaaaagagagccagaaagggagaggcctgaattctgtttatgaactctacccaagtccc

SEQ ID NO: 16913 - DNA, 122 bp, Homo sapiens
  misc_feature (61)..(62): /note="This region represents a CpG dinucleotide"
  misc_feature (61)..(61): /note="Nucleotide may be methylated to form 5-methylcytosine"
ccccttccctccaaataagttcactagctccccaacaatggttcttaaacagctggaggccgggcatggtggctcatgtctgtaatcccagcactttgggaggccaaggcgggtggatcatg

SEQ ID NO: 16914 - DNA, 122 bp, Homo sapiens
  misc_feature (61)..(62): /note="This region represents a CpG dinucleotide"
  misc_feature (61)..(61): /note="Nucleotide may be methylated to form 5-methylcytosine"
gcatttcactttgtctcactttgggtgaatagtcccaattctgtcagacgtgcatctcttcgtctgtcagctccgtgtctcttgccaggatgcttctctctatctatcaggcagaattttca

SEQ ID NO: 16915 - DNA, 122 bp, Homo sapiens
  misc_feature (61)..(62): /note="This region represents a CpG dinucleotide"
  misc_feature (61)..(61): /note="Nucleotide may be methylated to form 5-methylcytosine"
cacaatgtcctcttgaaattcagggcactgtgactgccccttcctctggcagcctgggtacgcgtctcttctgtgttttaggaagtcactccactctgcttctgaatgactcatatacatct

SEQ ID NO: 16916 - DNA, 122 bp, Homo sapiens
  misc_feature (61)..(62): /note="This region represents a CpG dinucleotide"
  misc_feature (61)..(61): /note="Nucleotide may be methylated to form 5-methylcytosine"
tgtggcttttcatagagtctgtgggaacaaagctgcttctcgtccctttgtgctgcttcccgtaagatgaaatgtgtgtccatgactcagagctataatagacccacggagttactatcagt

SEQ ID NO: 16917 - DNA, 122 bp, Homo sapiens
  misc_feature (61)..(62): /note="This region represents a CpG dinucleotide"
  misc_feature (61)..(61): /note="Nucleotide may be methylated to form 5-methylcytosine"
tttgggaaggaaggaacacgcaaaaatttttaccttcttctttcaattggacactatggacggaaatccaggagagctgaccttggtaagaattcctactttcttccatcatttattaggcc

SEQ ID NO: 16918 - DNA, 122 bp, Homo sapiens
  misc_feature (61)..(62): /note="This region represents a CpG dinucleotide"
  misc_feature (61)..(61): /note="Nucleotide may be methylated to form 5-methylcytosine"
aactccacactgctgaaactgctttctacctgctagtccttgtcttacttgacttttcctcgacggaccttttttcccttggctttgtgagaccatgggaatccttttttctctgcaaacat

SEQ ID NO: 16919 - DNA, 122 bp, Homo sapiens
  misc_feature (61)..(62): /note="This region represents a CpG dinucleotide"
  misc_feature (61)..(61): /note="Nucleotide may be methylated to form 5-methylcytosine"
tccattaggaacagtgtgggcagtgaaggggaccctccaaactgtaaagctacaagagaacgttttaactccttttaaaattagaagaaaaatgaagttttacagtctatgaaaatgtttta

SEQ ID NO: 16920 - DNA, 122 bp, Homo sapiens
  misc_feature (61)..(62): /note="This region represents a CpG dinucleotide"
  misc_feature (61)..(61): /note="Nucleotide may be methylated to form 5-methylcytosine"
atgtgaggctgatttctcattataggttgtgatgaaagcctgatctagaggcctccctcccgtcctgttgcggcccccgcaagcctccttaccctgtggcctctggtacttcttgtctagct

SEQ ID NO: 16921 - DNA, 122 bp, Homo sapiens
  misc_feature (61)..(62): /note="This region represents a CpG dinucleotide"
  misc_feature (61)..(61): /note="Nucleotide may be methylated to form 5-methylcytosine"
gtgaacggaaacttgttaaccttgacagtgcctctcttgcagcattagccatcctgagagcgtccttcagtttctgtgtgctggttctgcccaggaatcaaacaagcccatacccaaatcaa

SEQ ID NO: 16922 - DNA, 122 bp, Homo sapiens
  misc_feature (61)..(62): /note="This region represents a CpG dinucleotide"
  misc_feature (61)..(61): /note="Nucleotide may be methylated to form 5-methylcytosine"
gaaaacagtgtcccttggcttaaaacaaatggtgtcctcttagtctcccgtcccagtgggcgttagatgtcggggcaggcggctgcacacttaattctccgcgggggcattggcctgtctgc

SEQ ID NO: 16923 - DNA, 122 bp, Homo sapiens
  misc_feature (61)..(62): /note="This region represents a CpG dinucleotide"
  misc_feature (61)..(61): /note="Nucleotide may be methylated to form 5-methylcytosine"
ccctagtgtctggtatttgctagggatacttggcattccttggcttctctccaaaatctgcgtctattgtcatgtggcattctcctggtttttttttctgtgttcctgtggctattactgac

SEQ ID NO: 16924 - DNA, 122 bp, Homo sapiens
  misc_feature (61)..(62): /note="This region represents a CpG dinucleotide"
  misc_feature (61)..(61): /note="Nucleotide may be methylated to form 5-methylcytosine"
ccaatagacatccccccaaagcagcaaggaactacttttcaaattcacttaaatgacacacgttattctgtctgtctctggcagctcttcattcctgcccagagtttatgggtagatgcctt

SEQ ID NO: 16925 - DNA, 122 bp, Homo sapiens
  misc_feature (61)..(62): /note="This region represents a CpG dinucleotide"
  misc_feature (61)..(61): /note="Nucleotide may be methylated to form 5-methylcytosine"
caagaaacaatgacaccaacagcacaccaccagtgcttgctgagtctccactgccatccacgtgccacagtctgcatctgcagctgccacagcagggatgctcccaaagtgtggcctctgag

SEQ ID NO: 16926 - DNA, 122 bp, Homo sapiens
  misc_feature (61)..(62): /note="This region represents a CpG dinucleotide"
  misc_feature (61)..(61): /note="Nucleotide may be methylated to form 5-methylcytosine"
caacagccaagcttcttggtagttttctatactcatttagtcactttcttaccttccattcgctcaaaccttctccaatctaggttccagccccatcactcagcagacattattctcattaa

SEQ ID NO: 16927 - DNA, 122 bp, Homo sapiens
  misc_feature (61)..(62): /note="This region represents a CpG dinucleotide"
  misc_feature (61)..(61): /note="Nucleotide may be methylated to form 5-methylcytosine"
taattgtacccagtaatattttctggtccttttgcataatttccatttggttaaaagacacgggttccaatgaactaatatattttatagcaaattggagaagagagggtttccttcacaca

SEQ ID NO: 16928 - DNA, 122 bp, Homo sapiens
  misc_feature (61)..(62): /note="This region represents a CpG dinucleotide"
  misc_feature (61)..(61): /note="Nucleotide may be methylated to form 5-methylcytosine"
ctcatggtcttcaaactctccatgccttgttagcttcctggaatccacagaatcctttcacgcttgggcactgacctgtaaaaagccatcttaaaaggcttccaggtacattgtcttggctc

SEQ ID NO: 16929 - DNA, 122 bp, Homo sapiens
  misc_feature (61)..(62): /note="This region represents a CpG dinucleotide"
  misc_feature (61)..(61): /note="Nucleotide may be methylated to form 5-methylcytosine"
taccacagaagccataggcccttcccagaatctcataacaggaagtatgtgatgtccatacgtcttattactggcaatgttaaccttcatcacttggttaaggtaatgtctgctgggtttac

SEQ ID NO: 16930 - DNA, 122 bp, Homo sapiens
  misc_feature (61)..(62): /note="This region represents a CpG dinucleotide"
  misc_feature (61)..(61): /note="Nucleotide may be methylated to form 5-methylcytosine"
gtgtctatacccaaagcaccacccggtgattttgaacaaacaggaaacaaatcaacgtagcgtgtggttcctgcagaaggctgctgtcagactgcagtcagtaggggtggagtcctctgggg

SEQ ID NO: 16931 - DNA, 122 bp, Homo sapiens
  misc_feature (61)..(62): /note="This region represents a CpG dinucleotide"
  misc_feature (61)..(61): /note="Nucleotide may be methylated to form 5-methylcytosine"
atcatcctgctcacaaatgtgacacagaacagagtgtcacagacacctcaatgcactggacgcttaagtcaaatggaaagttaaaaacaccttctgcaagcagccactggcattacttcata

SEQ ID NO: 16932 - DNA, 122 bp, Homo sapiens
  misc_feature (61)..(62): /note="This region represents a CpG dinucleotide"
  misc_feature (61)..(61): /note="Nucleotide may be methylated to form 5-methylcytosine"
tcctccctccttccccagaagttttcacttactgattcatccccattgtgatctagatgccgtcacagaggacctgcttgcatgggggcactcacctaggttttgagaaaagtcaatcaaag

SEQ ID NO: 16933 - DNA, 122 bp, Homo sapiens
  misc_feature (61)..(62): /note="This region represents a CpG dinucleotide"
  misc_feature (61)..(61): /note="Nucleotide may be methylated to form 5-methylcytosine"
cctttcctgaacatgaggacagggttcagtgataagtgcaggaacgcaggagaggtagggcggagaaaactctgcttcaggaagggagagataaagatggccaaagtccctgtactgggtag

SEQ ID NO: 16934 - DNA, 122 bp, Homo sapiens
  misc_feature (61)..(62): /note="This region represents a CpG dinucleotide"
  misc_feature (61)..(61): /note="Nucleotide may be methylated to form 5-methylcytosine"
ctccctccttgcaattcaagtctttaggccttgacttggtcctgaagtgagagcaaccaacgatgtcattcacagaacacagatggagaggcaaagaagaaaacccaaaggcacctagaggt

SEQ ID NO: 16935 - DNA, 122 bp, Homo sapiens
  misc_feature (61)..(62): /note="This region represents a CpG dinucleotide"
  misc_feature (61)..(61): /note="Nucleotide may be methylated to form 5-methylcytosine"
aaaatgtgatgtagcatagtgatgcttcctcccctggccaatattcagggaaccacccagcgcacaggaggaaagcctgggtgaaaatcacagctccgcctcctgcagccctgtgacctcag

SEQ ID NO: 16936 - DNA, 122 bp, Homo sapiens
  misc_feature (61)..(62): /note="This region represents a CpG dinucleotide"
  misc_feature (61)..(61): /note="Nucleotide may be methylated to form 5-methylcytosine"
cttacagtcaacagagggttagccttccataaatgagaaatccaaaaaagaataatgccacgtatttcaggaatgtcggttagaggtttggccttcttgggaagtgtcacaatgctgagtct

SEQ ID NO: 16937 - DNA, 122 bp, Homo sapiens
  misc_feature (61)..(62): /note="This region represents a CpG dinucleotide"
  misc_feature (61)..(61): /note="Nucleotide may be methylated to form 5-methylcytosine"
ttattgaacgttttaagttactggaagttggatatccagaaggctggacccacgccgggtcgagtgaggaactggaggtccaatccacggggatgttaatgtgttttgttttgtttgttttt

SEQ ID NO: 16938 - DNA, 122 bp, Homo sapiens
  misc_feature (61)..(62): /note="This region represents a CpG dinucleotide"
  misc_feature (61)..(61): /note="Nucleotide may be methylated to form 5-methylcytosine"
tctttattaccactgttactacaagtttgctgactttcagccacagtggatggaaaagtacgcctgttgcaacatgacgtgagtcagttgttcataaataatgggattgcaccgtcagctct

SEQ ID NO: 16939 - DNA, 122 bp, Homo sapiens
  misc_feature (61)..(62): /note="This region represents a CpG dinucleotide"
  misc_feature (61)..(61): /note="Nucleotide may be methylated to form 5-methylcytosine"
ttctgggtactttcaagggaccaactctctgtatgggttctttggttttgataccttttgcgtggtgactttctcaaatgctgcttattgtaacaatatatttgacctatgagccgactcac

SEQ ID NO: 16940 - DNA, 122 bp, Homo sapiens
  misc_feature (61)..(62): /note="This region represents a CpG dinucleotide"
  misc_feature (61)..(61): /note="Nucleotide may be methylated to form 5-methylcytosine"
ggtgatccacccgccttggcctcccaaagtgctgggattacaggcttgagccaccatgcccggcaagaactgttgttttctagatgccagatgaatgagtttagaatgacctatttgaggag

SEQ ID NO: 16941 - DNA, 122 bp, Homo sapiens
  misc_feature (61)..(62): /note="This region represents a CpG dinucleotide"
  misc_feature (61)..(61): /note="Nucleotide may be methylated to form 5-methylcytosine"
gttgctttctagacacctcttcctgagtcacttcacccctaaaaccaaccttctctcctacgtgaagagttataaaacatggcttctgcccccgggagctcataacttagtcagagagacac

SEQ ID NO: 16942 - DNA, 122 bp, Homo sapiens
  misc_feature (61)..(62): /note="This region represents a CpG dinucleotide"
  misc_feature (61)..(61): /note="Nucleotide may be methylated to form 5-methylcytosine"
tttgagcaccatgagcctgagatagacaagcaggaggagtgaaggcacatgtgatgcactcgtagtctgcataggccattgccacccagtatggctggtggaataggaaactaagctgtttg

SEQ ID NO: 16943 - DNA, 122 bp, Homo sapiens
  misc_feature (61)..(62): /note="This region represents a CpG dinucleotide"
  misc_feature (61)..(61): /note="Nucleotide may be methylated to form 5-methylcytosine"
atacatggaggtcgctctacttacaaacaggctgaattccaaaaggctgttaaatccattcgtttaaacgtccaaaaccgtgtgtgagatttaggtttatggggtcagtatttcctcctagt

SEQ ID NO: 16944 - DNA, 122 bp, Homo sapiens
  misc_feature (61)..(62): /note="This region represents a CpG dinucleotide"
  misc_feature (61)..(61): /note="Nucleotide may be methylated to form 5-methylcytosine"
tctttggactgaatactatacttcaactttatgtccattgtcttatttgattttcccagccgttgatgagtaatataccattatccttgcttagcaaatgatgaaagcagggttcagagagg

SEQ ID NO: 16945 - DNA, 122 bp, Homo sapiens
  misc_feature (61)..(62): /note="This region represents a CpG dinucleotide"
  misc_feature (61)..(61): /note="Nucleotide may be methylated to form 5-methylcytosine"
ctttgagtcaggatggctaaatttatagctggctgaatacttcccagaggatgagtgtaacgatattgattttagcgaagtgagtcatatgcctactgcctggaaacacaagctcaattacc

SEQ ID NO: 16946 - DNA, 122 bp, Homo sapiens
  misc_feature (61)..(62): /note="This region represents a CpG dinucleotide"
  misc_feature (61)..(61): /note="Nucleotide may be methylated to form 5-methylcytosine"
tttaaattctgatactttagaggtgctgtgcaaacataagctgtaccagattatactccacgataatgtatgagagtaccatttcctactactcttgccaaccacagatagtatcaatcttt

SEQ ID NO: 16947 - DNA, 122 bp, Homo sapiens
  misc_feature (61)..(62): /note="This region represents a CpG dinucleotide"
  misc_feature (61)..(61): /note="Nucleotide may be methylated to form 5-methylcytosine"
gtgacctccactgatggcttgaatgtacatgttcctgaactgcttaaaatacaagtccaacgtcagcacagtactagaaagctcaattgcagaaggtttgcattgtatgatcagttcaccat

SEQ ID NO: 16948 - DNA, 122 bp, Homo sapiens
  misc_feature (61)..(62): /note="This region represents a CpG dinucleotide"
  misc_feature (61)..(61): /note="Nucleotide may be methylated to form 5-methylcytosine"
aatgtagaaaattattcacacggtgtaaaaaagcccggtgggaaagtacactgtggtttccgtctctggccctgccacagggaaggaaactggaacacaccggtctggtaggaagaagaggg

SEQ ID NO: 16949 - DNA, 122 bp, Homo sapiens
  misc_feature (61)..(62): /note="This region represents a CpG dinucleotide"
  misc_feature (61)..(61): /note="Nucleotide may be methylated to form 5-methylcytosine"
attagaggatatttcagatgagatgcacttgtgttgcctcagactactacggagtgactccgcagctgctgaagtgttgcctaattgaggatctactttagaaacgatgtgagtgtgatggg

SEQ ID NO: 16950 - DNA, 122 bp, Homo sapiens
  misc_feature (61)..(62): /note="This region represents a CpG dinucleotide"
  misc_feature (61)..(61): /note="Nucleotide may be methylated to form 5-methylcytosine"
tggaataacagagagaggattaggcagaaagctgggtttgtcagggtgggactgattacacgtagcctttcataggctttaggaagttgttatttcagaaataattggtgtgtgttgagttt

SEQ ID NO: 16951 - DNA, 122 bp, Homo sapiens
  misc_feature (61)..(62): /note="This region represents a CpG dinucleotide"
  misc_feature (61)..(61): /note="Nucleotide may be methylated to form 5-methylcytosine"
accaagccccaacctgcagctgctctgcagacgagcttcagacaggagttcaggaagctgcggtctagattatgtgtggctgacacttctgcctcacacgacacgctgttggagtttctccc

SEQ ID NO: 16952 - DNA, 122 bp, Homo sapiens
  misc_feature (61)..(62): /note="This region represents a CpG dinucleotide"
  misc_feature (61)..(61): /note="Nucleotide may be methylated to form 5-methylcytosine"
aacttagtctttgatgcttttactttgacccccaggactttcctgttggagtgagcaggtcggttttctttgagctgtgcagcagcagtctccttggctaaactcaatccagcacaggacca

SEQ ID NO: 16953 - DNA, 122 bp, Homo sapiens
  misc_feature (61)..(62): /note="This region represents a CpG dinucleotide"
  misc_feature (61)..(61): /note="Nucleotide may be methylated to form 5-methylcytosine"
atcagaatatactggaaaaaatttctcccccagatgttacaacattgccatttagtgcagcgctacttgagagcagatggcgatgagtcaggatttaacaaagaccttaatggctcttctgc

SEQ ID NO: 16954 - DNA, 122 bp, Homo sapiens
  misc_feature (61)..(62): /note="This region represents a CpG dinucleotide"
  misc_feature (61)..(61): /note="Nucleotide may be methylated to form 5-methylcytosine"
ccagagcctatatgcttaaccacaaagccatcctgccttaaatgacatggccttaaaagccgagttatccaatacagtaggttaagtgaaaaaggtgctgccaggctactgagatgaaaaga

SEQ ID NO: 16955 - DNA, 122 bp, Homo sapiens
  misc_feature (61)..(62): /note="This region represents a CpG dinucleotide"
  misc_feature (61)..(61): /note="Nucleotide may be methylated to form 5-methylcytosine"
tgccccagcccccacctcagccccaaccccaaccccagccgcatcccctgccccagctgacgggtcaaagcctcaggagagtgtggctctccccaggcgctaccaggaggggcaggtctcag

SEQ ID NO: 16956 - DNA, 122 bp, Homo sapiens
  misc_feature (61)..(62): /note="This region represents a CpG dinucleotide"
  misc_feature (61)..(61): /note="Nucleotide may be methylated to form 5-methylcytosine"
gaaggagaatggtctggcctggtgtagtctgtggaggagtgcccccaaggcctctagatccgcactcacccactaccggctgtgtatgtgtacttagggagcaggaatgtttacttttaaaa

SEQ ID NO: 16957 - DNA, 122 bp, Homo sapiens
  misc_feature (61)..(62): /note="This region represents a CpG dinucleotide"
  misc_feature (61)..(61): /note="Nucleotide may be methylated to form 5-methylcytosine"
aaagtatgtgcctgcttcgtacactgaggattctcagaaactggtaaggattcctcttcacgatggcaaactaagactgggattagaaaaacccctggtcacaggaaagtggtcagcaatag

SEQ ID NO: 16958 - DNA, 122 bp, Homo sapiens
  misc_feature (61)..(62): /note="This region represents a CpG dinucleotide"
  misc_feature (61)..(61): /note="Nucleotide may be methylated to form 5-methylcytosine"
ctagagtattgtctggcagcaagttattatctgccagtgaaaaaagctttaacgtgccttcggttaagccacacagaagtgccaggcaaggagaggcacggaccacagcatctgttttacaa

SEQ ID NO: 16959 - DNA, 122 bp, Homo sapiens
  misc_feature (61)..(62): /note="This region represents a CpG dinucleotide"
  misc_feature (61)..(61): /note="Nucleotide may be methylated to form 5-methylcytosine"
ctgggaaggaggggcccccgcagcagcagagcccacgtgatgtggggaaatcagtcagagcgcctgattccgagggagaaaccagctcagctcacacacgaacctatgaaaattctttattg

SEQ ID NO: 16960 - DNA, 122 bp, Homo sapiens
  misc_feature (61)..(62): /note="This region represents a CpG dinucleotide"
  misc_feature (61)..(61): /note="Nucleotide may be methylated to form 5-methylcytosine"
tggggtgagccgcaggatctaggtcaccgtgctctggccctgctctctgcctttcgcaagcgcttgctcccgtgggatgtttgtcatgcttccatgcatgacacaggagaatatcaacattg

SEQ ID NO: 16961 - DNA, 122 bp, Homo sapiens
  misc_feature (61)..(62): /note="This region represents a CpG dinucleotide"
  misc_feature (61)..(61): /note="Nucleotide may be methylated to form 5-methylcytosine"
tcctctttctgtacagccagtgtaagaacgcagcctgtgggtaagtaccaggaggcctaccgcaacgtgttttatcagcaaggtctttgtgacctgtaccttgtgtcgacctcctatctcat

SEQ ID NO: 16962 - DNA, 122 bp, Homo sapiens
  misc_feature (61)..(62): /note="This region represents a CpG dinucleotide"
  misc_feature (61)..(61): /note="Nucleotide may be methylated to form 5-methylcytosine"
gaaataggccgtgcagtgtggccccaggcaaaagctttgtcttttctcccaagaacctagcggaatgactgccagagtgatcactataaagcattttaccaggttattttgaagggacgcag

SEQ ID NO: 16963 - DNA, 122 bp, Homo sapiens
  misc_feature (61)..(62): /note="This region represents a CpG dinucleotide"
  misc_feature (61)..(61): /note="Nucleotide may be methylated to form 5-methylcytosine"
aaaagctgatctggtttgactccgctggaggtggggcctggagcaggccttgcgctgttgcgtaactggctgtgttctggtgaggccttgctcccaaccccacacgctcctccctctgaggc

SEQ ID NO: 16964 - DNA, 122 bp, Homo sapiens
  misc_feature (61)..(62): /note="This region represents a CpG dinucleotide"
  misc_feature (61)..(61): /note="Nucleotide may be methylated to form 5-methylcytosine"
tcttcagcaggcagttttccatcttcgcctgagtcaccatctaaacacctggagacttcacgtgacgttctggattttcagagtcactgcttatacctcaggctgtgctggcccaacttgga

SEQ ID NO: 16965 - DNA, 122 bp, Homo sapiens
  misc_feature (61)..(62): /note="This region represents a CpG dinucleotide"
  misc_feature (61)..(61): /note="Nucleotide may be methylated to form 5-methylcytosine"
cagtgtggtttgcaaggatattttaaaaaagattgtccaatgagaaacaagccgccccctcgcccatgtccattatgcctatgcaatcattgccccagaggacaaaggttctctgtgtcaga

SEQ ID NO: 16966 - DNA, 122 bp, Homo sapiens
  misc_feature (61)..(62): /note="This region represents a CpG dinucleotide"
  misc_feature (61)..(61): /note="Nucleotide may be methylated to form 5-methylcytosine"
ttctgtgtgtagtggtatttcattgtggttttaatttgcatttctctgatggctaatgaacgtcttttcatgtgcttgtcttccgtgtatcctgtgtggtgaagtgtcatcagatcttttgc

SEQ ID NO: 16967 - DNA, 122 bp, Homo sapiens
  misc_feature (61)..(62): /note="This region represents a CpG dinucleotide"
  misc_feature (61)..(61): /note="Nucleotide may be methylated to form 5-methylcytosine"
cttttaggcttattttctttttcctgttccttgagaaaacaatacagaaacagggctgggcgcggtggctcaagcctgtaatcccagcactttgggaggccaagacgggcggatcacaaggt

SEQ ID NO: 16968 - DNA, 122 bp, Homo sapiens
  misc_feature (61)..(62): /note="This region represents a CpG dinucleotide"
  misc_feature (61)..(61): /note="Nucleotide may be methylated to form 5-methylcytosine"
tctgaagtcacaaggctgggtcatacagtcagtccctgggggcacatagctcttaggattcgctcctagctaccaggcaactggcagagactaaacagcttatgtttctaagagggagtggc

SEQ ID NO: 16969 - DNA, 122 bp, Homo sapiens
  misc_feature (61)..(62): /note="This region represents a CpG dinucleotide"
  misc_feature (61)..(61): /note="Nucleotide may be methylated to form 5-methylcytosine"
atgatttcctctgaatctctagattttaaattgacatttctatggcatgctgaatcattgcgggtcgagttttaattagtctcaggcctttggaaaccaattcggcagaatacacaagagtc

SEQ ID NO: 16970 - DNA, 122 bp, Homo sapiens
  misc_feature (61)..(62): /note="This region represents a CpG dinucleotide"
  misc_feature (61)..(61): /note="Nucleotide may be methylated to form 5-methylcytosine"
tggtgaaatccagcaagggaaagtcacgttcaaagattattaagtgataaatgagaaaaacgcactagtggacaaaagatcttcagtaaaatggaagcacagaatgtgagaactattgaaag

SEQ ID NO: 16971 - DNA, 122 bp, Homo sapiens
  misc_feature (61)..(62): /note="This region represents a CpG dinucleotide"
  misc_feature (61)..(61): /note="Nucleotide may be methylated to form 5-methylcytosine"
caatggtccattttccgaacaacattaagcgcaacaacttcaagtattaaatacaaattacgtgtcggagtttattataaattaatttggtctctaatgaatgcatacttatagtgccacct

SEQ ID NO: 16972 - DNA, 122 bp, Homo sapiens
  misc_feature (61)..(62): /note="This region represents a CpG dinucleotide"
  misc_feature (61)..(61): /note="Nucleotide may be methylated to form 5-methylcytosine"
aaacttcatactgttttttttttattattatactttaagttttagggtacatgtgcacaacgtgcaggtttgttacatactgtaatgttaaagggaagaaaagttagaagactaatgaacag

SEQ ID NO: 16973 - DNA, 122 bp, Homo sapiens
  misc_feature (61)..(62): /note="This region represents a CpG dinucleotide"
  misc_feature (61)..(61): /note="Nucleotide may be methylated to form 5-methylcytosine"
gttgcatcttgtgtaattctagtacaatatcaaaaccagtcctctttttgttccaaagttcgcaggcccttctttgtcactccactactatattataatctggttttctgtttatattgtat

SEQ ID NO: 16974 - DNA, 122 bp, Homo sapiens
  misc_feature (61)..(62): /note="This region represents a CpG dinucleotide"
  misc_feature (61)..(61): /note="Nucleotide may be methylated to form 5-methylcytosine"
gactcaggccaggagcaagagaaagcacctcaggtatgagtatgcactcacctacatgagcgttttggtggatatcccgaggattcatgacagcctctagcaagaatgaatgaaaacagaga

SEQ ID NO: 16975 - DNA, 122 bp, Homo sapiens
  misc_feature (61)..(62): /note="This region represents a CpG dinucleotide"
  misc_feature (61)..(61): /note="Nucleotide may be methylated to form 5-methylcytosine"
aagtggagagtatcagaggtcagtggtagaaaaaagtttgattatcattcaagaggaacacgagggtaaaatagcaaagatgaatagtggagaaacttccacaattgcaggtgatggatttg

SEQ ID NO: 16976 - DNA, 122 bp, Homo sapiens
  misc_feature (61)..(62): /note="This region represents a CpG dinucleotide"
  misc_feature (61)..(61): /note="Nucleotide may be methylated to form 5-methylcytosine"
cacaggaagtctccttaagccaagacttgcaacagaagcccggcaagcgggacagaccggcggacagaccgttccacgtggcggctctgcgtgttacctgccccagcttcccttcttcacaa

SEQ ID NO: 16977 - DNA, 122 bp, Homo sapiens
  misc_feature (61)..(62): /note="This region represents a CpG dinucleotide"
  misc_feature (61)..(61): /note="Nucleotide may be methylated to form 5-methylcytosine"
cagccactccctacttaggaatcccatgcattcccctcttcttccatctggactgtgccacgccagggaattcatttggtccaggctagaattcactgggaacaattagcaacaggcccaaa

SEQ ID NO: 16978 - DNA, 122 bp, Homo sapiens
  misc_feature (61)..(62): /note="This region represents a CpG dinucleotide"
  misc_feature (61)..(61): /note="Nucleotide may be methylated to form 5-methylcytosine"
aaagaggcagagcagctttgccaccggcttatggagcatggcatcatccagcatggtgagcgtattgggcagcttttgctgcaggaacaaacagccagccccaaatcttgtgtcttacaaca

SEQ ID NO: 16979 - DNA, 122 bp, Homo sapiens
  misc_feature (61)..(62): /note="This region represents a CpG dinucleotide"
  misc_feature (61)..(61): /note="Nucleotide may be methylated to form 5-methylcytosine"
catgagcaaagcacagaaccttataactatgcttgcttgtggaaagacatcccttgtccacgggccaagtatttgaaaataccactccatatagctccagggccctgagagaagctaccgtg

SEQ ID NO: 16980 - DNA, 122 bp, Homo sapiens
  misc_feature (61)..(62): /note="This region represents a CpG dinucleotide"
  misc_feature (61)..(61): /note="Nucleotide may be methylated to form 5-methylcytosine"
tctgacccctgctcagcgcgcgccatttcgtcgttgccaaacgaaatcaagccccgcgtgcgctccaggggcgaaggactctggactcaccccgaccaccgggagagctggcccctacccac

SEQ ID NO: 16981 - DNA, 122 bp, Homo sapiens
  misc_feature (61)..(62): /note="This region represents a CpG dinucleotide"
  misc_feature (61)..(61): /note="Nucleotide may be methylated to form 5-methylcytosine"
cccgccatgccgggttggtgactgcttatcatcatcatcatcaacaccaaatgtactcagcgctctgcttactggaagcagtactcttccccatcacctttcacagtccccctgtgtgaggt

SEQ ID NO: 16982 - DNA, 122 bp, Homo sapiens
  misc_feature (61)..(62): /note="This region represents a CpG dinucleotide"
  misc_feature (61)..(61): /note="Nucleotide may be methylated to form 5-methylcytosine"
attcccttgtctattacttgagtggccagacaccaggaggcagcaagtagatttctccaccgcctctgactactgaagccctgggagttgcttaagcttatctactaaccaccttgacaggc

SEQ ID NO: 16983 - DNA, 122 bp, Homo sapiens
  misc_feature (61)..(62): /note="This region represents a CpG dinucleotide"
  misc_feature (61)..(61): /note="Nucleotide may be methylated to form 5-methylcytosine"
gagcaaaccaaaaccaaaagaaaagaggaactcagaggaccaagacaggaaaacaatctgcgaatgtgtgaaaaacacaatgcctccagaggccaaggaacatacggttgtatccgtgagac

SEQ ID NO: 16984 - DNA, 122 bp, Homo sapiens
  misc_feature (61)..(62): /note="This region represents a CpG dinucleotide"
  misc_feature (61)..(61): /note="Nucleotide may be methylated to form 5-methylcytosine"
tcatggctcaggctccctgagtgtacagctggtttacttgactcatgagcaagatgcacacgtcacatctggctggcacgtctctgaagcctttttacatctctaggctttccccattcctc

SEQ ID NO: 16985 - DNA, 122 bp, Homo sapiens
  misc_feature (61)..(62): /note="This region represents a CpG dinucleotide"
  misc_feature (61)..(61): /note="Nucleotide may be methylated to form 5-methylcytosine"
tgtcagaatggctgctgtcaagtccaagtgcatcatgagcattatctgcagccttatttccgctggcgtggcaatgctggccagcaaaatcctctctcaaccccatttcctccttgctccct

SEQ ID NO: 16986 - DNA, 122 bp, Homo sapiens
  misc_feature (61)..(62): /note="This region represents a CpG dinucleotide"
  misc_feature (61)..(61): /note="Nucleotide may be methylated to form 5-methylcytosine"
tggccagagacctatggatcatgactacatcccactgtcagatgacacactgggcagctacgacctgttggatccaaaatgtgagactcaaattactaaggcaattagtggcagggacagga

SEQ ID NO: 16987 - DNA, 122 bp, Homo sapiens
  misc_feature (61)..(62): /note="This region represents a CpG dinucleotide"
  misc_feature (61)..(61): /note="Nucleotide may be methylated to form 5-methylcytosine"
atggtggaggagaagggggtgaaaagccgcagaaaggagatctatttaccctggcacatgcgctgtgtggtcagctgaaaacaaaacaggttttttattactcgtgtggtgtaggggggaag

SEQ ID NO: 16988 - DNA, 122 bp, Homo sapiens
  misc_feature (61)..(62): /note="This region represents a CpG dinucleotide"
  misc_feature (61)..(61): /note="Nucleotide may be methylated to form 5-methylcytosine"
tttattatgcagttgcattttcatatccgtattgaacatttacttgctgtgcctgtcacacgctagcaggtgtcatcttttcctgtttgcttgtttcttggggccatcctagtgttaaaggc

SEQ ID NO: 16989 - DNA, 122 bp, Homo sapiens
  misc_feature (61)..(62): /note="This region represents a CpG dinucleotide"
  misc_feature (61)..(61): /note="Nucleotide may be methylated to form 5-methylcytosine"
atgattactgagttttccttcctgtgattttctctcagtgatttctcctttaaaccacaccgtgacatgaactaatatattgggaatgactcagattttccgtatcccgagaaagtgacaaa

SEQ ID NO: 16990 - DNA, 122 bp, Homo sapiens
  misc_feature (61)..(62): /note="This region represents a CpG dinucleotide"
  misc_feature (61)..(61): /note="Nucleotide may be methylated to form 5-methylcytosine"
aaggatgcgggaccctcggggagactgaggcagtgtaacacatgcccacacccaggaagtcgcccctcccacggcagccagaatgcccttactgcccctcccccagcctccagggaaagtca

SEQ ID NO: 16991 - DNA, 122 bp, Homo sapiens
  misc_feature (61)..(62): /note="This region represents a CpG dinucleotide"
  misc_feature (61)..(61): /note="Nucleotide may be methylated to form 5-methylcytosine"
aaaaaaaaaacaacccacaaaaccaaaatgctattaatcctgccacaatatttttaattacgtacaaagatctgacatgtcacccagggacccatttcacccactgctctgtttggccgcca

SEQ ID NO: 16992 - DNA, 122 bp, Homo sapiens
  misc_feature (61)..(62): /note="This region represents a CpG dinucleotide"
  misc_feature (61)..(61): /note="Nucleotide may be methylated to form 5-methylcytosine"
aactctgtacttcctctctctgaccacagtctcctgtctgtctacctctgctaccagaaccgtggccctgagtcacctctgccctcagccagaaccccagattctgcacctccgtgtctccc

SEQ ID NO: 16993 - DNA, 122 bp, Homo sapiens
  misc_feature (61)..(62): /note="This region represents a CpG dinucleotide"
  misc_feature (61)..(61): /note="Nucleotide may be methylated to form 5-methylcytosine"
caactctctcctggggccagaactgctccgaaacgggaacagctgtgtatattctttgatcgttagcaggaaacgatgtgtcgtgtctcaaagcaccttttcatgctgctttcttattaact

SEQ ID NO: 16994 - DNA, 122 bp, Homo sapiens
  misc_feature (61)..(62): /note="This region represents a CpG dinucleotide"
  misc_feature (61)..(61): /note="Nucleotide may be methylated to form 5-methylcytosine"
gcatccaaatcccccagctcccagccctgcactgtgttgacagccttaggacttgtgaaacggcagaagggcttttgtaaactagagctaaacatttcaggccatgttgacgttgtttcccc

SEQ ID NO: 16995 - DNA, 122 bp, Homo sapiens
  misc_feature (61)..(62): /note="This region represents a CpG dinucleotide"
  misc_feature (61)..(61): /note="Nucleotide may be methylated to form 5-methylcytosine"
tacactattaccagcatttggttttgtcactattttttattttaggcattttgataggtgcgtagtgatgtctctctatagtttcaattagcatttcctgatgactaatgatgttgaaaatc

SEQ ID NO: 16996 - DNA, 122 bp, Homo sapiens
  misc_feature (61)..(62): /note="This region represents a CpG dinucleotide"
  misc_feature (61)..(61): /note="Nucleotide may be methylated to form 5-methylcytosine"
cccccgtaagatgacaataacagccccaccccaggatgtcaagatgaaggcagatagtaacgaggctgctagaagagttcagactccacaatgtgcctgcatgttccattatctaaatcagt

SEQ ID NO: 16997 - DNA, 122 bp, Homo sapiens
  misc_feature (61)..(62): /note="This region represents a CpG dinucleotide"
  misc_feature (61)..(61): /note="Nucleotide may be methylated to form 5-methylcytosine"
catgagtcaccacacccagcctgctcttgctgttaactgtactgcctttctgaggcatcacgtctcacctctggtcaaccagtaaaagcccagggatagaaaatgagtaggacatatttaga

SEQ ID NO: 16998 - DNA, 122 bp, Homo sapiens
  misc_feature (61)..(62): /note="This region represents a CpG dinucleotide"
  misc_feature (61)..(61): /note="Nucleotide may be methylated to form 5-methylcytosine"
tttacctctccctcacaactctctggatccacagccaacctgggagcccagccctggaggcgggagggcagagcacatctatctgactccaaaaccagcgctcttgccctttgtccaccgtg

SEQ ID NO: 16999 - DNA, 122 bp, Homo sapiens
  misc_feature (61)..(62): /note="This region represents a CpG dinucleotide"
  misc_feature (61)..(61): /note="Nucleotide may be methylated to form 5-methylcytosine"
tccctggcaggcatttgtcaggccatatgttttaaccttatggtaatactttgctttagtcgttcctcctgctaccagtagcgttttgacccacctgccagtgtttgcttgctctatgtttc

SEQ ID NO: 17000 - DNA, 122 bp, Homo sapiens
  misc_feature (61)..(62): /note="This region represents a CpG dinucleotide"
  misc_feature (61)..(61): /note="Nucleotide may be methylated to form 5-methylcytosine"
acatatatacacacatacgcagtatctgggggcgcatatacaatcacgcacatacacatacgatcacgagtacatcagagaaaactctttcaagatttgggcaaaatagttcactaaaacgg

SEQ ID NO: 17001 - DNA, 122 bp, Homo sapiens
  misc_feature (61)..(62): /note="This region represents a CpG dinucleotide"
  misc_feature (61)..(61): /note="Nucleotide may be methylated to form 5-methylcytosine"
agacgctgcgcgggtgcagaagagtatttaatgttaaggaaagagaagaaccgcgccgcccggaggcagagaggctccatggccgtgctgctgggccatccccaactccctatcccatcccc

SEQ ID NO: 17002 - DNA, 122 bp, Homo sapiens
  misc_feature (61)..(62): /note="This region represents a CpG dinucleotide"
  misc_feature (61)..(61): /note="Nucleotide may be methylated to form 5-methylcytosine"
cggttctcagaccttctcaggtatgatttcattaatcctcctaatcctctcagtaggcaacggtaccatttccactttagagacaagaacattgaagcttggagaggttaaagacctctcca

SEQ ID NO: 17003 - DNA, 122 bp, Homo sapiens
  misc_feature (61)..(62): /note="This region represents a CpG dinucleotide"
  misc_feature (61)..(61): /note="Nucleotide may be methylated to form 5-methylcytosine"
aaaaatatattaaaaaaaaggtgagtcacaaagtgtggcatatcccatacattacaaccacgagtctagagtgttagctggacttctgacaaaattccttcagaggtaaaataaaaagaaac

SEQ ID NO: 17004 - DNA, 122 bp, Homo sapiens
  misc_feature (61)..(62): /note="This region represents a CpG dinucleotide"
  misc_feature (61)..(61): /note="Nucleotide may be methylated to form 5-methylcytosine"
ctgtcccacttctcactctctctctctctcttttttctttagaaagagctaggagacaagcgatcagaaagtattgacaaagttcgacagttactacctttgccgaaacagacatgtgatgt

SEQ ID NO: 17005 - DNA, 122 bp, Homo sapiens
  misc_feature (61)..(62): /note="This region represents a CpG dinucleotide"
  misc_feature (61)..(61): /note="Nucleotide may be methylated to form 5-methylcytosine"
acagtcacacatacctggaagaagcaatggtccctgcatttctgtggtacgggtatcccacgccagccagccctggaagctctctactgtgccgtaagccaaccacctttcctagctcaaga

SEQ ID NO: 17006 - DNA, 122 bp, Homo sapiens
  misc_feature (61)..(62): /note="This region represents a CpG dinucleotide"
  misc_feature (61)..(61): /note="Nucleotide may be methylated to form 5-methylcytosine"
ttccattcaatttaaaccacctactgggtgcttaatagtcttggccgggtgcgtggcacacgcctataatcccagcactttgggaggccgaggtgggtggatcacctgaggtcagtctgact

SEQ ID NO: 17007 - DNA, 122 bp, Homo sapiens
  misc_feature (61)..(62): /note="This region represents a CpG dinucleotide"
  misc_feature (61)..(61): /note="Nucleotide may be methylated to form 5-methylcytosine"
agaatgtgtttttctcctgtgatattcagctggataaacaaaatatgataggaaggaagtcgggtttaatcaggactgtagttatgccaagtgaattcaaaaagtgggatatgggagtcaag

SEQ ID NO: 17008 - DNA, 122 bp, Homo sapiens
  misc_feature (61)..(62): /note="This region represents a CpG dinucleotide"
  misc_feature (61)..(61): /note="Nucleotide may be methylated to form 5-methylcytosine"
aaaaaaaaaaaaaaaaattaaaaacccaatgaggtggctactgttatcatccccattttacggatgaggacatgggtacatagagattaagtaacttgccaaagatctcacaactggtaagt

SEQ ID NO: 17009 - DNA, 122 bp, Homo sapiens
  misc_feature (61)..(62): /note="This region represents a CpG dinucleotide"
  misc_feature (61)..(61): /note="Nucleotide may be methylated to form 5-methylcytosine"
tttgaaagtaagcaagagaacagaaagcgagcaagagaaccgcaacctttaccaccttggcgaattcttgccgggacctacatattaaacagcacttgcacacagacgcctcaagtcgtcct

SEQ ID NO: 17010 - DNA, 122 bp, Homo sapiens
  misc_feature (61)..(62): /note="This region represents a CpG dinucleotide"
  misc_feature (61)..(61): /note="Nucleotide may be methylated to form 5-methylcytosine"
ggcctgggttgtctgatgcacctctgagtcaggtctcagggacaaacctttcaacctgtgcgcttcagtgcagcctcctacaaaagggaatcccagaacataaccatatctctgaataaggt

SEQ ID NO: 17011 - DNA, 122 bp, Homo sapiens
  misc_feature (61)..(62): /note="This region represents a CpG dinucleotide"
  misc_feature (61)..(61): /note="Nucleotide may be methylated to form 5-methylcytosine"
ctttcttagctgccctggctggtgtttcatgtccaccagctctgcgttcagcacagcactcggacttgcctaggaattgtaagatttcttttcaaatttattgaggaccccaaagcacttca

SEQ ID NO: 17012 - DNA, 122 bp, Homo sapiens
  misc_feature (61)..(62): /note="This region represents a CpG dinucleotide"
  misc_feature (61)..(61): /note="Nucleotide may be methylated to form 5-methylcytosine"
ggtgcattagacaagccctggaatgacagccagaagatctctattctgatcctggccctccgtctacttgggccactttgatcaagccatttagccccgttcccttcaggtggctcagctgg

SEQ ID NO: 17013 - DNA, 122 bp, Homo sapiens
  misc_feature (61)..(62): /note="This region represents a CpG dinucleotide"
  misc_feature (61)..(61): /note="Nucleotide may be methylated to form 5-methylcytosine"
aaatcttccagcttctcttccacgttccacaatgtccaagggagccagctgccaagtccacggtccagacgaacctgtctgacacctgcctgtgcctaaaagctggccaggcacagcaggag

SEQ ID NO: 17014 - DNA, 122 bp, Homo sapiens
  misc_feature (61)..(62): /note="This region represents a CpG dinucleotide"
  misc_feature (61)..(61): /note="Nucleotide may be methylated to form 5-methylcytosine"
atttcaggagagatgaaccagtgcttttctggtactgctcatcagcatgttctagccagtcggcaaaaaaggcatctgcatttatggagttaattgacatcttattaattttgctcagattc

SEQ ID NO: 17015 - DNA, 122 bp, Homo sapiens
  misc_feature (61)..(62): /note="This region represents a CpG dinucleotide"
  misc_feature (61)..(61): /note="Nucleotide may be methylated to form 5-methylcytosine"
gggggagaataaccactgtgtaatggttcaagttgctctgggtttaaagatctttagaagcgtgtaaagattatcttttggtttcacagttactgatgaacgcctacacagcccttctgtta

SEQ ID NO: 17016 - DNA, 122 bp, Homo sapiens
  misc_feature (61)..(62): /note="This region represents a CpG dinucleotide"
  misc_feature (61)..(61): /note="Nucleotide may be methylated to form 5-methylcytosine"
tcctaacgcccctgctccctggtttcatttggaaccaactgagagacacaagtccctcttcgttgatcagggtcagttgaaagatgtagctgtcggcctggtagccaggtgggcttgctaat

SEQ ID NO: 17017 - DNA, 122 bp, Homo sapiens
  misc_feature (61)..(62): /note="This region represents a CpG dinucleotide"
  misc_feature (61)..(61): /note="Nucleotide may be methylated to form 5-methylcytosine"
ctgaatgtcctggatgtatccacaccctctaggaacaactgaacaaatctttcctggaaacggtgtttaattactcagagcagtgtcacattaatatagaagctgtgcatgtcttccgtata

SEQ ID NO: 17018 - DNA, 122 bp, Homo sapiens
  misc_feature (61)..(62): /note="This region represents a CpG dinucleotide"
  misc_feature (61)..(61): /note="Nucleotide may be methylated to form 5-methylcytosine"
gattacaaataatttatgtaataccttgctccccaggagatgcgcttagtcctccctccccgcctctgccagctcatgcatgtggggctttgctggatgacttgcttctaaagagtagagaa

SEQ ID NO: 17019 - DNA, 122 bp, Homo sapiens
  misc_feature (61)..(62): /note="This region represents a CpG dinucleotide"
  misc_feature (61)..(61): /note="Nucleotide may be methylated to form 5-methylcytosine"
gaaaggttccctggcaaaactccagccagcctgcatactgaggtggagcttcgggaagttcgcacaatttgcatggggaggagcctggcccctcctcttcctttgtgaaacctgggattcaa

SEQ ID NO: 17020 - DNA, 122 bp, Homo sapiens
  misc_feature (61)..(62): /note="This region represents a CpG dinucleotide"
  misc_feature (61)..(61): /note="Nucleotide may be methylated to form 5-methylcytosine"
gggaagggcggcaaacactgttgtgcttggatacgaaaaccaaggcctgattagcgtaagcgtttgttgaaaaagcattttctctgcacactaatctctacatatcctgtggggaaatcctt

SEQ ID NO: 17021 - DNA, 122 bp, Homo sapiens
  misc_feature (61)..(62): /note="This region represents a CpG dinucleotide"
  misc_feature (61)..(61): /note="Nucleotide may be methylated to form 5-methylcytosine"
aggtagcatatatagtgtggatactctggacagaatggatgattcacgtcctgggcggaacggagcaagagggtgagatttcatcatgaattcagaatggcacttagtttagaacttatgaa

SEQ ID NO: 17022 - DNA, 122 bp, Homo sapiens
  misc_feature (61)..(62): /note="This region represents a CpG dinucleotide"
  misc_feature (61)..(61): /note="Nucleotide may be methylated to form 5-methylcytosine"
ttgctacagactgtttggttctgtgtcaaaaatatcaatgcaaaacacactacttcctagcgcccaaatctaaaatcaaaagggcttcccttggggaaaaaagtctgctctatgtggacttg

SEQ ID NO: 17023 - DNA, 122 bp, Homo sapiens
  misc_feature (61)..(62): /note="This region represents a CpG dinucleotide"
  misc_feature (61)..(61): /note="Nucleotide may be methylated to form 5-methylcytosine"
cacagaccactgctttgtcataggtgttcgggcaggataggcctcaccctcaaagcaggacgctcaaagctctaaggaagccactctgcccagggctgcttcaaacacttagagatcaggtt

SEQ ID NO: 17024 - DNA, 122 bp, Homo sapiens
  misc_feature (61)..(62): /note="This region represents a CpG dinucleotide"
  misc_feature (61)..(61): /note="Nucleotide may be methylated to form 5-methylcytosine"
tgagcctcacaagtacctgcatgttgctccactccttttcccagaccacctggagtcctccgcaatccagcaatgaatgggctagaacctggtcctctggcaccctgcatagggagatggct

SEQ ID NO: 17025 - DNA, 122 bp, Homo sapiens
  misc_feature (61)..(62): /note="This region represents a CpG dinucleotide"
  misc_feature (61)..(61): /note="Nucleotide may be methylated to form 5-methylcytosine"
atctgagcaccagaaatcctgctctaactctttagctgtgtgacctttggcaagtttcttcgtctgtaaaatgggaccaatggggttgtagagaggattaaatgaggtaatatgtgtaacgt

SEQ ID NO: 17026 - DNA, 122 bp, Homo sapiens
  misc_feature (61)..(62): /note="This region represents a CpG dinucleotide"
  misc_feature (61)..(61): /note="Nucleotide may be methylated to form 5-methylcytosine"
gagaatacagggaagaacgaaatcgcctctgatcgtactttctccacggatgtaagtgtccgggctctagtgggggaatgatactcttcgtgcgaaattcacttttaaaaaaggcttagaaa

SEQ ID NO: 17027 - DNA, 122 bp, Homo sapiens
  misc_feature (61)..(62): /note="This region represents a CpG dinucleotide"
  misc_feature (61)..(61): /note="Nucleotide may be methylated to form 5-methylcytosine"
tgggattacaggtgtgagtcactgcaccagggccattcagtcttataaactgccatttaccggaggtcaagaataatttataatggaccaattgtaatgaacgtttattgtattttaccctt

SEQ ID NO: 17028 - DNA, 122 bp, Homo sapiens
  misc_feature (61)..(62): /note="This region represents a CpG dinucleotide"
  misc_feature (61)..(61): /note="Nucleotide may be methylated to form 5-methylcytosine"
tcctacctctaggggtcttagtagcttccggagtttgatctttcatcacttcctgaattgcgtttcctcttttaaatactcagaatagttttcctggtagatcttgaaagatttttatattt

SEQ ID NO: 17029 - DNA, 122 bp, Homo sapiens
  misc_feature (61)..(62): /note="This region represents a CpG dinucleotide"
  misc_feature (61)..(61): /note="Nucleotide may be methylated to form 5-methylcytosine"
tagggacacctttgttggctttttttttcttctcttgctccattcatcactctctggcagcgaggacaccaggccaactgcagctgctgactttccccagtcggctgcctgctgttgcccag

SEQ ID NO: 17030 - DNA, 122 bp, Homo sapiens
  misc_feature (61)..(62): /note="This region represents a CpG dinucleotide"
  misc_feature (61)..(61): /note="Nucleotide may be methylated to form 5-methylcytosine"
aaagaaaaaattagagggagaagaagcaagctgaaatgccagtgaaacttacaggaaagacgtgacaagagagaaggaagtagaacaagaagagcagtgttgtaagaatcaaaaaaggctag

SEQ ID NO: 17031 - DNA, 122 bp, Homo sapiens
  misc_feature (61)..(62): /note="This region represents a CpG dinucleotide"
  misc_feature (61)..(61): /note="Nucleotide may be methylated to form 5-methylcytosine"
ttgtataatcccctttcctttgagtgtcagtagaacataatcactcttgtgattatgctacgttaaatggcaaaagggagattatctgcgattacctaatcacatgaatctttaaaagcaga

SEQ ID NO: 17032 - DNA, 122 bp, Homo sapiens
  misc_feature (61)..(62): /note="This region represents a CpG dinucleotide"
  misc_feature (61)..(61): /note="Nucleotide may be methylated to form 5-methylcytosine"
gttatcagaatatctaatcattaaaagtttatttgattcagctgagctaatcagccacatcgattcatccatcacatctcagagatgaattagaaacttataggtctaaataataataattc

SEQ ID NO: 17033 - DNA, 122 bp, Homo sapiens
  misc_feature (61)..(62): /note="This region represents a CpG dinucleotide"
  misc_feature (61)..(61): /note="Nucleotide may be methylated to form 5-methylcytosine"
tgacaagtgctcctccagccgtgagatgagccagaggatggaatgccacaggccccacttcgtctcccagcccttcatctttcttccatgtccaaaggcggctccccagaggccaagggctc

SEQ ID NO: 17034 - DNA, 122 bp, Homo sapiens
  misc_feature (61)..(62): /note="This region represents a CpG dinucleotide"
  misc_feature (61)..(61): /note="Nucleotide may be methylated to form 5-methylcytosine"
caaaacttgtgaggcagtagcgcgcctgagcctcagggcttagcagcaggttgtacagggcgatccacacttgcccgtccaacttgctcagcttttgctgctctgagggggccacagtatgc

SEQ ID NO: 17035 - DNA, 122 bp, Homo sapiens
  misc_feature (61)..(62): /note="This region represents a CpG dinucleotide"
  misc_feature (61)..(61): /note="Nucleotide may be methylated to form 5-methylcytosine"
catttgctgaattaaacaaaaatacaaggctttgggatattctttacaggatctaatgctcgaggcggttttcttcctattatcatgcaaacaaaccatttaaataccccaagccacaaaat

SEQ ID NO: 17036 - DNA, 122 bp, Homo sapiens
  misc_feature (61)..(62): /note="This region represents a CpG dinucleotide"
  misc_feature (61)..(61): /note="Nucleotide may be methylated to form 5-methylcytosine"
taagtctgagtcattgctcttagtactgacaactcccactgcagtggatcagagacgaggcggaagcagcctggccagcctctcctgggaaggaaggagcattgccccatctcagattcgga

SEQ ID NO: 17037 - DNA, 122 bp, Homo sapiens
  misc_feature (61)..(62): /note="This region represents a CpG dinucleotide"
  misc_feature (61)..(61): /note="Nucleotide may be methylated to form 5-methylcytosine"
agtcacttaacttctctagatgccaatctccttctcaataaagaaatcattggccgggtacggtggctcatgcctgtaatcccagcactttgggagcctgaggcaggcagatcacttgaggc

SEQ ID NO: 17038 - DNA, 122 bp, Homo sapiens
  misc_feature (61)..(62): /note="This region represents a CpG dinucleotide"
  misc_feature (61)..(61): /note="Nucleotide may be methylated to form 5-methylcytosine"
cttttgggtccccgcctgacagctcttgccgtctgtgcctcacgtccacacggatgataacgaacccctcatggggctgttgggatgacgaggtgagacggcatctgtcagctcttacagag

SEQ ID NO: 17039 - DNA, 122 bp, Homo sapiens
  misc_feature (61)..(62): /note="This region represents a CpG dinucleotide"
  misc_feature (61)..(61): /note="Nucleotide may be methylated to form 5-methylcytosine"
ggaacagtaggagaactctccacatttatcttgaggcttcaggcttttcaacatcatcttcgaaagtacagcattaggaaactgtgctgactcaacaacccccagattctagtttatgctgc

SEQ ID NO: 17040 - DNA, 122 bp, Homo sapiens
  misc_feature (61)..(62): /note="This region represents a CpG dinucleotide"
  misc_feature (61)..(61): /note="Nucleotide may be methylated to form 5-methylcytosine"
aacatgggttccccaacctccaatttctttccatctatagggttgttctgtagagcagggcgcccacacccaggctgcacacttgagtcacctggggagccccacccaattaaatcccaatc

SEQ ID NO: 17041 - DNA, 122 bp, Homo sapiens
  misc_feature (61)..(62): /note="This region represents a CpG dinucleotide"
  misc_feature (61)..(61): /note="Nucleotide may be methylated to form 5-methylcytosine"
attttggttgaactttgctttcagaactagaactacctgctatccaagacttgttaaccacgttttcatgggcaaattacaaaaccctttcaaccccagtttcctcttctataaactagtgg

SEQ ID NO: 17042 - DNA, 122 bp, Homo sapiens
  misc_feature (61)..(62): /note="This region represents a CpG dinucleotide"
  misc_feature (61)..(61): /note="Nucleotide may be methylated to form 5-methylcytosine"
agccaccacacctagccttatgttgttttttaagaaaacacacacattatgttatgctcacgttatcagaaacaaatgagactgaccctggcaagtcccaaccaaggaatctgtctccagat

SEQ ID NO: 17043 - DNA, 122 bp, Homo sapiens
  misc_feature (61)..(62): /note="This region represents a CpG dinucleotide"
  misc_feature (61)..(61): /note="Nucleotide may be methylated to form 5-methylcytosine"
aaatgggggtggttgtgaaaaaagaaaggtttgggttgacatttagcatgctagatgagtcgaaccccttaagcaaagaattatgatagacaaaactaacccagaggaggatgtgagagggg

SEQ ID NO: 17044 - DNA, 122 bp, Homo sapiens
  misc_feature (61)..(62): /note="This region represents a CpG dinucleotide"
  misc_feature (61)..(61): /note="Nucleotide may be methylated to form 5-methylcytosine"
gttaagtggacttgcttaactaaacattgtccttggctacataatgcagaagtgactacccgtgtattttacatttttaaaaaaagaaatgggctgggcgcagtggctcacgcatgtaatcc

SEQ ID NO: 17045 - DNA, 122 bp, Homo sapiens
  misc_feature (61)..(62): /note="This region represents a CpG dinucleotide"
  misc_feature (61)..(61): /note="Nucleotide may be methylated to form 5-methylcytosine"
gctcatgtgctggtgactcacctgagctgggctgagggcagggaagaggctcgggagacacgctgctgctccttgaccatcctgccacatgctgcccagcccgagtgatggaaactaaggca

SEQ ID NO: 17046 - DNA, 122 bp, Homo sapiens
  misc_feature (61)..(62): /note="This region represents a CpG dinucleotide"
  misc_feature (61)..(61): /note="Nucleotide may be methylated to form 5-methylcytosine"
tttgagctcctcttgtgtgactgtgtttgtccctcgcctcaccatgtttatcatagagtgcgtatgtttgtttctgtgtaactaactaaataaatcctccagggcaagactgattcatccaa

SEQ ID NO: 17047 - DNA, 122 bp, Homo sapiens
  misc_feature (61)..(62): /note="This region represents a CpG dinucleotide"
  misc_feature (61)..(61): /note="Nucleotide may be methylated to form 5-methylcytosine"
tgactctgtattcgacgacacagcagggaacttgcatgaatcgcaagtgtggtgtgcatacgtggatgtctgttcggctaagcccagttcttcagtttctgacatgactgcttgtcaacagg

SEQ ID NO: 17048 - DNA, 122 bp, Homo sapiens
  misc_feature (61)..(62): /note="This region represents a CpG dinucleotide"
  misc_feature (61)..(61): /note="Nucleotide may be methylated to form 5-methylcytosine"
tggagaaacttctgcggcaaggaaataatatcttcagtcaacagtcagcaaggatcctaacgtctgccagcaccatgtgattgagctggaaagtcgattttctgaggactgccaacagccac

SEQ ID NO: 17049 - DNA, 122 bp, Homo sapiens
  misc_feature (61)..(62): /note="This region represents a CpG dinucleotide"
  misc_feature (61)..(61): /note="Nucleotide may be methylated to form 5-methylcytosine"
tcttggtactccagccacatcaccctttcagttctactaatattgaatgcagaattagcacgtgccatccctcacccttcttgatcctttgactcttagctaatgaggattttctcagggaa

SEQ ID NO: 17050 - DNA, 122 bp, Homo sapiens
  misc_feature (61)..(62): /note="This region represents a CpG dinucleotide"
  misc_feature (61)..(61): /note="Nucleotide may be methylated to form 5-methylcytosine"
tgtagggaacatagtcattagtgatctcaaataccgaaagacattttacggatctctcctcgcccctgataacaatcaatttacattcttaattatgagttatgttttgattaggttatctc

SEQ ID NO: 17051 - DNA, 122 bp, Homo sapiens
  misc_feature (61)..(62): /note="This region represents a CpG dinucleotide"
  misc_feature (61)..(61): /note="Nucleotide may be methylated to form 5-methylcytosine"
ctgtgtcgtgtcagagggtgcttagcataccagaggacagctctttgtctatatgtgtgacgctcctagcagactagatttgagatcagcgtctctgctgtttgagatcagagtccccgcct

SEQ ID NO: 17052 - DNA, 122 bp, Homo sapiens
  misc_feature (61)..(62): /note="This region represents a CpG dinucleotide"
  misc_feature (61)..(61): /note="Nucleotide may be methylated to form 5-methylcytosine"
gacactttattggaagcttttcttgtttaccaattaaactatgacttcatgttatcacaacgctgacaaggtgtacaaactatgtaacattttgcaactacaggacagtctgcctttcacat

SEQ ID NO: 17053 - DNA, 122 bp, Homo sapiens
  misc_feature (61)..(62): /note="This region represents a CpG dinucleotide"
  misc_feature (61)..(61): /note="Nucleotide may be methylated to form 5-methylcytosine"
cagaacctgtgccatccagatgggagcagtaagggtgtagggcaaagttagtgagctgcccggtgcacgaggacttccatgataatcagggctgaaccaggaaggcaggtcaaggccagggt

SEQ ID NO: 17054 - DNA, 122 bp, Homo sapiens
  misc_feature (61)..(62): /note="This region represents a CpG dinucleotide"
  misc_feature (61)..(61): /note="Nucleotide may be methylated to form 5-methylcytosine"
gtatcccataacatatgaatggtaatatttgtggcttattcaaggtactgtatttccttccgctcatgggcaagagcttattttttggctgatctccttttgcagaagaggccaagttcctg

SEQ ID NO: 17055 - DNA, 122 bp, Homo sapiens
  misc_feature (61)..(62): /note="This region represents a CpG dinucleotide"
  misc_feature (61)..(61): /note="Nucleotide may be methylated to form 5-methylcytosine"
gcatgttcatactgggatcataatagggatctcacctcacactgaaccactgaactgaatcggaggctttgacatgattcagagatactgtaggctacagacccatggaacagccatactga

SEQ ID NO: 17056 - DNA, 122 bp, Homo sapiens
  misc_feature (61)..(62): /note="This region represents a CpG dinucleotide"
  misc_feature (61)..(61): /note="Nucleotide may be methylated to form 5-methylcytosine"
gccaaaacaacagatgtctgctctacaggctctgaacttgttttctgtgcagtgacaagccgtaaaccacttggagtttatccttcagcttggtggcatcctgaatgagactgtccctgtct

SEQ ID NO: 17057 - DNA, 122 bp, Homo sapiens
  misc_feature (61)..(62): /note="This region represents a CpG dinucleotide"
  misc_feature (61)..(61): /note="Nucleotide may be methylated to form 5-methylcytosine"
cagaagcagaaaggaaaacacagattgtttaagtcactagccctgagtcacacagcaatacgtagtgcaattggaatttggcctgggcagtcattccaggaacttgtgttcataaaccctga

SEQ ID NO: 17058 - DNA, 122 bp, Homo sapiens
  misc_feature (61)..(62): /note="This region represents a CpG dinucleotide"
  misc_feature (61)..(61): /note="Nucleotide may be methylated to form 5-methylcytosine"
gccaacatcataaaatcatgagagcaaaaaggacctagtttacctactggaggttagctacgcaatgatgataaattagcagggagttgttaatgtgcctacatgacccatgactagttagc

SEQ ID NO: 17059 - DNA, 122 bp, Homo sapiens
  misc_feature (61)..(62): /note="This region represents a CpG dinucleotide"
  misc_feature (61)..(61): /note="Nucleotide may be methylated to form 5-methylcytosine"
ggtgtccacgtgaactcaacattcaacctgtcgagagcaaaagtcagcagaaactgacttcgtttccctgttattgatatgaggctgtgggggctcactgtaattaatcagtagggtcagcc

SEQ ID NO: 17060 - DNA, 122 bp, Homo sapiens
  misc_feature (61)..(62): /note="This region represents a CpG dinucleotide"
  misc_feature (61)..(61): /note="Nucleotide may be methylated to form 5-methylcytosine"
gtttgactgtaactgtgtatggtatcactgagtgcttcgtcctagtcccaggaagtctaacgtcctgtcttatgcattgaagtgagaggttagaatcttgggtctgattctgactcaggatt

SEQ ID NO: 17061 - DNA, 122 bp, Homo sapiens
  misc_feature (61)..(62): /note="This region represents a CpG dinucleotide"
  misc_feature (61)..(61): /note="Nucleotide may be methylated to form 5-methylcytosine"
ctggaagcctccatagtgattagcacagtagtttgcgcgctctgtgtactccacactgcacgtagtggtgtctgtaaccccggggtttgtgaatggcacgtcccattttaaaacttaaaatg

SEQ ID NO: 17062 - DNA, 122 bp, Homo sapiens
  misc_feature (61)..(62): /note="This region represents a CpG dinucleotide"
  misc_feature (61)..(61): /note="Nucleotide may be methylated to form 5-methylcytosine"
aaaggatatctatgagtaattgtatttgataatcttagtgaaaggattattttaaacaaccgctgctaagaaggtgactgatttgagttcatctctgggcttcccctttggctaaaatgcta

SEQ ID NO: 17063 - DNA, 122 bp, Homo sapiens
  misc_feature (61)..(62): /note="This region represents a CpG dinucleotide"
  misc_feature (61)..(61): /note="Nucleotide may be methylated to form 5-methylcytosine"
ctaactgaatgcctgacatttgtctaaattacaaaagccaaaattaaagctccccagtaccgtgacaacagaaatgagactctgcagcaaggctctggggatgcagatggacagagcaggtt

SEQ ID NO: 17064 - DNA, 122 bp, Homo sapiens
  misc_feature (61)..(62): /note="This region represents a CpG dinucleotide"
  misc_feature (61)..(61): /note="Nucleotide may be methylated to form 5-methylcytosine"
ctatgggacaggaagatacaacctcactgacccccatgctcagcaagggttgcacagatacgccacagtgaccacgtctcagtcacagcatgactccggagaactcatgcctgcttgttata

SEQ ID NO: 17065 - DNA, 122 bp, Homo sapiens
  misc_feature (61)..(62): /note="This region represents a CpG dinucleotide"
  misc_feature (61)..(61): /note="Nucleotide may be methylated to form 5-methylcytosine"
tcccattttacagatgacaaaactgaggctcacgaaggtggttaactagccaaggccactcgtctaggaagtgagaggccaaggttcaatcctaggcaatctggcttaagtttgtgttctgt

SEQ ID NO: 17066 - DNA, 122 bp, Homo sapiens
  misc_feature (61)..(62): /note="This region represents a CpG dinucleotide"
  misc_feature (61)..(61): /note="Nucleotide may be methylated to form 5-methylcytosine"
cgcggcctcggcagcccccggggcagctgcgcgtgctgcagtcttcccctgagtagcctgcgtcacacacgcacacgccatcctcgcaaaggccgtgcccacggcagtccccgggacagcga

SEQ ID NO: 17067 - DNA, 122 bp, Homo sapiens
  misc_feature (61)..(62): /note="This region represents a CpG dinucleotide"
  misc_feature (61)..(61): /note="Nucleotide may be methylated to form 5-methylcytosine"
gtagtaatagcactgctggtaaatagaaaacaatgaatgtgattatgtacccctggccgtcgtcgccatcatcatcatcatcatcatcatcatcatttgagccctttaaaaattcctattgt

SEQ ID NO: 17068 - DNA, 122 bp, Homo sapiens
  misc_feature (61)..(62): /note="This region represents a CpG dinucleotide"
  misc_feature (61)..(61): /note="Nucleotide may be methylated to form 5-methylcytosine"
agagccatggagctggtataagcagattccagccagacagcccaagccagctatgggagccgctactgaaacagatggcaaagaaagcagcctgtgcactcacctctctctgaattgttcct

SEQ ID NO: 17069 - DNA, 122 bp, Homo sapiens
  misc_feature (61)..(62): /note="This region represents a CpG dinucleotide"
  misc_feature (61)..(61): /note="Nucleotide may be methylated to form 5-methylcytosine"
ggtaattttacttccatgaggaatcatttggactcttcagtcttcctttcttcagttttacgtagggctttgctggaggaaaatggggctaagggggagagaaacatagtctcggagtaggg

SEQ ID NO: 17070 - DNA, 122 bp, Homo sapiens
  misc_feature (61)..(62): /note="This region represents a CpG dinucleotide"
  misc_feature (61)..(61): /note="Nucleotide may be methylated to form 5-methylcytosine"
ttcccctccaagtgttggagtcaaacagttgaaatatcaatttctcatctataaagtgaacgtgagtttagaggtttgcttaggattacaaagtcttaattctggggatagaatacccaggg

SEQ ID NO: 17071 - DNA, 122 bp, Homo sapiens
  misc_feature (61)..(62): /note="This region represents a CpG dinucleotide"
  misc_feature (61)..(61): /note="Nucleotide may be methylated to form 5-methylcytosine"
tttaggcagagctggctaattgcattgagaaggcagcccaacatttatgtctggaccccacgctcctggccagtattcagaagaaactcagaaagcagtcagcttcagggagtcactagatt

SEQ ID NO: 17072 - DNA, 122 bp, Homo sapiens
  misc_feature (61)..(62): /note="This region represents a CpG dinucleotide"
  misc_feature (61)..(61): /note="Nucleotide may be methylated to form 5-methylcytosine"
ttcccacatgcatagtcacatggtaatgccactcccaccaaccacagaaacaggtgctaacgttggggaacttaaggatgctggaagagaccaagagtccctgattgtgtaagtctggtctt

SEQ ID NO: 17073 - DNA, 122 bp, Homo sapiens
  misc_feature (61)..(62): /note="This region represents a CpG dinucleotide"
  misc_feature (61)..(61): /note="Nucleotide may be methylated to form 5-methylcytosine"
tcatcaagttcgtggtagaagtacaggatgcagcagggccgcatcagctaccttatgcagcgctgttgggtcatggatgacttcttagagaaagtgacagctaagaaagaggcttaagggag

SEQ ID NO: 17074 - DNA, 122 bp, Homo sapiens
  misc_feature (61)..(62): /note="This region represents a CpG dinucleotide"
  misc_feature (61)..(61): /note="Nucleotide may be methylated to form 5-methylcytosine"
tgtcaatgttggccttgaggctagacgtgaagtcaaattcacctagtcacatgtaataaacgtagggagaggaatagtttctctgggaaaatcagacatgaacctaggagaaatggattctg

SEQ ID NO: 17075 - DNA, 122 bp, Homo sapiens
  misc_feature (61)..(62): /note="This region represents a CpG dinucleotide"
  misc_feature (61)..(61): /note="Nucleotide may be methylated to form 5-methylcytosine"
ctgtctgggaagtagcaacttcaaatgagagggggataagaaggagttaacctcaggctacggaatggagtacagacagtacaagactcaaaaatgagatgacaaatttcatctactggcaa

SEQ ID NO: 17076 - DNA, 122 bp, Homo sapiens
  misc_feature (61)..(62): /note="This region represents a CpG dinucleotide"
  misc_feature (61)..(61): /note="Nucleotide may be methylated to form 5-methylcytosine"
cttcatctcaacttgctttgcacgctaagcctaatgggatccatcaggcatgagttctctcgcgcgctagctccctccctctcccctctctccccagctgccgatttccatcagccccttcc

SEQ ID NO: 17077 - DNA, 122 bp, Homo sapiens
  misc_feature (61)..(62): /note="This region represents a CpG dinucleotide"
  misc_feature (61)..(61): /note="Nucleotide may be methylated to form 5-methylcytosine"
atcctagtcaggaattgtatttaacacataaactgagtatttcctttggctttacttaaacgcttacaaaacaaaacttgatcaaatcagaaatgtttagtctgctgtatcttgactgagga

SEQ ID NO: 17078 - DNA, 122 bp, Homo sapiens
  misc_feature (61)..(62): /note="This region represents a CpG dinucleotide"
  misc_feature (61)..(61): /note="Nucleotide may be methylated to form 5-methylcytosine"
catgacttctgttagaagatccagccgagggtgtgtattgtgtgtaagatcttttgcaaccgatactcatgagagttctgttggccactgttgagacagcctctattgggaagattctgtaa

SEQ ID NO: 17079 - DNA, 122 bp, Homo sapiens
  misc_feature (61)..(62): /note="This region represents a CpG dinucleotide"
  misc_feature (61)..(61): /note="Nucleotide may be methylated to form 5-methylcytosine"
ataacactgagcgtttagattcagcatgtactctgggccaggctcagctctaagctggtgcggatcaccacgatgacctctagagtctcctctgaggtgggttctactgttagcccatctaa

SEQ ID NO: 17080 - DNA, 122 bp, Homo sapiens
  misc_feature (61)..(62): /note="This region represents a CpG dinucleotide"
  misc_feature (61)..(61): /note="Nucleotide may be methylated to form 5-methylcytosine"
ataccagtcagctccaacatggaagcaatcaggggacactagctgggatgtcatcacctgcgtgggcactgcaagctgccatgggagatgctcccaggtgggagcagctttcaggaggccag

SEQ ID NO: 17081 - DNA, 122 bp, Homo sapiens
  misc_feature (61)..(62): /note="This region represents a CpG dinucleotide"
  misc_feature (61)..(61): /note="Nucleotide may be methylated to form 5-methylcytosine"
gagccccaccagagcagatgagctggaagtgcagcagagttagagcctgggctggactgtcggtggggtagagtctaagttgtttccggtctgagccttcaagttgctgggctgtccttggc

SEQ ID NO: 17082 - DNA, 122 bp, Homo sapiens
  misc_feature (61)..(62): /note="This region represents a CpG dinucleotide"
  misc_feature (61)..(61): /note="Nucleotide may be methylated to form 5-methylcytosine"
tcctagaaggtctccaactgaggctgagggagaacctgacgcaaagcaggtggtcccccacgcaggtcaccacatccccatgagcagggagccccacagtgcaagctgcagacctcatcctt

SEQ ID NO: 17083 - DNA, 122 bp, Homo sapiens
  misc_feature (61)..(62): /note="This region represents a CpG dinucleotide"
  misc_feature (61)..(61): /note="Nucleotide may be methylated to form 5-methylcytosine"
ctcgccctagctcctctgtctctacctgtctgcctatgaaacagttcaaaactaatatggcgcaatggatggtattatagacttcccacctccctggccagacttcttgggttcaaagtttg

SEQ ID NO: 17084 - DNA, 122 bp, Homo sapiens
  misc_feature (61)..(62): /note="This region represents a CpG dinucleotide"
  misc_feature (61)..(61): /note="Nucleotide may be methylated to form 5-methylcytosine"
ttcccgcagggccttcgaggcacttcacttcgaagtgaaggggtaagactccggaacgttcggtctccgggtcccattcagccttcgttgaatcgcgcccttagactcacaacagttgcaga

SEQ ID NO: 17085 - DNA, 122 bp, Homo sapiens
  misc_feature (61)..(62): /note="This region represents a CpG dinucleotide"
  misc_feature (61)..(61): /note="Nucleotide may be methylated to form 5-methylcytosine"
agattaagagtgtgaatcatagatcctcccagctatttcagaaaaagccaaaattagagacgggattttccaggaaagatatgtgaggagcctcctgtgtaaatgagtgaatccccatgaca

SEQ ID NO: 17086 - DNA, 122 bp, Homo sapiens
  misc_feature (61)..(62): /note="This region represents a CpG dinucleotide"
  misc_feature (61)..(61): /note="Nucleotide may be methylated to form 5-methylcytosine"
cctatcactaatctggcccttgggaatagaagcatctattatgaatgggcccagaggaggcgtctcctaagtgaagctgccttcgacattctgctgagggttccaagtattcacacaagagc

SEQ ID NO: 17087 - DNA, 122 bp, Homo sapiens
  misc_feature (61)..(62): /note="This region represents a CpG dinucleotide"
  misc_feature (61)..(61): /note="Nucleotide may be methylated to form 5-methylcytosine"
ttattttgcaaacgcctggaagagcacatgaaactcagagaactacaatgcagacgacaacgcctagaaggaatgggtccccgctgctcgaatgaaagattaattacatttgccccaaaagc

SEQ ID NO: 17088 - DNA, 122 bp, Homo sapiens
  misc_feature (61)..(62): /note="This region represents a CpG dinucleotide"
  misc_feature (61)..(61): /note="Nucleotide may be methylated to form 5-methylcytosine"
gtttcctctttcggctgttgctgccctgacacttgcacatttcttttagttggatatacacggaagtggaattgctggatcatagattatgcatatttgtgatttgtttgctttttcattta

SEQ ID NO: 17089 - DNA, 122 bp, Homo sapiens
  misc_feature (61)..(62): /note="This region represents a CpG dinucleotide"
  misc_feature (61)..(61): /note="Nucleotide may be methylated to form 5-methylcytosine"
catgttggtcccgcccccaactcaccgtgatcataagacaatagttctccttgcaggccccgcagcagcccacaaaagccaccaggaagaggaagacacccactgcgatgatgaccactggc

SEQ ID NO: 17090 - DNA, 122 bp, Homo sapiens
  misc_feature (61)..(62): /note="This region represents a CpG dinucleotide"
  misc_feature (61)..(61): /note="Nucleotide may be methylated to form 5-methylcytosine"
attcagctcttttgtcactacttgccagactaatcactcagaattgtaaccctttaaacgcgtcccctcccttctttatgttccaccatttttaaaacagaggaaccaaagcatcagcctgt

SEQ ID NO: 17091 - DNA, 122 bp, Homo sapiens
  misc_feature (61)..(62): /note="This region represents a CpG dinucleotide"
  misc_feature (61)..(61): /note="Nucleotide may be methylated to form 5-methylcytosine"
gtaaaaccagaattcctatcttttaggtttattcatgcaatgactaccagtaaccagctacgtgccagctacctctcagagctggggatggagcagtgatgacatcaggtgaagatgaagaa

SEQ ID NO: 17092 - DNA, 122 bp, Homo sapiens
  misc_feature (61)..(62): /note="This region represents a CpG dinucleotide"
  misc_feature (61)..(61): /note="Nucleotide may be methylated to form 5-methylcytosine"
actctgtctcaaaaaaaaaaaaaagattaaatatgtgtacagtacctgtaccatgttaggcggtcagtaaacatttgtttaactaacaactgataaggatagtaaagaagtatcagaacacc

SEQ ID NO: 17093 - DNA, 122 bp, Homo sapiens
  misc_feature (61)..(62): /note="This region represents a CpG dinucleotide"
  misc_feature (61)..(61): /note="Nucleotide may be methylated to form 5-methylcytosine"
aacagtcatcggagactttcactcaatacaaagttctaccagacctatgcaaatagtaatcgcattttctagaaagagttctaaagtaagtcacacacacaaacctcagtagtagcacaaaa

SEQ ID NO: 17094 - DNA, 122 bp, Homo sapiens
  misc_feature (61)..(62): /note="This region represents a CpG dinucleotide"
  misc_feature (61)..(61): /note="Nucleotide may be methylated to form 5-methylcytosine"
tttagatggcaccactacatccccacccttgaccactaccacattcacagctcccaaattcggagctggcccatgtttcagtcaaccccagaccaaggcaaagcatttatcagccagacggt

SEQ ID NO: 17095 - DNA, 122 bp, Homo sapiens
  misc_feature (61)..(62): /note="This region represents a CpG dinucleotide"
  misc_feature (61)..(61): /note="Nucleotide may be methylated to form 5-methylcytosine"
gctggggctgctgcattgctcctccctcacccacaggattccctggttccagccaggagacgatggtcaacagccactgctgtagtggtgcctagttaaaactctttggtttctgtctctgt

SEQ ID NO: 17096 - DNA, 122 bp, Homo sapiens
  misc_feature (61)..(62): /note="This region represents a CpG dinucleotide"
  misc_feature (61)..(61): /note="Nucleotide may be methylated to form 5-methylcytosine"
tgtaatgctagacgtaataagtagcagtaggctggagagtaggccatgtaaaggaagtcccggttggatggcacttaaggcctaagtgttttgaagcctaggggatctgactaagctgattg

SEQ ID NO: 17097 - DNA, 122 bp, Homo sapiens
  misc_feature (61)..(62): /note="This region represents a CpG dinucleotide"
  misc_feature (61)..(61): /note="Nucleotide may be methylated to form 5-methylcytosine"
atgcttccctagaggtttgagcagcggggcactgaagatgcgagccccacccccatcacacgccctgagagggggattcccatttcagaataagaagttgactcacaccattgattaattcg

SEQ ID NO: 17098 - DNA, 122 bp, Homo sapiens
  misc_feature (61)..(62): /note="This region represents a CpG dinucleotide"
  misc_feature (61)..(61): /note="Nucleotide may be methylated to form 5-methylcytosine"
catgcaacctctccaggactgtgttatcattcatacaacgggtcaataataccatactaacgccttagcaggcatataccgagtggtagttctcttctctcctctagttagaagacatatat

SEQ ID NO: 17099 - DNA, 122 bp, Homo sapiens
  misc_feature (61)..(62): /note="This region represents a CpG dinucleotide"
  misc_feature (61)..(61): /note="Nucleotide may be methylated to form 5-methylcytosine"
atttcgatgcatgtttcatactaactccccctcagtttgcacatgggacccatgaggtgacgtgaagagataactgcacatacctgggaacttctcagacctcctcgttttctttttcttta

SEQ ID NO: 17100 - DNA, 122 bp, Homo sapiens
  misc_feature (61)..(62): /note="This region represents a CpG dinucleotide"
  misc_feature (61)..(61): /note="Nucleotide may be methylated to form 5-methylcytosine"
agtgctgcggggctgtgtcctcacccttgggcggagcgtagagcagccagaactggattgcgcttagcaagtctgtttccaggatccgacacaggagctccaggacctgtgggcaggaggcc

SEQ ID NO: 17101 - DNA, 122 bp, Homo sapiens
  misc_feature (61)..(62): /note="This region represents a CpG dinucleotide"
  misc_feature (61)..(61): /note="Nucleotide may be methylated to form 5-methylcytosine"
cattagaaactgggtccacccaaacattgcgattactgctgccttcttgcccttgccgcacgtggccgcccccacatttccccagagtgtagaacatcctgtcgcccttcatttgcatatta

SEQ ID NO: 17102 - DNA, 122 bp, Homo sapiens
  misc_feature (61)..(62): /note="This region represents a CpG dinucleotide"
  misc_feature (61)..(61): /note="Nucleotide may be methylated to form 5-methylcytosine"
aaagagagagagagagaattccacagggctctttcctgagtgagggctgtggagaggctgcgaagggccccgtctgcagcctcacagccctggacacaggacctaactgctctctgcctcag

SEQ ID NO: 17103 - DNA, 122 bp, Homo sapiens
  misc_feature (61)..(62): /note="This region represents a CpG dinucleotide"
  misc_feature (61)..(61): /note="Nucleotide may be methylated to form 5-methylcytosine"
agaaatcttcagagttggaaggacctgaaaaaatggggccccacccctccatgtcatagacgcaccagaggcttggacaggagaagcaagcaggccaaacacacccacctcaccagaaacag

SEQ ID NO: 17104 - DNA, 122 bp, Homo sapiens
  misc_feature (61)..(62): /note="This region represents a CpG dinucleotide"
  misc_feature (61)..(61): /note="Nucleotide may be methylated to form 5-methylcytosine"
aaatttaggtagaatatcatttaggatcctcttgatagacctaaaccaaataggtgtaaacgcaaagagcatttattggtttacaaaactgggaagctcaggaacagggctgccttcataca

SEQ ID NO: 17105 - DNA, 122 bp, Homo sapiens
  misc_feature (61)..(62): /note="This region represents a CpG dinucleotide"
  misc_feature (61)..(61): /note="Nucleotide may be methylated to form 5-methylcytosine"
ttacctgtcaggcgccccccgcgccgccccccgtgtgcgcccagacacacgagcacagcgcggcacctgacatttagtggtctggcaaacaactgtgtgacagatattacagtagctgtcag

SEQ ID NO: 17106 - DNA, 122 bp, Homo sapiens
  misc_feature (61)..(62): /note="This region represents a CpG dinucleotide"
  misc_feature (61)..(61): /note="Nucleotide may be methylated to form 5-methylcytosine"
ggggaattgtaattccaatttgtgtcaatccaaattgtgtctgtgtgtcatatgaggggacggcaggcaataatgagtgagggaggttattctgagcctaagtaatattgacagaataggac

SEQ ID NO: 17107 - DNA, 122 bp, Homo sapiens
  misc_feature (61)..(62): /note="This region represents a CpG dinucleotide"
  misc_feature (61)..(61): /note="Nucleotide may be methylated to form 5-methylcytosine"
tttcataacagtctatagagattcatctcatatgatgaaacaactggctgcgtgttcctgcgaagctatggccggctcactaatggaccacactgtatttgctgtccctccttccctgcctc

SEQ ID NO: 17108 - DNA, 122 bp, Homo sapiens
  misc_feature (61)..(62): /note="This region represents a CpG dinucleotide"
  misc_feature (61)..(61): /note="Nucleotide may be methylated to form 5-methylcytosine"
tctgtgtgataaccattgttggaaatttgttgagacttcctttctgatctggtacatggtcggggttttgtaaatgtttaaagtataattaaaaagaattcgtagtccagatttattaaatg

SEQ ID NO: 17109 - DNA, 122 bp, Homo sapiens
  misc_feature (61)..(62): /note="This region represents a CpG dinucleotide"
  misc_feature (61)..(61): /note="Nucleotide may be methylated to form 5-methylcytosine"
gtacccagagtgcacccttcgccctcgttggagttctctcctctctgccaagctttgctccgtgccagaggtgtgctccattgtacctccgctctgtccctgcagtcaggcaaccaattgga

SEQ ID NO: 17110 - DNA, 122 bp, Homo sapiens
  misc_feature (61)..(62): /note="This region represents a CpG dinucleotide"
  misc_feature (61)..(61): /note="Nucleotide may be methylated to form 5-methylcytosine"
gggcaccctcctgtgggagaggcccgttccgaggcaaggggtactcgtggcggccgagggcgttgcgtcccggtgtgctggcttcccggggcaaagtggccaggtccctgctggggatcagg

SEQ ID NO: 17111 - DNA, 122 bp, Homo sapiens
  misc_feature (61)..(62): /note="This region represents a CpG dinucleotide"
  misc_feature (61)..(61): /note="Nucleotide may be methylated to form 5-methylcytosine"
tgcactgttgtatctgcctggcgacacctgatgaggaggtgttaaacagacaacagcccacgctatgacacaaagaggaagaaggccagagaggcaaagaacaaagaggaagaggagaaaag

SEQ ID NO: 17112 - DNA, 122 bp, Homo sapiens
  misc_feature (61)..(62): /note="This region represents a CpG dinucleotide"
  misc_feature (61)..(61): /note="Nucleotide may be methylated to form 5-methylcytosine"
aagtgacttcctacagctgcccagctggcacatggcacagccagaatagaatcctgctcacgggattccaaatccaaaactctcccagtaacaacaatggtggtggccacagcaacaccaat

SEQ ID NO: 17113 - DNA, 122 bp, Homo sapiens
  misc_feature (61)..(62): /note="This region represents a CpG dinucleotide"
  misc_feature (61)..(61): /note="Nucleotide may be methylated to form 5-methylcytosine"
attaggtttattgaggtgacatgcaataattcttaaatgttctgcaattagaagtttctacgtcatgaaggcagtttagaagattacagcaaaatggtgaagcatgacttcttcatatgctt

SEQ ID NO: 17114 - DNA, 122 bp, Homo sapiens
  misc_feature (61)..(62): /note="This region represents a CpG dinucleotide"
  misc_feature (61)..(61): /note="Nucleotide may be methylated to form 5-methylcytosine"
aatatatacatatatatatagatatacacaccttagggataaatccagcatcttacttaacggagaaatacaagaggcatttccattaagattaggaacaacgtaaggatagccactctctc

SEQ ID NO: 17115 - DNA, 122 bp, Homo sapiens
  misc_feature (61)..(62): /note="This region represents a CpG dinucleotide"
  misc_feature (61)..(61): /note="Nucleotide may be methylated to form 5-methylcytosine"
aggaagaggctaagtcacaggaggcagctctatgggtgataactgacctactgccaggcacgttaatgccttctatcagctaatcctgtaagacaaatggggtaacatagatcttttctcta

SEQ ID NO: 17116 - DNA, 122 bp, Homo sapiens
  misc_feature (61)..(62): /note="This region represents a CpG dinucleotide"
  misc_feature (61)..(61): /note="Nucleotide may be methylated to form 5-methylcytosine"
gtctgacttcatagtttctgcccttcaccattacacttcataaaaaatgtattgtgccagcgtcatggcctgtgcagtcaaatgacatttagcgacgttttgcttagataattttggttgtt

SEQ ID NO: 17117 - DNA, 122 bp, Homo sapiens
  misc_feature (61)..(62): /note="This region represents a CpG dinucleotide"
  misc_feature (61)..(61): /note="Nucleotide may be methylated to form 5-methylcytosine"
caaaccctcaggtcctctgtcagagcctatttactctaattttagcacatttcaaatgggcgtggtagtgtttaaatggtttcccagcccacagtaagtcagaggtagcaaattagataaga

SEQ ID NO: 17118 - DNA, 122 bp, Homo sapiens
  misc_feature (61)..(62): /note="This region represents a CpG dinucleotide"
  misc_feature (61)..(61): /note="Nucleotide may be methylated to form 5-methylcytosine"
aggatgaataaaatgcagtccctgaccttaagatgcttaatgaagtctggccgggcaccacggctcacacctgtaatcccaacactttaggaggctgaggcaggcagattgcttgagcccag

SEQ ID NO: 17119 - DNA, 122 bp, Homo sapiens
  misc_feature (61)..(62): /note="This region represents a CpG dinucleotide"
  misc_feature (61)..(61): /note="Nucleotide may be methylated to form 5-methylcytosine"
acaagggaccaccctgatattgctagtgacctttctctacttggaatgtttcagtagtctcgccttcagagctgtgagttatggaattcagaaccccagaagcctctccatttcttttgcta

SEQ ID NO: 17120 - DNA, 122 bp, Homo sapiens
  misc_feature (61)..(62): /note="This region represents a CpG dinucleotide"
  misc_feature (61)..(61): /note="Nucleotide may be methylated to form 5-methylcytosine"
ttgttccttctgacgttcggatgtgttcggagtttctttctttaggcgggttcgtggtctcgcgggatcaggagtgaagctgcagaccttcacggtgagtgttacagcttttaaagtggcgc

SEQ ID NO: 17121 - DNA, 122 bp, Homo sapiens
  misc_feature (61)..(62): /note="This region represents a CpG dinucleotide"
  misc_feature (61)..(61): /note="Nucleotide may be methylated to form 5-methylcytosine"
catggaattttatcttctactaccaggagcacacatgtcttacaaggctttcagcatgcccgccacttcttgttcctcatgtgcaatcagcatgatgtcattgacataatggattgatgtaa

SEQ ID NO: 17122 - DNA, 122 bp, Homo sapiens
  misc_feature (61)..(62): /note="This region represents a CpG dinucleotide"
  misc_feature (61)..(61): /note="Nucleotide may be methylated to form 5-methylcytosine"
aacactttagtcaggaagtggtttctctcactgaggttatcagcattagaaaggcagtcacggaaacaataaccctgaatggaatgttgttttgaaagggaggctttagacagcaggtcctt

SEQ ID NO: 17123 - DNA, 122 bp, Homo sapiens
  misc_feature (61)..(62): /note="This region represents a CpG dinucleotide"
  misc_feature (61)..(61): /note="Nucleotide may be methylated to form 5-methylcytosine"
tctgtgaaggaggagatggctgacccaggaagagaaacccgcactaaccacacattcacccgataaatgttattgggcattctctatgctccagacactccctttaggcagtgcttgtatgg

SEQ ID NO: 17124 - DNA, 122 bp, Homo sapiens
  misc_feature (61)..(62): /note="This region represents a CpG dinucleotide"
  misc_feature (61)..(61): /note="Nucleotide may be methylated to form 5-methylcytosine"
aagattttcaaaaggagcacacacatttagtaaagcactctagctaatgcaggatacacacgatgtgcgttttcttattccttgctctaaccactggtctctcagatccctgcagagcagta

SEQ ID NO: 17125 - DNA, 122 bp, Homo sapiens
  misc_feature (61)..(62): /note="This region represents a CpG dinucleotide"
  misc_feature (61)..(61): /note="Nucleotide may be methylated to form 5-methylcytosine"
ctcctgctgtctcaagccatcctcccacctcagcctcccaagtagctgagactatagacacgtgccaccacagctggccaccttagccattttgaagtgcacagttcggtggcattaagcac

SEQ ID NO: 17126 - DNA, 122 bp, Homo sapiens
  misc_feature (61)..(62): /note="This region represents a CpG dinucleotide"
  misc_feature (61)..(61): /note="Nucleotide may be methylated to form 5-methylcytosine"
gtctccttccaccaaagctgcaccgtctgtcagtgaagcacaaacagttcaggagcaaggcgctgcaggcccatacatttccttccaaatacttattcactaaagcacatgaaacaggaaaa

SEQ ID NO: 17127 - DNA, 122 bp, Homo sapiens
  misc_feature (61)..(62): /note="This region represents a CpG dinucleotide"
  misc_feature (61)..(61): /note="Nucleotide may be methylated to form 5-methylcytosine"
tcttggtttaatcctgtttctgtggcagatttcagcttactgctcacactctgggtctcacggctcctatgacatcagtttcagtactgtaggtctgatcttcagttgggggtggtgctgga

SEQ ID NO: 17128 - DNA, 122 bp, Homo sapiens
  misc_feature (61)..(62): /note="This region represents a CpG dinucleotide"
  misc_feature (61)..(61): /note="Nucleotide may be methylated to form 5-methylcytosine"
tgcagggcagtccttctgtaacctgaaccagaccttgctgctcctctgtgccactccctccggtggcttctcatcaccatggcctgcaaggctctgtgtgacctgtcttctggcactccctg

SEQ ID NO: 17129 - DNA, 122 bp, Homo sapiens
  misc_feature (61)..(62): /note="This region represents a CpG dinucleotide"
  misc_feature (61)..(61): /note="Nucleotide may be methylated to form 5-methylcytosine"
ttgtgttttttttcctcgtggagtgacgcaaaccttcattcctgaatggtctgagtcattcgtagtcctgcctggattgggctgctgtactttcccattgaccttaatcacagggcatggta

SEQ ID NO: 17130 - DNA, 122 bp, Homo sapiens
  misc_feature (61)..(62): /note="This region represents a CpG dinucleotide"
  misc_feature (61)..(61): /note="Nucleotide may be methylated to form 5-methylcytosine"
gtgagtcatccataacctctttgaccctgctggaattctgaattagttccctatttatgccgctggagttcccagctctaatgaatggcagtggttggagcctccttgcgactcatggcttg

SEQ ID NO: 17131 - DNA, 122 bp, Homo sapiens
  misc_feature (61)..(62): /note="This region represents a CpG dinucleotide"
  misc_feature (61)..(61): /note="Nucleotide may be methylated to form 5-methylcytosine"
gccatccccaagaacacacaacagcaacagccccacccttcatcacaaagctgtgcagaacgtctcagtgacgtgctagttttgaacaatgatacaatagggttgttgccaaccacagggaa

SEQ ID NO: 17132 - DNA, 122 bp, Homo sapiens
  misc_feature (61)..(62): /note="This region represents a CpG dinucleotide"
  misc_feature (61)..(61): /note="Nucleotide may be methylated to form 5-methylcytosine"
cccaactttccagctcatctccagcctgtgcttctccccgactcaactcattttcaaccacgtgctaggcctccacccttggatgtcgaagagccatctccagttccacccagttcatcttc

SEQ ID NO: 17133 - DNA, 122 bp, Homo sapiens
  misc_feature (61)..(62): /note="This region represents a CpG dinucleotide"
  misc_feature (61)..(61): /note="Nucleotide may be methylated to form 5-methylcytosine"
agctcaaggaaggagccacagcagtgacacatgctagctagacaacaaagtgactggtgacgcctttagctggggtggtcaggtagctaccgcaaggcaccagctgtggaaacatcgggggg

SEQ ID NO: 17134 - DNA, 122 bp, Homo sapiens
  misc_feature (61)..(62): /note="This region represents a CpG dinucleotide"
  misc_feature (61)..(61): /note="Nucleotide may be methylated to form 5-methylcytosine"
caaactcttgacctcaggtgatctgtctgcctcgggctcccaaagtgctgggattacaggcgtgagccactgtgaccagccagcataatgtttttaaggtctatccgtgttgtagcatgaat

SEQ ID NO: 17135 - DNA, 122 bp, Homo sapiens
  misc_feature (61)..(62): /note="This region represents a CpG dinucleotide"
  misc_feature (61)..(61): /note="Nucleotide may be methylated to form 5-methylcytosine"
cttgttagaatctttaggtactggctttcactttgctgagacaaatgctccagaacttgccgtaactaaattttttacaaataaaaaaatgtgattacatagtaatccattaaatcttatca

SEQ ID NO: 17136 - DNA, 122 bp, Homo sapiens
  misc_feature (61)..(62): /note="This region represents a CpG dinucleotide"
  misc_feature (61)..(61): /note="Nucleotide may be methylated to form 5-methylcytosine"
ccagctgctgtgtactgtggccctgtgagcctcagtgtcccttcttcatgtctgccagtgcgtccagggcacaccctgggcctcttgacacccccacccacacaggcacacattgcccctta

SEQ ID NO: 17137 - DNA, 122 bp, Homo sapiens
  misc_feature (61)..(62): /note="This region represents a CpG dinucleotide"
  misc_feature (61)..(61): /note="Nucleotide may be methylated to form 5-methylcytosine"
cttggctttggtggtttaatactgtatttttgtggtggttggcctcttgccagcaggtggcgctttccagaaaacatcagctatactagtatggggaggaaccagtggtgagggccctagaa

SEQ ID NO: 17138 - DNA, 122 bp, Homo sapiens
  misc_feature (61)..(62): /note="This region represents a CpG dinucleotide"
  misc_feature (61)..(61): /note="Nucleotide may be methylated to form 5-methylcytosine"
gcccaactcttggcggagcgcggctcccggctccggctcctgtgcagccgcaggccccggcgctgcccagtagacagactaagcaggactctcttaatgtcccttaagtcttttggttcttg

SEQ ID NO: 17139 - DNA, 122 bp, Homo sapiens
  misc_feature (61)..(62): /note="This region represents a CpG dinucleotide"
  misc_feature (61)..(61): /note="Nucleotide may be methylated to form 5-methylcytosine"
aaaaaaatcaaggcgctactttgcatttaaaattcatttttgaaacatactggcagcaaacgccacactattgcagttagggaagacaggagagcaaatgtcaggtcttggcaaagtggggt

SEQ ID NO: 17140 - DNA, 122 bp, Homo sapiens
  misc_feature (61)..(62): /note="This region represents a CpG dinucleotide"
  misc_feature (61)..(61): /note="Nucleotide may be methylated to form 5-methylcytosine"
aggccgctgccgccgctgcaaacagatgtcagcgacaacctgctagcttacacctggacgcgcggccctcacctcgcgcgccgcgctgaaacattcatgtctcggaggacttcccgccgcaa

SEQ ID NO: 17141 - DNA, 122 bp, Homo sapiens
  misc_feature (61)..(62): /note="This region represents a CpG dinucleotide"
  misc_feature (61)..(61): /note="Nucleotide may be methylated to form 5-methylcytosine"
aagctcacaagtgccagcctgacgtgagtagtgctaatatcaaatctgacaacttccgttcggagtcaggcaggcagaatggtatagggggcagagctttggcatcatacgaacctgggttt

SEQ ID NO: 17142 - DNA, 122 bp, Homo sapiens
  misc_feature (61)..(62): /note="This region represents a CpG dinucleotide"
  misc_feature (61)..(61): /note="Nucleotide may be methylated to form 5-methylcytosine"
tgtctttgtctgttcccagtgataatgtccctgtaaaacactatagctaatctaatattgcgtggtttcttaagccttggatcctttatgaccagctgccatgtaagatgattcagtatcta

SEQ ID NO: 17143 - DNA, 122 bp, Homo sapiens
  misc_feature (61)..(62): /note="This region represents a CpG dinucleotide"
  misc_feature (61)..(61): /note="Nucleotide may be methylated to form 5-methylcytosine"
taagaagttgaggtggtgatatcacaaatttgtcttctcatctggttggcctaggtacggcgagagacagtacttgactcatctgctgggcacagatgcagtaccagatactgggtcctgct

SEQ ID NO: 17144 - DNA, 122 bp, Homo sapiens
  misc_feature (61)..(62): /note="This region represents a CpG dinucleotide"
  misc_feature (61)..(61): /note="Nucleotide may be methylated to form 5-methylcytosine"
cacccttttcttccttccacagacccacagcctagagccttctttcctccccactgtccccgccacacttcccctgcctggcagcccaggcccagacaccctgcgattcagtggtttcacat

SEQ ID NO: 17145 - DNA, 122 bp, Homo sapiens
  misc_feature (61)..(62): /note="This region represents a CpG dinucleotide"
  misc_feature (61)..(61): /note="Nucleotide may be methylated to form 5-methylcytosine"
ggggttgcccaaccagaccagcaggtgactgggagcagaggtctggcctggctggcccctcgcctacatccaggctgtcctgaatcaggtgcccgatccagtccagcaggcagcctcaggaa

SEQ ID NO: 17146 - DNA, 122 bp, Homo sapiens
  misc_feature (61)..(62): /note="This region represents a CpG dinucleotide"
  misc_feature (61)..(61): /note="Nucleotide may be methylated to form 5-methylcytosine"
cattttggccaatgcaaatcatctactctcctctgacaagcctactcatcataacccgcacgtcttgaatcttcctagaagatgaaatcagaccagtcttgcgggctctacatggttacaac

SEQ ID NO: 17147 - DNA, 122 bp, Homo sapiens
  misc_feature (61)..(62): /note="This region represents a CpG dinucleotide"
  misc_feature (61)..(61): /note="Nucleotide may be methylated to form 5-methylcytosine"
gggagatattattagccacaagattcagggtgtttgtcttccctctggatcgcccaaacccgcaaccctccacctgagccctgagcccacaggggtggcttgatttctgcaaagggtctaaa

SEQ ID NO: 17148 - DNA, 122 bp, Homo sapiens
  misc_feature (61)..(62): /note="This region represents a CpG dinucleotide"
  misc_feature (61)..(61): /note="Nucleotide may be methylated to form 5-methylcytosine"
cagatgagtaaagctggctgactaaagcacaataggcaatggcaggtattgcagcaaattcgggaacacaaactactaagagtggggtggggatgaggaggcaataaactccttagctacca

SEQ ID NO: 17149 - DNA, 122 bp, Homo sapiens
  misc_feature (61)..(62): /note="This region represents a CpG dinucleotide"
  misc_feature (61)..(61): /note="Nucleotide may be methylated to form 5-methylcytosine"
atgaaatcaaaactagagaaattagaagtcaatgacctggcattctggcaaccaatgacacgccatgtatctggcagagtcccagtgggaaagagaaatcaacccagatgttgagacttttc

SEQ ID NO: 17150 - DNA, 122 bp, Homo sapiens
  misc_feature (61)..(62): /note="This region represents a CpG dinucleotide"
  misc_feature (61)..(61): /note="Nucleotide may be methylated to form 5-methylcytosine"
catagttcaagagactgcaaagaagaggctccttaaggggtgtggacaggattaagagaacgagcagggttgctgaggcacccagagactagcaacagtggcagtcattaccaccccaggcc

SEQ ID NO: 17151 - DNA, 122 bp, Homo sapiens
  misc_feature (61)..(62): /note="This region represents a CpG dinucleotide"
  misc_feature (61)..(61): /note="Nucleotide may be methylated to form 5-methylcytosine"
tcttttacaaaattgtttgggctgtcatacgttgtttttagaatcaatttgttatttttacgaaaaacagcatgctgggttttttattgggatagtactgagtctgtagatcaactttaaca

SEQ ID NO: 17152 - DNA, 122 bp, Homo sapiens
  misc_feature (61)..(62): /note="This region represents a CpG dinucleotide"
  misc_feature (61)..(61): /note="Nucleotide may be methylated to form 5-methylcytosine"
tgggtgaggcagtgtggggagagggcaggggcacacatacctgagccgagacaccacccccgcccgccgtcagagcatccggagtgtggtgaccatgttagtattcagcacaagcgcgcgcg

SEQ ID NO: 17153 - DNA, 122 bp, Homo sapiens
  misc_feature (61)..(62): /note="This region represents a CpG dinucleotide"
  misc_feature (61)..(61): /note="Nucleotide may be methylated to form 5-methylcytosine"
gcccggtgccctcagggatggcctcgatcgccggtggggcccgcatttccggggggctggcgcctcgacccggaggggtgatggtggctcttttgccataaccgagagcagaagcggtagcg

SEQ ID NO: 17154 - DNA, 122 bp, Homo sapiens
  misc_feature (61)..(62): /note="This region represents a CpG dinucleotide"
  misc_feature (61)..(61): /note="Nucleotide may be methylated to form 5-methylcytosine"
tttttctcttaaacagtggctggctaacaatcaaaaataggttttggtaatgttgggtaacgttgctcaaatacggctatattatgcagagcacatggcaatcgttgaagagtaaaacacag

SEQ ID NO: 17155 - DNA, 122 bp, Homo sapiens
  misc_feature (61)..(62): /note="This region represents a CpG dinucleotide"
  misc_feature (61)..(61): /note="Nucleotide may be methylated to form 5-methylcytosine"
aaggtgtctaatttgtcagtatacagaaaaaagtaaacatagcaggtttgaactactatccgtcgaaaggcctgcttacaatcttggcccttgggtggcatctgggaacatgggtttgggga

SEQ ID NO: 17156 - DNA, 122 bp, Homo sapiens
  misc_feature (61)..(62): /note="This region represents a CpG dinucleotide"
  misc_feature (61)..(61): /note="Nucleotide may be methylated to form 5-methylcytosine"
gggctatattccagttcctgcttgccaaattgatcaaggtgtgtgctaggccaaaggtagcgtttgcttcctagtcccagctcggtcttcagatctccccagcctccatcccttattcaagt

SEQ ID NO: 17157 - DNA, 122 bp, Homo sapiens
  misc_feature (61)..(62): /note="This region represents a CpG dinucleotide"
  misc_feature (61)..(61): /note="Nucleotide may be methylated to form 5-methylcytosine"
tgctgaactccaggcagggctggtaggtgtgcactgtgcctacggcattcatcagaccagcgcttctgggggactccttgccattagaaccttcctggggctgattcatggccaggcctggt

SEQ ID NO: 17158 - DNA, 122 bp, Homo sapiens
  misc_feature (61)..(62): /note="This region represents a CpG dinucleotide"
  misc_feature (61)..(61): /note="Nucleotide may be methylated to form 5-methylcytosine"
tcctctcactccagcgccaacactgactggtcccctgggctcgtgggccgccggcagcctcggctcgttctccagacagtgttccaagaagccacttccagcgaggaagcgttggcctgaga

SEQ ID NO: 17159 - DNA, 122 bp, Homo sapiens
  misc_feature (61)..(62): /note="This region represents a CpG dinucleotide"
  misc_feature (61)..(61): /note="Nucleotide may be methylated to form 5-methylcytosine"
tttgagctttgacttctccccagccaattaagatcaaaagctatggggatgtacacaacccgtagagtttactacacccaataccttttactacacccaatactacactcaataccttcctc

SEQ ID NO: 17160 - DNA, 122 bp, Homo sapiens
  misc_feature (61)..(62): /note="This region represents a CpG dinucleotide"
  misc_feature (61)..(61): /note="Nucleotide may be methylated to form 5-methylcytosine"
gggcaggcactcaggcaagggtggggcagaggagctagacccgctctgagggagtacggccgccgtgccggcagcctgacctaaggctgcttcagccccgcccacctcagcaggtacctgcg

SEQ ID NO: 17161 - DNA, 122 bp, Homo sapiens
  misc_feature (61)..(62): /note="This region represents a CpG dinucleotide"
  misc_feature (61)..(61): /note="Nucleotide may be methylated to form 5-methylcytosine"
tggatacaatatcaatgccttatatggcttcactcttaccatttgtagttccagaaataccgtacaataaaggtcattcattttaccagcatgacaaaattgttttgagaaaaaaaattgcc

SEQ ID NO: 17162 - DNA, 122 bp, Homo sapiens
  misc_feature (61)..(62): /note="This region represents a CpG dinucleotide"
  misc_feature (61)..(61): /note="Nucleotide may be methylated to form 5-methylcytosine"
cacatgaaacatctgccttgttgtttacttacaatgtgcacacactgtgataaagccttccgtggctctcactgatccctgacatccccgtgctgttggctctactgcatcacaggctccca

SEQ ID NO: 17163 - DNA, 122 bp, Homo sapiens
  misc_feature (61)..(62): /note="This region represents a CpG dinucleotide"
  misc_feature (61)..(61): /note="Nucleotide may be methylated to form 5-methylcytosine"
aaagaagaaaaagaaagaaaaagaaaaaataactaataacttcatcttacagtggtgacacggagacctggagcaggaatacagagatgtgccaaactttgtacagaaattttgcaaaacta

SEQ ID NO: 17164 - DNA, 122 bp, Homo sapiens
  misc_feature (61)..(62): /note="This region represents a CpG dinucleotide"
  misc_feature (61)..(61): /note="Nucleotide may be methylated to form 5-methylcytosine"
ctatgagcgtcagcatcctcctcccctgccccaccctgccctcctgtggccttcactccccggaaaactcaccagacaaggtccccttgggctgagctgacagccacagcagcaggtgcagc

SEQ ID NO: 17165 - DNA, 122 bp, Homo sapiens
  misc_feature (61)..(62): /note="This region represents a CpG dinucleotide"
  misc_feature (61)..(61): /note="Nucleotide may be methylated to form 5-methylcytosine"
tttttgccttggcctcagcagtgctctcccacttcgtcttccctcctttctagtgcttctcgcctgaaagcttttccacgtgcgtgccgtgttcagtgagaactctgattcatgctcttcag

SEQ ID NO: 17166 - DNA, 122 bp, Homo sapiens
  misc_feature (61)..(62): /note="This region represents a CpG dinucleotide"
  misc_feature (61)..(61): /note="Nucleotide may be methylated to form 5-methylcytosine"
tggtcctcttccctccccactggcctcctcctttctccagagggcaccacctttgccctgcgccagacagccaggcccttgccaggccaagagttgagtcagacttcagttcaccaacatgc

SEQ ID NO: 17167 - DNA, 122 bp, Homo sapiens
  misc_feature (61)..(62): /note="This region represents a CpG dinucleotide"
  misc_feature (61)..(61): /note="Nucleotide may be methylated to form 5-methylcytosine"
tgtttcttctatggcttatttcacttaggacaatgtcgtcaaggttcacccttgctgtggcgtgtggcggaatttccttcctctttagggctgagtaacattccattgtacggctgtaccac

SEQ ID NO: 17168 - DNA, 122 bp, Homo sapiens
  misc_feature (61)..(62): /note="This region represents a CpG dinucleotide"
  misc_feature (61)..(61): /note="Nucleotide may be methylated to form 5-methylcytosine"
tcatttaacatggtacatgtactaattctaaactttacaacaatcctgtgaggtaagtaacgaattgtcattctcattttacagtggaggataaagaggctgaaggagtttaagtcatttgc

SEQ ID NO: 17169 - DNA, 122 bp, Homo sapiens
  misc_feature (61)..(62): /note="This region represents a CpG dinucleotide"
  misc_feature (61)..(61): /note="Nucleotide may be methylated to form 5-methylcytosine"
gaagaagttctggtgccactgtatcgcccgaattggaatgaacaatatatttttttctttcgcaacgcatcataaatctcagtggaagactaaacatactcttgatgtgtttattctggcag

SEQ ID NO: 17170 - DNA, 122 bp, Homo sapiens
  misc_feature (61)..(62): /note="This region represents a CpG dinucleotide"
  misc_feature (61)..(61): /note="Nucleotide may be methylated to form 5-methylcytosine"
gtgaggacacaggccgtcctccggcggggagcacggtggggtcagggtgctgtgtggtcccgcaaagaggcagctgagcttgggcctcaggtcgttccacaccttgctcatctgaaagggaa

SEQ ID NO: 17171 - DNA, 122 bp, Homo sapiens
  misc_feature (61)..(62): /note="This region represents a CpG dinucleotide"
  misc_feature (61)..(61): /note="Nucleotide may be methylated to form 5-methylcytosine"
tagaggtgacatcattattttgtaactttagtactaggctttccatttgtggtatggacacgtatgatatggagcaatttttgaattgtctttcacataggggaaattgcatcttatatacc

SEQ ID NO: 17172 - DNA, 122 bp, Homo sapiens
  misc_feature (61)..(62): /note="This region represents a CpG dinucleotide"
  misc_feature (61)..(61): /note="Nucleotide may be methylated to form 5-methylcytosine"
caatcaatccttctagtcacttgatctttctatggttttaaagcaactggttttgggagtcgaccatgaactgactcagaaaatgattaccagaagtggggttcaaaaaaagctctgggcag

SEQ ID NO: 17173 - DNA, 122 bp, Homo sapiens
  misc_feature (61)..(62): /note="This region represents a CpG dinucleotide"
  misc_feature (61)..(61): /note="Nucleotide may be methylated to form 5-methylcytosine"
attaaagcctccaacttgtgtttggacagtggccactgctctacctaaacaggtgactcacgcatccattgtgcagggacagaggaagagaaggagagtgagggcgctgggatgcggactga

SEQ ID NO: 17174 - DNA, 122 bp, Homo sapiens
  misc_feature (61)..(62): /note="This region represents a CpG dinucleotide"
  misc_feature (61)..(61): /note="Nucleotide may be methylated to form 5-methylcytosine"
cctcgtcatacggccaccaggttcagcccggaacgcacacggaccgatgctcatctcccgcggccgggacgacaagacacagcggctcccctgggcttgaatcaggcagctgctggtataga

SEQ ID NO: 17175 - DNA, 122 bp, Homo sapiens
  misc_feature (61)..(62): /note="This region represents a CpG dinucleotide"
  misc_feature (61)..(61): /note="Nucleotide may be methylated to form 5-methylcytosine"
ggttagtattctatatcaactgactcttagtctatcttgagagtggcaaaatgggaatggcgaagaaagggagagaattcctaggtttgtcctgtctccagacaggaagttggattagtgct

SEQ ID NO: 17176 - DNA, 122 bp, Homo sapiens
  misc_feature (61)..(62): /note="This region represents a CpG dinucleotide"
  misc_feature (61)..(61): /note="Nucleotide may be methylated to form 5-methylcytosine"
tgctctacacacacactcccagcagaacacacacctgccaaaaatggaagtggtcgagtacgcctgttggtgttgaaaggcatttcagtataaatcagtgaataaatcaggttacaaaacac

SEQ ID NO: 17177 - DNA, 122 bp, Homo sapiens
  misc_feature (61)..(62): /note="This region represents a CpG dinucleotide"
  misc_feature (61)..(61): /note="Nucleotide may be methylated to form 5-methylcytosine"
atgccaggaaatggggatgaaatcacatacgtatttcacaatctttcatgcccttttgtacgtttatgagaaattaggattaaatctaacccaaactgtggctttgaaacttggggctgttg

SEQ ID NO: 17178 - DNA, 122 bp, Homo sapiens
  misc_feature (61)..(62): /note="This region represents a CpG dinucleotide"
  misc_feature (61)..(61): /note="Nucleotide may be methylated to form 5-methylcytosine"
aacttgatccttagtaagtctgtgaagaaatggagaaacatgtctctttgtcaagaaaagcgagagttactggtttaaaaagtagtaaatactttttcatttgctgtcgtttggaaccagtt

SEQ ID NO: 17179 - DNA, 122 bp, Homo sapiens
  misc_feature (61)..(62): /note="This region represents a CpG dinucleotide"
  misc_feature (61)..(61): /note="Nucleotide may be methylated to form 5-methylcytosine"
ggctcccgcgtgtcacatagatacgctggctcccgcctgtcacgtagatacgctggctcccgcctgtcacgtagatatgctggctcccacctgccgcgtagctacgctgcctcccgcctgtg

SEQ ID NO: 17180 - DNA, 122 bp, Homo sapiens
  misc_feature (61)..(62): /note="This region represents a CpG dinucleotide"
  misc_feature (61)..(61): /note="Nucleotide may be methylated to form 5-methylcytosine"
gtaatttccattctattatattacaattattaagtttataccatttatagtggttagtgccgtgcagatggagcaatgactaagacatcattcctgttctttaatgactcatagatcagagc

SEQ ID NO: 17181 - DNA, 122 bp, Homo sapiens
  misc_feature (61)..(62): /note="This region represents a CpG dinucleotide"
  misc_feature (61)..(61): /note="Nucleotide may be methylated to form 5-methylcytosine"
aggtgtcatcagcatttgaaactgagtgaggtcaccaagagaaggaatgttaaatagatacgcagtcagagaaatgatctgggctcttaatcatatagaggtcaggagaaccagggaaggag

SEQ ID NO: 17182 - DNA, 122 bp, Homo sapiens
  misc_feature (61)..(62): /note="This region represents a CpG dinucleotide"
  misc_feature (61)..(61): /note="Nucleotide may be methylated to form 5-methylcytosine"
taaaacatcgataatcatttatcatctctcaccatttctgatcatcagaaattcaggagtcgtttggctgcaatattctggttttagatgtctcatgaggttgtagtcagatgtcaactaag

SEQ ID NO: 17183 - DNA, 122 bp, Homo sapiens
  misc_feature (61)..(62): /note="This region represents a CpG dinucleotide"
  misc_feature (61)..(61): /note="Nucleotide may be methylated to form 5-methylcytosine"
tacaaggtatttataacatgtacagggcattttgcttctctttctctgtgactcagaccccgttccccaggagaataaatgctttaggctttgcaacatttcaaatctacttgagtcccctt

SEQ ID NO: 17184 - DNA, 122 bp, Homo sapiens
  misc_feature (61)..(62): /note="This region represents a CpG dinucleotide"
  misc_feature (61)..(61): /note="Nucleotide may be methylated to form 5-methylcytosine"
gttaagagaacactactgccacatggcagtaacttaatatgtatggaagtccagtgatgacgtaatactctaagcctgattcagagataaaagttaccaaagcttttatacacattaatatt

SEQ ID NO: 17185 - DNA, 122 bp, Homo sapiens
  misc_feature (61)..(62): /note="This region represents a CpG dinucleotide"
  misc_feature (61)..(61): /note="Nucleotide may be methylated to form 5-methylcytosine"
cagattctctgagtgttcctcatctctgcctcagagaaggaaataagaagtgaggtactacgtagtacactgacacctagctggctgcagcctgcatgctggcccagccctgatctctacaa

SEQ ID NO: 17186 - DNA, 122 bp, Homo sapiens
  misc_feature (61)..(62): /note="This region represents a CpG dinucleotide"
  misc_feature (61)..(61): /note="Nucleotide may be methylated to form 5-methylcytosine"
gtgaacccagaaccacaagtaacagataatgtctctcctctttattctcccagtcattgtcgttgctctgtaacacacaatgcccactgtcatgctgacaataatgtcaacagtctttgttt

SEQ ID NO: 17187 - DNA, 122 bp, Homo sapiens
  misc_feature (61)..(62): /note="This region represents a CpG dinucleotide"
  misc_feature (61)..(61): /note="Nucleotide may be methylated to form 5-methylcytosine"
agggctgtggggctgtgattcggagctgtgattcatcaataagacccacaggattgtcagcgttcttcagttatgtgtttgtgccttcctcatgagccagggaaaggctggggttaccaccg

SEQ ID NO: 17188 - DNA, 122 bp, Homo sapiens
  misc_feature (61)..(62): /note="This region represents a CpG dinucleotide"
  misc_feature (61)..(61): /note="Nucleotide may be methylated to form 5-methylcytosine"
cctctgatacctggagcctgtcttctgctaacaagcctgtgttcaggggcctgtgctcagcgtgctcgtggagtctggcctcccaccttctccctccctgctggggagaggaggggcaacag

SEQ ID NO: 17189 - DNA, 122 bp, Homo sapiens
  misc_feature (61)..(62): /note="This region represents a CpG dinucleotide"
  misc_feature (61)..(61): /note="Nucleotide may be methylated to form 5-methylcytosine"
gcatcaccatggagtgagattggaaagagctgggcccctgaaaccaaagcacagaatgtgcggctgtgccattatctaacaaatcccaggggatcaacaaagctccctgaaaaaagcatctg

SEQ ID NO: 17190 - DNA, 122 bp, Homo sapiens
  misc_feature (61)..(62): /note="This region represents a CpG dinucleotide"
  misc_feature (61)..(61): /note="Nucleotide may be methylated to form 5-methylcytosine"
atctcggctcactgcaacctctgtctcttgggttcaagggattctcgtgcctcagcctcccgaatagctgtgatcccagctattcaagggaagagtggaggatggggcaacctctgggaggc

SEQ ID NO: 17191 - DNA, 122 bp, Homo sapiens
  misc_feature (61)..(62): /note="This region represents a CpG dinucleotide"
  misc_feature (61)..(61): /note="Nucleotide may be methylated to form 5-methylcytosine"
ctggatttcccggggccctttgatggggcgtgtcatcaccagggtggcactgatggggcccgtttgctatggacagaaccggggaacaccagtgagaaaaggcctgcatggtggccctgcag

SEQ ID NO: 17192 - DNA, 122 bp, Homo sapiens
  misc_feature (61)..(62): /note="This region represents a CpG dinucleotide"
  misc_feature (61)..(61): /note="Nucleotide may be methylated to form 5-methylcytosine"
gacaaaaattttgcaatccctgggcactacagaaagatgtctcatgtgagagccaattaacgtaaggtgtatttggattctgtttgatatagcatgagatgagcttgatcagactagtattt

SEQ ID NO: 17193 - DNA, 122 bp, Homo sapiens
  misc_feature (61)..(62): /note="This region represents a CpG dinucleotide"
  misc_feature (61)..(61): /note="Nucleotide may be methylated to form 5-methylcytosine"
tcaggccagcagcctcatttgagagcttcttcaaaagacatattagactctcaggcctgccgcagacctactgaatcagagcctgcattcaaacaagatcccaggggatttgtatgcaaatt

SEQ ID NO: 17194 - DNA, 122 bp, Homo sapiens
  misc_feature (61)..(62): /note="This region represents a CpG dinucleotide"
  misc_feature (61)..(61): /note="Nucleotide may be methylated to form 5-methylcytosine"
gtttgcctttacctttttcaaatagcaaattcaacaaagcagcctgaatcatgtgctgcacgctgggtgttggtacctccctcagggtggcagctgactaactgcaactgtggattaaggaa

SEQ ID NO: 17195 - DNA, 122 bp, Homo sapiens
  misc_feature (61)..(62): /note="This region represents a CpG dinucleotide"
  misc_feature (61)..(61): /note="Nucleotide may be methylated to form 5-methylcytosine"
gtacaagcgacaagtctctccaggatacaagaaagtaggaggttcattgttaatgttacccggctacagacttcctgccgaacatatggctgtcatggataacgctgacctcaaggaagttc

SEQ ID NO: 17196 - DNA, 122 bp, Homo sapiens
  misc_feature (61)..(62): /note="This region represents a CpG dinucleotide"
  misc_feature (61)..(61): /note="Nucleotide may be methylated to form 5-methylcytosine"
aagagcgggaagggttcctaccagcatggggctttgttctcagaaagcttctctaagatacgttacttagatacatccgtaaaatccctcagtcaactgcacccctgtggcctatagcctga

SEQ ID NO: 17197 - DNA, 122 bp, Homo sapiens
  misc_feature (61)..(62): /note="This region represents a CpG dinucleotide"
  misc_feature (61)..(61): /note="Nucleotide may be methylated to form 5-methylcytosine"
ccttgatctcggacttcccagcctccagaactgtgagcaataaatttgttgtttttaagccgcccagtctgtgatgttttgttttagcatcccagactaagtaagggtttaaaagaggtgat

SEQ ID NO: 17198 - DNA, 122 bp, Homo sapiens
  misc_feature (61)..(62): /note="This region represents a CpG dinucleotide"
  misc_feature (61)..(61): /note="Nucleotide may be methylated to form 5-methylcytosine"
tagtacaaccactggagaatgacatggaggtttctcaaaaacctacaaagagaactcacacgtgatccagcaattttcctgctgggtatttatcaaaaggaaagaaaaggaaggaacatcag

SEQ ID NO: 17199 - DNA, 122 bp, Homo sapiens
  misc_feature (61)..(62): /note="This region represents a CpG dinucleotide"
  misc_feature (61)..(61): /note="Nucleotide may be methylated to form 5-methylcytosine"
ttgtttctctgaaatgcgaatataactgggcatccagcactgtttggcattgttttgtttcgttcttgctaaatctggcagccctcgtgggaaggagagtgagtgtgagtgaggagggggaa

SEQ ID NO: 17200 - DNA, 122 bp, Homo sapiens
  misc_feature (61)..(62): /note="This region represents a CpG dinucleotide"
  misc_feature (61)..(61): /note="Nucleotide may be methylated to form 5-methylcytosine"
gctttgcccttccgggttctgcggaaggaactcgttagctcctctgctgctgggtgaggtcgtttgtttcttagagctgcctgaatgaaatgccacaaagtgggtagcataaaacaacagaa

SEQ ID NO: 17201 - DNA, 122 bp, Homo sapiens
  misc_feature (61)..(62): /note="This region represents a CpG dinucleotide"
  misc_feature (61)..(61): /note="Nucleotide may be methylated to form 5-methylcytosine"
gtgttgggtgtgttgttgtgaaaccaggaactgttacatttcttttgcttccacgagagacgcaatcgatgtaaagatgaagacatcacacagaagagaagagaactgagggaactacagag

SEQ ID NO: 17202 - DNA, 122 bp, Homo sapiens
  misc_feature (61)..(62): /note="This region represents a CpG dinucleotide"
  misc_feature (61)..(61): /note="Nucleotide may be methylated to form 5-methylcytosine"
taacaagaaaccaatttttcagaggccaagagtcccaacagggccgagaatctggccactcgcctatggctctggaggtggcatgacaaataagggtggcatgacaaatataggttaactga

SEQ ID NO: 17203 - DNA, 122 bp, Homo sapiens
  misc_feature (61)..(62): /note="This region represents a CpG dinucleotide"
  misc_feature (61)..(61): /note="Nucleotide may be methylated to form 5-methylcytosine"
tctgattctcaacatttttactcctggggagccacaatagtccctaagtggtttttcagccgctttttaggtttcagaaacagcatccgtgcccttttgatgtaatctatgtcccaataatt

SEQ ID NO: 17204 - DNA, 122 bp, Homo sapiens
  misc_feature (61)..(62): /note="This region represents a CpG dinucleotide"
  misc_feature (61)..(61): /note="Nucleotide may be methylated to form 5-methylcytosine"
ggcagcagcctccccgcctgccatgccacagcctctccctgccatgccacagttcagctccgagagagagtgccaaggtttgagagacaacccgtgtttaatccttcagtggttttgtagag

SEQ ID NO: 17205 - DNA, 122 bp, Homo sapiens
  misc_feature (61)..(62): /note="This region represents a CpG dinucleotide"
  misc_feature (61)..(61): /note="Nucleotide may be methylated to form 5-methylcytosine"
catgtgtgcacactgcacacattagatctgctaacattccactagccaaagcaagtcacacggccaagatcaatatcagtggagcagggaatataccctgtcctccacagtgtcaacaaagc

SEQ ID NO: 17206 - DNA, 122 bp, Homo sapiens
  misc_feature (61)..(62): /note="This region represents a CpG dinucleotide"
  misc_feature (61)..(61): /note="Nucleotide may be methylated to form 5-methylcytosine"
ctgttgttggtggtagctctgtttaattgcttttccagctcctggattatatatgtttgacgagtaaccaagccttgaaggttctctttctcttcctttaaggtgtccaactcttccttgtg

SEQ ID NO: 17207 - DNA, 122 bp, Homo sapiens
  misc_feature (61)..(62): /note="This region represents a CpG dinucleotide"
  misc_feature (61)..(61): /note="Nucleotide may be methylated to form 5-methylcytosine"
tggactgacaaacaacaaacccacagtaaaacgagaggaagtgctggggaggccagctgtcggcttgagccaagcagtaggaactcaatgtatgcaggttctaggaggaaagagataataat

SEQ ID NO: 17208 - DNA, 122 bp, Homo sapiens
  misc_feature (61)..(62): /note="This region represents a CpG dinucleotide"
  misc_feature (61)..(61): /note="Nucleotide may be methylated to form 5-methylcytosine"
ctcccgacgaacactgagtttccacgcttggtgactggcagggcgctgtggtgactcttccgtgagcctgtgtgcctctgatggctcagtgagggtagagtctggcaaaggccaccagaggg

SEQ ID NO: 17209 - DNA, 122 bp, Homo sapiens
  misc_feature (61)..(62): /note="This region represents a CpG dinucleotide"
  misc_feature (61)..(61): /note="Nucleotide may be methylated to form 5-methylcytosine"
aattcagtaatttccacagggttggagatgactcagcagttccactcctgcacgagcacccgagagttgccctgatagccgtgcacttgggcgttcatcacagcatttgcttcttacatgaa

SEQ ID NO: 17210 - DNA, 122 bp, Homo sapiens
  misc_feature (61)..(62): /note="This region represents a CpG dinucleotide"
  misc_feature (61)..(61): /note="Nucleotide may be methylated to form 5-methylcytosine"
ttaacaacttccttatgccaggatgttgctcagaagggattttttcaacttaggtgcaggcgcaataaatcaacctaaatgtcctaaacttgacccagcttattagaatatcgtacacacga

SEQ ID NO: 17211 - DNA, 122 bp, Homo sapiens
  misc_feature (61)..(62): /note="This region represents a CpG dinucleotide"
  misc_feature (61)..(61): /note="Nucleotide may be methylated to form 5-methylcytosine"
tgacctgtcagctctgggcaggtgtttccaggtgtgggctgaactcttaacaccggatgacgtgtttcaaggggccctgctgacgcagcattcactgacaatgaatcaccccaagaggacat

SEQ ID NO: 17212 - DNA, 122 bp, Homo sapiens
  misc_feature (61)..(62): /note="This region represents a CpG dinucleotide"
  misc_feature (61)..(61): /note="Nucleotide may be methylated to form 5-methylcytosine"
cctggaaactaatacttcttgtggtgggttggggtgggtggttgtgcatcaagcaacagtcgtcagcagccccatgagtcatgtggaaggagtggccagagaaagagtggatgctctacagc

SEQ ID NO: 17213 - DNA, 122 bp, Homo sapiens
  misc_feature (61)..(62): /note="This region represents a CpG dinucleotide"
  misc_feature (61)..(61): /note="Nucleotide may be methylated to form 5-methylcytosine"
gttgactgcaattaactatgaaactgtgggccatgaaaccacggagaagtggggggactacggtatttcccaagaggtagaccacattttggacaggaagattcaaatcataaagttagttt

SEQ ID NO: 17214 - DNA, 122 bp, Homo sapiens
  misc_feature (61)..(62): /note="This region represents a CpG dinucleotide"
  misc_feature (61)..(61): /note="Nucleotide may be methylated to form 5-methylcytosine"
ggcttcaggcagaggctgttcaacccctcgttacagatgtggaaactgggcctaagctcacggcattaatacagcatgggacagggtttcaacacatcatgattgccgggttctgggtgagg

SEQ ID NO: 17215 - DNA, 122 bp, Homo sapiens
  misc_feature (61)..(62): /note="This region represents a CpG dinucleotide"
  misc_feature (61)..(61): /note="Nucleotide may be methylated to form 5-methylcytosine"
cctttcagtctatgcgacagagagaggagctgtcctctcattgctccctgggtccctttacgtagctttcaccacgctgtggttattgatttactcctctgtgtttccacatccacctccag

SEQ ID NO: 17216 - DNA, 122 bp, Homo sapiens
  misc_feature (61)..(62): /note="This region represents a CpG dinucleotide"
  misc_feature (61)..(61): /note="Nucleotide may be methylated to form 5-methylcytosine"
gacctccgggctgcacatgacccatttttcaacatcactggccaaagtgcaacaaggtcacgtactgcaaatatttgtgattagaaagattctttcctctaaaagttgccatgagatagttc

SEQ ID NO: 17217 - DNA, 122 bp, Homo sapiens
  misc_feature (61)..(62): /note="This region represents a CpG dinucleotide"
  misc_feature (61)..(61): /note="Nucleotide may be methylated to form 5-methylcytosine"
aatgcagattctgattcagtaggctggggatgggacttgagactgcatttccagcaagctcgcagatgactggatcctgctgtcttcaggctgcatgcttcaaggggtcattcgcaggtgtt

SEQ ID NO: 17218 - DNA, 122 bp, Homo sapiens
  misc_feature (61)..(62): /note="This region represents a CpG dinucleotide"
  misc_feature (61)..(61): /note="Nucleotide may be methylated to form 5-methylcytosine"
gtttggaaagggaaacaacacattgaatgccaacccctggactagatatttcatcaacttcgttcatcctcactaccacccacacaagacggtcttcctatttccaacttagaagaaggaag

SEQ ID NO: 17219 - DNA, 122 bp, Homo sapiens
  misc_feature (61)..(62): /note="This region represents a CpG dinucleotide"
  misc_feature (61)..(61): /note="Nucleotide may be methylated to form 5-methylcytosine"
catgtgccatgttggtgtgctgcacccattaactcatcaagagcagttaaacttcttacacggcaattggctctgcccagagagagcattctttaagagaaagaaaatggggctggccaggg

SEQ ID NO: 17220 - DNA, 122 bp, Homo sapiens
  misc_feature (61)..(62): /note="This region represents a CpG dinucleotide"
  misc_feature (61)..(61): /note="Nucleotide may be methylated to form 5-methylcytosine"
aatgagagcaatagcagtttattagtcacatatgctcatacctgggaggataacactgcacgccatgaactgcttcatgggagttgcactcagaaacaggtattaccaggagctgtgggagg

SEQ ID NO: 17221 - DNA, 122 bp, Homo sapiens
  misc_feature (61)..(62): /note="This region represents a CpG dinucleotide"
  misc_feature (61)..(61): /note="Nucleotide may be methylated to form 5-methylcytosine"
tatggggtgggaggtaaatcaaggccacaacctcccacctggggaaggatgagcgcgcagcgtgccctgagaaaacacaccctccctgcaaggttgctctaaaagatcacttcctggcccta

SEQ ID NO: 17222 - DNA, 122 bp, Homo sapiens
  misc_feature (61)..(62): /note="This region represents a CpG dinucleotide"
  misc_feature (61)..(61): /note="Nucleotide may be methylated to form 5-methylcytosine"
catacttctgatccttggagtgaccctcagtgtctaaaaatcctattaaaaacgttgctgcgtgagctactcacttgtttgattaacatgaaagggagtttaatgtaaacaatacttctgga

SEQ ID NO: 17223 - DNA, 122 bp, Homo sapiens
  misc_feature (61)..(62): /note="This region represents a CpG dinucleotide"
  misc_feature (61)..(61): /note="Nucleotide may be methylated to form 5-methylcytosine"
tctttaattgtgaggctgcatgagccataatgcatttaaaaagatcctctcaagcacacacggcttccttgtaaaaggtgatatcctcaggcacctctaatcaggcttacagcagcattcca

SEQ ID NO: 17224 - DNA, 122 bp, Homo sapiens
  misc_feature (61)..(62): /note="This region represents a CpG dinucleotide"
  misc_feature (61)..(61): /note="Nucleotide may be methylated to form 5-methylcytosine"
aaactttcaaatcctgaagtccctgcttagctggtctctaaacttaaaagtctttcaggccgggcaccatggctcacacctataatcccagcactattgtgaggcccaggtgggcatgagcc

SEQ ID NO: 17225 - DNA, 122 bp, Homo sapiens
  misc_feature (61)..(62): /note="This region represents a CpG dinucleotide"
  misc_feature (61)..(61): /note="Nucleotide may be methylated to form 5-methylcytosine"
tactgcaatcacacctcaggagcaaagatggccaagatctatttcaattcttagatatctcgaggaaccgcagatgactgtaactatggaagatagccaatctgtagtaatgaagaagcgca

SEQ ID NO: 17226 - DNA, 122 bp, Homo sapiens
  misc_feature (61)..(62): /note="This region represents a CpG dinucleotide"
  misc_feature (61)..(61): /note="Nucleotide may be methylated to form 5-methylcytosine"
tttgaaaactcttgctgagcactgcatgtggtaactcattaaactgtcagaaacatgcaacgcagtaaggaaaatcaggttcagagaggttaagtaacttccctgaggttagacactagtaa

SEQ ID NO: 17227 - DNA, 122 bp, Homo sapiens
  misc_feature (61)..(62): /note="This region represents a CpG dinucleotide"
  misc_feature (61)..(61): /note="Nucleotide may be methylated to form 5-methylcytosine"
ggctcctaaccatctctctgacatcatcttgtgtaactctttctctgaatcactgaccttcgctagccacattcattttttctcagtttttttagctcttaaagttctttcccatctcaggg

SEQ ID NO: 17228 - DNA, 122 bp, Homo sapiens
  misc_feature (61)..(62): /note="This region represents a CpG dinucleotide"
  misc_feature (61)..(61): /note="Nucleotide may be methylated to form 5-methylcytosine"
atacattattaacaacaaaagggaaaaattgagttgactttaagaggaagtggaaaataacgagatcacatctgtactctacaggctctccacagaggtcagactgaggtggtaaaattgtt

SEQ ID NO: 17229 - DNA, 122 bp, Homo sapiens
  misc_feature (61)..(62): /note="This region represents a CpG dinucleotide"
  misc_feature (61)..(61): /note="Nucleotide may be methylated to form 5-methylcytosine"
agccagcaacttgagggataactaccgatttgcacatacgaatgttgagtctctggtgaacgagtatgatgataatggagagtaagtgactgagttgaatctcctgaccaagtattattgtg

SEQ ID NO: 17230 - DNA, 122 bp, Homo sapiens
  misc_feature (61)..(62): /note="This region represents a CpG dinucleotide"
  misc_feature (61)..(61): /note="Nucleotide may be methylated to form 5-methylcytosine"
agctatgtagagatttcctgagacttaagagctttttctaagactgcctctaactagctgcgtgttcctgggcagggaaccttattattcttacccaaatactgaaggatctgggccaggta

SEQ ID NO: 17231 - DNA, 122 bp, Homo sapiens
  misc_feature (61)..(62): /note="This region represents a CpG dinucleotide"
  misc_feature (61)..(61): /note="Nucleotide may be methylated to form 5-methylcytosine"
gctggggacgaaactgcagtgaccagtgggtgtggctgggtccagcctccagatctggcccgcacgatgccttgcaggatggacaggatgacagacagggacgaagcagagacctctacaga

SEQ ID NO: 17232 - DNA, 122 bp, Homo sapiens
  misc_feature (61)..(62): /note="This region represents a CpG dinucleotide"
  misc_feature (61)..(61): /note="Nucleotide may be methylated to form 5-methylcytosine"
gcagcttgcacaatcactgagctgccaactcggagttcttggagcagtgctgacagtgagcgcagtgttggtgtttacttgagtcatcgtcgtgtggtcatgatgacgagtcacaaagattt

SEQ ID NO: 17233 - DNA, 122 bp, Homo sapiens
  misc_feature (61)..(62): /note="This region represents a CpG dinucleotide"
  misc_feature (61)..(61): /note="Nucleotide may be methylated to form 5-methylcytosine"
tttcaattaagtataaatcatgctttgtagctgaccaacttatcctgtctacctgagctacgaagcggcacaaatggtgaccttgagattgtacaaacctcaattggaccacttcccagtgg

SEQ ID NO: 17234 - DNA, 122 bp, Homo sapiens
  misc_feature (61)..(62): /note="This region represents a CpG dinucleotide"
  misc_feature (61)..(61): /note="Nucleotide may be methylated to form 5-methylcytosine"
cataggctttctcatctaggttggtgtggcacaccctgatgttctcacaataggaaattgcgtaaggatgcatttctcacaacgtacccccttcactaaccaatgcatgactgtatggattc

SEQ ID NO: 17235 - DNA, 122 bp, Homo sapiens
  misc_feature (61)..(62): /note="This region represents a CpG dinucleotide"
  misc_feature (61)..(61): /note="Nucleotide may be methylated to form 5-methylcytosine"
gctggtgccagcctggcggcccttccctgctattagagttatcttatttcaggagaacttcgaattacaatacacttatcttcattgcagcactgttaatggaagacattttcaggaactgg

SEQ ID NO: 17236 - DNA, 122 bp, Homo sapiens
  misc_feature (61)..(62): /note="This region represents a CpG dinucleotide"
  misc_feature (61)..(61): /note="Nucleotide may be methylated to form 5-methylcytosine"
actttgtaaatgactgattcctaagcccaatattgaatgcttagtacgtgacaatctctgcgctgagaattccacatgcctcacttcagctcatctgagtgtcagcgctacatagggaagtt

SEQ ID NO: 17237 - DNA, 122 bp, Homo sapiens
  misc_feature (61)..(62): /note="This region represents a CpG dinucleotide"
  misc_feature (61)..(61): /note="Nucleotide may be methylated to form 5-methylcytosine"
acacaatgaacactggcaaacagacagatctcccatctgtgtgagcttcttaacctcagtcgcaaggaccatcatggaactgtaagattagcggataaacattctatatttgttcattcagt

SEQ ID NO: 17238 - DNA, 122 bp, Homo sapiens
  misc_feature (61)..(62): /note="This region represents a CpG dinucleotide"
  misc_feature (61)..(61): /note="Nucleotide may be methylated to form 5-methylcytosine"
ctttcacggagctggccaggatagtgctgctgcggcacaggttgaactggctcgggaggccgagcaaggtactgagcttgcaagacctctgctgccgcaccatcgtgtcctgcacacctgtg

SEQ ID NO: 17239 - DNA, 122 bp, Homo sapiens
  misc_feature (61)..(62): /note="This region represents a CpG dinucleotide"
  misc_feature (61)..(61): /note="Nucleotide may be methylated to form 5-methylcytosine"
aacaaagctcaacatttttggattaataaatactgttttgagacatcagtatctgacaatcgctttcataaacaaaagacttgtgcaaactccacaattttgcttcagactaagccaaactg

SEQ ID NO: 17240 - DNA, 122 bp, Homo sapiens
  misc_feature (61)..(62): /note="This region represents a CpG dinucleotide"
  misc_feature (61)..(61): /note="Nucleotide may be methylated to form 5-methylcytosine"
cttaaacttctttccttttagcttcttgcacttcctgtttctggctttttggtttccttacgcttaacaattgtaaaatttctagtgaaagtttgatacatattttggtacagattatttct

SEQ ID NO: 17241 - DNA, 122 bp, Homo sapiens
  misc_feature (61)..(62): /note="This region represents a CpG dinucleotide"
  misc_feature (61)..(61): /note="Nucleotide may be methylated to form 5-methylcytosine"
cagcattgagctgataaagacctttgttttccatgttttgattggcccagtgagaagcctcgagcagtttgcacacccatctgtgtccatactggtggggcagaaaagtgctgacacaggat

SEQ ID NO: 17242 - DNA, 122 bp, Homo sapiens
  misc_feature (61)..(62): /note="This region represents a CpG dinucleotide"
  misc_feature (61)..(61): /note="Nucleotide may be methylated to form 5-methylcytosine"
agcaggaatgcagtgtctgaaaaatacctcaaacaccaatcttaggttctacaatagtgacgttatccataggagcaactggggaggctcggaatcccgtggcctctggctgcatgactcct

SEQ ID NO: 17243 - DNA, 122 bp, Homo sapiens
  misc_feature (61)..(62): /note="This region represents a CpG dinucleotide"
  misc_feature (61)..(61): /note="Nucleotide may be methylated to form 5-methylcytosine"
ctgccacagattatgtaataatggccaggtgttgcgcatgcccactatgggctggcctagcgtataggcctcaataaagccattcacatatgtggggacttgcttgtacatctgaagaatga

SEQ ID NO: 17244 - DNA, 122 bp, Homo sapiens
  misc_feature (61)..(62): /note="This region represents a CpG dinucleotide"
  misc_feature (61)..(61): /note="Nucleotide may be methylated to form 5-methylcytosine"
catcctgatgccttggagtccaaggcccatgcctccctatccaccacgctgccctcccgccggctgggtaactctgcttggctgataatgaggagcttagcctcagaggtgtcctatcagcc

SEQ ID NO: 17245 - DNA, 122 bp, Homo sapiens
  misc_feature (61)..(62): /note="This region represents a CpG dinucleotide"
  misc_feature (61)..(61): /note="Nucleotide may be methylated to form 5-methylcytosine"
gtacttgggaggatctcgcaagtgaggccccaaggccttggcctttatgctcctcagactcggaggcagtgcagttcctgcccaaaccgggcctttgggatttctagaccatgaggcatcac

SEQ ID NO: 17246 - DNA, 122 bp, Homo sapiens
  misc_feature (61)..(62): /note="This region represents a CpG dinucleotide"
  misc_feature (61)..(61): /note="Nucleotide may be methylated to form 5-methylcytosine"
gccatcacccctgtctagccatggaactctttcatcttgcaaaactggaaatgccttactcgtgaaccagtacctccccattcccagccattccagtttcttgtagcgcatcttctctttga

SEQ ID NO: 17247 - DNA, 122 bp, Homo sapiens
  misc_feature (61)..(62): /note="This region represents a CpG dinucleotide"
  misc_feature (61)..(61): /note="Nucleotide may be methylated to form 5-methylcytosine"
ccaagcagtcaggcagaaaaggggaattctcctttcccctacttttttgttctactgttacgctttgtagatcagaccatgcccacttacactggcaggggcaatctgcttcactcggtcca

SEQ ID NO: 17248 - DNA, 122 bp, Homo sapiens
  misc_feature (61)..(62): /note="This region represents a CpG dinucleotide"
  misc_feature (61)..(61): /note="Nucleotide may be methylated to form 5-methylcytosine"
tagaaacagacttttcttttgagtgtgcatttttttctttttacctaaatgtgtcatgctcgacacttttttttaaattgaagtacaaaaaagatcacgaatcattaagtatttaggttgat

SEQ ID NO: 17249 - DNA, 122 bp, Homo sapiens
  misc_feature (61)..(62): /note="This region represents a CpG dinucleotide"
  misc_feature (61)..(61): /note="Nucleotide may be methylated to form 5-methylcytosine"
agtgatgtgctcagggttgtactttgggaagatcactaggctctgactgtgtgcctgttgcgcccacaggcaactgcatgctccttgaggctgagaacttctgattcatcccagaatctccc

SEQ ID NO: 17250 - DNA, 122 bp, Homo sapiens
  misc_feature (61)..(62): /note="This region represents a CpG dinucleotide"
  misc_feature (61)..(61): /note="Nucleotide may be methylated to form 5-methylcytosine"
cccacccagcttgtcatggtttacttctgattggatataactagatgataacagggatcacgctgcatccattgaggagaaagatgattcaaccctctcgcgggctgctggggaatcgatat

SEQ ID NO: 17251 - DNA, 122 bp, Homo sapiens
  misc_feature (61)..(62): /note="This region represents a CpG dinucleotide"
  misc_feature (61)..(61): /note="Nucleotide may be methylated to form 5-methylcytosine"
acttccacccagtgcttgcaatgcttgttctggggcacacctgagactgccccactgtgacgaagccattccccagctagccctgcccctagccattgagtcatcacagctgaggacaagtc

SEQ ID NO: 17252 - DNA, 122 bp, Homo sapiens
  misc_feature (61)..(62): /note="This region represents a CpG dinucleotide"
  misc_feature (61)..(61): /note="Nucleotide may be methylated to form 5-methylcytosine"
cataactgtcttatcagataggtgtcacaggcagactattggaaagagggtcccttcccacgcatgtgtgtagctgtccgtagtcctgaatctcattgctctctgactgggctccacccaga

SEQ ID NO: 17253 - DNA, 122 bp, Homo sapiens
  misc_feature (61)..(62): /note="This region represents a CpG dinucleotide"
  misc_feature (61)..(61): /note="Nucleotide may be methylated to form 5-methylcytosine"
ttcacattggaggccctgctggaaatatggatgacagaaaaatttgctaatattgtcaaacgatcagtaaccacaacaagaatgcaattaggtacagaagagatgtatttcaatctgacttt

SEQ ID NO: 17254 - DNA, 122 bp, Homo sapiens
  misc_feature (61)..(62): /note="This region represents a CpG dinucleotide"
  misc_feature (61)..(61): /note="Nucleotide may be methylated to form 5-methylcytosine"
ctgccatcttcactgagattaactcattcttgcaaagtgtcaagcattccccttccttctcggctggtggagtcacggagcacagggctctgcagaagaagtggcctgtggataatgagaaa

SEQ ID NO: 17255 - DNA, 122 bp, Homo sapiens
  misc_feature (61)..(62): /note="This region represents a CpG dinucleotide"
  misc_feature (61)..(61): /note="Nucleotide may be methylated to form 5-methylcytosine"
actactgtgcccataacagcccataatagcctataacagaccacagggcctgagctaccgcgggctcctgtgacccaaaaaccgaaagacaagacaccaggcatggagcaaagctcaaagct

SEQ ID NO: 17256 - DNA, 122 bp, Homo sapiens
  misc_feature (61)..(62): /note="This region represents a CpG dinucleotide"
  misc_feature (61)..(61): /note="Nucleotide may be methylated to form 5-methylcytosine"
gcagacatgtaggaaaattcaggaagaatgcaaagttatagaaaactgggcataccagtacgcagtaatagaaccaggaaagaaagcccacagagaatcatgatgtggaggtaaaacgttta

SEQ ID NO: 17257 - DNA, 122 bp, Homo sapiens
  misc_feature (61)..(62): /note="This region represents a CpG dinucleotide"
  misc_feature (61)..(61): /note="Nucleotide may be methylated to form 5-methylcytosine"
gtttccagatgcgaagccctgataggctgagtcaaagaaggggaacagaaaccggtgctgcggggaagcaaagtgagtcagggcaggaaatccttctggcaccaacctcagacaccggcctt

SEQ ID NO: 17258 - DNA, 122 bp, Homo sapiens
  misc_feature (61)..(62): /note="This region represents a CpG dinucleotide"
  misc_feature (61)..(61): /note="Nucleotide may be methylated to form 5-methylcytosine"
aatgttggatgtatgctaggcactgtgtgagcacttggcatccattctctctttggttcccgcaagttaggaattggccccttttctcagaggagaatgaggccctgtgaggttaagctgat

SEQ ID NO: 17259 - DNA, 122 bp, Homo sapiens
  misc_feature (61)..(62): /note="This region represents a CpG dinucleotide"
  misc_feature (61)..(61): /note="Nucleotide may be methylated to form 5-methylcytosine"
acagaggcggagaaggggcgaagttactcgccctgtgtgatctggaacatccatcctctccggcctgcaggcatcagagctcctgggccgccggcctttggacccggatcaagacttacact

SEQ ID NO: 17260 - DNA, 122 bp, Homo sapiens
  misc_feature (61)..(62): /note="This region represents a CpG dinucleotide"
  misc_feature (61)..(61): /note="Nucleotide may be methylated to form 5-methylcytosine"
aaaagcaacagagaagagacaaaagtcctgaactgaaacttggtagacaggaaatatccgcgggcggaaaacgcgcttcctgttccaagtcacagggaaatgcaaatccaaacactgagcgg

SEQ ID NO: 17261 - DNA, 122 bp, Homo sapiens
  misc_feature (61)..(62): /note="This region represents a CpG dinucleotide"
  misc_feature (61)..(61): /note="Nucleotide may be methylated to form 5-methylcytosine"
ctgtcttctcccagaattgcaggaatagaaataaaaacctcctaggagtgtccggagggacgactgcactttccagttcagatgagctgaacaggagaaacaggcaggcttttaatcacatt

SEQ ID NO: 17262 - DNA, 122 bp, Homo sapiens
  misc_feature (61)..(62): /note="This region represents a CpG dinucleotide"
  misc_feature (61)..(61): /note="Nucleotide may be methylated to form 5-methylcytosine"
atttaccacccatcttggctccatgcacctctccccacattccccgagtgggaacacacgcgtgcacacacacacccatgcacatttcatacagacacagacctggggagatgataaaactg

SEQ ID NO: 17263 - DNA, 122 bp, Homo sapiens
  misc_feature (61)..(62): /note="This region represents a CpG dinucleotide"
  misc_feature (61)..(61): /note="Nucleotide may be methylated to form 5-methylcytosine"
gctgactaagaagcccgaggataaccacacccagtgccagctggtgcctgtggtggagatcggcatcagtgagcgccagaatgctgagcagcatgtcacccagctcatgtccaccgagcctc

SEQ ID NO: 17264 - DNA, 122 bp, Homo sapiens
  misc_feature (61)..(62): /note="This region represents a CpG dinucleotide"
  misc_feature (61)..(61): /note="Nucleotide may be methylated to form 5-methylcytosine"
tagcttgtcttgcaggtcactcatgaggattacatgagacgctacatgtgaaggcacttacggtgggtcttagtgtttacagaaggaaaaggtaatcattaacacacgtattccaccttcca

SEQ ID NO: 17265 - DNA, 122 bp, Homo sapiens
  misc_feature (61)..(62): /note="This region represents a CpG dinucleotide"
  misc_feature (61)..(61): /note="Nucleotide may be methylated to form 5-methylcytosine"
aagaaaaagaaatagaaacttgggagattatgaggattaagctgctacattaagtgtgaacgtcagtccaatacttgatgagtctgcagacacatgaatgggaaccaaagcagccttggggt

SEQ ID NO: 17266 - DNA, 122 bp, Homo sapiens
  misc_feature (61)..(62): /note="This region represents a CpG dinucleotide"
  misc_feature (61)..(61): /note="Nucleotide may be methylated to form 5-methylcytosine"
gtctcaactgcagactacaatctaagacactgctgctgactcactgttacacaattaaagcggtttcccaaagtagactcattttctaccacatgaaaatctatcccgaactgttttccaat

SEQ ID NO: 17267 - DNA, 122 bp, Homo sapiens
  misc_feature (61)..(62): /note="This region represents a CpG dinucleotide"
  misc_feature (61)..(61): /note="Nucleotide may be methylated to form 5-methylcytosine"
agtggttttttgttcccagaactgagtgcatttttgtggacagtgattcattacagaatacgccagtactagaaccacagcatgtctgtgcagtttactaggcactgggacataggttagcc

SEQ ID NO: 17268 - DNA, 122 bp, Homo sapiens
  misc_feature (61)..(62): /note="This region represents a CpG dinucleotide"
  misc_feature (61)..(61): /note="Nucleotide may be methylated to form 5-methylcytosine"
caactcccattttaaattgcctgccatgctgagtagagtgaatcatccctctgtccagcacgtccatgctgcatattcttcccgctcattagtcacttggtagctgtcttggctgtcagatc

SEQ ID NO: 17269 - DNA, 122 bp, Homo sapiens
  misc_feature (61)..(62): /note="This region represents a CpG dinucleotide"
  misc_feature (61)..(61): /note="Nucleotide may be methylated to form 5-methylcytosine"
ccgggccgactatgacacactctccctgcgctcgctgcggctggggcccgggggcctggacgaccgctacagcctggtgtctgagcagctggagcccgcggccacctccacctacagggcct

SEQ ID NO: 17270 - DNA, 122 bp, Homo sapiens
  misc_feature (61)..(62): /note="This region represents a CpG dinucleotide"
  misc_feature (61)..(61): /note="Nucleotide may be methylated to form 5-methylcytosine"
ttccttgtctcagtttctaggactctattctattatgctatcactagtcctaatgggaggcgacctcatgcccgtcttacccaatagagcagactaggttgagtgctgtacctggaagttcc

SEQ ID NO: 17271 - DNA, 122 bp, Homo sapiens
  misc_feature (61)..(62): /note="This region represents a CpG dinucleotide"
  misc_feature (61)..(61): /note="Nucleotide may be methylated to form 5-methylcytosine"
cttgatagaatcaagaatatttgttacaatggggaagtacagtttttggatgaggagctacgaaagactgctgatctgttaacttaaggtccagctgctgcactgcctctgatgaaaagcat

SEQ ID NO: 17272 - DNA, 122 bp, Homo sapiens
  misc_feature (61)..(62): /note="This region represents a CpG dinucleotide"
  misc_feature (61)..(61): /note="Nucleotide may be methylated to form 5-methylcytosine"
tattctcatgctgctgcaaacagcgggtctccctccacattgccctccctgatcctaccacgcacaggaaaggattaatccatccctgtggtttgaagccaatgatctggaagtgggtggca

SEQ ID NO: 17273 - DNA, 122 bp, Homo sapiens
  misc_feature (61)..(62): /note="This region represents a CpG dinucleotide"
  misc_feature (61)..(61): /note="Nucleotide may be methylated to form 5-methylcytosine"
aggctgaaaaaagctggcctccgagcaggaggaagctcagagcacaaacctaggcctgggcgtggccactgggagctgctgatagcgaaccccagctcacaccagtttcttttttggtcgtg

SEQ ID NO: 17274 - DNA, 122 bp, Homo sapiens
  misc_feature (61)..(62): /note="This region represents a CpG dinucleotide"
  misc_feature (61)..(61): /note="Nucleotide may be methylated to form 5-methylcytosine"
caacttttctcaatcttacaaaattgttcttccaaatcatttaggtaatgtacactctcacgagcagcttatgggcagcttaagtaatcccatggagttactgaagtattaccaaggtatct

SEQ ID NO: 17275 - DNA, 122 bp, Homo sapiens
  misc_feature (61)..(62): /note="This region represents a CpG dinucleotide"
  misc_feature (61)..(61): /note="Nucleotide may be methylated to form 5-methylcytosine"
tggagagccagctcggccaccgccgtttctgggctgcccaggccagcaggctcacagtgacggagctcagccacccccgtttctgggctgcccaggccagcaggctcacagtgacggagctc

SEQ ID NO: 17276 - DNA, 122 bp, Homo sapiens
  misc_feature (61)..(62): /note="This region represents a CpG dinucleotide"
  misc_feature (61)..(61): /note="Nucleotide may be methylated to form 5-methylcytosine"
gttattcgggaattaggcatctgccctgatgatgctgctgtaatccccatcaaaaacaaccggttttatactattgaaatcctaaaggtagaataatggaagccctgtctgtttgccacacc

SEQ ID NO: 17277 - DNA, 122 bp, Homo sapiens
  misc_feature (61)..(62): /note="This region represents a CpG dinucleotide"
  misc_feature (61)..(61): /note="Nucleotide may be methylated to form 5-methylcytosine"
tggagagctgtattcgggtgctgtctgatgtaggtaagataccaagtcagtttggatatacgtgatgaaaatgaattgtctgacagtagtaaggctgccatttattgagcactcattacaac

SEQ ID NO: 17278 - DNA, 122 bp, Homo sapiens
  misc_feature (61)..(62): /note="This region represents a CpG dinucleotide"
  misc_feature (61)..(61): /note="Nucleotide may be methylated to form 5-methylcytosine"
aatgtttatgtgagtctccattattcatttctttgcctggaaatctttcaaaaaaacttacggagaataataaggaaagaacaataagaaacccccaccctacatacagagtatacacacac

SEQ ID NO: 17279 - DNA, 122 bp, Homo sapiens
  misc_feature (61)..(62): /note="This region represents a CpG dinucleotide"
  misc_feature (61)..(61): /note="Nucleotide may be methylated to form 5-methylcytosine"
tttgcctgactaatggatccttgaggaaactccccaaactcctggaatcagatatgaaaacgtttttcctttttgtgggagtagggggtagaagattatgacttttgttcctaagcaaggca

SEQ ID NO: 17280 - DNA, 122 bp, Homo sapiens
  misc_feature (61)..(62): /note="This region represents a CpG dinucleotide"
  misc_feature (61)..(61): /note="Nucleotide may be methylated to form 5-methylcytosine"
tcctatgtcatagaattgttgtgatgattaaatgagttattacatttaagtgattagaaccgtgcttagcacagaggaagcactcaaaagttaactactattagtgatgtctaaactttttt

SEQ ID NO: 17281 - DNA, 122 bp, Homo sapiens
  misc_feature (61)..(62): /note="This region represents a CpG dinucleotide"
  misc_feature (61)..(61): /note="Nucleotide may be methylated to form 5-methylcytosine"
ggcaccatccaaaaaggcaaataaatgccgaggtcacataagtgtcatacatctctggggcgatacactgcttaacagcaagtgagatcaagtttcaggttggatttgggcgagtgtgtgtg

SEQ ID NO: 17282 - DNA, 122 bp, Homo sapiens
  misc_feature (61)..(62): /note="This region represents a CpG dinucleotide"
  misc_feature (61)..(61): /note="Nucleotide may be methylated to form 5-methylcytosine"
ggaaggtgaaagtaaggaagaaatattttttcctgtagacacagttgtgcttcttacagacgatgcagtaacaaatgaggcaagagtctcagcagcaacagcagtggtagccatggacaaat

SEQ ID NO: 17283 - DNA, 122 bp, Homo sapiens
  misc_feature (61)..(62): /note="This region represents a CpG dinucleotide"
  misc_feature (61)..(61): /note="Nucleotide may be methylated to form 5-methylcytosine"
cacgacgcccccgtcacgacgcgcccccttcgtcacgtccccctcacgacctccccctcacgacgccttcctcacgacgtgccctcctcacgacgtccccgtcacgacgccctccacacgac

SEQ ID NO: 17284 - DNA, 122 bp, Homo sapiens
  misc_feature (61)..(62): /note="This region represents a CpG dinucleotide"
  misc_feature (61)..(61): /note="Nucleotide may be methylated to form 5-methylcytosine"
ctgatagattgagaacaagcttttaaagggcttaatcactttgtgtgcaaatatatcctgcgaaatacaagtgagtgtgacaggtttggcggaacattttgttagcagctagcttgtgctcc

SEQ ID NO: 17285 - DNA, 122 bp, Homo sapiens
  misc_feature (61)..(62): /note="This region represents a CpG dinucleotide"
  misc_feature (61)..(61): /note="Nucleotide may be methylated to form 5-methylcytosine"
atccagtctcccatctgcatagaagtatctcactctgcctttttctcttttctttagctacgcacagactcagagaagcgctcactggcagaaagtgggctgagctggtttagtgaatcaga

SEQ ID NO: 17286 - DNA, 122 bp, Homo sapiens
  misc_feature (61)..(62): /note="This region represents a CpG dinucleotide"
  misc_feature (61)..(61): /note="Nucleotide may be methylated to form 5-methylcytosine"
agaggcggggcagaggcggcacttacggggcctgcgtgcgtgtggtgaactccttgaactcgctgtcatggatggtgaagtagggacggaagtcgcagcagaacctgaggggctgcaggcag

SEQ ID NO: 17287 - DNA, 122 bp, Homo sapiens
  misc_feature (61)..(62): /note="This region represents a CpG dinucleotide"
  misc_feature (61)..(61): /note="Nucleotide may be methylated to form 5-methylcytosine"
caaggctcctgggtctttgcttgccttttcaaaagtgtttcaggcagtgaaacaggaacccgcataaaagctgggttcagataacaccgagatgggtcagcagctttgaatcccaacactcg

SEQ ID NO: 17288 - DNA, 122 bp, Homo sapiens
  misc_feature (61)..(62): /note="This region represents a CpG dinucleotide"
  misc_feature (61)..(61): /note="Nucleotide may be methylated to form 5-methylcytosine"
gagaaagcagctctgtccagattcatttgattaactagacaggcacatcaactatacacccgttcattgcattgcagtatcctgaaactcaggggcacttgaaggggaagaggaagtagctc

SEQ ID NO: 17289 - DNA, 122 bp, Homo sapiens
  misc_feature (61)..(62): /note="This region represents a CpG dinucleotide"
  misc_feature (61)..(61): /note="Nucleotide may be methylated to form 5-methylcytosine"
tgattaattcatctcactggaaatctggttgcagaaactccctgatgtcacagacacaaacgtaaaaaccaatcaataatttaaatttttacctttcgacaagctcttttgatggcactgac

SEQ ID NO: 17290 - DNA, 122 bp, Homo sapiens
  misc_feature (61)..(62): /note="This region represents a CpG dinucleotide"
  misc_feature (61)..(61): /note="Nucleotide may be methylated to form 5-methylcytosine"
atttgtactagaaataaggaactcagcatctcactcaccttagtttgtccttcaccagcccgtctttctctttctgagagcctttgtctccctctcttcatgtccaacaagcagagaaaaat

SEQ ID NO: 17291 - DNA, 122 bp, Homo sapiens
  misc_feature (61)..(62): /note="This region represents a CpG dinucleotide"
  misc_feature (61)..(61): /note="Nucleotide may be methylated to form 5-methylcytosine"
ggaagtgggtgtgtccaattcaggaagctacagggtattaggcatcaaacagcattacctcgtcatgaccagtggataaatgatgagttctgaattatatggggagaagagtatggagagga

SEQ ID NO: 17292 - DNA, 122 bp, Homo sapiens
  misc_feature (61)..(62): /note="This region represents a CpG dinucleotide"
  misc_feature (61)..(61): /note="Nucleotide may be methylated to form 5-methylcytosine"
tgaacccaggaggcggaggttgcagtgagccaaggttgcgccattgcactccagcctggacgacaggagtgaaactgcattgcaaaaacagcaacaaaaaaaatccattcatctagtttgtc

SEQ ID NO: 17293 - DNA, 122 bp, Homo sapiens
  misc_feature (61)..(62): /note="This region represents a CpG dinucleotide"
  misc_feature (61)..(61): /note="Nucleotide may be methylated to form 5-methylcytosine"
gtgctcagctggcacagagctgtagttcctgcagacctaccagggaggacagccagggatcgcatggttttgtaaattaaaatgcccaagctcagaggcctgcaaggacttaccttaaagca

SEQ ID NO: 17294 - DNA, 122 bp, Homo sapiens
  misc_feature (61)..(62): /note="This region represents a CpG dinucleotide"
  misc_feature (61)..(61): /note="Nucleotide may be methylated to form 5-methylcytosine"
gactcaagcttccttcttccaactcaatcaggatatgagagcattggtacatggtgacagcgttcaggaatcagatccaaggagagaaagatagcttcatgtatcaaagtggagatgtcctt

SEQ ID NO: 17295 - DNA, 122 bp, Homo sapiens
  misc_feature (61)..(62): /note="This region represents a CpG dinucleotide"
  misc_feature (61)..(61): /note="Nucleotide may be methylated to form 5-methylcytosine"
aaagaaattatgtgtgtcctttgaggtgctggctgcatagacaggaggggactggatcatcgggaagtgttccgcctccacacgccatcaaccactgaactgcatcgaatcagctgtaaaga

SEQ ID NO: 17296 - DNA, 122 bp, Homo sapiens
  misc_feature (61)..(62): /note="This region represents a CpG dinucleotide"
  misc_feature (61)..(61): /note="Nucleotide may be methylated to form 5-methylcytosine"
aagctgctggcagcccctggatcagacattcagtggaaggcccatgtcacagacccaacccgaaggttaattttccctcattagcatctccatagtctgctccttgcaagggatctcaggtc

SEQ ID NO: 17297 - DNA, 122 bp, Homo sapiens
  misc_feature (61)..(62): /note="This region represents a CpG dinucleotide"
  misc_feature (61)..(61): /note="Nucleotide may be methylated to form 5-methylcytosine"
ttttgtcttaacctcatataatactttagcttaaccctgataatgtgcagatattactgacgtgacaaaagcaagcacttggcctgttgattgtttacatagaggctgtgatataatcagac

SEQ ID NO: 17298 - DNA, 122 bp, Homo sapiens
  misc_feature (61)..(62): /note="This region represents a CpG dinucleotide"
  misc_feature (61)..(61): /note="Nucleotide may be methylated to form 5-methylcytosine"
ctccctggaggacagataggtgtggcagcctcagtggcctagagtggacagctggtttaccgatagtccttttttttgagacagagtcttggtctatcacccgggctggagtgcagtagtac

SEQ ID NO: 17299 - DNA, 122 bp, Homo sapiens
  misc_feature (61)..(62): /note="This region represents a CpG dinucleotide"
  misc_feature (61)..(61): /note="Nucleotide may be methylated to form 5-methylcytosine"
tattcagtccaaagcatgtgggggaggttgcatcagtcagggttcaatcagagaaacaaacgctcagagtgattcacatataagaagggacttataatagggtctaggccttattgaattgt

SEQ ID NO: 17300 - DNA, 122 bp, Homo sapiens
  misc_feature (61)..(62): /note="This region represents a CpG dinucleotide"
  misc_feature (61)..(61): /note="Nucleotide may be methylated to form 5-methylcytosine"
tcctagaaggagaaatggatgctaggagaaatcaagacggaataaatacatattcagaaacgggtgagaggtcaaagtttacacagacctagatgtctgtaaatacaagcacacataataat

SEQ ID NO: 17301 - DNA, 122 bp, Homo sapiens
  misc_feature (61)..(62): /note="This region represents a CpG dinucleotide"
  misc_feature (61)..(61): /note="Nucleotide may be methylated to form 5-methylcytosine"
actttctcttcagcctcttctataacatcaaaatatttgttgtctgtacttttctttctccgcagtggttttcttatctccttttctgttggtcacactgaaaccacctccaataccacatt

SEQ ID NO: 17302 - DNA, 122 bp, Homo sapiens
  misc_feature (61)..(62): /note="This region represents a CpG dinucleotide"
  misc_feature (61)..(61): /note="Nucleotide may be methylated to form 5-methylcytosine"
tgtgctcttggcctcataatccttggccatgttgtccagttgaaagtatttatggctgggcgctgtggctcacacctgtaatcctggcactttgggagactgaggcgggtggatcatgaggt

SEQ ID NO: 17303 - DNA, 122 bp, Homo sapiens
  misc_feature (61)..(62): /note="This region represents a CpG dinucleotide"
  misc_feature (61)..(61): /note="Nucleotide may be methylated to form 5-methylcytosine"
tcagggttggaggaagccggacaaagatgaatgggattcagagcctgaactcaaggtcaacgtcttctgaatcacaaagagctggtgggtcagtctgggagaagaaagaaaattctgcgcca

SEQ ID NO: 17304 - DNA, 122 bp, Homo sapiens
  misc_feature (61)..(62): /note="This region represents a CpG dinucleotide"
  misc_feature (61)..(61): /note="Nucleotide may be methylated to form 5-methylcytosine"
cctcctacggctgtcacgctccttcaataaaatatgacagaaaatgcacctggtttgtagcgatgctcagtaattgctggcggcagtaatgtgacagttatttttactgttgtttttatgaa

SEQ ID NO: 17305 - DNA, 122 bp, Homo sapiens
  misc_feature (61)..(62): /note="This region represents a CpG dinucleotide"
  misc_feature (61)..(61): /note="Nucleotide may be methylated to form 5-methylcytosine"
tgggattccacttacccatccttgattttatttgtcctctccacattgtcaatgtccattcggatcttgtacttgacatgatggggcagctcaatgctgcctggagtaattccagtgaacac

SEQ ID NO: 17306 - DNA, 122 bp, Homo sapiens
  misc_feature (61)..(62): /note="This region represents a CpG dinucleotide"
  misc_feature (61)..(61): /note="Nucleotide may be methylated to form 5-methylcytosine"
gaaaagaggatatgagcaaatgttactattttgaccacctgggcgcgctggtacgctctgcgttgtatcctctttatctgccagattgcggtgagtcagaccgcccattatctccacctgaa

SEQ ID NO: 17307 - DNA, 122 bp, Homo sapiens
  misc_feature (61)..(62): /note="This region represents a CpG dinucleotide"
  misc_feature (61)..(61): /note="Nucleotide may be methylated to form 5-methylcytosine"
ttaagcatgcattttaattttaactaaacctgccaggagtttgatatgagctccttgttgcgtgcagattgactcacaggattatcagaccaatgactgtaattgagaggaaagaacctagc

SEQ ID NO: 17308 - DNA, 122 bp, Homo sapiens
  misc_feature (61)..(62): /note="This region represents a CpG dinucleotide"
  misc_feature (61)..(61): /note="Nucleotide may be methylated to form 5-methylcytosine"
cacacagaatttaagctcacgactgcctataataatacacttgaatctagacttcttgaccgcagtctgcctttttgcaaacaatcagggattatcagggagtctgcagcaggaagtgcctc

SEQ ID NO: 17309 - DNA, 122 bp, Homo sapiens
  misc_feature (61)..(62): /note="This region represents a CpG dinucleotide"
  misc_feature (61)..(61): /note="Nucleotide may be methylated to form 5-methylcytosine"
cagagtcttacaggccactcgaggacgatttccttatagcagacgactgactatacttctcgagcagtgtttgctgagtgacatattaactcttgcttatggttccttgggaggagaaggcc

SEQ ID NO: 17310 - DNA, 122 bp, Homo sapiens
  misc_feature (61)..(62): /note="This region represents a CpG dinucleotide"
  misc_feature (61)..(61): /note="Nucleotide may be methylated to form 5-methylcytosine"
atcagtcccttctaaggtctgggcttccttttagaatgttagtgagtcatccctgagttgcgagatcccaaaggtacactaactgtaggctctgaagtaactttcagtaaattacaggcatc

SEQ ID NO: 17311 - DNA, 122 bp, Homo sapiens
  misc_feature (61)..(62): /note="This region represents a CpG dinucleotide"
  misc_feature (61)..(61): /note="Nucleotide may be methylated to form 5-methylcytosine"
tgcctccctttcctcacccttcatatagatgatgtataatttatcattcaaaccaggcgacgttggagactcgaagagggagctgtttctccaggacaacaggccaaaccagcactgtctta

SEQ ID NO: 17312 - DNA, 122 bp, Homo sapiens
  misc_feature (61)..(62): /note="This region represents a CpG dinucleotide"
  misc_feature (61)..(61): /note="Nucleotide may be methylated to form 5-methylcytosine"
aaattgtctacgcccaacccagctttcatttcttggggacacattgctggtcagccagtccgatgctggcactgatgggaaaacacagaaataatgtatgccccctggattgtcttaggggg

SEQ ID NO: 17313 - DNA, 122 bp, Homo sapiens
  misc_feature (61)..(62): /note="This region represents a CpG dinucleotide"
  misc_feature (61)..(61): /note="Nucleotide may be methylated to form 5-methylcytosine"
aatcactctaagtggtgttcctgtcaccctttaaggtagcctggtcagaattcctgcttccgggccctagcacctactctggcctgaccatttcagccaagggggaagggatgatgttgagg

SEQ ID NO: 17314 - DNA, 122 bp, Homo sapiens
  misc_feature (61)..(62): /note="This region represents a CpG dinucleotide"
  misc_feature (61)..(61): /note="Nucleotide may be methylated to form 5-methylcytosine"
tcccatccgaacctgcattaggactcaaatcctcggctgatcctggcagggctgggcctccgggcacagattagcacagaaaccccaggaactcaaagcacctgcaggcaaggatcactatg

SEQ ID NO: 17315 - DNA, 122 bp, Homo sapiens
  misc_feature (61)..(62): /note="This region represents a CpG dinucleotide"
  misc_feature (61)..(61): /note="Nucleotide may be methylated to form 5-methylcytosine"
gctttatagcaatgcttgaggttgggctgctaacaagctcactcaactagtgtttcctgacggccaacgtcagaataattccatctccatgagaagtacagaaagaaccacaaaccaaacct

SEQ ID NO: 17316 - DNA, 122 bp, Homo sapiens
  misc_feature (61)..(62): /note="This region represents a CpG dinucleotide"
  misc_feature (61)..(61): /note="Nucleotide may be methylated to form 5-methylcytosine"
tccatcagcaaactgcagttggtatctcctttaaaatgcaccaagaatcaggtcacttctcgacacacacattgcactcccattactcacagggattgctgcatagcctcctccctagtttc

SEQ ID NO: 17317 - DNA, 122 bp, Homo sapiens
  misc_feature (61)..(62): /note="This region represents a CpG dinucleotide"
  misc_feature (61)..(61): /note="Nucleotide may be methylated to form 5-methylcytosine"
ggagaaggggagcaaatatctgtctactccctcaactccacccagccatggcttgtcccacggccaagttgcctgggtccttgggatcaccaacttcttctgactctctacacacacacccc

SEQ ID NO: 17318 - DNA, 122 bp, Homo sapiens
  misc_feature (61)..(62): /note="This region represents a CpG dinucleotide"
  misc_feature (61)..(61): /note="Nucleotide may be methylated to form 5-methylcytosine"
cattcctgtataaagtgtctggtgacccctgctggggggctctcacccaggcaggaggcacgggatcccagacctgtgtaatgaagcactctagctgccccttggcagagggggtgtgttgt

SEQ ID NO: 17319 - DNA, 122 bp, Homo sapiens
  misc_feature (61)..(62): /note="This region represents a CpG dinucleotide"
  misc_feature (61)..(61): /note="Nucleotide may be methylated to form 5-methylcytosine"
tcctagagaaagagaccctttgttcctgggcctgtttcctaaaacaaagtacctcagagccgggaacagactgatgtgattagatagtgacttcctggtattggaaatggtgccagttactg

SEQ ID NO: 17320 - DNA, 122 bp, Homo sapiens
  misc_feature (61)..(62): /note="This region represents a CpG dinucleotide"
  misc_feature (61)..(61): /note="Nucleotide may be methylated to form 5-methylcytosine"
agagtgtcagctctaggaaggcagggtttgggttcatcgccgtatccccagtgcctagcacggggccgggcacagaggaggcacgggggctgatattgatgatataatcaaccagcgcagca

SEQ ID NO: 17321 - DNA, 122 bp, Homo sapiens
  misc_feature (61)..(62): /note="This region represents a CpG dinucleotide"
  misc_feature (61)..(61): /note="Nucleotide may be methylated to form 5-methylcytosine"
attgtacacaggagaaagataagaacttttctctcaacttccttcatgtacttcggcatgcgttcacacaaacctcacctcgacgttttgagaaggaaatgtatttgtggttcttcagttga

SEQ ID NO: 17322 - DNA, 122 bp, Homo sapiens
  misc_feature (61)..(62): /note="This region represents a CpG dinucleotide"
  misc_feature (61)..(61): /note="Nucleotide may be methylated to form 5-methylcytosine"
tgcaactcaggcccaggatgacaaatggtgtcttaggccattgttaacacagggaggtagcgaccagttgacgtgtgatttttaaatgctcagtgcagaataaatgaaatgatgccattgtc

SEQ ID NO: 17323 - DNA, 122 bp, Homo sapiens
  misc_feature (61)..(62): /note="This region represents a CpG dinucleotide"
  misc_feature (61)..(61): /note="Nucleotide may be methylated to form 5-methylcytosine"
tgatgacaatgtgagtgttcttgggatccggaagcattccctttgcagtgtcatagttaccgaagtaggcagcaggcagctcggtagataataccctgcacagacacgttaaagccttggta

SEQ ID NO: 17324 - DNA, 122 bp, Homo sapiens
  misc_feature (61)..(62): /note="This region represents a CpG dinucleotide"
  misc_feature (61)..(61): /note="Nucleotide may be methylated to form 5-methylcytosine"
tggaacagaggtgaatgtatgctggccactcttgcccctccaggagtcactgtctataaccgcataacacccaagaataccagaagtaagtgagtaataggagtaattctggcaggaattgg

SEQ ID NO: 17325 - DNA, 122 bp, Homo sapiens
  misc_feature (61)..(62): /note="This region represents a CpG dinucleotide"
  misc_feature (61)..(61): /note="Nucleotide may be methylated to form 5-methylcytosine"
ctttgacagggcagtcatatatctgcccacatactgcagcaaacacatctgggacatgaccgtcagctcaaacaagaatatcagtgaaatattcctatccaaaatgccctgcaacaaattac

SEQ ID NO: 17326 - DNA, 122 bp, Homo sapiens
  misc_feature (61)..(62): /note="This region represents a CpG dinucleotide"
  misc_feature (61)..(61): /note="Nucleotide may be methylated to form 5-methylcytosine"
attcccccttataaatagatgtcaggatacaggatatagaaggatcttcttcatgatcttcgtgctcatgaatttaaaaaaatattattgtaaaagaatcaagggcaggatgaataaatcag

SEQ ID NO: 17327 - DNA, 122 bp, Homo sapiens
  misc_feature (61)..(62): /note="This region represents a CpG dinucleotide"
  misc_feature (61)..(61): /note="Nucleotide may be methylated to form 5-methylcytosine"
ctcctaattgacctacttaaactcgctattcatcaaccacttgggcatcctgctgtcatccgttatccaatatgtttggctagtgagtggagttgggttacaacagcattattccaaaaatg

SEQ ID NO: 17328 - DNA, 122 bp, Homo sapiens
  misc_feature (61)..(62): /note="This region represents a CpG dinucleotide"
  misc_feature (61)..(61): /note="Nucleotide may be methylated to form 5-methylcytosine"
gttgagtaatgattacagcattttcaaagccttttgtttgcctttgcgttcaacacaaggcgtagatagaaaacgaacaggaaggttttatcttatctggctacagtttgcatcagcaactg

SEQ ID NO: 17329 - DNA, 122 bp, Homo sapiens
  misc_feature (61)..(62): /note="This region represents a CpG dinucleotide"
  misc_feature (61)..(61): /note="Nucleotide may be methylated to form 5-methylcytosine"
gttagaagatacctgaaggcagaaactgcggctttgtcaactgttgatttcctcatggcgcgcagtgtaaatttactagtactttatttagtagaggcttagtacttactggttggcagatt

SEQ ID NO: 17330 - DNA, 122 bp, Homo sapiens
  misc_feature (61)..(62): /note="This region represents a CpG dinucleotide"
  misc_feature (61)..(61): /note="Nucleotide may be methylated to form 5-methylcytosine"
agtctacaggaggaagtgagagaaagtaagagcaatactcatgggaagtgttcacatgctcgtgaaaacagcagcccttggattcaagagggaaacatttatttgccctctggacataaagt

SEQ ID NO: 17331 - DNA, 122 bp, Homo sapiens
  misc_feature (61)..(62): /note="This region represents a CpG dinucleotide"
  misc_feature (61)..(61): /note="Nucleotide may be methylated to form 5-methylcytosine"
cagcttgcagcgaccacccgatcccaggctgttcgctgaaggaggaggagaagcagcattcgcagccgcagcagcagcaacttgacccaagtaagtgcaaaagaaattgccccctgatttat

SEQ ID NO: 17332 - DNA, 122 bp, Homo sapiens
  misc_feature (61)..(62): /note="This region represents a CpG dinucleotide"
  misc_feature (61)..(61): /note="Nucleotide may be methylated to form 5-methylcytosine"
cagttcccttatctcagaaggccagaagacggctgtcaaaggtcacagggaaatcaaaggcggggtacagggccagagggaggaggaaacaacttcccggttgctttcagacgcttcagaga

SEQ ID NO: 17333 - DNA, 122 bp, Homo sapiens
  misc_feature (61)..(62): /note="This region represents a CpG dinucleotide"
  misc_feature (61)..(61): /note="Nucleotide may be methylated to form 5-methylcytosine"
caggagagtttgccagtagctccccagggttccagggtgtctgccagccttcctaggaatcgtgggcaggcttctaggtgccagtgactcaaactcctttttccacttcccagttcaacctg

SEQ ID NO: 17334 - DNA, 122 bp, Homo sapiens
  misc_feature (61)..(62): /note="This region represents a CpG dinucleotide"
  misc_feature (61)..(61): /note="Nucleotide may be methylated to form 5-methylcytosine"
actcaaggggataaacttacacaaaggtatgagtcagttaagccttctggcatggagccacgacaatgaagattcgtggccccttcagaataagcaggcggtcagccatcagaaaagatgga

SEQ ID NO: 17335 - DNA, 122 bp, Homo sapiens
  misc_feature (61)..(62): /note="This region represents a CpG dinucleotide"
  misc_feature (61)..(61): /note="Nucleotide may be methylated to form 5-methylcytosine"
gacttattgcagtgtctttttgaatgtgtttttacatgtcaactccactttacatgctttcgtatgaaggaatgacttgtgcccagagcagatgcatgcaactgtgtgtacatgtctgagtg

SEQ ID NO: 17336 - DNA, 122 bp, Homo sapiens
  misc_feature (61)..(62): /note="This region represents a CpG dinucleotide"
  misc_feature (61)..(61): /note="Nucleotide may be methylated to form 5-methylcytosine"
aaaatcaatcaatcaatctcgcttgctcagtgggcctcttggttctgtttctctggagaacgtaacacagatttttggtacggggaatagggtactgctgtaacaaatacctaacaatgggg

SEQ ID NO: 17337 - DNA, 122 bp, Homo sapiens
  misc_feature (61)..(62): /note="This region represents a CpG dinucleotide"
  misc_feature (61)..(61): /note="Nucleotide may be methylated to form 5-methylcytosine"
caggggaaacccagctgggccgaagccaggggctgtgtatttcaggaggaggtgacagagcggcagcagcaccaactcaactgtcagtatctgtggggccagctaagagaaggcagctatct

SEQ ID NO: 17338 - DNA, 122 bp, Homo sapiens
  misc_feature (61)..(62): /note="This region represents a CpG dinucleotide"
  misc_feature (61)..(61): /note="Nucleotide may be methylated to form 5-methylcytosine"
atgtaaggagaaacaggaccctcaatcaattaccgtcggctccaaaatggctgactttagcgaacacagcagaagatgctggctcatcagctctgtgttctaagttaatcccaggaaagcac

SEQ ID NO: 17339 - DNA, 122 bp, Homo sapiens
  misc_feature (61)..(62): /note="This region represents a CpG dinucleotide"
  misc_feature (61)..(61): /note="Nucleotide may be methylated to form 5-methylcytosine"
aagccctcctcctgcgcaccacatctggggcctccgaggagggacaaagcattcaactcccgggacctgtgggtgggaatgtccccaggcccagccctttagtgcctgctgatggctgtcac

SEQ ID NO: 17340 - DNA, 122 bp, Homo sapiens
  misc_feature (61)..(62): /note="This region represents a CpG dinucleotide"
  misc_feature (61)..(61): /note="Nucleotide may be methylated to form 5-methylcytosine"
tacatagcagagtaatctctttcaagtgtgatcacatcttggcatacccctgcctgagctcgtcatggcattcttgttatcatggcctgcagggcctggcacgatcttgcttttcctgctgt

SEQ ID NO: 17341 - DNA, 122 bp, Homo sapiens
  misc_feature (61)..(62): /note="This region represents a CpG dinucleotide"
  misc_feature (61)..(61): /note="Nucleotide may be methylated to form 5-methylcytosine"
aggatgttaaagaatgaggatgaacactcgagatcacgtgaggaggcttctatgaggagacgcaaatcctgctaagcccatggctgcagatattttttcccccaagtcctcagattagcggt

SEQ ID NO: 17342 - DNA, 122 bp, Homo sapiens
  misc_feature (61)..(62): /note="This region represents a CpG dinucleotide"
  misc_feature (61)..(61): /note="Nucleotide may be methylated to form 5-methylcytosine"
ccctgcctcggaccgcagggtgctgacctgccttccccaggtgccagtttctcatcagggcgtggtgcccgcccttatcccctgcatgtgacagtggaggcccagtccccaagtgtgggtgc

SEQ ID NO: 17343 - DNA, 122 bp, Homo sapiens
  misc_feature (61)..(62): /note="This region represents a CpG dinucleotide"
  misc_feature (61)..(61): /note="Nucleotide may be methylated to form 5-methylcytosine"
taacgagtattgggatatgaacccaagtctgattgatcataaaacccctgtcttttacaccgtacttcctctcagtacttgcagcagcaggaacatggagaaagggaagagttcatcagata

SEQ ID NO: 17344 - DNA, 122 bp, Homo sapiens
  misc_feature (61)..(62): /note="This region represents a CpG dinucleotide"
  misc_feature (61)..(61): /note="Nucleotide may be methylated to form 5-methylcytosine"
tgatttcagaagagggatttgaccttatggaagtccaaaaaataaaatattgatagatagcgaccacatagtgtggtttggtaagctgcatagtaaggtttataccctctaagaaaatagca

SEQ ID NO: 17345 - DNA, 122 bp, Homo sapiens
  misc_feature (61)..(62): /note="This region represents a CpG dinucleotide"
  misc_feature (61)..(61): /note="Nucleotide may be methylated to form 5-methylcytosine"
cttcttagtgtcactgtgaaattttccattacttcatctcacttcctgttctctcataagcgcgaacacggggctgtaatcatcgtctgaccaccacatgttagtgcactgtgtttcttgct

SEQ ID NO: 17346 - DNA, 122 bp, Homo sapiens
  misc_feature (61)..(62): /note="This region represents a CpG dinucleotide"
  misc_feature (61)..(61): /note="Nucleotide may be methylated to form 5-methylcytosine"
gccctcctgagtcccgggaggaaagtgctcgcccattcctgacctgtgacacgctcactgcgaaggcaggttattagaagagtcccatgaaagtaaacagggtattaaaacggatccttaaa

SEQ ID NO: 17347 - DNA, 122 bp, Homo sapiens
  misc_feature (61)..(62): /note="This region represents a CpG dinucleotide"
  misc_feature (61)..(61): /note="Nucleotide may be methylated to form 5-methylcytosine"
gtgcccgggacccccgtctccaggggtgccccagacccagagattagcctcccacttcggcgcagaaaacaaaagccctttgtgggacccgggcctttgtcttgggtgaggggagatttgca

SEQ ID NO: 17348 - DNA, 122 bp, Homo sapiens
  misc_feature (61)..(62): /note="This region represents a CpG dinucleotide"
  misc_feature (61)..(61): /note="Nucleotide may be methylated to form 5-methylcytosine"
ttggcaatcttcttcagtgttgtggcctcaatatcaagtacaacaatagcataaagtaggcgcttatttgttgaatgggtgagtgacgaatgaatacataaaatctatttccttagctggtg

SEQ ID NO: 17349 - DNA, 122 bp, Homo sapiens
  misc_feature (61)..(62): /note="This region represents a CpG dinucleotide"
  misc_feature (61)..(61): /note="Nucleotide may be methylated to form 5-methylcytosine"
actgtaacccagacctcctcctccccttcagagccacatatttacatgcttactggacatcgcttcttggatgtcttccaggtacctatcattagcatgtcctaactcatagtctttcccca

SEQ ID NO: 17350 - DNA, 122 bp, Homo sapiens
  misc_feature (61)..(62): /note="This region represents a CpG dinucleotide"
  misc_feature (61)..(61): /note="Nucleotide may be methylated to form 5-methylcytosine"
gtgcccgttattggccaattgtctcctacagccacagtggatcttttctacttggctctgcggtgttaaggctgggagtttgcaaattctcttgggtgtgggatctgggtgtcccaggctct

SEQ ID NO: 17351 - DNA, 122 bp, Homo sapiens
  misc_feature (61)..(62): /note="This region represents a CpG dinucleotide"
  misc_feature (61)..(61): /note="Nucleotide may be methylated to form 5-methylcytosine"
acgtttcagagattaatttcaaaatatggtttattccgggaggaagcagcatcctaagcacgtgacatttaaagaccaggctataaggaagtgcctctgcccccaggccaggtggcagctgt

SEQ ID NO: 17352 - DNA, 122 bp, Homo sapiens
  misc_feature (61)..(62): /note="This region represents a CpG dinucleotide"
  misc_feature (61)..(61): /note="Nucleotide may be methylated to form 5-methylcytosine"
cttgcttggtttctgtaatgaggaagttctccgcagctcagtttcctttccctcactgagcgcctgaaacaggaagtcagtcagttaagctggtggcagcagccgaggccaccaagaggcaa

SEQ ID NO: 17353 - DNA, 122 bp, Homo sapiens
  misc_feature (61)..(62): /note="This region represents a CpG dinucleotide"
  misc_feature (61)..(61): /note="Nucleotide may be methylated to form 5-methylcytosine"
gtgacattactggtgcataatctaacttatcctgactaatacagccaccttacacaataacgcatttaactttctcagataaagtcaagtaatggagaaggaagttccagagctagttgaca

SEQ ID NO: 17354 - DNA, 122 bp, Homo sapiens
  misc_feature (61)..(62): /note="This region represents a CpG dinucleotide"
  misc_feature (61)..(61): /note="Nucleotide may be methylated to form 5-methylcytosine"
ccatgtccatgttttcacgtgaatgggaaaagagtgggaagagaataagaggtatgctggcgataacaggataggcccaatagagagccctgagatcaggaatctgaacagacttgcagggt

SEQ ID NO: 17355 - DNA, 122 bp, Homo sapiens
  misc_feature (61)..(62): /note="This region represents a CpG dinucleotide"
  misc_feature (61)..(61): /note="Nucleotide may be methylated to form 5-methylcytosine"
tcaaggaggctaaagttcttccctgtgttcctatgaggataatttcacaaatacacagcacgtcccttcaaccacagattttgggcagagagaaggaaacaagaagaaggagaagaagagag

SEQ ID NO: 17356 - DNA, 122 bp, Homo sapiens
  misc_feature (61)..(62): /note="This region represents a CpG dinucleotide"
  misc_feature (61)..(61): /note="Nucleotide may be methylated to form 5-methylcytosine"
gccaatagcaaaaaagtgatcaggccagaaatcctgctgactcaggaaattctattctgccgttagacgaagctaaatatcagagcacctactctgccgtatattcttaatagggttcctgt

SEQ ID NO: 17357 - DNA, 122 bp, Homo sapiens
  misc_feature (61)..(62): /note="This region represents a CpG dinucleotide"
  misc_feature (61)..(61): /note="Nucleotide may be methylated to form 5-methylcytosine"
tcctctttcttcatctctttcagacacttataaatgtgcttcctctccctatgtaaatttcgtccaaatggcacaacgcaggcttgtcatgaggccattaataactcaccttttcacaggct

SEQ ID NO: 17358 - DNA, 122 bp, Homo sapiens
  misc_feature (61)..(62): /note="This region represents a CpG dinucleotide"
  misc_feature (61)..(61): /note="Nucleotide may be methylated to form 5-methylcytosine"
gcattaaagaatgacaagggggtagcgggcagggagcactggtcccctgggcctggcctccgcagaggtcgcagaagacctccctgaagagggtgcctgaggaccagggtggctgacgaggg

SEQ ID NO: 17359 - DNA, 122 bp, Homo sapiens
  misc_feature (61)..(62): /note="This region represents a CpG dinucleotide"
  misc_feature (61)..(61): /note="Nucleotide may be methylated to form 5-methylcytosine"
cccgaatttcctggagctccagagaccccacgtcaagaattcctagtgtatataaaagcccgtttgagctctaacatccatgattaacagtctctgggttgggtaactctgttggcttaaat

SEQ ID NO: 17360 - DNA, 122 bp, Homo sapiens
  misc_feature (61)..(62): /note="This region represents a CpG dinucleotide"
  misc_feature (61)..(61): /note="Nucleotide may be methylated to form 5-methylcytosine"
ctgagtctgtaccccggattcctttaccaaacactggatattagacactagatgcaaagccgtatttattccaaagccagaaacttcctaagcctctgcctaactcttcacaaatgaacctg

SEQ ID NO: 17361 - DNA, 122 bp, Homo sapiens
  misc_feature (61)..(62): /note="This region represents a CpG dinucleotide"
  misc_feature (61)..(61): /note="Nucleotide may be methylated to form 5-methylcytosine"
ggcatgctggtggaaattgggggaggaatgggtcaaattaatctccattcagcccccactcggtctttccaatgcctgctcagcaataagtgactcactgatggcttctgtgatgccacagc

SEQ ID NO: 17362 - DNA, 122 bp, Homo sapiens
  misc_feature (61)..(62): /note="This region represents a CpG dinucleotide"
  misc_feature (61)..(61): /note="Nucleotide may be methylated to form 5-methylcytosine"
tcagaatgcatctccttgccctaggcctttcgggggggacatggccttagacagtcaccccgaaattgggctcaggtcctcacagtaagtcgagtgtccccccacatccccaaccccggccc

SEQ ID NO: 17363 - DNA, 122 bp, Homo sapiens
  misc_feature (61)..(62): /note="This region represents a CpG dinucleotide"
  misc_feature (61)..(61): /note="Nucleotide may be methylated to form 5-methylcytosine"
attctaggcgctgcagacacagcagtgacccaaacagacaaaaccttgccctcatggaggcgacattccagtggagaagacaatcagtcaacccagccagtaagtaggtgattaaacagtaa

SEQ ID NO: 17364 - DNA, 122 bp, Homo sapiens
  misc_feature (61)..(62): /note="This region represents a CpG dinucleotide"
  misc_feature (61)..(61): /note="Nucleotide may be methylated to form 5-methylcytosine"
tttttttatgactggggaagaactgtctcagggtcagctgcagtagttaaggagatagaacgtcaagttgtcactgtgtgtgtgtctgtttctgaccggggagaagaacaatccaaacacag

SEQ ID NO: 17365 - DNA, 122 bp, Homo sapiens
  misc_feature (61)..(62): /note="This region represents a CpG dinucleotide"
  misc_feature (61)..(61): /note="Nucleotide may be methylated to form 5-methylcytosine"
actagcctaagagcacacagctagtaagtgaccaaaccaggaagaaaacccagttcaaggcgtgtcccctgctgtgtttgcaacaccgtcttggtctgcagccccaccgccacctgcggggc

SEQ ID NO: 17366 - DNA, 122 bp, Homo sapiens
  misc_feature (61)..(62): /note="This region represents a CpG dinucleotide"
  misc_feature (61)..(61): /note="Nucleotide may be methylated to form 5-methylcytosine"
aaacctcattttatagctgcttaaaaaccctgagaatagttgtacatggatctcagcaaacgtacaaaagaacacgcgttatcaaggcagagatctgcacacttgctagggaagacaagggt

SEQ ID NO: 17367 - DNA, 122 bp, Homo sapiens
  misc_feature (61)..(62): /note="This region represents a CpG dinucleotide"
  misc_feature (61)..(61): /note="Nucleotide may be methylated to form 5-methylcytosine"
agcctcaaccaggtgctctgtgatgtccctgtcatagctaagaagccaacaccatttaagcgttgggacgaagtgactcatggagacactttgccttttgctgggaattacctgatgacgca

SEQ ID NO: 17368 - DNA, 122 bp, Homo sapiens
  misc_feature (61)..(62): /note="This region represents a CpG dinucleotide"
  misc_feature (61)..(61): /note="Nucleotide may be methylated to form 5-methylcytosine"
ggatcaatcaagatcccataattactgggagttttaatcaactcatgccaattcagctgccgctcaatttgtgctggacttcggtgctcacaaggagggaagcggcgagggtggggtggggc

SEQ ID NO: 17369 - DNA, 122 bp, Homo sapiens
  misc_feature (61)..(62): /note="This region represents a CpG dinucleotide"
  misc_feature (61)..(61): /note="Nucleotide may be methylated to form 5-methylcytosine"
gattatgtcagcaacctgaaggagcttggaagtggattcctcccctgagcctccaggtgacggcccagccattgcacaacatggttgcagcctcatgacacgctgagcagagccaagccagc

SEQ ID NO: 17370 - DNA, 122 bp, Homo sapiens
  misc_feature (61)..(62): /note="This region represents a CpG dinucleotide"
  misc_feature (61)..(61): /note="Nucleotide may be methylated to form 5-methylcytosine"
tgctctattagctctgtgtataatacgccaaatttgcagaccagtcaataaagaattgtacgagcccctattgtgtgtgctggcaagagggagatgactgacacttgctttcaagtttccca

SEQ ID NO: 17371 - DNA, 122 bp, Homo sapiens
  misc_feature (61)..(62): /note="This region represents a CpG dinucleotide"
  misc_feature (61)..(61): /note="Nucleotide may be methylated to form 5-methylcytosine"
atgcttcctagaggcagatttcaacatcccattgcacaattccattcctcctcctcatatcgctttctgccttctttccccacttccctttggagatgaacttggcatgaaaggagagaggc

SEQ ID NO: 17372 - DNA, 122 bp, Homo sapiens
  misc_feature (61)..(62): /note="This region represents a CpG dinucleotide"
  misc_feature (61)..(61): /note="Nucleotide may be methylated to form 5-methylcytosine"
tagtttgctgatccctgatcaatgttctttctcatttccaggtctcacattgcctttagtcgtcagttcctcggcctttctttgtctttcatgaccttgatatctgtgaacagtcctggtca

SEQ ID NO: 17373 - DNA, 122 bp, Homo sapiens
  misc_feature (61)..(62): /note="This region represents a CpG dinucleotide"
  misc_feature (61)..(61): /note="Nucleotide may be methylated to form 5-methylcytosine"
atctccagataccactgtctactgattgagggactccaacttgatccagcaatcaagctacgtagacgaacagaaacagaattaaagcaattaagtgagtcaattcaactcaccacacttcg

SEQ ID NO: 17374 - DNA, 122 bp, Homo sapiens
  misc_feature (61)..(62): /note="This region represents a CpG dinucleotide"
  misc_feature (61)..(61): /note="Nucleotide may be methylated to form 5-methylcytosine"
tgcacccgtctatatttctttattaagcctaacgactggagtctttttcaaaaaagcacccgtctccaaatcctctcaattccagtgtggcaaacagcctctcacttacaacaaatagcaca

SEQ ID NO: 17375 - DNA, 122 bp, Homo sapiens
  misc_feature (61)..(62): /note="This region represents a CpG dinucleotide"
  misc_feature (61)..(61): /note="Nucleotide may be methylated to form 5-methylcytosine"
ccgccagggttttatgcttctgtacagacttctccccaccgctagtaccccaatgctcaccgtagtctctggcacatgcagtgtgttcatcaaatgtttgttgattgaccaaataaactatt

SEQ ID NO: 17376 - DNA, 122 bp, Homo sapiens
  misc_feature (61)..(62): /note="This region represents a CpG dinucleotide"
  misc_feature (61)..(61): /note="Nucleotide may be methylated to form 5-methylcytosine"
gccatctggaggaggaagagacctcatcagacaaaaggcaaagaaaccattagatacctacgaattgaggaagaagtaagcgactagttggaatagcatgttcttgctctcaagggaattgc

SEQ ID NO: 17377 - DNA, 122 bp, Homo sapiens
  misc_feature (61)..(62): /note="This region represents a CpG dinucleotide"
  misc_feature (61)..(61): /note="Nucleotide may be methylated to form 5-methylcytosine"
tgcacttccttctgctggttctcgcgcacctggcgccggagctcattggcatgctgtaagcgccctgtggcctttttctcctcctccagccgctccttctcaatctgttctctctgagccct

SEQ ID NO: 17378 - DNA, 122 bp, Homo sapiens
  misc_feature (61)..(62): /note="This region represents a CpG dinucleotide"
  misc_feature (61)..(61): /note="Nucleotide may be methylated to form 5-methylcytosine"
ttccattgttcatgtagttatgccttgaagaacatatgttgggaaagagaggctgtgttacgccacactgcctgtccactgaggccagaaaggatacctgaggacacaggaaatgtcacact

SEQ ID NO: 17379 - DNA, 122 bp, Homo sapiens
  misc_feature (61)..(62): /note="This region represents a CpG dinucleotide"
  misc_feature (61)..(61): /note="Nucleotide may be methylated to form 5-methylcytosine"
cacacctctttactggatattgccaaattgctcttcaaaacagttacatcaggcctggtgcggtggctcatgcctgtaatcccaggactttgaaaggtcaaggtgggcggatcacttgaggt

SEQ ID NO: 17380 - DNA, 122 bp, Homo sapiens
  misc_feature (61)..(62): /note="This region represents a CpG dinucleotide"
  misc_feature (61)..(61): /note="Nucleotide may be methylated to form 5-methylcytosine"
ccactcccagcccaggggactcagtaaacaagcagaaaattcttgtccctgggagctgtgcggggatcgtgcgtttggtgaggaattttcctctgtgcaagctggaggggaaacacagagat

SEQ ID NO: 17381 - DNA, 122 bp, Homo sapiens
  misc_feature (61)..(62): /note="This region represents a CpG dinucleotide"
  misc_feature (61)..(61): /note="Nucleotide may be methylated to form 5-methylcytosine"
ttacaaagttgagcgtgagcaatggagagaagccagtccagattggaacagtgtgactcacgagatggggttgagcacactgtcatcaccagctgccctctactgctgtactatcttttaca

SEQ ID NO: 17382 - DNA, 122 bp, Homo sapiens
  misc_feature (61)..(62): /note="This region represents a CpG dinucleotide"
  misc_feature (61)..(61): /note="Nucleotide may be methylated to form 5-methylcytosine"
ctcaattgcctttccagctctaggactctagaatcttcttattgtcaattctgcatctgccgtggcagtcctgcctatcctggcttctcagcaatcaccctccccaccagccgcaaggttag

SEQ ID NO: 17383 - DNA, 122 bp, Homo sapiens
  misc_feature (61)..(62): /note="This region represents a CpG dinucleotide"
  misc_feature (61)..(61): /note="Nucleotide may be methylated to form 5-methylcytosine"
tcctcaaaacaacaatataaggtagataccattattctcctcatgttacaaattaggaaacgtaggcacagtaaagtaaagtgacttatagaaagccacatagctagtgagtggtggagaca

SEQ ID NO: 17384 - DNA, 122 bp, Homo sapiens
  misc_feature (61)..(62): /note="This region represents a CpG dinucleotide"
  misc_feature (61)..(61): /note="Nucleotide may be methylated to form 5-methylcytosine"
gaaatgctgggcagaagtgaaagaaacacactgcagctgaggcatgatgctgttgggttacgcctacataaatctggtggctgcagcaatggctaggttcaaaactggactgacaaggtgtg

SEQ ID NO: 17385 - DNA, 122 bp, Homo sapiens
  misc_feature (61)..(62): /note="This region represents a CpG dinucleotide"
  misc_feature (61)..(61): /note="Nucleotide may be methylated to form 5-methylcytosine"
cttaatctgtctctgtccggctgtgtcttgtgccagctcttttcttctctttaaaatgttcgcttttatcacttcctggtattactatttctactatttagtctctgctaattcttctcaaa

SEQ ID NO: 17386 - DNA, 122 bp, Homo sapiens
  misc_feature (61)..(62): /note="This region represents a CpG dinucleotide"
  misc_feature (61)..(61): /note="Nucleotide may be methylated to form 5-methylcytosine"
aaatagtctgtaatttcctgtttctgcatttcccttcagtatctgtgacaggctgaagaacgatgactaaacgaagggaatttacacaagctagtctggtggtgtttgcaaaccatcgccat

SEQ ID NO: 17387 - DNA, 122 bp, Homo sapiens
  misc_feature (61)..(62): /note="This region represents a CpG dinucleotide"
  misc_feature (61)..(61): /note="Nucleotide may be methylated to form 5-methylcytosine"
ctaagacatggaagcagagtgactggcctgagctcacagcctgagctgggattcaagcctcgctctttcccaagactattctttccttgtgtttgatcccattaatcatcattctttttttt

SEQ ID NO: 17388 - DNA, 122 bp, Homo sapiens
  misc_feature (61)..(62): /note="This region represents a CpG dinucleotide"
  misc_feature (61)..(61): /note="Nucleotide may be methylated to form 5-methylcytosine"
atgttcactttacccttttatattgaaaacatcattttttgacagaatatagaaacaaaacgggaggttttatgtaccatagtgttaccatgtgcatgctctagaatcacactgatcagatt

SEQ ID NO: 17389 - DNA, 122 bp, Homo sapiens
  misc_feature (61)..(62): /note="This region represents a CpG dinucleotide"
  misc_feature (61)..(61): /note="Nucleotide may be methylated to form 5-methylcytosine"
tccctttcaacaccagcttcttgtttctctataccttctagggaaatgaatacagctgggcgtggtggcagatgcctgtaatcccaaccactcaggaggctgaggcaggagaattgcttgaa

SEQ ID NO: 17390 - DNA, 122 bp, Homo sapiens
  misc_feature (61)..(62): /note="This region represents a CpG dinucleotide"
  misc_feature (61)..(61): /note="Nucleotide may be methylated to form 5-methylcytosine"
ccacggcagaggaacctgcaactagcttccccatgggggcctcctgactctgacattctacgagcctatgacacaccctttgtgtggtggacgctgtattgaattcaagtctctaagttaca

SEQ ID NO: 17391 - DNA, 122 bp, Homo sapiens
  misc_feature (61)..(62): /note="This region represents a CpG dinucleotide"
  misc_feature (61)..(61): /note="Nucleotide may be methylated to form 5-methylcytosine"
gtttgcttttacttcttatagcatggtcttactagctgctttaaaatctttgtctgataacgccaacatttgtgtcatcttggggttggcatctgttggctgccttccctggcaagtacatg

SEQ ID NO: 17392 - DNA, 122 bp, Homo sapiens
  misc_feature (61)..(62): /note="This region represents a CpG dinucleotide"
  misc_feature (61)..(61): /note="Nucleotide may be methylated to form 5-methylcytosine"
cacacgcagcaacactggtaatactgcttcccatattcattctttggtcttcactgacagcgtgaagaagcaactattgctgattcatcagttactcattttcacaatggtcagtactccaa

SEQ ID NO: 17393 - DNA, 122 bp, Homo sapiens
  misc_feature (61)..(62): /note="This region represents a CpG dinucleotide"
  misc_feature (61)..(61): /note="Nucleotide may be methylated to form 5-methylcytosine"
caaacaggagctcctaagaggaaagacagaaagacacagagaactggacaaacagagaggcggggcctggggggagtgtcatctaggaagcatttactgagctcctgagccaggctctggga

SEQ ID NO: 17394 - DNA, 122 bp, Homo sapiens
  misc_feature (61)..(62): /note="This region represents a CpG dinucleotide"
  misc_feature (61)..(61): /note="Nucleotide may be methylated to form 5-methylcytosine"
ccaacagttaaacccagctgtaactaattctgaaggtcctattctatccacagatgtatacgtttaagcataagtgttagattagataaaggaaacacaagcttttactgtatattcttaga

SEQ ID NO: 17395 - DNA, 122 bp, Homo sapiens
  misc_feature (61)..(62): /note="This region represents a CpG dinucleotide"
  misc_feature (61)..(61): /note="Nucleotide may be methylated to form 5-methylcytosine"
ctgtggccacaccaccaacgtccccagcgtgtccactgaatgtgattggaatcaactgcacggtagagcaggaataagctggagtcagactgacctagtttaaattccatcgctagagctgt

SEQ ID NO: 17396 - DNA, 122 bp, Homo sapiens
  misc_feature (61)..(62): /note="This region represents a CpG dinucleotide"
  misc_feature (61)..(61): /note="Nucleotide may be methylated to form 5-methylcytosine"
tacttcagaacacagtgaggacttatgtaaaccatctacacagggcatgacatatactaccgcagaaaaatgattgttgatgtcactttcattaccaccactctaccctcagcacttcaata

SEQ ID NO: 17397 - DNA, 122 bp, Homo sapiens
  misc_feature (61)..(62): /note="This region represents a CpG dinucleotide"
  misc_feature (61)..(61): /note="Nucleotide may be methylated to form 5-methylcytosine"
cttagaaaatggacacagagcttgtccagctaaataaacctgcctgatttggagccatttcgtgttggggattgtttgctactacaccacaccctgggtgatctggcgggtgcattgcctta

SEQ ID NO: 17398 - DNA, 122 bp, Homo sapiens
  misc_feature (61)..(62): /note="This region represents a CpG dinucleotide"
  misc_feature (61)..(61): /note="Nucleotide may be methylated to form 5-methylcytosine"
gagtccccatgcttgggtacacaccagccgtgcccctactttcactgttcttccttaggacgttatttaatccccgcagaaaggacatcgtctcacctgtagcaaggagctaacatcataat

SEQ ID NO: 17399 - DNA, 122 bp, Homo sapiens
  misc_feature (61)..(62): /note="This region represents a CpG dinucleotide"
  misc_feature (61)..(61): /note="Nucleotide may be methylated to form 5-methylcytosine"
ttcattagcaagactaaacataatcatgcctatgaaagtgtggtagcctctaaaacattacgcaaatagccaagtattatcattatttctgttagtaatgaaacaatatatgcgtgtcagat

SEQ ID NO: 17400 - DNA, 122 bp, Homo sapiens
  misc_feature (61)..(62): /note="This region represents a CpG dinucleotide"
  misc_feature (61)..(61): /note="Nucleotide may be methylated to form 5-methylcytosine"
aaatggaatatttaaggtatatgagaatgccaaacagaataaaagaaatgatggcacaatcgctaccagaggaaagcagtactaatgaaataaaaagatgataagaattgaaagtaaacaca

SEQ ID NO: 17401 - DNA, 122 bp, Homo sapiens
  misc_feature (61)..(62): /note="This region represents a CpG dinucleotide"
  misc_feature (61)..(61): /note="Nucleotide may be methylated to form 5-methylcytosine"
gatattgattatgaggctgttaaaatatttttggctactgttgcctcaaatgtatttgaacgaactctaattccatagaatgttactaaatgttgcataggggaaaacagaagtgtctgtag

SEQ ID NO: 17402 - DNA, 122 bp, Homo sapiens
  misc_feature (61)..(62): /note="This region represents a CpG dinucleotide"
  misc_feature (61)..(61): /note="Nucleotide may be methylated to form 5-methylcytosine"
cacaaagatgagcagcctggggtttcggggagaatgtacagacacgcaaagcggtcgggccggcctgtgactcgtgggctctgcaaaaggctttcagttgttctccgggagccgattctacc

SEQ ID NO: 17403 - DNA, 122 bp, Homo sapiens
  misc_feature (61)..(62): /note="This region represents a CpG dinucleotide"
  misc_feature (61)..(61): /note="Nucleotide may be methylated to form 5-methylcytosine"
gggcttgggtagagcatgtgccctaaaaagcctgcatagagaagaagcatttcttgcctacgaaaaatccagcctgagtcacagccccaggaaggcccctgctgtcttgggtggcaataatg

SEQ ID NO: 17404 - DNA, 122 bp, Homo sapiens
  misc_feature (61)..(62): /note="This region represents a CpG dinucleotide"
  misc_feature (61)..(61): /note="Nucleotide may be methylated to form 5-methylcytosine"
caaactatctttgcaatgcttaaaagaaacactgagatcaggggtcagtaaagtttccatcgagtcccataaagtaaatatttgaggctttatgggccatacagtctgtttagtataagacg

SEQ ID NO: 17405 - DNA, 122 bp, Homo sapiens
  misc_feature (61)..(62): /note="This region represents a CpG dinucleotide"
  misc_feature (61)..(61): /note="Nucleotide may be methylated to form 5-methylcytosine"
acaggcgttgcaagaatcagattcactttggacgactcttcacattccaagtcatcattgcgttaggcagcacaattccatctctggttgatgggcagaaaaagtgggcagcttgccaggta

SEQ ID NO: 17406 - DNA, 122 bp, Homo sapiens
  misc_feature (61)..(62): /note="This region represents a CpG dinucleotide"
  misc_feature (61)..(61): /note="Nucleotide may be methylated to form 5-methylcytosine"
tggcacagggtgagcaatgagtcaattaattacagctgcttaatctataatggatgctgacgcgtagtgagcaggaacttagctttgtcacactgcaccacgagactcctttgcaagctaat

SEQ ID NO: 17407 - DNA, 122 bp, Homo sapiens
  misc_feature (61)..(62): /note="This region represents a CpG dinucleotide"
  misc_feature (61)..(61): /note="Nucleotide may be methylated to form 5-methylcytosine"
cttccctttgtgtggcctgaagaccacattctgatcaacaggaagtaagcagtcgtgttgcgtaacaacccacagcaagctttaccagacagcttgtgtgtgccctttgtcccttctcttct

SEQ ID NO: 17408 - DNA, 122 bp, Homo sapiens
  misc_feature (61)..(62): /note="This region represents a CpG dinucleotide"
  misc_feature (61)..(61): /note="Nucleotide may be methylated to form 5-methylcytosine"
gaaccttaagacgcattaaactctaagctacttggaagctgcttcttctgtttgtggacacgcagatttgccacagttgaaatcactggccacgtgctgtcttgtgtgtgtttgtcacttaa

SEQ ID NO: 17409 - DNA, 122 bp, Homo sapiens
  misc_feature (61)..(62): /note="This region represents a CpG dinucleotide"
  misc_feature (61)..(61): /note="Nucleotide may be methylated to form 5-methylcytosine"
ctcatgttttctacaacaaagctcaaacaataaccacaacacttcctgcctctctcttaccggaaatagtgtctctgtgagaaacttgaagtcttggaagttctcaggctgaagtcaagctg

SEQ ID NO: 17410 - DNA, 122 bp, Homo sapiens
  misc_feature (61)..(62): /note="This region represents a CpG dinucleotide"
  misc_feature (61)..(61): /note="Nucleotide may be methylated to form 5-methylcytosine"
ctttccatccatcttgttcccaccccccgtcatccccccaacccaatgataaatccaggccgttaatccgtaatgacgtagatcgatccatagtccacattaacggctcctcactttcgagt

SEQ ID NO: 17411 - DNA, 122 bp, Homo sapiens
  misc_feature (61)..(62): /note="This region represents a CpG dinucleotide"
  misc_feature (61)..(61): /note="Nucleotide may be methylated to form 5-methylcytosine"
gctgtgagaacgaagtctgaggactgccgtggagaaagcgtggccagagcccagtggagacggaagatgaagacactgctgagaagcaccagccagggcctgctccccaaagcatcggactg

SEQ ID NO: 17412 - DNA, 122 bp, Homo sapiens
  misc_feature (61)..(62): /note="This region represents a CpG dinucleotide"
  misc_feature (61)..(61): /note="Nucleotide may be methylated to form 5-methylcytosine"
cttccttcccttgcttcccatttggttcagaagacacatgttttgtataattgagagtagcgatagaggggtgtgttctgaaattctggttaatttccctcagggaacaaaggacagcagag

SEQ ID NO: 17413 - DNA, 122 bp, Homo sapiens
  misc_feature (61)..(62): /note="This region represents a CpG dinucleotide"
  misc_feature (61)..(61): /note="Nucleotide may be methylated to form 5-methylcytosine"
acttggaactccaggctcaggtcagtttgtaaatactcaaaacccaaacccatatattctcgttccttctcctgctcccttttcctcctcctcctcaccccacactagccacatagactctg

SEQ ID NO: 17414 - DNA, 122 bp, Homo sapiens
  misc_feature (61)..(62): /note="This region represents a CpG dinucleotide"
  misc_feature (61)..(61): /note="Nucleotide may be methylated to form 5-methylcytosine"
aggcagcccccacaggaagtgagaggcagccacacacacctcggcttgcattctgggttgcgaaagaaaccatgtggggactgtggagacctcactcaccctccagcctgcccctacctggg

SEQ ID NO: 17415 - DNA, 122 bp, Homo sapiens
  misc_feature (61)..(62): /note="This region represents a CpG dinucleotide"
  misc_feature (61)..(61): /note="Nucleotide may be methylated to form 5-methylcytosine"
caggggaaacactgtgatgggtattatgcaatatgcctttccctctctctctgctttttccgcactgctgtagcacttgaccttctgtggtagtggtttctgtgtgggcccctcagtaacag

SEQ ID NO: 17416 - DNA, 122 bp, Homo sapiens
  misc_feature (61)..(62): /note="This region represents a CpG dinucleotide"
  misc_feature (61)..(61): /note="Nucleotide may be methylated to form 5-methylcytosine"
aagcacaattttattttacccatttaaaattatgtgtgcattgacaccaaccttcatgcacgtgacccataacccagcaagaattatttcattcatagaaagtcaccaaggcctacttagtc

SEQ ID NO: 17417 - DNA, 122 bp, Homo sapiens
  misc_feature (61)..(62): /note="This region represents a CpG dinucleotide"
  misc_feature (61)..(61): /note="Nucleotide may be methylated to form 5-methylcytosine"
ccatgcatttgtttcttttaatatggcaccatgtggaagtgtagttttgctcaactcatacgtgtgtgaaagaaagcatagtgaatatgactaagtgcataggcccaggaaccagatgacct

SEQ ID NO: 17418 - DNA, 122 bp, Homo sapiens
  misc_feature (61)..(62): /note="This region represents a CpG dinucleotide"
  misc_feature (61)..(61): /note="Nucleotide may be methylated to form 5-methylcytosine"
ctgctctctcctctgacagtccgtaattgagcaggtctcgtgggatacctgaaatgcacccgcttcccggcccatgcaggaggtaaaccgcctctcccaccgcctgcatgcactgctcacac

SEQ ID NO: 17419 - DNA, 122 bp, Homo sapiens
  misc_feature (61)..(62): /note="This region represents a CpG dinucleotide"
  misc_feature (61)..(61): /note="Nucleotide may be methylated to form 5-methylcytosine"
atagcagtgcctgggccccactcccagagattttgatataaagataattttaaaacttctcgagtcattgagaatcactgcttttaaagggaaacacgtcattgtaaagaacacgttgttta

SEQ ID NO: 17420 - DNA, 122 bp, Homo sapiens
  misc_feature (61)..(62): /note="This region represents a CpG dinucleotide"
  misc_feature (61)..(61): /note="Nucleotide may be methylated to form 5-methylcytosine"
tatgtaagcaactctcacagaagtggcaagcaccctttgcaaatgatttctccatttagtcgagcaacttttagagaagacagaaatgtcttgtattgttggtgtaatgccatattataaaa

SEQ ID NO: 17421 - DNA, 122 bp, Homo sapiens
  misc_feature (61)..(62): /note="This region represents a CpG dinucleotide"
  misc_feature (61)..(61): /note="Nucleotide may be methylated to form 5-methylcytosine"
gaagaagtctttatacttgcagggtctttgtacctttggaaatgagccctgtttatttcacgatactaatgcattactagcatatctggtgctttatcagttttcagttgcttttgcatacg

SEQ ID NO: 17422 - DNA, 122 bp, Homo sapiens
  misc_feature (61)..(62): /note="This region represents a CpG dinucleotide"
  misc_feature (61)..(61): /note="Nucleotide may be methylated to form 5-methylcytosine"
gggcagcagctgccatatggccacagtcagctggatcagatgtttataagcttccttcttcgtccctctctgtcctctcagcctcctaatttgatcacggctaccttgtgagctgccctcca

SEQ ID NO: 17423 - DNA, 122 bp, Homo sapiens
  misc_feature (61)..(62): /note="This region represents a CpG dinucleotide"
  misc_feature (61)..(61): /note="Nucleotide may be methylated to form 5-methylcytosine"
ttgtcccgggacacctaggctagggtggggagagacgggccctggtggtggctcgggaggcgaagcgttgtcctcagccccgcgtggaactcgtgtctggcacagcctggctgtggcctaac

SEQ ID NO: 17424 - DNA, 122 bp, Homo sapiens
  misc_feature (61)..(62): /note="This region represents a CpG dinucleotide"
  misc_feature (61)..(61): /note="Nucleotide may be methylated to form 5-methylcytosine"
ctttggcaattctaggttggcagtttgcatccagggggtcctggttgcctttcagcttcccgtttcactctcccccagactgtgttgaatgctggtcaaactccgttagttgagttttagct

SEQ ID NO: 17425 - DNA, 122 bp, Homo sapiens
  misc_feature (61)..(62): /note="This region represents a CpG dinucleotide"
  misc_feature (61)..(61): /note="Nucleotide may be methylated to form 5-methylcytosine"
gaaacagaggaagccagtgtttagagagactcgcaatgggcacacagagacaaacagaggcgggcttcagacaaactgaaagagcaacctcagcacaggacagtttggtttctgattctatt

SEQ ID NO: 17426 - DNA, 122 bp, Homo sapiens
  misc_feature (61)..(62): /note="This region represents a CpG dinucleotide"
  misc_feature (61)..(61): /note="Nucleotide may be methylated to form 5-methylcytosine"
tccagaggtgcagtcagactgcctgggttggctcatgcctgggtctgtcattgtgggcagcgtgaccagcctaaacctcagttttctcttttgtcacctatgtgctaaaaatacttatttct

SEQ ID NO: 17427 - DNA, 122 bp, Homo sapiens
  misc_feature (61)..(62): /note="This region represents a CpG dinucleotide"
  misc_feature (61)..(61): /note="Nucleotide may be methylated to form 5-methylcytosine"
tttaagaatgactcattctcaacccaagtacgtctgccatgtcgggttaggcaggttgtgcgctgcacaagggcacccacccgaggaaatggagggtttcaaatccaggctgcaatccgctt

SEQ ID NO: 17428 - DNA, 122 bp, Homo sapiens
  misc_feature (61)..(62): /note="This region represents a CpG dinucleotide"
  misc_feature (61)..(61): /note="Nucleotide may be methylated to form 5-methylcytosine"
caaacaaacaagaaaataatttatgaaagtcaagagcctgataaacagtcaccacccattcgtaatctgtgctgccacacctctagccagcagatctgccatcttttgaaatgagtatcaac

SEQ ID NO: 17429 - DNA, 122 bp, Homo sapiens
  misc_feature (61)..(62): /note="This region represents a CpG dinucleotide"
  misc_feature (61)..(61): /note="Nucleotide may be methylated to form 5-methylcytosine"
ctgggtttccatccagtttacctttgtgagccccaactttacaaatgtgctgctttttttcgcaaggactcagctttatgtaacataacctatttcctccaagggcacccagccctcccaat

SEQ ID NO: 17430 - DNA, 122 bp, Homo sapiens
  misc_feature (61)..(62): /note="This region represents a CpG dinucleotide"
  misc_feature (61)..(61): /note="Nucleotide may be methylated to form 5-methylcytosine"
ttgactcaggaggtaaaaatgtcaacaggccacaacctccagggctcctggaattggagacgaagccagttctgagcttatgcaaccataggacagtgagagagggccatggactcgattta

SEQ ID NO: 17431 - DNA, 122 bp, Homo sapiens
  misc_feature (61)..(62): /note="This region represents a CpG dinucleotide"
  misc_feature (61)..(61): /note="Nucleotide may be methylated to form 5-methylcytosine"
gaactcacagggctgtaacactgttactgtacagagaggaccaggacgatgccagcaccccgtttatcctgagtgaactctccggaggcctcttcaagcttgtgggttctctgctgtcttga

SEQ ID NO: 17432 - DNA, 122 bp, Homo sapiens
  misc_feature (61)..(62): /note="This region represents a CpG dinucleotide"
  misc_feature (61)..(61): /note="Nucleotide may be methylated to form 5-methylcytosine"
cttttgaatgttactattttacatagtatatgaaaatcccaacactgtcagctaccctgtcgcttttcaaatagggagtatgtatgtgtgtttatgactagtgttgggatgtggctggttta

SEQ ID NO: 17433 - DNA, 122 bp, Homo sapiens
  misc_feature (61)..(62): /note="This region represents a CpG dinucleotide"
  misc_feature (61)..(61): /note="Nucleotide may be methylated to form 5-methylcytosine"
catcagtatcctctgccatgatgacgatatctacacatctgaatcacccaggacatttttcgtacaatcagactttacaaacctggctgtagatttttgtttttgtttttttttttagtgta

SEQ ID NO: 17434 - DNA, 122 bp, Homo sapiens
  misc_feature (61)..(62): /note="This region represents a CpG dinucleotide"
  misc_feature (61)..(61): /note="Nucleotide may be methylated to form 5-methylcytosine"
gcctgagctctagagcattccaacctggaaaaattctttctataatccaagactaggctccggaagctctcttcctcatttttcagatttacagatcatctgacacaagatgagctgtaagt

SEQ ID NO: 17435 - DNA, 122 bp, Homo sapiens
  misc_feature (61)..(62): /note="This region represents a CpG dinucleotide"
  misc_feature (61)..(61): /note="Nucleotide may be methylated to form 5-methylcytosine"
tgattcaacagtaacggcacaccctgccaggaagacatttccatgtgacacagtttttgacgtttaatagcagcataaattttcaaaaggcaaacaaggtatgttagcttcatgataggaag

SEQ ID NO: 17436 - DNA, 122 bp, Homo sapiens
  misc_feature (61)..(62): /note="This region represents a CpG dinucleotide"
  misc_feature (61)..(61): /note="Nucleotide may be methylated to form 5-methylcytosine"
ggtgaagagtaccacattattaccaatgcccaggacagatgccaagctgggcagtgatggcgtgcagaaaagcctcaggggaaagacacagcagaaggggagagggagcatttctgtctttg

SEQ ID NO: 17437 - DNA, 122 bp, Homo sapiens
  misc_feature (61)..(62): /note="This region represents a CpG dinucleotide"
  misc_feature (61)..(61): /note="Nucleotide may be methylated to form 5-methylcytosine"
ggaaccagccagggttcagagggctccacaaagccgatggctgccctgaaacaggaacagcgaggaaggaaggaggaactggtatatttctacacagaaatccccatgtggtttaaacttga

SEQ ID NO: 17438 - DNA, 122 bp, Homo sapiens
  misc_feature (61)..(62): /note="This region represents a CpG dinucleotide"
  misc_feature (61)..(61): /note="Nucleotide may be methylated to form 5-methylcytosine"
tgcctgcccaaaggcttctggctgggcttgctcttcctggacacttggtgctgtggtctgcgtgtttctcacctccgaaactcgtgttgaaatgtaattctcaacgtagcaggatggagggg

SEQ ID NO: 17439 - DNA, 122 bp, Homo sapiens
  misc_feature (61)..(62): /note="This region represents a CpG dinucleotide"
  misc_feature (61)..(61): /note="Nucleotide may be methylated to form 5-methylcytosine"
tgcaatagactgggagagggctgggcgggtgagcacacaggcgtgacctctagtgagcttcgacaccccagcctctgcgtcactctgagaattacagctttgtagcttcgtatcccttttca

SEQ ID NO: 17440 - DNA, 122 bp, Homo sapiens
  misc_feature (61)..(62): /note="This region represents a CpG dinucleotide"
  misc_feature (61)..(61): /note="Nucleotide may be methylated to form 5-methylcytosine"
gtactctactggtttagaggtcctagtacccaagaggagaatgcttcctctaggagaacacggcaatagtcccattgagttaagtgagactgccacctggcttctggggctccttatagcat

SEQ ID NO: 17441 - DNA, 122 bp, Homo sapiens
  misc_feature (61)..(62): /note="This region represents a CpG dinucleotide"
  misc_feature (61)..(61): /note="Nucleotide may be methylated to form 5-methylcytosine"
tttctaaaaccaacccaactgcttttctttacaattttggccttagcaaacagatgagtccgttgacttgagcattgcttgggcactgtctgtgtgcaggtcaggcaggggatgctggtggc

SEQ ID NO: 17442 - DNA, 122 bp, Homo sapiens
  misc_feature (61)..(62): /note="This region represents a CpG dinucleotide"
  misc_feature (61)..(61): /note="Nucleotide may be methylated to form 5-methylcytosine"
tggcaaaaatgggacaggaagagtttgcacttggttttttgtgaaagaatgttagaaatacgtgaaaccgttggtagtattttgactatcacctgaaaggtactaaatgttaaactagtaat

SEQ ID NO: 17443 - DNA, 122 bp, Homo sapiens
  misc_feature (61)..(62): /note="This region represents a CpG dinucleotide"
  misc_feature (61)..(61): /note="Nucleotide may be methylated to form 5-methylcytosine"
ccaagggaaaaagggcaggtggctgcccgggagcagtcaagcgtgctctttctaataacacgctccagtcctgggtaggctctcgtattattccacacaccctcaggatgggaaacagaaac

SEQ ID NO: 17444 - DNA, 122 bp, Homo sapiens
  misc_feature (61)..(62): /note="This region represents a CpG dinucleotide"
  misc_feature (61)..(61): /note="Nucleotide may be methylated to form 5-methylcytosine"
cagcccgccccggcggagggcaaccccttaatgagccttagcaggtggcatgtgggccagcgtgtcccagcacgagacgttcttgtgctgggtcccttcagctttagcctcagtgggcaatt

SEQ ID NO: 17445 - DNA, 122 bp, Homo sapiens
  misc_feature (61)..(62): /note="This region represents a CpG dinucleotide"
  misc_feature (61)..(61): /note="Nucleotide may be methylated to form 5-methylcytosine"
catgagccacttcacccagcccaatcactgtcttttaattgtggaattttacttggcaagcgtctccttgtcaacatagtaagacttttttcccctacattatttttatatttatataacaa

SEQ ID NO: 17446 - DNA, 122 bp, Homo sapiens
  misc_feature (61)..(62): /note="This region represents a CpG dinucleotide"
  misc_feature (61)..(61): /note="Nucleotide may be methylated to form 5-methylcytosine"
cccttaatgccttatgctaattcctgttggtaacatgaatgacaagagacggaatcagtgcgaatccaggtggtgcaaagtagactgactggtatcccgcaccccctttcctccctggggag

SEQ ID NO: 17447 - DNA, 122 bp, Homo sapiens
  misc_feature (61)..(62): /note="This region represents a CpG dinucleotide"
  misc_feature (61)..(61): /note="Nucleotide may be methylated to form 5-methylcytosine"
acagttcaccaattgtgcatgttatttcctgcagtgggcccaagatcactgacaggatgccgtcggggttgggctgaaggtggaaacagcacactagcttgctgtttgtggcctctttacaa

SEQ ID NO: 17448 - DNA, 122 bp, Homo sapiens
  misc_feature (61)..(62): /note="This region represents a CpG dinucleotide"
  misc_feature (61)..(61): /note="Nucleotide may be methylated to form 5-methylcytosine"
tggaatcgggacgctgcctatcccgtcattcttgtcatgcctatttttggtggttggaatcgcatgagcagcaaacacctgttgttgattttgcaggagaggcatggagagcaggtgcagca

SEQ ID NO: 17449 - DNA, 122 bp, Homo sapiens
  misc_feature (61)..(62): /note="This region represents a CpG dinucleotide"
  misc_feature (61)..(61): /note="Nucleotide may be methylated to form 5-methylcytosine"
gaaactatatatggtaaaatctatttcttaaacacagccttactgcacacaatgaaagaacgaagtcaccaagtcttaaaatgattgacatgggggaggaatttcaaggattaagatgatac

SEQ ID NO: 17450 - DNA, 122 bp, Homo sapiens
  misc_feature (61)..(62): /note="This region represents a CpG dinucleotide"
  misc_feature (61)..(61): /note="Nucleotide may be methylated to form 5-methylcytosine"
ttccttcagcactatttcctggactgttctgtgattgtttctcttgcttcacaaacctgccgtataaaggatgtggtaatccctggaggtgaacttgcaaaatagactccagggctgccaga

SEQ ID NO: 17451 - DNA, 122 bp, Homo sapiens
  misc_feature (61)..(62): /note="This region represents a CpG dinucleotide"
  misc_feature (61)..(61): /note="Nucleotide may be methylated to form 5-methylcytosine"
acaacaaatagctgttgagatcgcatcaaaccctgaacaataaggagcaatataaccttacgtgctaggtgtcatgtgcctgatatgagaagcatctggtgacatgggtgaaggagtgtcag

SEQ ID NO: 17452 - DNA, 122 bp, Homo sapiens
  misc_feature (61)..(62): /note="This region represents a CpG dinucleotide"
  misc_feature (61)..(61): /note="Nucleotide may be methylated to form 5-methylcytosine"
aattggcacatgagcctgctcattacctctgattcaagaaacagcctgtggtcatagcaccgttgccaatgtcctgtgggctgagctataaatgtggtaaagagtgaggatgactgactttt

SEQ ID NO: 17453 - DNA, 122 bp, Homo sapiens
  misc_feature (61)..(62): /note="This region represents a CpG dinucleotide"
  misc_feature (61)..(61): /note="Nucleotide may be methylated to form 5-methylcytosine"
gcctgccctctctggcctcagtttaccccctgtactgctgggcgagggatcagggcatagcgaaggaccatttcagctccgctggtgccacactgctgaagtcctggccgctttttcctgca

SEQ ID NO: 17454 - DNA, 122 bp, Homo sapiens
  misc_feature (61)..(62): /note="This region represents a CpG dinucleotide"
  misc_feature (61)..(61): /note="Nucleotide may be methylated to form 5-methylcytosine"
agcaagacagtggatctgagctccatccccgcagtctgcactggccccttcatggcacagcgacagctttgccatcagccggcaagcatgcggggtgtggacgacacagccggagagagcag

SEQ ID NO: 17455 - DNA, 122 bp, Homo sapiens
  misc_feature (61)..(62): /note="This region represents a CpG dinucleotide"
  misc_feature (61)..(61): /note="Nucleotide may be methylated to form 5-methylcytosine"
attaaatctcctctctttataaattacccagtctcagaaatgtctttataacagtgaaaacggactaagacaggtgtctaagcagaaggaacagcttggacaaaggctcagaggtagtagag

SEQ ID NO: 17456 - DNA, 122 bp, Homo sapiens
  misc_feature (61)..(62): /note="This region represents a CpG dinucleotide"
  misc_feature (61)..(61): /note="Nucleotide may be methylated to form 5-methylcytosine"
agacaaagttaaagcttaggatagggaatatatatgtatgtgtatatgaaatgatgtcttcgagttttaacttccagcctgagatggcctagatttggtgtgttagtttgtttcactgaagt

SEQ ID NO: 17457 - DNA, 122 bp, Homo sapiens
  misc_feature (61)..(62): /note="This region represents a CpG dinucleotide"
  misc_feature (61)..(61): /note="Nucleotide may be methylated to form 5-methylcytosine"
aagattgtgggggcggatggcaagataggacagtgcagggagaatattccaggatggtatcgtgggagccccaaggcaggcagacattgaaagctggccaccaaggctagaatacaatgaat

SEQ ID NO: 17458 - DNA, 122 bp, Homo sapiens
  misc_feature (61)..(62): /note="This region represents a CpG dinucleotide"
  misc_feature (61)..(61): /note="Nucleotide may be methylated to form 5-methylcytosine"
tctttctttggcctctcagcttcctgggactctggggcaggtttggatagtcctgccaaccgcagaacactcatcaaggtgggagtggaaactgctgcagagaagaatcccatttgtgtttg

SEQ ID NO: 17459 - DNA, 122 bp, Homo sapiens
  misc_feature (61)..(62): /note="This region represents a CpG dinucleotide"
  misc_feature (61)..(61): /note="Nucleotide may be methylated to form 5-methylcytosine"
cccggggaggagtttatcaggctgatgtggagtgaggaatgcatgtggcatgctagcatgcgggttctgtaagcctctgtctgtgtatgcttagtaaaacacagctgaagaaagtccacaaa

SEQ ID NO: 17460 - DNA, 122 bp, Homo sapiens
  misc_feature (61)..(62): /note="This region represents a CpG dinucleotide"
  misc_feature (61)..(61): /note="Nucleotide may be methylated to form 5-methylcytosine"
agaaggctttgcactcgtcacacctacgcatcttgtctccaggaggtaacagggagggtgcgggggaggctgctgagtggttttgaaattatacagagctggatttgaacccctttcagcga

SEQ ID NO: 17461 - DNA, 122 bp, Homo sapiens
  misc_feature (61)..(62): /note="This region represents a CpG dinucleotide"
  misc_feature (61)..(61): /note="Nucleotide may be methylated to form 5-methylcytosine"
acccatatgagctccacatgcatgtggctcccctgccaggaacaggcctccctgtcctcccgtacaacctcactgccgccacttgtcactcagcagatgttgcctgagtccctgccatgtga

SEQ ID NO: 17462 - DNA, 122 bp, Homo sapiens
  misc_feature (61)..(62): /note="This region represents a CpG dinucleotide"
  misc_feature (61)..(61): /note="Nucleotide may be methylated to form 5-methylcytosine"
tccctttctctttcccacagatcctaatgggaccatacttcctatattctcagccaccagcgggtgagcattttgctaatccaggcagactggatgtgcttcagctctgtgggctttagggc

SEQ ID NO: 17463 - DNA, 122 bp, Homo sapiens
  misc_feature (61)..(62): /note="This region represents a CpG dinucleotide"
  misc_feature (61)..(61): /note="Nucleotide may be methylated to form 5-methylcytosine"
gaggttaatgacttgccggagatgggagttccaatcggcagcagatcagcaaatggaatgcgggtgtcctggcccgtgatctaagtctcctgattcatagtctaatgttcttttgtctacac

SEQ ID NO: 17464 - DNA, 122 bp, Homo sapiens
  misc_feature (61)..(62): /note="This region represents a CpG dinucleotide"
  misc_feature (61)..(61): /note="Nucleotide may be methylated to form 5-methylcytosine"
acatctctgaaggttatgccggtttacattccttcagcagtccgaccagtccccagcagccgcaccctcgctaaccccagggcaagttacatacagagtggcctgctgtgccaaaggagcta

SEQ ID NO: 17465 - DNA, 122 bp, Homo sapiens
  misc_feature (61)..(62): /note="This region represents a CpG dinucleotide"
  misc_feature (61)..(61): /note="Nucleotide may be methylated to form 5-methylcytosine"
cctggctcccttcagggaagcctgccctggcaacaccccacccttttgagctcttacatgcgcagccacaccctgcccatggcaggactcaccccactgtgtatgtgtggtcacaggcacga

SEQ ID NO: 17466 - DNA, 122 bp, Homo sapiens
  misc_feature (61)..(62): /note="This region represents a CpG dinucleotide"
  misc_feature (61)..(61): /note="Nucleotide may be methylated to form 5-methylcytosine"
gcagaaaccattttatgactagctggactagtgcctgtaccctgtagtaatctggactaccgcttgttgcttaagttcaggtaaacttaatgggtcttctccttttgcttgaaattcaactg

SEQ ID NO: 17467 - DNA, 122 bp, Homo sapiens
  misc_feature (61)..(62): /note="This region represents a CpG dinucleotide"
  misc_feature (61)..(61): /note="Nucleotide may be methylated to form 5-methylcytosine"
caagcttcccacatccccaagccacaccccaggccctgtgctgggcacagcccccaactgcgtgccacctgcggtttggccaaacctgaaccgccacatgactcctgtttggttccttcttc

SEQ ID NO: 17468 - DNA, 122 bp, Homo sapiens
  misc_feature (61)..(62): /note="This region represents a CpG dinucleotide"
  misc_feature (61)..(61): /note="Nucleotide may be methylated to form 5-methylcytosine"
cccactgggcacccgctagggaaacaatgggagggatgaaaacagagaaggaaaagaaagcggatccagggttcccacctccctgggtgaacccgactatcaatgcccacattagacaaaag

SEQ ID NO: 17469 - DNA, 122 bp, Homo sapiens
  misc_feature (61)..(62): /note="This region represents a CpG dinucleotide"
  misc_feature (61)..(61): /note="Nucleotide may be methylated to form 5-methylcytosine"
ggggaaggcaaaaagggaacttgcaacagagaccagccttatcgcgctgatacactaggtcgcctgggtggggtgctcaatccctgtttgtggggatgttgaggaatcaggaaacatgaaat

SEQ ID NO: 17470 - DNA, 122 bp, Homo sapiens
  misc_feature (61)..(62): /note="This region represents a CpG dinucleotide"
  misc_feature (61)..(61): /note="Nucleotide may be methylated to form 5-methylcytosine"
tactgagtgtgaggaatcttgtgtggctgctgaggaatttagctgccactttccaggcaccggaacaatgtgcccattcgtggattaaggaaaccatgacctcaagcctcctaatcctcctc

SEQ ID NO: 17471 - DNA, 122 bp, Homo sapiens
  misc_feature (61)..(62): /note="This region represents a CpG dinucleotide"
  misc_feature (61)..(61): /note="Nucleotide may be methylated to form 5-methylcytosine"
cagcccaggcagagataaggacccacgtcagtgccagccccacccacctgacagataaggcggtggtgctcccacaggaggccccagaaatccagcccagccctcagatctcccttggagct

SEQ ID NO: 17472 - DNA, 122 bp, Homo sapiens
  misc_feature (61)..(62): /note="This region represents a CpG dinucleotide"
  misc_feature (61)..(61): /note="Nucleotide may be methylated to form 5-methylcytosine"
cctcccgccccacggggagtcatctgcttgaggaaggaaagacacattgccgggctacagcgcagggcccattgtcatgctgagccacccttgcttccctgcaggcctcctgagtcgcagcc

SEQ ID NO: 17473 - DNA, 122 bp, Homo sapiens
  misc_feature (61)..(62): /note="This region represents a CpG dinucleotide"
  misc_feature (61)..(61): /note="Nucleotide may be methylated to form 5-methylcytosine"
gcagttgggcactgggtgttctccctttaaaaggttacagtgttaactgacacatagtaacgtgcccagatgagaaagactgagatgacttcaggactttcagccatgtaacaggaagcatg

SEQ ID NO: 17474 - DNA, 122 bp, Homo sapiens
  misc_feature (61)..(62): /note="This region represents a CpG dinucleotide"
  misc_feature (61)..(61): /note="Nucleotide may be methylated to form 5-methylcytosine"
gaaagtgctaattttaagaaacagtcaggaaactatcccaaacagctgaggttgagcccgcgggtgtgcctactacatagattggagcaaatctatgtaacccaatggcccttgtcaacctt

SEQ ID NO: 17475 - DNA, 122 bp, Homo sapiens
  misc_feature (61)..(62): /note="This region represents a CpG dinucleotide"
  misc_feature (61)..(61): /note="Nucleotide may be methylated to form 5-methylcytosine"
cttctgggaaggaggagagcagacacagagacacacaggagggcgacacggaggcacaggcggagactgcagtggaatcatgcttccacaagccgaggaacaccgacggctgccggcacacc

SEQ ID NO: 17476 - DNA, 122 bp, Homo sapiens
  misc_feature (61)..(62): /note="This region represents a CpG dinucleotide"
  misc_feature (61)..(61): /note="Nucleotide may be methylated to form 5-methylcytosine"
caatgataaatccaggccgttaatccgtaatgacgtagatcgatccatagtccacattaacggctcctcactttcgagtccggctaatggacatcagttgggacttaaggccaacaaataat

SEQ ID NO: 17477 - DNA, 122 bp, Homo sapiens
  misc_feature (61)..(62): /note="This region represents a CpG dinucleotide"
  misc_feature (61)..(61): /note="Nucleotide may be methylated to form 5-methylcytosine"
aaagcgcagaagacgttagaagaaacctgcagaagcaggctgggcttgcagggatgaatacgtcacattgatgagcaatagctaagcaggtgttggtaaacggggacgcagtaagccgcgag

SEQ ID NO: 17478 - DNA, 122 bp, Homo sapiens
  misc_feature (61)..(62): /note="This region represents a CpG dinucleotide"
  misc_feature (61)..(61): /note="Nucleotide may be methylated to form 5-methylcytosine"
aggactctgtcggccctgacagtgtggctggacttgatcttgtgggcaatggaaggccaccgctgtgtcttgaccgacaacatgattagatctgcatgtcggaaacgtggttctggctgacc

SEQ ID NO: 17479 - DNA, 122 bp, Homo sapiens
  misc_feature (61)..(62): /note="This region represents a CpG dinucleotide"
  misc_feature (61)..(61): /note="Nucleotide may be methylated to form 5-methylcytosine"
taaccagtgttgcctcattcagctcaaacagatttcatagccaaagcaaaaggactggtacggtagtctgtggaaaccaggaagataaaacaacagccacaaaagagaaaatcaagagtgtt

SEQ ID NO: 17480 - DNA, 122 bp, Homo sapiens
  misc_feature (61)..(62): /note="This region represents a CpG dinucleotide"
  misc_feature (61)..(61): /note="Nucleotide may be methylated to form 5-methylcytosine"
cttgtctcagctctccactgtaccccattagctcagagcctgtgcttggtaaaaactcaacgagtatttctgaaatgacagcctgcaagctactgtagcaaagccaggcctccactgatagg

SEQ ID NO: 17481 - DNA, 122 bp, Homo sapiens
  misc_feature (61)..(62): /note="This region represents a CpG dinucleotide"
  misc_feature (61)..(61): /note="Nucleotide may be methylated to form 5-methylcytosine"
gtcagagcctgtgttcttaaccaccaggaaacacatggctttagacttttaccacagacacgtgcgcccaatatgcaaaccagccaacccacaaaaactgctttgcatttttaagcagttgc

SEQ ID NO: 17482 - DNA, 122 bp, Homo sapiens
  misc_feature (61)..(62): /note="This region represents a CpG dinucleotide"
  misc_feature (61)..(61): /note="Nucleotide may be methylated to form 5-methylcytosine"
attgcatggtgctacattcctttccattacatactttctttgtcgacctgagttttcagccgttgctgaaataaaagcaagtattgcacaagaatcagtttggtgttccatccaattccaaa

SEQ ID NO: 17483 - DNA, 122 bp, Homo sapiens
  misc_feature (61)..(62): /note="This region represents a CpG dinucleotide"
  misc_feature (61)..(61): /note="Nucleotide may be methylated to form 5-methylcytosine"
ggtcagccaaacacagcttcagagcctgggcttctgctccctccacccaccagcccccagcgggccctttcatgggctgggtcactaactgacatccttccaggaaggaaggaaggcgttcc

SEQ ID NO: 17484 - DNA, 122 bp, Homo sapiens
  misc_feature (61)..(62): /note="This region represents a CpG dinucleotide"
  misc_feature (61)..(61): /note="Nucleotide may be methylated to form 5-methylcytosine"
ataagtgtacagtggagtttttcagaagctacatgatatgtattgacaccatggttcccacgatgaatagaatgtgtgcctatgtattctcgtgttttaaatttttctcacttttaagttct

SEQ ID NO: 17485 - DNA, 122 bp, Homo sapiens
  misc_feature (61)..(62): /note="This region represents a CpG dinucleotide"
  misc_feature (61)..(61): /note="Nucleotide may be methylated to form 5-methylcytosine"
ctgtgatttagagagaaaatttgtctcttaaggctgacaaaatcctgtggtcttggtccccgtgcttcaagcctacaaggaattccagtagaatattaaaaggattctgagtctccctagga

SEQ ID NO: 17486 - DNA, 122 bp, Homo sapiens
  misc_feature (61)..(62): /note="This region represents a CpG dinucleotide"
  misc_feature (61)..(61): /note="Nucleotide may be methylated to form 5-methylcytosine"
tggcacgttatgtaaacactatgatccttcacttctgaacacccatgttcacgggtcagacgagacagggcactcttgtcagcaagcgtgtcacacctcaccagcctctggctgcagatcag

SEQ ID NO: 17487 - DNA, 122 bp, Homo sapiens
  misc_feature (61)..(62): /note="This region represents a CpG dinucleotide"
  misc_feature (61)..(61): /note="Nucleotide may be methylated to form 5-methylcytosine"
ggcggtctccaattcctgggcccacttggaggtaaaataggacccaggaagccaatcccacgccctggtatgaagggaaaaccagggaggaaacatggaactctccaaatacatttccctgt

SEQ ID NO: 17488 - DNA, 122 bp, Homo sapiens
  misc_feature (61)..(62): /note="This region represents a CpG dinucleotide"
  misc_feature (61)..(61): /note="Nucleotide may be methylated to form 5-methylcytosine"
gtgctctctcaggagttaccacagagaagaaaatccaagctaccagtatgtgggtcaaaacgtaaactccctgaattgtgattgcagcctccatgccacatatatcaaggaatctaatcaac

SEQ ID NO: 17489 - DNA, 122 bp, Homo sapiens
  misc_feature (61)..(62): /note="This region represents a CpG dinucleotide"
  misc_feature (61)..(61): /note="Nucleotide may be methylated to form 5-methylcytosine"
caagatgagaagtggtgcattcttcccacccgtgcacgccccaggacttgaaagtgtaggcgtctgtgaacacagggctgcaggcaccttcatggaccccaggtaacagcagcaatagatgt

SEQ ID NO: 17490 - DNA, 122 bp, Homo sapiens
  misc_feature (61)..(62): /note="This region represents a CpG dinucleotide"
  misc_feature (61)..(61): /note="Nucleotide may be methylated to form 5-methylcytosine"
gaaatagagtgggggattccggggtgggcaacaaatgcatggtgcttgtcactcacaagacggaaaattgggtttctgttgtaaaatattgtttacttaatagcaccgcttaagtactattt

SEQ ID NO: 17491 - DNA, 122 bp, Homo sapiens
  misc_feature (61)..(62): /note="This region represents a CpG dinucleotide"
  misc_feature (61)..(61): /note="Nucleotide may be methylated to form 5-methylcytosine"
ttttgaaatgcaggatgtagacacagaccacaaaaccattctagtttctgcagcggagaacgcaatatgagtatctgtctcaaggtcatttcctgataatattatcttccagtaatttgagg

SEQ ID NO: 17492 - DNA, 122 bp, Homo sapiens
  misc_feature (61)..(62): /note="This region represents a CpG dinucleotide"
  misc_feature (61)..(61): /note="Nucleotide may be methylated to form 5-methylcytosine"
cattggcaccagtaaggttttgaggagctggcaggcttcaactgataagtgagggtggtgcgtaaacccagtctgagagttgcagcaggtcgtctcagtagtcgttagacaaaactggtttc

SEQ ID NO: 17493 - DNA, 122 bp, Homo sapiens
  misc_feature (61)..(62): /note="This region represents a CpG dinucleotide"
  misc_feature (61)..(61): /note="Nucleotide may be methylated to form 5-methylcytosine"
ctcctgacattgctaaagatgatcatgaagacatttatccagtctctcctgcctccctttcgcccatcccttcagaagcttatgtcaagtgtgacaggctaggtgatgaatgggtagaaagt

SEQ ID NO: 17494 - DNA, 122 bp, Homo sapiens
  misc_feature (61)..(62): /note="This region represents a CpG dinucleotide"
  misc_feature (61)..(61): /note="Nucleotide may be methylated to form 5-methylcytosine"
gacaagtaggccaagcaggctctgactcatagaggttgctgcctgcttgtgccctgtgtgcgccttttgagtaaagagcacagtccaccaagtccagctctgcatgctcaagtgctattgaa

SEQ ID NO: 17495 - DNA, 122 bp, Homo sapiens
  misc_feature (61)..(62): /note="This region represents a CpG dinucleotide"
  misc_feature (61)..(61): /note="Nucleotide may be methylated to form 5-methylcytosine"
ctcgagtgaccaggccccatggccacacccaaatacaccatgtctccaggtgcagtgtggcgtagatgttagaattcctacagtgctactccctagctgtgaggctttgggtgacttaacct

SEQ ID NO: 17496 - DNA, 122 bp, Homo sapiens
  misc_feature (61)..(62): /note="This region represents a CpG dinucleotide"
  misc_feature (61)..(61): /note="Nucleotide may be methylated to form 5-methylcytosine"
tggtataattaagggtgaaaataaggcccctctgtatttctattcccctttgcttttctgcggagcttttacctcagaggaaagttgttttagtaatctgggaaagagaaaccatgtgctga

SEQ ID NO: 17497 - DNA, 122 bp, Homo sapiens
  misc_feature (61)..(62): /note="This region represents a CpG dinucleotide"
  misc_feature (61)..(61): /note="Nucleotide may be methylated to form 5-methylcytosine"
agctataatagaggaaaacgaaaggtttctcaaaatagaactaacattttcccttgcttccgattaagcaatgactcttacacaagactttctgtgtaatttctctttatgtaagtcctgat

SEQ ID NO: 17498 - DNA, 122 bp, Homo sapiens
  misc_feature (61)..(62): /note="This region represents a CpG dinucleotide"
  misc_feature (61)..(61): /note="Nucleotide may be methylated to form 5-methylcytosine"
cactcgggggtggcggggcccggcaacctctgtattaacaagccctgcaggtgatcgtgacgcactctgaagtttgagaagcactgttctagaagagctgctagatgtatatatggtgatct

SEQ ID NO: 17499 - DNA, 122 bp, Homo sapiens
  misc_feature (61)..(62): /note="This region represents a CpG dinucleotide"
  misc_feature (61)..(61): /note="Nucleotide may be methylated to form 5-methylcytosine"
cactgagtattgggagaacagactatttatggaggagctctgggtattaaagcattgttgcgcaaattcaaacagcacaggggattggcgtctcatctcagctagcagtaaagaatacggac

SEQ ID NO: 17500 - DNA, 122 bp, Homo sapiens
  misc_feature (61)..(62): /note="This region represents a CpG dinucleotide"
  misc_feature (61)..(61): /note="Nucleotide may be methylated to form 5-methylcytosine"
ggtttcacaatatactttaagcatacattttacttgttgtgaacaggaacctgacatcctcggtctacagtttggtacacttgatattgccaagctgttttcatgacagtaaaggggatggt

SEQ ID NO: 17501 - DNA, 122 bp, Homo sapiens
  misc_feature (61)..(62): /note="This region represents a CpG dinucleotide"
  misc_feature (61)..(61): /note="Nucleotide may be methylated to form 5-methylcytosine"
atccaaccagttcaaacacacttctaggacaaaacctagaaatgagcatactgaccagaacgtcaaagtaaagttaaagtaaaaaatgaatgaggggtatggtagaatcatgagttagttaa

SEQ ID NO: 17502 - DNA, 122 bp, Homo sapiens
  misc_feature (61)..(62): /note="This region represents a CpG dinucleotide"
  misc_feature (61)..(61): /note="Nucleotide may be methylated to form 5-methylcytosine"
ttcatcatgcaccagtgcttccttgttacggacactattgcacatgagcacagaaatgcacgctttgcttaggaaaaagaatttccatcagatgtggtggaaggatttctttttattcattt

SEQ ID NO: 17503 - DNA, 122 bp, Homo sapiens
  misc_feature (61)..(62): /note="This region represents a CpG dinucleotide"
  misc_feature (61)..(61): /note="Nucleotide may be methylated to form 5-methylcytosine"
atttgttccaagatgcaatgttctgccttcccttccaagcacaggcatctccaaggaaggcgagaaaaatcagaaacagagcgcctccgctgtgcccctaagcttggccaggagttggcctc

SEQ ID NO: 17504 - DNA, 122 bp, Homo sapiens
  misc_feature (61)..(62): /note="This region represents a CpG dinucleotide"
  misc_feature (61)..(61): /note="Nucleotide may be methylated to form 5-methylcytosine"
ccaagtggaaactgagttaccccgtgaagaagacgagttctatttatggtcagaatgccacgctcaagggccagtgaaggcctgtgggcttttctgaatatttctctaaggtcttctaggga

SEQ ID NO: 17505 - DNA, 122 bp, Homo sapiens
  misc_feature (61)..(62): /note="This region represents a CpG dinucleotide"
  misc_feature (61)..(61): /note="Nucleotide may be methylated to form 5-methylcytosine"
aggcttgaaaacaggtcaagaaatactgctatttaggttagtcatttcacctcaataactcgaagtacctaaacatagacttttttttttttttttgagacggagtttcgttcttgttgccc

SEQ ID NO: 17506 - DNA, 122 bp, Homo sapiens
  misc_feature (61)..(62): /note="This region represents a CpG dinucleotide"
  misc_feature (61)..(61): /note="Nucleotide may be methylated to form 5-methylcytosine"
cagaagttcttccaagaagaggttgagactttaatgtagcatgacacattgaggccacttcggctggtcagcagtgtttgtgaacagtgtgtcaagtcacctgaccaagcagaggttaggaa

SEQ ID NO: 17507 - DNA, 122 bp, Homo sapiens
  misc_feature (61)..(62): /note="This region represents a CpG dinucleotide"
  misc_feature (61)..(61): /note="Nucleotide may be methylated to form 5-methylcytosine"
agatatctgaactgaccatattgaggaaatgggaggaggcagagaactggaaactgtagacggtgactaagccctgcttctggtatgggaaattgcttaaagctatattcaaaatggacgct

SEQ ID NO: 17508 - DNA, 122 bp, Homo sapiens
  misc_feature (61)..(62): /note="This region represents a CpG dinucleotide"
  misc_feature (61)..(61): /note="Nucleotide may be methylated to form 5-methylcytosine"
cctcccctgtccccactcagccgcagcatcccccgctggcccccaggcccctcatccatccgctgcccacgaacccccagccccgcaccctccccgtggctcaggtctcccctatcccggcc

SEQ ID NO: 17509 - DNA, 122 bp, Homo sapiens
  misc_feature (61)..(62): /note="This region represents a CpG dinucleotide"
  misc_feature (61)..(61): /note="Nucleotide may be methylated to form 5-methylcytosine"
ctccacgcccgtgctctctcagcaccctctccactccagtcaacacggaccacacaccagcgtcacacgtgacccaacatgtctctacgagaacgtgatataagctctagtctaggggactg

SEQ ID NO: 17510 - DNA, 122 bp, Homo sapiens
  misc_feature (61)..(62): /note="This region represents a CpG dinucleotide"
  misc_feature (61)..(61): /note="Nucleotide may be methylated to form 5-methylcytosine"
atccattcatccatccaacaacacgtgaggcggcttcaggcttcggagttgctgaagctccgagttcgggatgtgcagctgtggtggagccaggggctgggcacacccctggctcctggcct

SEQ ID NO: 17511 - DNA, 122 bp, Homo sapiens
  misc_feature (61)..(62): /note="This region represents a CpG dinucleotide"
  misc_feature (61)..(61): /note="Nucleotide may be methylated to form 5-methylcytosine"
attgcctgtaatttgtttcagtttacagtggtttttgccctgggcaatctgctactcagacggaataaagacagccttgcaactgggtcttccagggaaccttgagacaaatctttgacagt

SEQ ID NO: 17512 - DNA, 122 bp, Homo sapiens
  misc_feature (61)..(62): /note="This region represents a CpG dinucleotide"
  misc_feature (61)..(61): /note="Nucleotide may be methylated to form 5-methylcytosine"
gatccaagcacgagttgagtgggtaacgcgcacatccacctgcctgtgggcaagtgagtgcgcgtgcactggaatgcgagcatgttccagtgtccagggaggtgtgagtgaagaatatgtgc

SEQ ID NO: 17513 - DNA, 122 bp, Homo sapiens
  misc_feature (61)..(62): /note="This region represents a CpG dinucleotide"
  misc_feature (61)..(61): /note="Nucleotide may be methylated to form 5-methylcytosine"
tactatttcttctaaaaggactaaatggagtgatactgctggtactggcaagaaccagtacgactcattcagctcaacaacagagtgacaatggcctgtagaaggattcactcacttgagga

SEQ ID NO: 17514 - DNA, 122 bp, Homo sapiens
  misc_feature (61)..(62): /note="This region represents a CpG dinucleotide"
  misc_feature (61)..(61): /note="Nucleotide may be methylated to form 5-methylcytosine"
gcggtcatattgttcctcataaactgaatattgacctttatctcacccctgtttttgattcgttttccttgtttggattctaatctaaaccaccttaaagagaagaaaaaaaaattggctgt

SEQ ID NO: 17515 - DNA, 122 bp, Homo sapiens
  misc_feature (61)..(62): /note="This region represents a CpG dinucleotide"
  misc_feature (61)..(61): /note="Nucleotide may be methylated to form 5-methylcytosine"
tattatgtgaacacttaatgctggagttgtcaccatactaatttttaagtcctacttacacgtaggcagaaatgatgacatgcttagcatttttcatcactttgaccaagaggcagaatctg

SEQ ID NO: 17516 - DNA, 122 bp, Homo sapiens
  misc_feature (61)..(62): /note="This region represents a CpG dinucleotide"
  misc_feature (61)..(61): /note="Nucleotide may be methylated to form 5-methylcytosine"
gtaacattaagaaggaaaatcttagcatcctcactcaggtcattcattcaaagtaacacacggtaaacactccaggaaatccaggacatgagatacctctggttgttgacaggcttgcctca

SEQ ID NO: 17517 - DNA, 122 bp, Homo sapiens
  misc_feature (61)..(62): /note="This region represents a CpG dinucleotide"
  misc_feature (61)..(61): /note="Nucleotide may be methylated to form 5-methylcytosine"
gcaaagctgagagccggagctccaggccatgccatggcctcttatctgggagcctcaccacgcaggtgtccaggtggcctccacccagtgtagacaagccagccatgcttctcgccacctgg

SEQ ID NO: 17518 - DNA, 122 bp, Homo sapiens
  misc_feature (61)..(62): /note="This region represents a CpG dinucleotide"
  misc_feature (61)..(61): /note="Nucleotide may be methylated to form 5-methylcytosine"
tccttgcccattcagctgaagccacatggtctattctttgttccttgaatacactacacacgccattgcctggggcctttgtgcttgctcttccaggaaggctcttcacacagctatccaca

SEQ ID NO: 17519 - DNA, 122 bp, Homo sapiens
  misc_feature (61)..(62): /note="This region represents a CpG dinucleotide"
  misc_feature (61)..(61): /note="Nucleotide may be methylated to form 5-methylcytosine"
ggtaagagaacaaatatttaccttcttagcatctgcagaagccctcagcccttctggcagcgggtgcactaaaggcaaaaccgcagcactgacacgctgaaaatgagaatcagaaacctgtt

SEQ ID NO: 17520 - DNA, 122 bp, Homo sapiens
  misc_feature (61)..(62): /note="This region represents a CpG dinucleotide"
  misc_feature (61)..(61): /note="Nucleotide may be methylated to form 5-methylcytosine"
caacactaacccaacttctaccacgcacagcaaggctgtgctatttaggcgtggatcacacgcacactgcgccaacttctaagctaacaatggacaaccaaagcctccggaactctgtcttg

SEQ ID NO: 17521 - DNA, 122 bp, Homo sapiens
  misc_feature (61)..(62): /note="This region represents a CpG dinucleotide"
  misc_feature (61)..(61): /note="Nucleotide may be methylated to form 5-methylcytosine"
aagggcttgaacattccataggggcagggtacatcttcagtctcaggtcagctggcttaacgagagctcaagttgactgcctttccactggaagtgtccttcagaactggaaccgggccggg

SEQ ID NO: 17522 - DNA, 122 bp, Homo sapiens
  misc_feature (61)..(62): /note="This region represents a CpG dinucleotide"
  misc_feature (61)..(61): /note="Nucleotide may be methylated to form 5-methylcytosine"
atctgagcccacgcaagggaaagttgtggcacaaaaatcctcagtggagatcttttgtgtcgggagaagtatgtgttgggcaaaaatgtcttagtacagtgtcatgcttagtcattgagtgg

SEQ ID NO: 17523 - DNA, 122 bp, Homo sapiens
  misc_feature (61)..(62): /note="This region represents a CpG dinucleotide"
  misc_feature (61)..(61): /note="Nucleotide may be methylated to form 5-methylcytosine"
taaactaagatgcctgacaattacagatataatcacatctttctggaagcatagcctgcacgtgcattgtaccttcccagtatgccattcaacacagccttgttataggaacgtgctggaga

SEQ ID NO: 17524 - DNA, 122 bp, Homo sapiens
  misc_feature (61)..(62): /note="This region represents a CpG dinucleotide"
  misc_feature (61)..(61): /note="Nucleotide may be methylated to form 5-methylcytosine"
aaaatcgcacatatcaactgctaatcttgactaaactcagactccttactaagacattatcgtttccttctatcaacggagataacattttacatcagtgggttataactaagtttcatttt

SEQ ID NO: 17525 - DNA, 122 bp, Homo sapiens
  misc_feature (61)..(62): /note="This region represents a CpG dinucleotide"
  misc_feature (61)..(61): /note="Nucleotide may be methylated to form 5-methylcytosine"
attgccactttggttttggtgggttttggctgacttctttaccacatctcattttatcaacggggattttgtgacctgcatcttgtgaaaccagtaatgctgacttcctgtctcatcctgtg

SEQ ID NO: 17526 - DNA, 122 bp, Homo sapiens
  misc_feature (61)..(62): /note="This region represents a CpG dinucleotide"
  misc_feature (61)..(61): /note="Nucleotide may be methylated to form 5-methylcytosine"
tgccccgcagaagggatatttatcaatgtctgaagacatttttccttgacataaacgaagcgtctagtgtcaaggccaggggtgctactaaacagcctccaatgcacagggtagcccacata

SEQ ID NO: 17527 - DNA, 122 bp, Homo sapiens
  misc_feature (61)..(62): /note="This region represents a CpG dinucleotide"
  misc_feature (61)..(61): /note="Nucleotide may be methylated to form 5-methylcytosine"
agttatttgatgtaaaatatgagaagaggcgaggtggcaagaggctgctggggactgacacgtgggagcagtgcagaagagaaccctgacaaaccttaaaagaacacaaagtacatagtagt

SEQ ID NO: 17528 - DNA, 122 bp, Homo sapiens
  misc_feature (61)..(62): /note="This region represents a CpG dinucleotide"
  misc_feature (61)..(61): /note="Nucleotide may be methylated to form 5-methylcytosine"
aatggggtcccatttggggtccccactggggacttatgctgtccctatgctgtctcctggcgtcttgtggggccattgtgaggatgacagcagcccagagcagggttattcctgggggtggg

SEQ ID NO: 17529 - DNA, 122 bp, Homo sapiens
  misc_feature (61)..(62): /note="This region represents a CpG dinucleotide"
  misc_feature (61)..(61): /note="Nucleotide may be methylated to form 5-methylcytosine"
gctattggctttttatttcactctccctttttttccacatttgctgtagaaatctatccacgggtacagtggttaagttgctgtttctagagctatggtgagaggaacagcgatctgtgcat

SEQ ID NO: 17530 - DNA, 122 bp, Homo sapiens
  misc_feature (61)..(62): /note="This region represents a CpG dinucleotide"
  misc_feature (61)..(61): /note="Nucleotide may be methylated to form 5-methylcytosine"
ccccaaatgttagtggaaagacaacctaatgaaaatggccctgatgacaaagagaaagaccgtccagaaagtatgccatgagcaaagacaagaaacaagactataactgcattctagataat

SEQ ID NO: 17531 - DNA, 122 bp, Homo sapiens
  misc_feature (61)..(62): /note="This region represents a CpG dinucleotide"
  misc_feature (61)..(61): /note="Nucleotide may be methylated to form 5-methylcytosine"
tcttggccttcacccatggcacgcaccgataaatgattaaaccaccttcctcaaggaggacgaaaaaggcaggaacatacgtctgagcagctgagggtaatacagacgactgatggtttcct

SEQ ID NO: 17532 - DNA, 122 bp, Homo sapiens
  misc_feature (61)..(62): /note="This region represents a CpG dinucleotide"
  misc_feature (61)..(61): /note="Nucleotide may be methylated to form 5-methylcytosine"
gggatggaactgagcttagaaccttggtctgtctgactttagaagctagcgcttaacctccgtgctattctgcagaggttcaaactggtggccaataagccagctgtggcccacagacatgc

SEQ ID NO: 17533 - DNA, 122 bp, Homo sapiens
  misc_feature (61)..(62): /note="This region represents a CpG dinucleotide"
  misc_feature (61)..(61): /note="Nucleotide may be methylated to form 5-methylcytosine"
agattctagagaagcaggaaccagaaagtcacttcaaatgtaaaccacaaagttaataatcgcaaaggcaaaagctcaaattgcatatggtgattcataatcaacctgcttcacctatggca

SEQ ID NO: 17534 - DNA, 122 bp, Homo sapiens
  misc_feature (61)..(62): /note="This region represents a CpG dinucleotide"
  misc_feature (61)..(61): /note="Nucleotide may be methylated to form 5-methylcytosine"
atttgcagtcaaagaccctgccactgctctgccattaggagagaaatcccgacaaggaatcgtgatggtaaattaaacaacatagtccccagaatgcgattaatgcatgtcataaaaccagg

SEQ ID NO: 17535 - DNA, 122 bp, Homo sapiens
  misc_feature (61)..(62): /note="This region represents a CpG dinucleotide"
  misc_feature (61)..(61): /note="Nucleotide may be methylated to form 5-methylcytosine"
gtcgtcaccaggatggggagcaggtggtggtgaccacatggagcagtcacacctgagagacgaaggaagccgtggcgtgaatccagccacccttttctccctcagccttttttttttttttt

SEQ ID NO: 17536 - DNA, 122 bp, Homo sapiens
  misc_feature (61)..(62): /note="This region represents a CpG dinucleotide"
  misc_feature (61)..(61): /note="Nucleotide may be methylated to form 5-methylcytosine"
tctatgtatagtaaacaccagtccacagcaatatcacacacaattagattaactgataaacgctgaccagagttggcgtgagagccttttcccctccttgcctccagggggaaaattgacag

SEQ ID NO: 17537 - DNA, 122 bp, Homo sapiens
  misc_feature (61)..(62): /note="This region represents a CpG dinucleotide"
  misc_feature (61)..(61): /note="Nucleotide may be methylated to form 5-methylcytosine"
tctcctcttggtctgtgagcatccagccttacttttgtatccaatcatatttccatacttcgctgaactgtgtttatggatagtttccaccagatctttggatcttcatcttgaaggctgcc

SEQ ID NO: 17538 - DNA, 122 bp, Homo sapiens
  misc_feature (61)..(62): /note="This region represents a CpG dinucleotide"
  misc_feature (61)..(61): /note="Nucleotide may be methylated to form 5-methylcytosine"
acaagctccctacttacttgctctgtgaccttagcaagtcactcaatcatctcagttgggcgtcctcacttgtcacacagagtcaccacacatgctgagttgccaagggatgacatgagaca

SEQ ID NO: 17539 - DNA, 122 bp, Homo sapiens
  misc_feature (61)..(62): /note="This region represents a CpG dinucleotide"
  misc_feature (61)..(61): /note="Nucleotide may be methylated to form 5-methylcytosine"
ggcggcatttttataagtaattccttatttctgcctgaagaccacaaagcctcctggaggcgtaactgctcagaccggtcttcagggaatatttaaggacttagtggaatttatgaacaata

SEQ ID NO: 17540 - DNA, 122 bp, Homo sapiens
  misc_feature (61)..(62): /note="This region represents a CpG dinucleotide"
  misc_feature (61)..(61): /note="Nucleotide may be methylated to form 5-methylcytosine"
aggaagagcaggttcacccacacattcacaagtcaccctaaagctcgctccagccaggcacggtctatacactgtgataaggatgtggccgcacagaacagacccacaggaacacagcagat

SEQ ID NO: 17541 - DNA, 122 bp, Homo sapiens
  misc_feature (61)..(62): /note="This region represents a CpG dinucleotide"
  misc_feature (61)..(61): /note="Nucleotide may be methylated to form 5-methylcytosine"
atatacactgagatcattttatccccctaccttccactgcacttcactgacacttaaccccgaagacatttgcattggaaacttcgcattatctgtttgaaagtcctctcagttcaagccac

SEQ ID NO: 17542 - DNA, 122 bp, Homo sapiens
  misc_feature (61)..(62): /note="This region represents a CpG dinucleotide"
  misc_feature (61)..(61): /note="Nucleotide may be methylated to form 5-methylcytosine"
gaagttgtaacagggtgatgttattttgtccaaagaaatgaagaaatatagccatgcaggcggccctgggagacataaccttagaaaacacaaaggcagcaggaattgccacctcttgtgta

SEQ ID NO: 17543 - DNA, 122 bp, Homo sapiens
  misc_feature (61)..(62): /note="This region represents a CpG dinucleotide"
  misc_feature (61)..(61): /note="Nucleotide may be methylated to form 5-methylcytosine"
acaagcaggaataaggaaattaataggcaaaagataattctcagtatttgctttataggacgagtcagcaaaagtcctgtggatatccctgaacttggctgggtggtaaactaattccgact

SEQ ID NO: 17544 - DNA, 122 bp, Homo sapiens
  misc_feature (61)..(62): /note="This region represents a CpG dinucleotide"
  misc_feature (61)..(61): /note="Nucleotide may be methylated to form 5-methylcytosine"
gcacagcatgatagcaagccaggctgatgcccagtgaagccaggctgatgccctggcatgcgtgtgactctgggaagtgcccagtgatctctccccaggtcacacccaccccaggtgaagca

SEQ ID NO: 17545 - DNA, 122 bp, Homo sapiens
  misc_feature (61)..(62): /note="This region represents a CpG dinucleotide"
  misc_feature (61)..(61): /note="Nucleotide may be methylated to form 5-methylcytosine"
aaccaaatgtagttcacaatacagtgtaattcaaaatagttcaccagatagttcagtacacgccattttttttaatcaaataagtatgattttccctaaattcttgcatttcgaactaataa

SEQ ID NO: 17546 - DNA, 122 bp, Homo sapiens
  misc_feature (61)..(62): /note="This region represents a CpG dinucleotide"
  misc_feature (61)..(61): /note="Nucleotide may be methylated to form 5-methylcytosine"
tgacttagagatgagtaaatcaccggttattacaagaagtttccaaaagctgtgttgctgcggtgaaacctgctaaaaacaaggtgactcatgctgttgtttagaagctggatgacagaaac

SEQ ID NO: 17547 - DNA, 122 bp, Homo sapiens
  misc_feature (61)..(62): /note="This region represents a CpG dinucleotide"
  misc_feature (61)..(61): /note="Nucleotide may be methylated to form 5-methylcytosine"
cagcaaaaaataaagcatgggcatgtgatttggtttgctcatgaaatgggaaaagcagctcgtgtcactgctgagcagaagctttagaggctgtgaacagttctttgtgactcaccatgctc

SEQ ID NO: 17548 - DNA, 122 bp, Homo sapiens
  misc_feature (61)..(62): /note="This region represents a CpG dinucleotide"
  misc_feature (61)..(61): /note="Nucleotide may be methylated to form 5-methylcytosine"
caggaccccacaaaaccagaaaactaacaggaccccttgtagaccagtctctttgtgcaacgtagggagaaagggcgggggggactaaagaacctcccaaaaggtattaaaaatagcaacat

SEQ ID NO: 17549 - DNA, 122 bp, Homo sapiens
  misc_feature (61)..(62): /note="This region represents a CpG dinucleotide"
  misc_feature (61)..(61): /note="Nucleotide may be methylated to form 5-methylcytosine"
gtagtaattcatgcttacaccagggatgagtaagtgtctgtttttctgaatcttctccctcgtgacatagtgtcactaatgaaattgtgtttgccaatctaatgggtgagaaatggtttctc

SEQ ID NO: 17550 - DNA, 122 bp, Homo sapiens
  misc_feature (61)..(62): /note="This region represents a CpG dinucleotide"
  misc_feature (61)..(61): /note="Nucleotide may be methylated to form 5-methylcytosine"
tgtagtacatacagtactcctgtaacaattctatagccacttcctgatgttgttgcagtgcgctcaagcattgggggtagctgcttggaaggtactgtgatgctaatcatctctgtgggagc

SEQ ID NO: 17551 - DNA, 122 bp, Homo sapiens
  misc_feature (61)..(62): /note="This region represents a CpG dinucleotide"
  misc_feature (61)..(61): /note="Nucleotide may be methylated to form 5-methylcytosine"
ccggtattctttataccctttcatatttcagaattaatttcaaattatgtaggctggtttcgtgcccagcagactcaatgctcagcagaatagcacaagtggtacatttactagagctcagg

SEQ ID NO: 17552 - DNA, 122 bp, Homo sapiens
  misc_feature (61)..(62): /note="This region represents a CpG dinucleotide"
  misc_feature (61)..(61): /note="Nucleotide may be methylated to form 5-methylcytosine"
gctcagcaccggcacccggggactgttgctgatggaggctccaccgtctgaggatgtcaacgtctctgtgtgtgcttccacggtcactgcagcagggcagaaaggacatgagcacgggcact

SEQ ID NO: 17553 - DNA, 122 bp, Homo sapiens
  misc_feature (61)..(62): /note="This region represents a CpG dinucleotide"
  misc_feature (61)..(61): /note="Nucleotide may be methylated to form 5-methylcytosine"
aacgaggctttaattcaaggtcaaagagtcgagaagttggtgagaaaacccgtcgcccctcggggccctgctggacacataaacggccaaaggatggctcttttcatctcctcttttaaaca

SEQ ID NO: 17554 - DNA, 122 bp, Homo sapiens
  misc_feature (61)..(62): /note="This region represents a CpG dinucleotide"
  misc_feature (61)..(61): /note="Nucleotide may be methylated to form 5-methylcytosine"
ccattcatcagttcatgggcatttgcggtttttttccacctttcgactgttgtgactttccgtttatttttaatctgaactttactccatcacttcctccctttccttttttattcgcacca

SEQ ID NO: 17555 - DNA, 122 bp, Homo sapiens
  misc_feature (61)..(62): /note="This region represents a CpG dinucleotide"
  misc_feature (61)..(61): /note="Nucleotide may be methylated to form 5-methylcytosine"
aagcagggaatagaggaagtggttttgtctcaggcctaaaaaccatttgctatctcacagcgcctgttagtaagtcacctccccttcagtgtttaccaaacattcagaggccctgcacctac

SEQ ID NO: 17556 - DNA, 122 bp, Homo sapiens
  misc_feature (61)..(62): /note="This region represents a CpG dinucleotide"
  misc_feature (61)..(61): /note="Nucleotide may be methylated to form 5-methylcytosine"
taattcttaggtttctagtttgggtgattctcatagtgccaccaactaaaaaagaatatacgagagaagaaacacagaaaatgctaggatttacagacaatgaaacagtcatcctgaaattc

SEQ ID NO: 17557 - DNA, 122 bp, Homo sapiens
  misc_feature (61)..(62): /note="This region represents a CpG dinucleotide"
  misc_feature (61)..(61): /note="Nucleotide may be methylated to form 5-methylcytosine"
gatccacctgacttggcctcccaaagtgctgggattacaggcctgagccactgtgcctggcgggcgttattaaactcagggcaaacactaatgtgaactagcttactcagagtctctctgtc

SEQ ID NO: 17558 - DNA, 122 bp, Homo sapiens
  misc_feature (61)..(62): /note="This region represents a CpG dinucleotide"
  misc_feature (61)..(61): /note="Nucleotide may be methylated to form 5-methylcytosine"
ctcagagaggttaacatcttttccaagatcacaaaaccatttaaagtgctacaacttgaacgtaagtctttgttttcaagtcccgagcttgctttattacatcatgctacagtcttaggaag

SEQ ID NO: 17559 - DNA, 122 bp, Homo sapiens
  misc_feature (61)..(62): /note="This region represents a CpG dinucleotide"
  misc_feature (61)..(61): /note="Nucleotide may be methylated to form 5-methylcytosine"
tatatgttaaggctattagacaaaagtaattgtttgtgctttgctctgttttgtttttgccgtctagtcctagactgaatttcttaagattatcttagggattggactgggagggagtagtt

SEQ ID NO: 17560 - DNA, 122 bp, Homo sapiens
  misc_feature (61)..(62): /note="This region represents a CpG dinucleotide"
  misc_feature (61)..(61): /note="Nucleotide may be methylated to form 5-methylcytosine"
ggcatatctcacacacctgcatgaacacccaatcaccatgctcatgaactacaaatacagcgggctgattgtttttggtgtgagagcagaagacagacagttcgtggttttttttttccact

SEQ ID NO: 17561 - DNA, 122 bp, Homo sapiens
  misc_feature (61)..(62): /note="This region represents a CpG dinucleotide"
  misc_feature (61)..(61): /note="Nucleotide may be methylated to form 5-methylcytosine"
gtacagttgttttacttttacctccacacccaccgccatcatcacaaacacacacatacacgactgtgcacttcctgaaggcagaagcagcatcatacttctttggtatcttcagcaatcag

SEQ ID NO: 17562 - DNA, 122 bp, Homo sapiens
  misc_feature (61)..(62): /note="This region represents a CpG dinucleotide"
  misc_feature (61)..(61): /note="Nucleotide may be methylated to form 5-methylcytosine"
tacttgttacacaacccttatattcctaaaggttttactttatccctttatgatgacaatcgttagactggctagtggttaagagcacagattctggaatcagacaattgatttgaatcttg

SEQ ID NO: 17563 - DNA, 122 bp, Homo sapiens
  misc_feature (61)..(62): /note="This region represents a CpG dinucleotide"
  misc_feature (61)..(61): /note="Nucleotide may be methylated to form 5-methylcytosine"
ttgtgagtagcagagattaccttgtactgtgagaggattttaccttgatgtgtgtactggcggatgagagctacaaagttaaagctgactgaggacagtttacaggaagcagtcttcactgt

SEQ ID NO: 17564 - DNA, 122 bp, Homo sapiens
  misc_feature (61)..(62): /note="This region represents a CpG dinucleotide"
  misc_feature (61)..(61): /note="Nucleotide may be methylated to form 5-methylcytosine"
attcattgtcgttttgttttatttgttgtgttttgtttttgcaactatgggaaactggaacgagcttataggaaaggggaagcaggaggggtcagcaaggagaaataacttggagtctcagt

SEQ ID NO: 17565 - DNA, 122 bp, Homo sapiens
  misc_feature (61)..(62): /note="This region represents a CpG dinucleotide"
  misc_feature (61)..(61): /note="Nucleotide may be methylated to form 5-methylcytosine"
aaacaaagttttaatcacctttgcccatccacacaagtcttaagtaagagtttacccaagcgtgagtcctacaggttattgtgactgtttactctttgaaagagtaaaataaatcaacactc

SEQ ID NO: 17566 - DNA, 122 bp, Homo sapiens
  misc_feature (61)..(62): /note="This region represents a CpG dinucleotide"
  misc_feature (61)..(61): /note="Nucleotide may be methylated to form 5-methylcytosine"
tatagtggctggaaccctaaccaaaggcagctgtcacctgttggtgggttctcttaggcacgttgtttgttcatctagctgtcacctggcagcttatgccctccagttcctggaactgacca

SEQ ID NO: 17567 - DNA, 122 bp, Homo sapiens
  misc_feature (61)..(62): /note="This region represents a CpG dinucleotide"
  misc_feature (61)..(61): /note="Nucleotide may be methylated to form 5-methylcytosine"
ataatacgtggaaacattaggcatgtcgcacacttagcagatggtgcttggctccctctgcgtttccaccagtctgtggcctacagttcaaatggtgggaagaaggctgtgagatctgaggc

SEQ ID NO: 17568 - DNA, 122 bp, Homo sapiens
  misc_feature (61)..(62): /note="This region represents a CpG dinucleotide"
  misc_feature (61)..(61): /note="Nucleotide may be methylated to form 5-methylcytosine"
gcaggacgagccgcagacaaaacccctgacaacgggttaaagacggaagtggcgagactccgtctcaaaaaaaaaaaaaaaaaaggaagtggcttcattccgcgggaacttcggcagacttg

SEQ ID NO: 17569 - DNA, 122 bp, Homo sapiens
  misc_feature (61)..(62): /note="This region represents a CpG dinucleotide"
  misc_feature (61)..(61): /note="Nucleotide may be methylated to form 5-methylcytosine"
aagcagttggctccccgtgattgaaacttggctgctgtgacaggctgagaactggctactcgttacaagagtaggttacaatcctttacacatccatttaggttacagttcactatacgtgg

SEQ ID NO: 17570 - DNA, 122 bp, Homo sapiens
  misc_feature (61)..(62): /note="This region represents a CpG dinucleotide"
  misc_feature (61)..(61): /note="Nucleotide may be methylated to form 5-methylcytosine"
caataataagcattttcattgcagcagcaaatccttgaataggattttgctgtggccctgcgtgccctgaaactgctgggtttctgccatggacttggcctttggaaacagcccccatcttt

SEQ ID NO: 17571 - DNA, 122 bp, Homo sapiens
  misc_feature (61)..(62): /note="This region represents a CpG dinucleotide"
  misc_feature (61)..(61): /note="Nucleotide may be methylated to form 5-methylcytosine"
gttcctccgggacacaggaggccacgcccaccacgggggaggcgccggggtcccgtgtgccggggtctctcagtgacacgggagctccttgtccacaagggcaggcacctcagagccacctg

SEQ ID NO: 17572 - DNA, 122 bp, Homo sapiens
  misc_feature (61)..(62): /note="This region represents a CpG dinucleotide"
  misc_feature (61)..(61): /note="Nucleotide may be methylated to form 5-methylcytosine"
gacttagcacaatgagtatcacatccagatcagaacaccagatattcttgatgtaggaaacgttccaaaatgaattcctggagtcatctccttctcactgctttgtgttcattttttgcctg

SEQ ID NO: 17573 - DNA, 122 bp, Homo sapiens
  misc_feature (61)..(62): /note="This region represents a CpG dinucleotide"
  misc_feature (61)..(61): /note="Nucleotide may be methylated to form 5-methylcytosine"
atgcccggcttatttacatttttgaaagatatgttacggcatgatttcttgactttggcacgctttatatttttggccagataactgttgttggggctgtcttgtgcattgtaggacattaa

SEQ ID NO: 17574 - DNA, 122 bp, Homo sapiens
  misc_feature (61)..(62): /note="This region represents a CpG dinucleotide"
  misc_feature (61)..(61): /note="Nucleotide may be methylated to form 5-methylcytosine"
cttctgtggtccccaagacttggggctcctctgctctcttgtgagtgttggagtctgaggcggggcccgtggacaaggcagtttctgcgtctcttggccacagctgcttggggaagtgtttt

SEQ ID NO: 17575 - DNA, 122 bp, Homo sapiens
  misc_feature (61)..(62): /note="This region represents a CpG dinucleotide"
  misc_feature (61)..(61): /note="Nucleotide may be methylated to form 5-methylcytosine"
tttcatactttcagtacctaataatctcacattatttactcattcatttacatcttgcttcgttccaaaacaagccaggtgcggtgctcatgcctataatcttagcagtctgggaggccaag

SEQ ID NO: 17576 - DNA, 122 bp, Homo sapiens
  misc_feature (61)..(62): /note="This region represents a CpG dinucleotide"
  misc_feature (61)..(61): /note="Nucleotide may be methylated to form 5-methylcytosine"
cgaagggcagggtgtgcacctgcactgtttgccactgaatcttgcacgggacctagtacacgggacatgtctaaatgcttgctgagtcaaggaatgagactggcttaacccaagtctcattt

SEQ ID NO: 17577 - DNA, 122 bp, Homo sapiens
  misc_feature (61)..(62): /note="This region represents a CpG dinucleotide"
  misc_feature (61)..(61): /note="Nucleotide may be methylated to form 5-methylcytosine"
gctttaattgcctgtcgatgacagatgccaagggaatgaaaatcccgtccggttctggagcgcctgcccggggatgggggtggtgtggggagtccgagctggctgggcctctagggcctcac

SEQ ID NO: 17578 - DNA, 122 bp, Homo sapiens
  misc_feature (61)..(62): /note="This region represents a CpG dinucleotide"
  misc_feature (61)..(61): /note="Nucleotide may be methylated to form 5-methylcytosine"
aggcgaaggtcagtgaagcagaggaagttaaagagctgtgagttggtgggtgactcaccccggtgatgtcagctagtttatgctggtgagctcttcatcagaactggagaaatgtggttaga

SEQ ID NO: 17579 - DNA, 122 bp, Homo sapiens
  misc_feature (61)..(62): /note="This region represents a CpG dinucleotide"
  misc_feature (61)..(61): /note="Nucleotide may be methylated to form 5-methylcytosine"
ttcgtgtgaggccacaaaagccttaatgttcagtctccagctacctcagattttggagaacgctgtgtaccatcagcagcttgaatccccaccctctaacgctaatgctcatctatcaaact

SEQ ID NO: 17580 - DNA, 122 bp, Homo sapiens
  misc_feature (61)..(62): /note="This region represents a CpG dinucleotide"
  misc_feature (61)..(61): /note="Nucleotide may be methylated to form 5-methylcytosine"
ccaaagctggtagaccaaggaagccttttttcacaggttatctttcaaaacacactggaacgtatagctgtagagctgtgggtacatgcaaggatggagggagggcagacagtgagctactg

SEQ ID NO: 17581 - DNA, 122 bp, Homo sapiens
  misc_feature (61)..(62): /note="This region represents a CpG dinucleotide"
  misc_feature (61)..(61): /note="Nucleotide may be methylated to form 5-methylcytosine"
ttttcctttatttccatgcttgccccctccccacttcctgcaggcctgtaagaggggtgccggctccatgtcagtttggaagaataaatgaagtgattctagccaagaagttatgaagaata

SEQ ID NO: 17582 - DNA, 122 bp, Homo sapiens
  misc_feature (61)..(62): /note="This region represents a CpG dinucleotide"
  misc_feature (61)..(61): /note="Nucleotide may be methylated to form 5-methylcytosine"
tcaggaactgggttatggtaaggcttcctaccctcaaaaccacaggggggagggcaagggcgagaggccccgcagtttgtggtcatggcaatacaatgataataacactcctcattccttat

SEQ ID NO: 17583 - DNA, 122 bp, Homo sapiens
  misc_feature (61)..(62): /note="This region represents a CpG dinucleotide"
  misc_feature (61)..(61): /note="Nucleotide may be methylated to form 5-methylcytosine"
cagcttgcatgtcaatctagtccactgtaagctggagaaagttacatgaattctcatcgacggcctcagcaatgtgcctcaagtgtcactgtgagatcattccctgcttcctggagacatgc

SEQ ID NO: 17584 - DNA, 122 bp, Homo sapiens
  misc_feature (61)..(62): /note="This region represents a CpG dinucleotide"
  misc_feature (61)..(61): /note="Nucleotide may be methylated to form 5-methylcytosine"
aaaacatacgcatatacccagcaaacacagactgacagtgactcaccctgatctcatgctcggtaatcaggttcagatatcctggtccttcagcatgagtgtggttctcaggtctgtctctc

SEQ ID NO: 17585 - DNA, 122 bp, Homo sapiens
  misc_feature (61)..(62): /note="This region represents a CpG dinucleotide"
  misc_feature (61)..(61): /note="Nucleotide may be methylated to form 5-methylcytosine"
aaataggaagaagggcaatctcatgagagaacataagtttagttttggtaatgttgtgctcgggcctgaaagacagccagacagtaaggtacaggagacagctaatcttctggatttagagt

SEQ ID NO: 17586 - DNA, 122 bp, Homo sapiens
  misc_feature (61)..(62): /note="This region represents a CpG dinucleotide"
  misc_feature (61)..(61): /note="Nucleotide may be methylated to form 5-methylcytosine"
tcttgcttgatgaacaatgagctattttacagcattataataattcctagtcacacacagcgcaactccttttggtcactggtatttgttttggctttacttgcatctcccatttcaaaaca

SEQ ID NO: 17587 - DNA, 122 bp, Homo sapiens
  misc_feature (61)..(62): /note="This region represents a CpG dinucleotide"
  misc_feature (61)..(61): /note="Nucleotide may be methylated to form 5-methylcytosine"
cgtgccttcctgactgtgagctccttgagagcacggactgtgccaaagtcacaaagcactcgcttctcacaagcccaacaaaacctttcaataaatggcaagcattatgtttatcattagta

SEQ ID NO: 17588 - DNA, 122 bp, Homo sapiens
  misc_feature (61)..(62): /note="This region represents a CpG dinucleotide"
  misc_feature (61)..(61): /note="Nucleotide may be methylated to form 5-methylcytosine"
tgtgggtcttgacagatcccggtacttctgtacactggggctgtagaatgtgagcagttgcgcaagactcaggatggagtgtgttgtctcggccgggctgagacaaacatgtctgtgatcta

SEQ ID NO: 17589 - DNA, 122 bp, Homo sapiens
  misc_feature (61)..(62): /note="This region represents a CpG dinucleotide"
  misc_feature (61)..(61): /note="Nucleotide may be methylated to form 5-methylcytosine"
gcccctgaacccagaatgtagtcagctggcagttagtaattgagaacctgtttggtgacacggatgactgaatggggcccttaagtgttccatcctattgacaggggttgacaccttgactt

SEQ ID NO: 17590 - DNA, 122 bp, Homo sapiens
  misc_feature (61)..(62): /note="This region represents a CpG dinucleotide"
  misc_feature (61)..(61): /note="Nucleotide may be methylated to form 5-methylcytosine"
cacgattatatttcacctgggacatgctggtaagtgccccaggctgctaattacctgtaacgtcctctgacatttagcctgcccacgcaaaagccctgttaagtagacccacaacctattac

SEQ ID NO: 17591 - DNA, 122 bp, Homo sapiens
  misc_feature (61)..(62): /note="This region represents a CpG dinucleotide"
  misc_feature (61)..(61): /note="Nucleotide may be methylated to form 5-methylcytosine"
atcttacttaccgtgggatctttaacatgcattgcatttagattgagctaaaagggcagacggtggttttttgtttagagtgaaatggaagtaccaagtatataagtgataaaagggtagta

SEQ ID NO: 17592 - DNA, 122 bp, Homo sapiens
  misc_feature (61)..(62): /note="This region represents a CpG dinucleotide"
  misc_feature (61)..(61): /note="Nucleotide may be methylated to form 5-methylcytosine"
agaaaatgctctttttgcagtcttgaaatttagtcagccccaaaagaaaccaggaaattgcgtcagacactgaaagagaaacaagctagagaaaaaccattgcttgttgcaaaccaaaattt

SEQ ID NO: 17593 - DNA, 122 bp, Homo sapiens
  misc_feature (61)..(62): /note="This region represents a CpG dinucleotide"
  misc_feature (61)..(61): /note="Nucleotide may be methylated to form 5-methylcytosine"
aaagccattgcggccccagaaggtaaatggctttcgcaggaacacaggtctcctgactcacggcctaaccttcctttcccccacaccaaagctcgcgcggcaccagctagagtgaaggtcaa

SEQ ID NO: 17594 - DNA, 122 bp, Homo sapiens
  misc_feature (61)..(62): /note="This region represents a CpG dinucleotide"
  misc_feature (61)..(61): /note="Nucleotide may be methylated to form 5-methylcytosine"
tcttcagtgaccccactgctcaccaaattaagcccaaaggccctcattgtcattggccaccgtctccacaactccctgtactttcctacctctgggtcctctctgacttttaaagccttcaa

SEQ ID NO: 17595 - DNA, 122 bp, Homo sapiens
  misc_feature (61)..(62): /note="This region represents a CpG dinucleotide"
  misc_feature (61)..(61): /note="Nucleotide may be methylated to form 5-methylcytosine"
aaggcccgaggcctgccagcagccgtatcaggtgggaggcactccgttctgactcccacacgctggctgcaagtgctcctctgcttctcgggttcagcctctgagccacctgggtggtaggt

SEQ ID NO: 17596 - DNA, 122 bp, Homo sapiens
  misc_feature (61)..(62): /note="This region represents a CpG dinucleotide"
  misc_feature (61)..(61): /note="Nucleotide may be methylated to form 5-methylcytosine"
cttagattcagttctccacatagattcagttctccacatttcggaggaagcaacttaccacggtggagacaattcagttagtgcatttgcctcacttgtatcctgcccaccttaactatcgc

SEQ ID NO: 17597 - DNA, 122 bp, Homo sapiens
  misc_feature (61)..(62): /note="This region represents a CpG dinucleotide"
  misc_feature (61)..(61): /note="Nucleotide may be methylated to form 5-methylcytosine"
atccatagttatggaaggaagcccagtgaagttctggggcacagcctggctgtttgaagacggttgtaagccaagctgctgtggccatgagaaaggcacccagtggttcctgtgataaagac

SEQ ID NO: 17598 - DNA, 122 bp, Homo sapiens
  misc_feature (61)..(62): /note="This region represents a CpG dinucleotide"
  misc_feature (61)..(61): /note="Nucleotide may be methylated to form 5-methylcytosine"
cccaatgtgaatagcaattctgggagggccccaaacaaggtaatatcatacacattttaccgtgtagcttttaagctctaattagaccaacactcagtgtagagtttcagcaatgctttgtt

SEQ ID NO: 17599 - DNA, 122 bp, Homo sapiens
  misc_feature (61)..(62): /note="This region represents a CpG dinucleotide"
  misc_feature (61)..(61): /note="Nucleotide may be methylated to form 5-methylcytosine"
gaagtaaaatggcctgctcatacattactaacaagaatataggccaggcacggtcgctcacgcctgtaatcccagtactttgggaggccgaggcgggtggatcatctgaggtcaggagtttg

SEQ ID NO: 17600 - DNA, 122 bp, Homo sapiens
  misc_feature (61)..(62): /note="This region represents a CpG dinucleotide"
  misc_feature (61)..(61): /note="Nucleotide may be methylated to form 5-methylcytosine"
tgtggaatgttcctggggccttgacaggtctgaagccatgaacaggtatgcattgatcagcgtggccattgcagaagcagctgcccttgacaatgaaatcatagattgcatagtgtgtaaaa

SEQ ID NO: 17601 - DNA, 122 bp, Homo sapiens
  misc_feature (61)..(62): /note="This region represents a CpG dinucleotide"
  misc_feature (61)..(61): /note="Nucleotide may be methylated to form 5-methylcytosine"
gggagctgataagtggatcaaggagaagagagcagctaagagcaagcagcgaaaccaccacgtctaatggggagggcttcgagcactatacaaaccagcctaaccctgcagcatgaaaactg

SEQ ID NO: 17602 - DNA, 122 bp, Homo sapiens
  misc_feature (61)..(62): /note="This region represents a CpG dinucleotide"
  misc_feature (61)..(61): /note="Nucleotide may be methylated to form 5-methylcytosine"
tagttataatcctcattcattgtctatcagtgctttatgactttgcagaactttcacactcgtatcctcttttaaccatcaaaactagcaatcaggcagacttctgtaaggaaaattgcagt

SEQ ID NO: 17603 - DNA, 122 bp, Homo sapiens
  misc_feature (61)..(62): /note="This region represents a CpG dinucleotide"
  misc_feature (61)..(61): /note="Nucleotide may be methylated to form 5-methylcytosine"
tttcattcagggtctggctccgtctcagtaactccttggggaaagcgatggagaagggctcgctcacgcagcacttctggcagtccctgaaggaccactacctcaagtctcccaggctggag

SEQ ID NO: 17604 - DNA, 122 bp, Homo sapiens
  misc_feature (61)..(62): /note="This region represents a CpG dinucleotide"
  misc_feature (61)..(61): /note="Nucleotide may be methylated to form 5-methylcytosine"
caagtcacttgcagaactactgattgactcaaagtacaaataactccaaaatgtcacacacgtcagttataagctactcatttccctcaagcaaatccaagagtacacaaactattatttgt

SEQ ID NO: 17605 - DNA, 122 bp, Homo sapiens
  misc_feature (61)..(62): /note="This region represents a CpG dinucleotide"
  misc_feature (61)..(61): /note="Nucleotide may be methylated to form 5-methylcytosine"
atataaatcctgtggaacaggatatactctagaagaacaggttgtcacagggctgagatacggttctcaaattagagggctagttaagaatcctatttactctaatacagagatagacaaca

SEQ ID NO: 17606 - DNA, 122 bp, Homo sapiens
  misc_feature (61)..(62): /note="This region represents a CpG dinucleotide"
  misc_feature (61)..(61): /note="Nucleotide may be methylated to form 5-methylcytosine"
catgtcagttagcctagagttcacataggaagtggcttcaagaggtaattatttagctcacgaggggagtgagacatgactgctgtcacaccctgtcacactccaatgcctctctgggcctg

SEQ ID NO: 17607 - DNA, 122 bp, Homo sapiens
  misc_feature (61)..(62): /note="This region represents a CpG dinucleotide"
  misc_feature (61)..(61): /note="Nucleotide may be methylated to form 5-methylcytosine"
ctcaggtgtggaccattacacaattaaattagcaaacctcagagggcttggattagaacccggcagggaacacttggggattcgagggcagagccaagctttctgaatggcagtggctctcc

SEQ ID NO: 17608 - DNA, 122 bp, Homo sapiens
  misc_feature (61)..(62): /note="This region represents a CpG dinucleotide"
  misc_feature (61)..(61): /note="Nucleotide may be methylated to form 5-methylcytosine"
ctgttccacttcactgagcaattactgaacagacgagctgtacagactctaaatgaacatcgtcactacctctcacttgttttttgcttctgacctctttaaaggttcggacaaagtaggta

SEQ ID NO: 17609 - DNA, 122 bp, Homo sapiens
  misc_feature (61)..(62): /note="This region represents a CpG dinucleotide"
  misc_feature (61)..(61): /note="Nucleotide may be methylated to form 5-methylcytosine"
ctgtaagttgtactttgagtgtcattagccttttgaaatatcagataaccagggaaagggcgaacatgaatttctgtggctgattatgacaccctggttatgagttaagggacttcgctcct

SEQ ID NO: 17610 - DNA, 122 bp, Homo sapiens
  misc_feature (61)..(62): /note="This region represents a CpG dinucleotide"
  misc_feature (61)..(61): /note="Nucleotide may be methylated to form 5-methylcytosine"
catggtgtatatgtgccacattttctttgtccagtctacttctcatacagactatttctacgcctttcattcacctggtggaaactctatcctttttcctgaagttggcatttctcctgaca

SEQ ID NO: 17611 - DNA, 122 bp, Homo sapiens
  misc_feature (61)..(62): /note="This region represents a CpG dinucleotide"
  misc_feature (61)..(61): /note="Nucleotide may be methylated to form 5-methylcytosine"
agtctcagctttctcaactgaagatgaggctaacgtcatccatggcagcgtaatgagggccggtggagcccagggtgaggtgcactggagaccttcaagaaacacttctttgagaagactgt

SEQ ID NO: 17612 - DNA, 122 bp, Homo sapiens
  misc_feature (61)..(62): /note="This region represents a CpG dinucleotide"
  misc_feature (61)..(61): /note="Nucleotide may be methylated to form 5-methylcytosine"
aagtagtctcaactttagcctttttgactcaaaatatcccagacctggcaatggaatgagcgggattatctgcctttttgtttcacggcagtccagtcattctgaatgttacctttggtgtt

SEQ ID NO: 17613 - DNA, 122 bp, Homo sapiens
  misc_feature (61)..(62): /note="This region represents a CpG dinucleotide"
  misc_feature (61)..(61): /note="Nucleotide may be methylated to form 5-methylcytosine"
tcaacattggttatgacatctcatttctttcattttgtagctatttccttttctccacttcgcaaatagctccattctccccaaacacatacaatatcactcacaaggtagctctaagttct

SEQ ID NO: 17614 - DNA, 122 bp, Homo sapiens
  misc_feature (61)..(62): /note="This region represents a CpG dinucleotide"
  misc_feature (61)..(61): /note="Nucleotide may be methylated to form 5-methylcytosine"
acaagactacaaaggcttcatcatcctgacaagcagcagctcccactccagagcacaggccggctagcactgcagagcctctgtccagggccaggtagggctagggcccctggggaagggac

SEQ ID NO: 17615 - DNA, 122 bp, Homo sapiens
  misc_feature (61)..(62): /note="This region represents a CpG dinucleotide"
  misc_feature (61)..(61): /note="Nucleotide may be methylated to form 5-methylcytosine"
gatgtaacatgtcaagcagaaatagggagcatgtttacagccattctatgaaaaagtgttcggaatgtacagactagcacagaagctggactaattgaacaagtattgctgaaaatgagtgc

SEQ ID NO: 17616 - DNA, 122 bp, Homo sapiens
  misc_feature (61)..(62): /note="This region represents a CpG dinucleotide"
  misc_feature (61)..(61): /note="Nucleotide may be methylated to form 5-methylcytosine"
aatttgttttcttagggaggtgtgtgtgtgtgtgagagagagtgtgtgtgtgtgagtgtgcgcatgagctggtcagctgcagaaccttctggttagcaaacctgatagcatctagggtggag

SEQ ID NO: 17617 - DNA, 122 bp, Homo sapiens
  misc_feature (61)..(62): /note="This region represents a CpG dinucleotide"
  misc_feature (61)..(61): /note="Nucleotide may be methylated to form 5-methylcytosine"
gtgggggaattatagaaatcagctacgtaattccatggagtagctctgctgaaagtctaacgatatgctatgtccaaaggactgaagcaactatctggggtatgctatgggggccaacacag

SEQ ID NO: 17618 - DNA, 122 bp, Homo sapiens
  misc_feature (61)..(62): /note="This region represents a CpG dinucleotide"
  misc_feature (61)..(61): /note="Nucleotide may be methylated to form 5-methylcytosine"
agaggtcttgctatgttgcccaggctggtctcaaactcctggcctcatgccatcttcctgcgtaagcttcccaaagcactgagattatatgccttagccactgtgcctggccccattgtgct

SEQ ID NO: 17619 - DNA, 122 bp, Homo sapiens
  misc_feature (61)..(62): /note="This region represents a CpG dinucleotide"
  misc_feature (61)..(61): /note="Nucleotide may be methylated to form 5-methylcytosine"
attaagaaaccaatcactacactataaaccaatcactacactattcttctttcaaagaaacgaaggaagttctaggatcatgagagatggagagtattcaatctcctgaatgtaaatctacc

SEQ ID NO: 17620 - DNA, 122 bp, Homo sapiens
  misc_feature (61)..(62): /note="This region represents a CpG dinucleotide"
  misc_feature (61)..(61): /note="Nucleotide may be methylated to form 5-methylcytosine"
ttttaaacgttagttttcattttaccagtgcaactctgctattggcacatctatgaaatacgtaaagctatcattttaatactaaagaggaaacacaaatttgactcatttccccagaaaat

SEQ ID NO: 17621 - DNA, 122 bp, Homo sapiens
  misc_feature (61)..(62): /note="This region represents a CpG dinucleotide"
  misc_feature (61)..(61): /note="Nucleotide may be methylated to form 5-methylcytosine"
ggcctgtgaggatcatctggggcctggtatgggtgaagtcaggggcaaggttggggctgacgtggattctctcttcctctctcgggcacaggagccaagccgccatggcctaccacagcttc

SEQ ID NO: 17622 - DNA, 122 bp, Homo sapiens
  misc_feature (61)..(62): /note="This region represents a CpG dinucleotide"
  misc_feature (61)..(61): /note="Nucleotide may be methylated to form 5-methylcytosine"
ttaaaagaagtcaattatccctcttatgactgattcataatttagccataaggagctggacgttacttcattctgacaatgagccatgatccctttgttaggccaagtttagacaaggaatc

SEQ ID NO: 17623 - DNA, 122 bp, Homo sapiens
  misc_feature (61)..(62): /note="This region represents a CpG dinucleotide"
  misc_feature (61)..(61): /note="Nucleotide may be methylated to form 5-methylcytosine"
agtcaaagttctttcacagcaagcaagtgttgccaaatgatcagttcaaagaagatttcacgccaatgaagatgattacaaaaaggaaaaagaggcaatgtcgcagtagttgccagaaagga

SEQ ID NO: 17624 - DNA, 122 bp, Homo sapiens
  misc_feature (61)..(62): /note="This region represents a CpG dinucleotide"
  misc_feature (61)..(61): /note="Nucleotide may be methylated to form 5-methylcytosine"
gccgctggcaagctggtggctgggcacagctgcttctccttgggatgtggtagctgcagccgcctgctcagtccatccttcctgatgggggttggcattgcacggtgcgatgggtttgtgaa

SEQ ID NO: 17625 - DNA, 122 bp, Homo sapiens
  misc_feature (61)..(62): /note="This region represents a CpG dinucleotide"
  misc_feature (61)..(61): /note="Nucleotide may be methylated to form 5-methylcytosine"
gccagaaatggacacaatttcacttgcactatattaaagtggtcaaggcagtcatgggcccgcccagatccaagggaaagggagtccaggagtctgtggtggcttgaacccaccacacccac

SEQ ID NO: 17626 - DNA, 122 bp, Homo sapiens
  misc_feature (61)..(62): /note="This region represents a CpG dinucleotide"
  misc_feature (61)..(61): /note="Nucleotide may be methylated to form 5-methylcytosine"
cttttttctatttgtttttcatctggatatttgattctgcatatcctagcccaagtgaaccgagaagatcgagttgtaggactaaaggatagacatgcagaaatgcattttaaaaatctgtt

SEQ ID NO: 17627 - DNA, 122 bp, Homo sapiens
  misc_feature (61)..(62): /note="This region represents a CpG dinucleotide"
  misc_feature (61)..(61): /note="Nucleotide may be methylated to form 5-methylcytosine"
cagtgcctgaattatcttccatgataattccttctttggggcctggcattgaaggaactgcgaataggcaaaatcactatatggaagtagtagcaaaatagtgctatgagttttatcattta

SEQ ID NO: 17628 - DNA, 122 bp, Homo sapiens
  misc_feature (61)..(62): /note="This region represents a CpG dinucleotide"
  misc_feature (61)..(61): /note="Nucleotide may be methylated to form 5-methylcytosine"
acagcagtgcagacacatttccaggtggagggtttgcagcctgctctaacttaatgttcccgctcccacactccactcccagtctgaaatgcatttcgaggagaacaagtaaaacctgccct

SEQ ID NO: 17629 - DNA, 122 bp, Homo sapiens
  misc_feature (61)..(62): /note="This region represents a CpG dinucleotide"
  misc_feature (61)..(61): /note="Nucleotide may be methylated to form 5-methylcytosine"
acgccaccgtgggcctggagtcccctcaccctcgacctgggctcgcccccaccctggacccgggtcaggtggtaccaagcactatgggcactgtctcctcgcaggggatggtggacaccgca

SEQ ID NO: 17630 - DNA, 122 bp, Homo sapiens
  misc_feature (61)..(62): /note="This region represents a CpG dinucleotide"
  misc_feature (61)..(61): /note="Nucleotide may be methylated to form 5-methylcytosine"
tcttaaatagatgagggatcctcattgatgccaccttagggatgaagaaatgaggtctagcgatggcaagtaacacacccaaggtcacaaagcgagtcagtggcacagcctgcactagaatc

SEQ ID NO: 17631 - DNA, 122 bp, Homo sapiens
  misc_feature (61)..(62): /note="This region represents a CpG dinucleotide"
  misc_feature (61)..(61): /note="Nucleotide may be methylated to form 5-methylcytosine"
ataatcattctaagactaaggttatcctgaacaaactatggttatctccacccccaataccgtaatcataatgacaactacagcattcacctaatgcctagcagttttaaaagtactttcct

SEQ ID NO: 17632 - DNA, 122 bp, Homo sapiens
  misc_feature (61)..(62): /note="This region represents a CpG dinucleotide"
  misc_feature (61)..(61): /note="Nucleotide may be methylated to form 5-methylcytosine"
ttgtgctatctcatttaattcttacaagctttaaaaatagtgccagaaacattgtaagcacgtgtttgtttgagggcctcaggtgtacaaattggctgatgacaaactactggccctagcag

SEQ ID NO: 17633 - DNA, 122 bp, Homo sapiens
  misc_feature (61)..(62): /note="This region represents a CpG dinucleotide"
  misc_feature (61)..(61): /note="Nucleotide may be methylated to form 5-methylcytosine"
gaggaggacgaggaggaagaagagagtgaaagctcagactcagaggaagaaagggctcatcgcttagcagaactacaggaacaggtattttgtcactcttgaaagtttttattgggtaagag

SEQ ID NO: 17634 - DNA, 122 bp, Homo sapiens
  misc_feature (61)..(62): /note="This region represents a CpG dinucleotide"
  misc_feature (61)..(61): /note="Nucleotide may be methylated to form 5-methylcytosine"
aacagaaccatattacattcatcaacagatacacactttcaatttcatatactgaaataccgaatttaatacagatcggtttctaagttctaatttttaagccttgtcccagaaattacaat

SEQ ID NO: 17635 - DNA, 122 bp, Homo sapiens
  misc_feature (61)..(62): /note="This region represents a CpG dinucleotide"
  misc_feature (61)..(61): /note="Nucleotide may be methylated to form 5-methylcytosine"
atatcatgtggcaaagaggagatgtcattagaccataagcaaaaaaaaaaaagcattgcacgggcattaacacaacatttaagtgtcctcctcaaggagccacaggcacagggagtggtgca

SEQ ID NO: 17636 - DNA, 122 bp, Homo sapiens
  misc_feature (61)..(62): /note="This region represents a CpG dinucleotide"
  misc_feature (61)..(61): /note="Nucleotide may be methylated to form 5-methylcytosine"
catgggtggactgaggctcagactacgggggcacctggttcatgacggagacatcagctgcgtgagtccagtaacagtcgtgcacagagacgaaggtcaggcccttcctgtggcagagcgga

SEQ ID NO: 17637 - DNA, 122 bp, Homo sapiens
  misc_feature (61)..(62): /note="This region represents a CpG dinucleotide"
  misc_feature (61)..(61): /note="Nucleotide may be methylated to form 5-methylcytosine"
tggtatatctaaacaggaacaaacatgtacaagactcagttcaaactagaaggcccttttcgcgaatgttttttaaagtgagtggtaaactgcaaaagtcacaatatgagatccattcctcc

SEQ ID NO: 17638 - DNA, 122 bp, Homo sapiens
  misc_feature (61)..(62): /note="This region represents a CpG dinucleotide"
  misc_feature (61)..(61): /note="Nucleotide may be methylated to form 5-methylcytosine"
acctcatcggctcagctcttgccacacagacatacacaggccatctggagctgcacgggacgctgaaaccaccactgagggcaggcgagagccaaatcaagaaccaagggggccggcacagg

SEQ ID NO: 17639 - DNA, 122 bp, Homo sapiens
  misc_feature (61)..(62): /note="This region represents a CpG dinucleotide"
  misc_feature (61)..(61): /note="Nucleotide may be methylated to form 5-methylcytosine"
ctccctctgtggtcttgctcactgtctctggtgcccaatcagtgctgggcactcagtaagcgcttgataagcctgtggatcagtgagaggatactcagaagtttgggagtgacctcaccaac

SEQ ID NO: 17640 - DNA, 122 bp, Homo sapiens
  misc_feature (61)..(62): /note="This region represents a CpG dinucleotide"
  misc_feature (61)..(61): /note="Nucleotide may be methylated to form 5-methylcytosine"
cctcccatctcgggttccaggaggatcacaagctattcagcaggcaagactcagattagccgctgttcaagctctggcatgcatggtatatatggatacatccaaggtcaccagggcactat

SEQ ID NO: 17641 - DNA, 122 bp, Homo sapiens
  misc_feature (61)..(62): /note="This region represents a CpG dinucleotide"
  misc_feature (61)..(61): /note="Nucleotide may be methylated to form 5-methylcytosine"
tttaaaaattcctctggtaatcctagtgcctatcagggctggaaaccactgaagcagagccgtactgcagggcccaagagcatacaaagctagttatttggatccaaagttggtcaagtgtg

SEQ ID NO: 17642 - DNA, 122 bp, Homo sapiens
  misc_feature (61)..(62): /note="This region represents a CpG dinucleotide"
  misc_feature (61)..(61): /note="Nucleotide may be methylated to form 5-methylcytosine"
acaggcccgagttccaactgtagctctgacataaccagctgtgtgacactgggcaattcacgtaacttctgtgggcatctccacccttgtttgcagatgagatctgcccccagctctaagat

SEQ ID NO: 17643 - DNA, 122 bp, Homo sapiens
  misc_feature (61)..(62): /note="This region represents a CpG dinucleotide"
  misc_feature (61)..(61): /note="Nucleotide may be methylated to form 5-methylcytosine"
accgcgcccggcctgcatccagcagcttttgctgggttaggagtaatcacagccctgcctcgttgcttgatttgcaggcagcacccggtacacacccaagacaggcagcaccatctacactg

SEQ ID NO: 17644 - DNA, 122 bp, Homo sapiens
  misc_feature (61)..(62): /note="This region represents a CpG dinucleotide"
  misc_feature (61)..(61): /note="Nucleotide may be methylated to form 5-methylcytosine"
taaagcccttactcagcacaaggcatagtgccaggctctgggatgcatagatgagggatacgtcataggcatcattgtgttcttaaagtaggcattgttgcagggagtattgagtgtaggaa

SEQ ID NO: 17645 - DNA, 122 bp, Homo sapiens
  misc_feature (61)..(62): /note="This region represents a CpG dinucleotide"
  misc_feature (61)..(61): /note="Nucleotide may be methylated to form 5-methylcytosine"
aatttggctacagttttctgtctgcagaaaggctcccaaagggaagacgccaggctggaacgagagtgactcatcccgggccctcattgtgcctgattcacccagaggaagctttgtgtgga

SEQ ID NO: 17646 - DNA, 122 bp, Homo sapiens
  misc_feature (61)..(62): /note="This region represents a CpG dinucleotide"
  misc_feature (61)..(61): /note="Nucleotide may be methylated to form 5-methylcytosine"
gaagcagaattctggtgtcatagactaggttccggatcccgctctgtcactaattagttgcgtgatcttggacaggtaagttacttaaggtcttcaagttcagcttccttggttataaaaca

SEQ ID NO: 17647 - DNA, 122 bp, Homo sapiens
  misc_feature (61)..(62): /note="This region represents a CpG dinucleotide"
  misc_feature (61)..(61): /note="Nucleotide may be methylated to form 5-methylcytosine"
aggacgccccctgccccggagcagcgcgtccagcgggggtcggcgtgagctgtgtggaggcgcccaccctcccttgcagccagaggtaggaagtagaagggaaagaggagaggtcgctctgt

SEQ ID NO: 17648 - DNA, 122 bp, Homo sapiens
  misc_feature (61)..(62): /note="This region represents a CpG dinucleotide"
  misc_feature (61)..(61): /note="Nucleotide may be methylated to form 5-methylcytosine"
tcagattcagattcacatatgcacaggaagcagtctatctgggagacaggaggaagcaagcgtttccacactgcattatgagtaactctgcagctgctgtcaattatctggagagaaacaca

SEQ ID NO: 17649 - DNA, 122 bp, Homo sapiens
  misc_feature (61)..(62): /note="This region represents a CpG dinucleotide"
  misc_feature (61)..(61): /note="Nucleotide may be methylated to form 5-methylcytosine"
gaactgcaccactaggacggacgacacaccgacgtaatgaccatagtaagaccccatgtacgtggctaatgaggcagtgacccgacgtggctcggaagccctgctggggagatcccgccccg

SEQ ID NO: 17650 - DNA, 122 bp, Homo sapiens
  misc_feature (61)..(62): /note="This region represents a CpG dinucleotide"
  misc_feature (61)..(61): /note="Nucleotide may be methylated to form 5-methylcytosine"
gcttcaggggtggaggaaaaaaatctgcaacttattgttatcctatattcacacaatatacgctgtgtgcctactacaaactggaaaccgttctcagctgtaagatccatcaatgcggagtt

SEQ ID NO: 17651 - DNA, 122 bp, Homo sapiens
  misc_feature (61)..(62): /note="This region represents a CpG dinucleotide"
  misc_feature (61)..(61): /note="Nucleotide may be methylated to form 5-methylcytosine"
ggagtctgtatgttctccccatgtctctgggtttcttctgggtgctctggtttcctcccacgtccccaaggtgtgtgtgtcaggtgcactggcgtgtctatgcggtcccagtctgagtgagt

SEQ ID NO: 17652 - DNA, 122 bp, Homo sapiens
  misc_feature (61)..(62): /note="This region represents a CpG dinucleotide"
  misc_feature (61)..(61): /note="Nucleotide may be methylated to form 5-methylcytosine"
gttttgatagttacctttgtcacactgtcttctgtattatgtttgccctcagcaacatgtcgtatctggcacagggctgacatcctgtttgtgctcagtcatttgtggaaggaagaagtcag

SEQ ID NO: 17653 - DNA, 122 bp, Homo sapiens
  misc_feature (61)..(62): /note="This region represents a CpG dinucleotide"
  misc_feature (61)..(61): /note="Nucleotide may be methylated to form 5-methylcytosine"
tgtttctctgtctctgtctctctcattcagtttctctccatttctctgtttctacatcttcgtctctccctgcagttccatctcttccagcctgtcccggagctctcccctgccagacacca

SEQ ID NO: 17654 - DNA, 122 bp, Homo sapiens
  misc_feature (61)..(62): /note="This region represents a CpG dinucleotide"
  misc_feature (61)..(61): /note="Nucleotide may be methylated to form 5-methylcytosine"
gggggggcccctggaaccctctgtgggctggcagtgtgcttcctgcacccagcgccagcccgccctggggaggggctgaacccgccctgctcgtgataaggcacaagcaagggctgccctga

SEQ ID NO: 17655 - DNA, 122 bp, Homo sapiens
  misc_feature (61)..(62): /note="This region represents a CpG dinucleotide"
  misc_feature (61)..(61): /note="Nucleotide may be methylated to form 5-methylcytosine"
ggggtatgggctttggaatcacactgtctggattcaagcctgattctgctgagtgacctgcgacaggttacctaaacacccagattccctagctgtgcagtggaggaagtggtagtatctac

SEQ ID NO: 17656 - DNA, 122 bp, Homo sapiens
  misc_feature (61)..(62): /note="This region represents a CpG dinucleotide"
  misc_feature (61)..(61): /note="Nucleotide may be methylated to form 5-methylcytosine"
ctaaataaatgttgggcgacagattttacagctaaacctcagatgttctataaaactactcgtatgtgtgtgtgtgtatatacacatattttaataagaaagagagagcagctatttgcttt

SEQ ID NO: 17657 - DNA, 122 bp, Homo sapiens
  misc_feature (61)..(62): /note="This region represents a CpG dinucleotide"
  misc_feature (61)..(61): /note="Nucleotide may be methylated to form 5-methylcytosine"
ctgaggccaggaagaaaaaagacaggactaatccaccccaattgtagacagtgggaacagcgctggcttgcttagaggtacagaggaaagcagcatgcaaccctgccccgtggtgaaggaag

SEQ ID NO: 17658 - DNA, 122 bp, Homo sapiens
  misc_feature (61)..(62): /note="This region represents a CpG dinucleotide"
  misc_feature (61)..(61): /note="Nucleotide may be methylated to form 5-methylcytosine"
tcagtgtaaaggaaggtgaagaatgccagggcctcatgaaggagggtgcgtgcagtgcagcgtgaacatttcaaggaaacttggtccagcctgagggtcaggaaatgaccttccaagaaata

SEQ ID NO: 17659 - DNA, 122 bp, Homo sapiens
  misc_feature (61)..(62): /note="This region represents a CpG dinucleotide"
  misc_feature (61)..(61): /note="Nucleotide may be methylated to form 5-methylcytosine"
aatacggatcccagacatttgtgggatacttgcatctccctatagcactttcccatgtatcgtctcatctgatctttagaagaaccctcctaggcatgcaggacagtgctgattacctcatt

SEQ ID NO: 17660 - DNA, 122 bp, Homo sapiens
  misc_feature (61)..(62): /note="This region represents a CpG dinucleotide"
  misc_feature (61)..(61): /note="Nucleotide may be methylated to form 5-methylcytosine"
tcaagtgtgctggaaagtgcggcattggaaaggctgatgtgataaaggagataacatgggcgaagctcctgacacatgcctgaaacctagtgtgggttcaacaagcatgaattctctctcac

SEQ ID NO: 17661 - DNA, 122 bp, Homo sapiens
  misc_feature (61)..(62): /note="This region represents a CpG dinucleotide"
  misc_feature (61)..(61): /note="Nucleotide may be methylated to form 5-methylcytosine"
ctggaatttctaagcaagcacataattagataagcaagcacagtgcatgggagtgcctggcgggaaagggaggaaaacaaagagttttaaagtacatttcaaggctatattttgagtttaaa

SEQ ID NO: 17662 - DNA, 122 bp, Homo sapiens
  misc_feature (61)..(62): /note="This region represents a CpG dinucleotide"
  misc_feature (61)..(61): /note="Nucleotide may be methylated to form 5-methylcytosine"
ggagtctttgttatgatttgtagttaacttaccctagtaaataggccagtctgttttcaacgactcaggtcaacaaggatagggatctggaactcggaagtattttacaatcaggttaaaga

SEQ ID NO: 17663 - DNA, 122 bp, Homo sapiens
  misc_feature (61)..(62): /note="This region represents a CpG dinucleotide"
  misc_feature (61)..(61): /note="Nucleotide may be methylated to form 5-methylcytosine"
agttttacctgtatattcggtggaagatttcaggtgagcagaagttctgggaggattaagcgtcgagggagatcttgagaatgaacacagttgaaaatgaaatcagtccagttgtaagtaat

SEQ ID NO: 17664 - DNA, 122 bp, Homo sapiens
  misc_feature (61)..(62): /note="This region represents a CpG dinucleotide"
  misc_feature (61)..(61): /note="Nucleotide may be methylated to form 5-methylcytosine"
atatcattttattaattcatttttttctctataccttaaaatctatggcatctcatggttcgacattaggaaatccatcactatgattcagtaagtaaacaaattcaaggtgtcacatcata

SEQ ID NO: 17665 - DNA, 122 bp, Homo sapiens
  misc_feature (61)..(62): /note="This region represents a CpG dinucleotide"
  misc_feature (61)..(61): /note="Nucleotide may be methylated to form 5-methylcytosine"
tctgaagcacatgcgcaggggagtatgctgcagggtgaggtggagagccagggaagggcccggtagtgcaaggccaagtggctagtttaaagattttatcctttggcctgagagcaattgag

SEQ ID NO: 17666 - DNA, 122 bp, Homo sapiens
  misc_feature (61)..(62): /note="This region represents a CpG dinucleotide"
  misc_feature (61)..(61): /note="Nucleotide may be methylated to form 5-methylcytosine"
ccatttacccccattaatctaaacagttgacccacatgtctttcactttaccagctgatacgcaccttgaggcttgcctcttaattcaccattacatcagactgccaagcacaatatttgac

SEQ ID NO: 17667 - DNA, 122 bp, Homo sapiens
  misc_feature (61)..(62): /note="This region represents a CpG dinucleotide"
  misc_feature (61)..(61): /note="Nucleotide may be methylated to form 5-methylcytosine"
gctggtgatgtttcctcaggaggctgcccatggtgtggtcctggcgacgcaccagcagcacgtcaccctcttgacccgggcgtgtgcctggctagctgagttttaagcctctctctggtgac

SEQ ID NO: 17668 - DNA, 122 bp, Homo sapiens
  misc_feature (61)..(62): /note="This region represents a CpG dinucleotide"
  misc_feature (61)..(61): /note="Nucleotide may be methylated to form 5-methylcytosine"
tgggtacaggttgtgtcttattcatctctgaatcatcagatcctagtgcagtccttgcctcgcaggagatactggcctagaagcttgctgaatgaatgaatgaatgaatgagcacacaatca

SEQ ID NO: 17669 - DNA, 122 bp, Homo sapiens
  misc_feature (61)..(62): /note="This region represents a CpG dinucleotide"
  misc_feature (61)..(61): /note="Nucleotide may be methylated to form 5-methylcytosine"
ctgctcccaaatagggacagtgtcacaaggtggctcgaggcagaccagacacacactggccgtgggagcttgtgggcggggtttcttcctgttgtgaatacgtgcagaagtgtcactccggc

SEQ ID NO: 17670 - DNA, 122 bp, Homo sapiens
  misc_feature (61)..(62): /note="This region represents a CpG dinucleotide"
  misc_feature (61)..(61): /note="Nucleotide may be methylated to form 5-methylcytosine"
ggatgagctgcagcctgacttgataggtagacaagattgaaaacctaacttaggagtatgcgccagaaacaatagatgagttttggccaatcctagcagcagaagttcaaccactcttacac

SEQ ID NO: 17671 - DNA, 122 bp, Homo sapiens
  misc_feature (61)..(62): /note="This region represents a CpG dinucleotide"
  misc_feature (61)..(61): /note="Nucleotide may be methylated to form 5-methylcytosine"
ataaggtcacattttgaggtatagaggattagaacatcaacataaatgttaggagggacacgatgcaaccataacagtggtgaaggctcaggaatggacagctgtagacttggccacaccca

SEQ ID NO: 17672 - DNA, 122 bp, Homo sapiens
  misc_feature (61)..(62): /note="This region represents a CpG dinucleotide"
  misc_feature (61)..(61): /note="Nucleotide may be methylated to form 5-methylcytosine"
gccctccactcactagatgccagcagcactcccttctctagtggcagcaataaaaaatgtcgctttggctgagtgcagtagctcatgcctgtaatcccagcgatttgggaggctggggccag

SEQ ID NO: 17673 - DNA, 122 bp, Homo sapiens
  misc_feature (61)..(62): /note="This region represents a CpG dinucleotide"
  misc_feature (61)..(61): /note="Nucleotide may be methylated to form 5-methylcytosine"
atagtacttgcctcacacagttgcttcaaggattagcaaaaaagataggcaacacccctgcgtggtactgctaccaccctgcaacacccgcccagtcatcagagagaattgggtggagcacc

SEQ ID NO: 17674 - DNA, 122 bp, Homo sapiens
  misc_feature (61)..(62): /note="This region represents a CpG dinucleotide"
  misc_feature (61)..(61): /note="Nucleotide may be methylated to form 5-methylcytosine"
cccttttctctcttttggtttctctcttggcgtgtgatttctgcacatgcagctcctcttcgccctccaccgtgagtggaagccgcttgagactcttaccaggagcagatgctagcaccatg

SEQ ID NO: 17675 - DNA, 122 bp, Homo sapiens
  misc_feature (61)..(62): /note="This region represents a CpG dinucleotide"
  misc_feature (61)..(61): /note="Nucleotide may be methylated to form 5-methylcytosine"
ttcagcaagacacatgctctctgagcctgttcagacagggacaatattcactttgcagaccggctctgaggactgaaggaagcatgttggctgggcctgcagtgtccaactcatattagatg

SEQ ID NO: 17676 - DNA, 122 bp, Homo sapiens
  misc_feature (61)..(62): /note="This region represents a CpG dinucleotide"
  misc_feature (61)..(61): /note="Nucleotide may be methylated to form 5-methylcytosine"
actagggctgtttgaccacccaggaactggaactagctggttgttacacccaaatctcttcggatgctgggctcctaaacgtgtcactgtgcagatgcagttgggagtaggcaggtgaagag

SEQ ID NO: 17677 - DNA, 122 bp, Homo sapiens
  misc_feature (61)..(62): /note="This region represents a CpG dinucleotide"
  misc_feature (61)..(61): /note="Nucleotide may be methylated to form 5-methylcytosine"
gaattttcctttttctaacagcaagataacatcagtcattcccctccaaaccctaagatgcgtacatactcctttacttgttaccctatccctatatatgttaaccacacttttggtttgtc

SEQ ID NO: 17678 - DNA, 122 bp, Homo sapiens
  misc_feature (61)..(62): /note="This region represents a CpG dinucleotide"
  misc_feature (61)..(61): /note="Nucleotide may be methylated to form 5-methylcytosine"
ggtgactagcaatttaattactttcatttcttctatcctcagctgctctaccctaaccagcggccctctcctcttcaccttatgagacttctgcactgcttcctccccctggccagagccag

SEQ ID NO: 17679 - DNA, 122 bp, Homo sapiens
  misc_feature (61)..(62): /note="This region represents a CpG dinucleotide"
  misc_feature (61)..(61): /note="Nucleotide may be methylated to form 5-methylcytosine"
tgattcacaggaacattaagaaaaccttgccaggctaagcaattccaggcagccttcagccgccaccaccggtgatgaatcacagaggctgctgccagagatgggacattttgggactctgc

SEQ ID NO: 17680 - DNA, 122 bp, Homo sapiens
  misc_feature (61)..(62): /note="This region represents a CpG dinucleotide"
  misc_feature (61)..(61): /note="Nucleotide may be methylated to form 5-methylcytosine"
aggcagagttgggaatattacatccattatcattccacaaaatgtaagatcctgtgaggacgcgtggtggcgctgcaggataagaaggcacaaaccagaaccgcagctgcagctccattaac

SEQ ID NO: 17681 - DNA, 122 bp, Homo sapiens
  misc_feature (61)..(62): /note="This region represents a CpG dinucleotide"
  misc_feature (61)..(61): /note="Nucleotide may be methylated to form 5-methylcytosine"
ccgccttcttgtttcagctctgccactgacttccctgtttcatatggcccttaagcacagcgctgacatggtatcgagtgtttttaaccacaagaaggctatgatgtgccttacagagaaaa

SEQ ID NO: 17682 - DNA, 122 bp, Homo sapiens
  misc_feature (61)..(62): /note="This region represents a CpG dinucleotide"
  misc_feature (61)..(61): /note="Nucleotide may be methylated to form 5-methylcytosine"
tctgtgaagggtgtgcacagagagcttcggtagcctgcgaagcagccattttcacttccacggagcaggtattttattgcattatttcgagctcaaggactccagaattagatccccaaaat

SEQ ID NO: 17683 - DNA, 122 bp, Homo sapiens
  misc_feature (61)..(62): /note="This region represents a CpG dinucleotide"
  misc_feature (61)..(61): /note="Nucleotide may be methylated to form 5-methylcytosine"
atacagatgagaaatcaagcacagagaggttaaatcactcatcaaagcttagacagtaagcgctggggctggtcttgaaacccaagtgccctggccctggagcacatgcccttagccactgt

SEQ ID NO: 17684 - DNA, 122 bp, Homo sapiens
  misc_feature (61)..(62): /note="This region represents a CpG dinucleotide"
  misc_feature (61)..(61): /note="Nucleotide may be methylated to form 5-methylcytosine"
aaactacaggaaagggaagattaaaaaaaccccaagtccctttaaacagttaaccctgagcgtggctggggctgtggtaactaaagacccattttctaaattttgccggctttatgttcttc

SEQ ID NO: 17685 - DNA, 122 bp, Homo sapiens
  misc_feature (61)..(62): /note="This region represents a CpG dinucleotide"
  misc_feature (61)..(61): /note="Nucleotide may be methylated to form 5-methylcytosine"
caaacccgagaactgcaggagagacaggaggcagtaggtgacgcggggaggcggcccgaccggacagcgccgtgtcctcagaccgtcatgccatccccttggtttcctcgcctgcacggggg

SEQ ID NO: 17686 - DNA, 122 bp, Homo sapiens
  misc_feature (61)..(62): /note="This region represents a CpG dinucleotide"
  misc_feature (61)..(61): /note="Nucleotide may be methylated to form 5-methylcytosine"
ataacaggctttagtcaggcagatctggcttgaaacctaaagtcattctgcagctgtttgcgtttggacaaatgccttgacctctctgagtatgtttgttctcatctgaaaaatggacataa

SEQ ID NO: 17687 - DNA, 122 bp, Homo sapiens
  misc_feature (61)..(62): /note="This region represents a CpG dinucleotide"
  misc_feature (61)..(61): /note="Nucleotide may be methylated to form 5-methylcytosine"
agttcatgtccatgtatctttctgctatgaatgcccagcgcaggcccctcccacgttcagcgcaggctcgccaacgcctaccactcagtgttccaaactgggtgcctttgaaagcactgcac

SEQ ID NO: 17688 - DNA, 122 bp, Homo sapiens
  misc_feature (61)..(62): /note="This region represents a CpG dinucleotide"
  misc_feature (61)..(61): /note="Nucleotide may be methylated to form 5-methylcytosine"
tcatagatcagtaattgtttcatttgtgcttgttttctcttccttctcaagggcaagaaccgtctttgtgtatattcctcaatgcttggtataaagcaggagatagatagatagatagatag

SEQ ID NO: 17689 - DNA, 122 bp, Homo sapiens
  misc_feature (61)..(62): /note="This region represents a CpG dinucleotide"
  misc_feature (61)..(61): /note="Nucleotide may be methylated to form 5-methylcytosine"
ataagttataaattgcacactgttctgagtagtgtgatgaaatgtcacaccatcctactccgtcctgcccaggatgtgaatctgaatcattcctttgtccagcatctccatgctgtatatgc

SEQ ID NO: 17690 - DNA, 122 bp, Homo sapiens
  misc_feature (61)..(62): /note="This region represents a CpG dinucleotide"
  misc_feature (61)..(61): /note="Nucleotide may be methylated to form 5-methylcytosine"
ttactgagatcagatctcactatactgcccatgctgaagtgcagtggctattcacaggtacgatcatgggccagtgtcatgatcaagtgcagccttgaactcctgggctcaagtgatcttcc

SEQ ID NO: 17691 - DNA, 122 bp, Homo sapiens
  misc_feature (61)..(62): /note="This region represents a CpG dinucleotide"
  misc_feature (61)..(61): /note="Nucleotide may be methylated to form 5-methylcytosine"
ggactttatggtttttgcctcattttttacttgctagacttgaatatgtttgttaatgtccgtagtccagaggaagaggatgtgagggcatgataaatcagttcagctcttatcttcaagtt

SEQ ID NO: 17692 - DNA, 122 bp, Homo sapiens
  misc_feature (61)..(62): /note="This region represents a CpG dinucleotide"
  misc_feature (61)..(61): /note="Nucleotide may be methylated to form 5-methylcytosine"
ttccttttctgagacttctggtttcttcctcatggctcatattatgactaatttcagacgcgttaaatccctctatcttgagacttgtgtacttgcgtgtacaagacaggtaacagtcttat

SEQ ID NO: 17693 - DNA, 122 bp, Homo sapiens
  misc_feature (61)..(62): /note="This region represents a CpG dinucleotide"
  misc_feature (61)..(61): /note="Nucleotide may be methylated to form 5-methylcytosine"
ctactatgacaccttcaaaggagatgactacaatgaggagaatcctactgaacccggcagcgacggcaccatgtcagacaaggaaattactcatgatgtcaaaggtaaccccatgtagagcc

SEQ ID NO: 17694 - DNA, 122 bp, Homo sapiens
  misc_feature (61)..(62): /note="This region represents a CpG dinucleotide"
  misc_feature (61)..(61): /note="Nucleotide may be methylated to form 5-methylcytosine"
gaacccaattatttattaatatatgaatgtaggaatgtagttcctactgaatccccagcacggtgactggcacattgtaaatgcttggtaaataaactcatgcaagaaaaggagaggtgaaa

SEQ ID NO: 17695 - DNA, 122 bp, Homo sapiens
  misc_feature (61)..(62): /note="This region represents a CpG dinucleotide"
  misc_feature (61)..(61): /note="Nucleotide may be methylated to form 5-methylcytosine"
tgagaagttatctaagaacacagggcaggagatggtaactcctccacagggcaggagatgcggtgattcaaaggtaatctgataagctgatatttgctttagggttactggatgacaatatg

SEQ ID NO: 17696 - DNA, 122 bp, Homo sapiens
  misc_feature (61)..(62): /note="This region represents a CpG dinucleotide"
  misc_feature (61)..(61): /note="Nucleotide may be methylated to form 5-methylcytosine"
gtattttgccctgcatttcccttgtgtttactatccagtcttcctgtttatcatttttgtcgacaacatgaaattctattgagagactgtctgaacatattgtaatgtagatgttcaggttt

SEQ ID NO: 17697 - DNA, 122 bp, Homo sapiens
  misc_feature (61)..(62): /note="This region represents a CpG dinucleotide"
  misc_feature (61)..(61): /note="Nucleotide may be methylated to form 5-methylcytosine"
tcttgcttggaagtgtgcgtgagagacttgttgtctctagccagcttgaaatgctcctcccgtttcttcccgtgatttgtcctcctcgtggagacattccttggcagctgtcggatgcctgc

SEQ ID NO: 17698 - DNA, 122 bp, Homo sapiens
  misc_feature (61)..(62): /note="This region represents a CpG dinucleotide"
  misc_feature (61)..(61): /note="Nucleotide may be methylated to form 5-methylcytosine"
aggaatacatcatatagagaaaccttagtaatctttcacctatgaacggtcttattcctacgctcatttgtaagacagttgttaagagctcagaaccacattttctataggaacattttaaa

SEQ ID NO: 17699 - DNA, 122 bp, Homo sapiens
  misc_feature (61)..(62): /note="This region represents a CpG dinucleotide"
  misc_feature (61)..(61): /note="Nucleotide may be methylated to form 5-methylcytosine"
tcctttatgtgagacacaaagttctgttctgtttgagcaactattttattatgtgatttgcggatgaaccaagccctaagtaatacaggtactgaactggaaataatagtatttggattcta

SEQ ID NO: 17700 - DNA, 122 bp, Homo sapiens
  misc_feature (61)..(62): /note="This region represents a CpG dinucleotide"
  misc_feature (61)..(61): /note="Nucleotide may be methylated to form 5-methylcytosine"
cagggcctggccgcgccccgctccctccccgccgatccgcctgccctttgtccccgtgaccgccaccccttaacacccagatattctaattcagtacatctgagtgaggtccaggattctat

SEQ ID NO: 17701 - DNA, 122 bp, Homo sapiens
  misc_feature (61)..(62): /note="This region represents a CpG dinucleotide"
  misc_feature (61)..(61): /note="Nucleotide may be methylated to form 5-methylcytosine"
ttgtcatcttcttataaggacaccagtcatactggattacgactcatcctaatgaactcacgttaacttgattatatatacagacttgatttccaaataaggccacatttacgtggactggg

SEQ ID NO: 17702 - DNA, 122 bp, Homo sapiens
  misc_feature (61)..(62): /note="This region represents a CpG dinucleotide"
  misc_feature (61)..(61): /note="Nucleotide may be methylated to form 5-methylcytosine"
ccacttaactcttctcattcaccaacaggctgaagaactgaaactggccacccagctgaccggaccggtcatgcccgtccggaacgtaagtgaacacttactcaaatccaggcttcagacga

SEQ ID NO: 17703 - DNA, 122 bp, Homo sapiens
  misc_feature (61)..(62): /note="This region represents a CpG dinucleotide"
  misc_feature (61)..(61): /note="Nucleotide may be methylated to form 5-methylcytosine"
tgtgcataagattgcattttaccctcttctaattgattttctaaaacagactgcctttggcgttgttactttatttggcatatcctggagaatataaagataggaacatatgtgaatagatg

SEQ ID NO: 17704 - DNA, 122 bp, Homo sapiens
  misc_feature (61)..(62): /note="This region represents a CpG dinucleotide"
  misc_feature (61)..(61): /note="Nucleotide may be methylated to form 5-methylcytosine"
tcgagaacttggtgctgattagaggtgtgattgcattcatggtaatagggatgagtgtcacgaactgctgtgtgttctgctggtgagcttcactgcaatactgcactaaccagtgagtgtaa

SEQ ID NO: 17705 - DNA, 122 bp, Homo sapiens
  misc_feature (61)..(62): /note="This region represents a CpG dinucleotide"
  misc_feature (61)..(61): /note="Nucleotide may be methylated to form 5-methylcytosine"
aaaccataaacttatttatctgaatgactttctgtttagggatactaagaaaagaagttacgtgaggtaatcatgctggtgctgaggttaagtttgtgcagtttcacttcttccttaatagt

SEQ ID NO: 17706 - DNA, 122 bp, Homo sapiens
  misc_feature (61)..(62): /note="This region represents a CpG dinucleotide"
  misc_feature (61)..(61): /note="Nucleotide may be methylated to form 5-methylcytosine"
gctctgagagtcacaataaggccggaacacccctgcagttgtgagcccaaaatgtccttacggcacatgggccagagagtctcctccttcccgaaacagggtcttcgccaggcctttatatt

SEQ ID NO: 17707 - DNA, 122 bp, Homo sapiens
  misc_feature (61)..(62): /note="This region represents a CpG dinucleotide"
  misc_feature (61)..(61): /note="Nucleotide may be methylated to form 5-methylcytosine"
atacacaatattatagacgtatgaagaaggacctgcacttcctacacatgaaagtagttacgatttatagagccctgatttggtcccaggtgctgtgttacaagtgctaagctactgagtca

SEQ ID NO: 17708 - DNA, 122 bp, Homo sapiens
  misc_feature (61)..(62): /note="This region represents a CpG dinucleotide"
  misc_feature (61)..(61): /note="Nucleotide may be methylated to form 5-methylcytosine"
gaaatggaagaaatcgtgacactggtgctgtaccatctgttctgtgaattccctggccatcgtctccctctgtttcctgtgtttcttattgggactctgtctgtccgatattaggtcctctg

SEQ ID NO: 17709 - DNA, 122 bp, Homo sapiens
  misc_feature (61)..(62): /note="This region represents a CpG dinucleotide"
  misc_feature (61)..(61): /note="Nucleotide may be methylated to form 5-methylcytosine"
atcttgtgcaaattaagcccagaaaacacagctgggactccatccctcacctcatccaggcgcagatatcaccagcaggaaacagaaagccagaggcttttgtgcagccactttccttacta

SEQ ID NO: 17710 - DNA, 122 bp, Homo sapiens
  misc_feature (61)..(62): /note="This region represents a CpG dinucleotide"
  misc_feature (61)..(61): /note="Nucleotide may be methylated to form 5-methylcytosine"
ttgttgcataaaagcagctgtagatgatacacaaatgggtgaggctgtattccaatgaaacgttatttgcaaaaacaggtggtagattaaatttggtcccaaggcttacttgggaaaaaaaa

SEQ ID NO: 17711 - DNA, 122 bp, Homo sapiens
  misc_feature (61)..(62): /note="This region represents a CpG dinucleotide"
  misc_feature (61)..(61): /note="Nucleotide may be methylated to form 5-methylcytosine"
ctcagacccagggaggagggatttgctgctttcagcctccccctcctgctttggtgccgacgtccatatgtggcatctcgggttggtttcccctggcacccagcatgtcccggcctcaccca

SEQ ID NO: 17712 - DNA, 122 bp, Homo sapiens
  misc_feature (61)..(62): /note="This region represents a CpG dinucleotide"
  misc_feature (61)..(61): /note="Nucleotide may be methylated to form 5-methylcytosine"
caagccgggaaaagtcagcagttgcccccttgaagctggggaacagtcatgttctgacttcgctggcactgccacaaaccatccttggctaaagtcagccagtgactcataatagtgttcaa

SEQ ID NO: 17713 - DNA, 122 bp, Homo sapiens
  misc_feature (61)..(62): /note="This region represents a CpG dinucleotide"
  misc_feature (61)..(61): /note="Nucleotide may be methylated to form 5-methylcytosine"
gctcttctgtcattgccacctaattgtaggcctctgcttgctagttgtatccactgtttacgttatagagaaatcttttcacatatgtaaggactttatatctgtgtgtgtgcccattcatt

SEQ ID NO: 17714 - DNA, 122 bp, Homo sapiens
  misc_feature (61)..(62): /note="This region represents a CpG dinucleotide"
  misc_feature (61)..(61): /note="Nucleotide may be methylated to form 5-methylcytosine"
cccctgcctcctgcacaactccctcccccaaagctcaaaacagctcctggagcaggcccacgtgctgcccaagttgcccaagttgagtccttgttgccactcaacaggaccactggttacca

SEQ ID NO: 17715 - DNA, 122 bp, Homo sapiens
  misc_feature (61)..(62): /note="This region represents a CpG dinucleotide"
  misc_feature (61)..(61): /note="Nucleotide may be methylated to form 5-methylcytosine"
acaacagatccccagaacttattcctcttatctcactgacattttataccctttgaccaacgtctcccatctatctgtcttcccccatcatctcctgacaagcatcattctactcttcctct

SEQ ID NO: 17716 - DNA, 122 bp, Homo sapiens
  misc_feature (61)..(62): /note="This region represents a CpG dinucleotide"
  misc_feature (61)..(61): /note="Nucleotide may be methylated to form 5-methylcytosine"
agtaggactttcttatgaaacacattacatcataaattaacccgaatcatgttacagcttcgcttgcacaggctgctgcgttatcggagaatgtgggaagtgtgcaccacagctgaacactg

SEQ ID NO: 17717 - DNA, 122 bp, Homo sapiens
  misc_feature (61)..(62): /note="This region represents a CpG dinucleotide"
  misc_feature (61)..(61): /note="Nucleotide may be methylated to form 5-methylcytosine"
aattattagctaggtgttgacagcaagtgtcaggatgtatcaatattgcctgaacccagtcgtgattcaggaactacaacactgacctttaccccagacacagtgagtctaaaggcagttgt

SEQ ID NO: 17718 - DNA, 122 bp, Homo sapiens
  misc_feature (61)..(62): /note="This region represents a CpG dinucleotide"
  misc_feature (61)..(61): /note="Nucleotide may be methylated to form 5-methylcytosine"
ggctactgtacaaacaaagaaccacaggctgggaggctgaacaacagacctgcactctctcgcagctcggaggctgcaggtctgaaatcgaggggctgacagcgctggtttcctctggaggc

SEQ ID NO: 17719 - DNA, 122 bp, Homo sapiens
  misc_feature (61)..(62): /note="This region represents a CpG dinucleotide"
  misc_feature (61)..(61): /note="Nucleotide may be methylated to form 5-methylcytosine"
gcatatttggagatgacctcatccagccgactcatggccaaactccggttttcccgaaggcgccgggccaacacaggatctgatagtgcagggtcaacgcctacgtgggaagacataaagtc

SEQ ID NO: 17720 - DNA, 122 bp, Homo sapiens
  misc_feature (61)..(62): /note="This region represents a CpG dinucleotide"
  misc_feature (61)..(61): /note="Nucleotide may be methylated to form 5-methylcytosine"
ctgaaaagacagtgagagaaggcagcaggcaaacctgggctattaaccacccaaagccagcgcctcctggcagaaatcttagtgtttctggttgtagacactcagcttggcagaggttgaga

SEQ ID NO: 17721 - DNA, 122 bp, Homo sapiens
  misc_feature (61)..(62): /note="This region represents a CpG dinucleotide"
  misc_feature (61)..(61): /note="Nucleotide may be methylated to form 5-methylcytosine"
ggggacagcaggtgcgccagaaaggtgaacaaagggaggacttcagctctgggaaagctacggctccacccaaagtctgagacaaagaggccaagagccctgcaaagaaacccaaccaaccg

SEQ ID NO: 17722 - DNA, 122 bp, Homo sapiens
  misc_feature (61)..(62): /note="This region represents a CpG dinucleotide"
  misc_feature (61)..(61): /note="Nucleotide may be methylated to form 5-methylcytosine"
tttcctttggcagcgtgtttccttttccgagtatgtgctgttaaactagattggccggttcgctttccatttcctgacacttgacatggaatgcctttgaccattggtgctctgacagagaa

SEQ ID NO: 17723 - DNA, 122 bp, Homo sapiens
  misc_feature (61)..(62): /note="This region represents a CpG dinucleotide"
  misc_feature (61)..(61): /note="Nucleotide may be methylated to form 5-methylcytosine"
ttgtctggttgaggagataagcatgcactagaaaatagtcagaaagtgtgggaatagaatcgtgagggtcctcagaggccagagagcatggtctgaataacaccacaatttgttggaagact

SEQ ID NO: 17724 - DNA, 122 bp, Homo sapiens
  misc_feature (61)..(62): /note="This region represents a CpG dinucleotide"
  misc_feature (61)..(61): /note="Nucleotide may be methylated to form 5-methylcytosine"
attctccccatgtttcctcacataaccttcctctgtgcatatctttgtgtcaaaaaatttcgtctttttataaggacagcagtcatattggattaaggcccaccctaatggcctcatttgaa

SEQ ID NO: 17725 - DNA, 122 bp, Homo sapiens
  misc_feature (61)..(62): /note="This region represents a CpG dinucleotide"
  misc_feature (61)..(61): /note="Nucleotide may be methylated to form 5-methylcytosine"
agtgaaataattttctcaatctccccctctgctaagtggcagagtcaggactagaatgtgcgtctctctgacgccatatcctgaactcagatactgtgactggattattcacaacttaatcc

SEQ ID NO: 17726 - DNA, 122 bp, Homo sapiens
  misc_feature (61)..(62): /note="This region represents a CpG dinucleotide"
  misc_feature (61)..(61): /note="Nucleotide may be methylated to form 5-methylcytosine"
ctttacagaaaaagtttgccaaaccctgctcttggtggtggggtcactgagagaaaacgacgtggagggtagccatgcagaatgtgatggacatgtataagaatgaaataaacctttattgt

SEQ ID NO: 17727 - DNA, 122 bp, Homo sapiens
  misc_feature (61)..(62): /note="This region represents a CpG dinucleotide"
  misc_feature (61)..(61): /note="Nucleotide may be methylated to form 5-methylcytosine"
aaatcaaagtaaaaaaactttgattgcttttgacaaactcaaagggcagcttctccctgccggaagggatgaagaaagcccaattctcttaagaacaacaaatgattgtctacagtgaccga

SEQ ID NO: 17728 - DNA, 122 bp, Homo sapiens
  misc_feature (61)..(62): /note="This region represents a CpG dinucleotide"
  misc_feature (61)..(61): /note="Nucleotide may be methylated to form 5-methylcytosine"
agtggagcagagtgagcacaaggaggagcattcggagatgaagtcagaggctgggccgtgcgccctgttgtaggtcagtgaaaggactttaggttttactctagggttaaaagtccctaaag

SEQ ID NO: 17729 - DNA, 122 bp, Homo sapiens
  misc_feature (61)..(62): /note="This region represents a CpG dinucleotide"
  misc_feature (61)..(61): /note="Nucleotide may be methylated to form 5-methylcytosine"
tacagcccctgaccctgcccaccacctacagacccctcctgataccctgaccactgcagccgtcccaacctcccaggtagatgagctctgtgaggccacttggttcctcccgtgtcaaggca

SEQ ID NO: 17730 - DNA, 122 bp, Homo sapiens
  misc_feature (61)..(62): /note="This region represents a CpG dinucleotide"
  misc_feature (61)..(61): /note="Nucleotide may be methylated to form 5-methylcytosine"
tggatccagctgaatcgaacacggccaaccctttgaactgcttcagcaaataatatttgacgcttggaatgcagatagcactgtacatattgtgtatgtttcaaagtggcagagcacacctt

SEQ ID NO: 17731 - DNA, 122 bp, Homo sapiens
  misc_feature (61)..(62): /note="This region represents a CpG dinucleotide"
  misc_feature (61)..(61): /note="Nucleotide may be methylated to form 5-methylcytosine"
ccttcaagttgtgtctgcccgcctcttgctactgtcttggatattttaaagtccttttgacgttgttctgatttctgggcaggggacagagtaagtgtgtatttgctctgagactgttaatt

SEQ ID NO: 17732 - DNA, 122 bp, Homo sapiens
  misc_feature (61)..(62): /note="This region represents a CpG dinucleotide"
  misc_feature (61)..(61): /note="Nucleotide may be methylated to form 5-methylcytosine"
tgcagacttagcggatcccatgagattttgactaccgtctgtgctcagaacagtttgagccgtatggaggaagtctccgcaccagtcttactgttggtggtcaccaggaagccagcagtgtg

SEQ ID NO: 17733 - DNA, 122 bp, Homo sapiens
  misc_feature (61)..(62): /note="This region represents a CpG dinucleotide"
  misc_feature (61)..(61): /note="Nucleotide may be methylated to form 5-methylcytosine"
ttgtcttcttatgaaaagaaaagtagtctcaacatgctctgagtaaacttgatgtgttcacgctccaagaaatagggaaggaagaaaaaggtgtgggcagtgtcataatggacttcattcat

SEQ ID NO: 17734 - DNA, 122 bp, Homo sapiens
  misc_feature (61)..(62): /note="This region represents a CpG dinucleotide"
  misc_feature (61)..(61): /note="Nucleotide may be methylated to form 5-methylcytosine"
gctgcacttgctgggggagtgtttacggagtgcgcctgtgtgtgagtgcgagcccacgtgcgtgtgtgtgagcctgtgtgtgtgcacgcactcaagtgagcaggggcgggcgctaggagggc

SEQ ID NO: 17735 - DNA, 122 bp, Homo sapiens
  misc_feature (61)..(62): /note="This region represents a CpG dinucleotide"
  misc_feature (61)..(61): /note="Nucleotide may be methylated to form 5-methylcytosine"
tgtctgtggtgaggtgctgtgccaacactgcagctcagttacctgtaaacacagaccccacggctacccaagtaaggtgacagtgacgaaaagcacttacaactgaatcattctcattgctg

SEQ ID NO: 17736 - DNA, 122 bp, Homo sapiens
  misc_feature (61)..(62): /note="This region represents a CpG dinucleotide"
  misc_feature (61)..(61): /note="Nucleotide may be methylated to form 5-methylcytosine"
acaggaccgtggtgagggccttgcccactcctgcctgtctgctccccctaacacctggatcgccagggaaacgccaggcctgagccagcagaaaccagcgcagcaggcaggccctcacccca

SEQ ID NO: 17737 - DNA, 122 bp, Homo sapiens
  misc_feature (61)..(62): /note="This region represents a CpG dinucleotide"
  misc_feature (61)..(61): /note="Nucleotide may be methylated to form 5-methylcytosine"
tgctgttgttggctagggtggtaggttgtgtcaattgtcaccatcaaattctcccctccacgtgaatgtgtgttgctcctatgactttctttttttgtttgtgttgtttgttttgagatgga

SEQ ID NO: 17738 - DNA, 122 bp, Homo sapiens
  misc_feature (61)..(62): /note="This region represents a CpG dinucleotide"
  misc_feature (61)..(61): /note="Nucleotide may be methylated to form 5-methylcytosine"
cagagagtggatcacactgtcgggctcagcacgaaagactgacagtctgggcacagcacccggtcctccctcccagcgctgactgcaatcccggccagggctgaggaaaccgcaggaccatg

SEQ ID NO: 17739 - DNA, 122 bp, Homo sapiens
  misc_feature (61)..(62): /note="This region represents a CpG dinucleotide"
  misc_feature (61)..(61): /note="Nucleotide may be methylated to form 5-methylcytosine"
ttagtcataataagaaaacaactatcggtacttgcaacatgatgactctccaaaccattacgttgagtgaaagaaactagacacaaaaaggacattgcagatgaagcacaagaaaggccaca

SEQ ID NO: 17740 - DNA, 122 bp, Homo sapiens
  misc_feature (61)..(62): /note="This region represents a CpG dinucleotide"
  misc_feature (61)..(61): /note="Nucleotide may be methylated to form 5-methylcytosine"
cagcctgtccccggaagacctgcaggccctggggagtgccatcagtatggtcacccagcacggcagcaccaccctcaccatccccagtcctgatgccgacctggccacatctggcacacata

SEQ ID NO: 17741 - DNA, 122 bp, Homo sapiens
  misc_feature (61)..(62): /note="This region represents a CpG dinucleotide"
  misc_feature (61)..(61): /note="Nucleotide may be methylated to form 5-methylcytosine"
tacaggaagactaatagggccccaaggcctcggggatgaacaaacacgatctttgtggtgcgcctttgttgagtaaccacggcaaactctctctgtgtgtctgtcttccttccttttattcc

SEQ ID NO: 17742 - DNA, 122 bp, Homo sapiens
  misc_feature (61)..(62): /note="This region represents a CpG dinucleotide"
  misc_feature (61)..(61): /note="Nucleotide may be methylated to form 5-methylcytosine"
gccttggggacattcaccttgggctccacaacctgtcagaaatgcccccaagcccaaaggcgtcgagagaatggccaggttgtttcagattgacacatatcctaatgtacaagtcagcccac

SEQ ID NO: 17743 - DNA, 122 bp, Homo sapiens
  misc_feature (61)..(62): /note="This region represents a CpG dinucleotide"
  misc_feature (61)..(61): /note="Nucleotide may be methylated to form 5-methylcytosine"
cttcccaattgctcattcatctaacacatacacaggctaatcagaggcaaacatccaccccgaactgttttagaaactagcttctcccatctgatactactgtatgtgtggtaagcagacat

SEQ ID NO: 17744 - DNA, 122 bp, Homo sapiens
  misc_feature (61)..(62): /note="This region represents a CpG dinucleotide"
  misc_feature (61)..(61): /note="Nucleotide may be methylated to form 5-methylcytosine"
aactatgtttaaaacttattttgaaagtagacaacagctaacattagtgttccgtgatgacgggaagtggagacaatgcagctgctaaatgagtccctttaaatattgacatgactgactct

SEQ ID NO: 17745 - DNA, 122 bp, Homo sapiens
  misc_feature (61)..(62): /note="This region represents a CpG dinucleotide"
  misc_feature (61)..(61): /note="Nucleotide may be methylated to form 5-methylcytosine"
ctcttacaagtaagtcatatgtggcagagacttctaggcatctactcaatatccattcctcgtttttttatgagtgggacactgggcattgtacccagttgatgagtcaatttctcaacctc

SEQ ID NO: 17746 - DNA, 122 bp, Homo sapiens
  misc_feature (61)..(62): /note="This region represents a CpG dinucleotide"
  misc_feature (61)..(61): /note="Nucleotide may be methylated to form 5-methylcytosine"
gtattgtgaagttatagtcctattgcctcaaaaagcttaccacaaaaagtcctgtatttgcgatgttcctttttcaccaaaataagtattttgcactttacccctattatcatcaagcagac

SEQ ID NO: 17747 - DNA, 122 bp, Homo sapiens
  misc_feature (61)..(62): /note="This region represents a CpG dinucleotide"
  misc_feature (61)..(61): /note="Nucleotide may be methylated to form 5-methylcytosine"
cagggagttaaaatccctgggtggaccagaggcagggcaaaaacagacatgaaatcctcacgcatgcaggacattcccgcctgggctctatcataaaacaagactaggcagggcatggtggc

SEQ ID NO: 17748 - DNA, 122 bp, Homo sapiens
  misc_feature (61)..(62): /note="This region represents a CpG dinucleotide"
  misc_feature (61)..(61): /note="Nucleotide may be methylated to form 5-methylcytosine"
ttacctagaagtggcagaaaagaactggaagggaagattgctatggattactgtatactccgctaagcattctctgtgaatgaactgcattcttgagtgaatcaccactggcattattgaat

SEQ ID NO: 17749 - DNA, 122 bp, Homo sapiens
  misc_feature (61)..(62): /note="This region represents a CpG dinucleotide"
  misc_feature (61)..(61): /note="Nucleotide may be methylated to form 5-methylcytosine"
gaacaaagattaagatgagtcagagactaaccctctggctactcatgatgggaagctcttcgcttcccttggaaagaaggttggtggccacatcagatatccaatactcaccgtaattatct

SEQ ID NO: 17750 - DNA, 122 bp, Homo sapiens
  misc_feature (61)..(62): /note="This region represents a CpG dinucleotide"
  misc_feature (61)..(61): /note="Nucleotide may be methylated to form 5-methylcytosine"
tatttcaccccctcaacaggcctctgagaaacaggcccctattatcgctcccacttttgccgaagaggcttaatacttagattatgcagcttccccaaggttacacaaccagcacgtggtgg

SEQ ID NO: 17751 - DNA, 122 bp, Homo sapiens
  misc_feature (61)..(62): /note="This region represents a CpG dinucleotide"
  misc_feature (61)..(61): /note="Nucleotide may be methylated to form 5-methylcytosine"
tgctctttccattactcatgcagtatttcccaacagagatgttcaaaacaatgacacagccgcattttccttcactataagcacttctttcttcccagctttactgaagtataactgaaaat

SEQ ID NO: 17752 - DNA, 122 bp, Homo sapiens
  misc_feature (61)..(62): /note="This region represents a CpG dinucleotide"
  misc_feature (61)..(61): /note="Nucleotide may be methylated to form 5-methylcytosine"
tctctcttaggaatttaccacaaacactttcataatatcataactcataaccaggaagagcggttagaatgatctgcagcaagtcagcagaaaggtaagcttggtaatttcttcagtcgtgc

SEQ ID NO: 17753 - DNA, 122 bp, Homo sapiens
  misc_feature (61)..(62): /note="This region represents a CpG dinucleotide"
  misc_feature (61)..(61): /note="Nucleotide may be methylated to form 5-methylcytosine"
gtgagggattgtttcggctgttgggtccttactcttgcttcttcctgtacatcacagacacgcttcctgtgctgtttgttgctctgtggtgtggttgatggggtgtctgaagtgttgctaat

SEQ ID NO: 17754 - DNA, 122 bp, Homo sapiens
  misc_feature (61)..(62): /note="This region represents a CpG dinucleotide"
  misc_feature (61)..(61): /note="Nucleotide may be methylated to form 5-methylcytosine"
gcaccccgacattcctgcggatggagtcatcagtctcttgcatggtggtgctgacaggatcgctcacctccaggctctcagcagtgatcctgtgacgcaagggctggccctgcactggggtt

SEQ ID NO: 17755 - DNA, 122 bp, Homo sapiens
  misc_feature (61)..(62): /note="This region represents a CpG dinucleotide"
  misc_feature (61)..(61): /note="Nucleotide may be methylated to form 5-methylcytosine"
agcaaagaacactgattacagaacacagaatagcagagtctattatctaaacctaatgcccgatggagataaaatatttcacattataatgcaagtcaatgggaaaaatagttgcgtgttta

SEQ ID NO: 17756 - DNA, 122 bp, Homo sapiens
  misc_feature (61)..(62): /note="This region represents a CpG dinucleotide"
  misc_feature (61)..(61): /note="Nucleotide may be methylated to form 5-methylcytosine"
caatctcaagtcggtcttgagtttgcccaataatcctaccatgtatccctcgtttatttacgtccttctaccccaccctgtgactgtttcacactttttcctccttcctcaactccacaaca

SEQ ID NO: 17757 - DNA, 122 bp, Homo sapiens
  misc_feature (61)..(62): /note="This region represents a CpG dinucleotide"
  misc_feature (61)..(61): /note="Nucleotide may be methylated to form 5-methylcytosine"
catctggagcccattgatcctaaagagcttcttgaggaatgcagggccgtcctgcacacccgacctccccggttccagagggattttgtggatctgaggacagattgccctagtacccaccc

SEQ ID NO: 17758 - DNA, 122 bp, Homo sapiens
  misc_feature (61)..(62): /note="This region represents a CpG dinucleotide"
  misc_feature (61)..(61): /note="Nucleotide may be methylated to form 5-methylcytosine"
cctcttggggagggctgtattgctgtcaaggtgtggataaagcatttcaggcaggcctgccgctggcccctggcccagtggtgtacagctgtgtcaataggcctttgaagtccacgcacacc

SEQ ID NO: 17759 - DNA, 122 bp, Homo sapiens
  misc_feature (61)..(62): /note="This region represents a CpG dinucleotide"
  misc_feature (61)..(61): /note="Nucleotide may be methylated to form 5-methylcytosine"
gtgggggaagactgatgtaatgatctcactttcctaccttaggtgtttcatcagtacagacgcctcaccttcccacgcacgcagactcgcagacgccctctgctggaactgacacgcagaca

SEQ ID NO: 17760 - DNA, 122 bp, Homo sapiens
  misc_feature (61)..(62): /note="This region represents a CpG dinucleotide"
  misc_feature (61)..(61): /note="Nucleotide may be methylated to form 5-methylcytosine"
accaaataactctttgtttcaggggactgtcctacacattgtgggatgtttagcagcctccgtggcttctacccactagatgccagcagcacaacacccctccccaacaatcatgacaatga

SEQ ID NO: 17761 - DNA, 122 bp, Homo sapiens
  misc_feature (61)..(62): /note="This region represents a CpG dinucleotide"
  misc_feature (61)..(61): /note="Nucleotide may be methylated to form 5-methylcytosine"
agggcgggacacataccaaatttgaggagaccagctgtggttagtgatgtggcatgggaccggaggagggcccaagaagtgtggcctcagcacactaacaggggtgaagccagaatccagga

SEQ ID NO: 17762 - DNA, 122 bp, Homo sapiens
  misc_feature (61)..(62): /note="This region represents a CpG dinucleotide"
  misc_feature (61)..(61): /note="Nucleotide may be methylated to form 5-methylcytosine"
acacactgtttcttttttggcaggcagggctagccgtcctcctaggtgttgctgtgtatccgttagggatgtaaagctgggggcccctttctgtattggtgttagtggccgtggatgaccat

SEQ ID NO: 17763 - DNA, 122 bp, Homo sapiens
  misc_feature (61)..(62): /note="This region represents a CpG dinucleotide"
  misc_feature (61)..(61): /note="Nucleotide may be methylated to form 5-methylcytosine"
ctccagtttgactctctgaggatactctctccctgcattactgaaagtgtcgtggttctacgaattaaagttatataagaagcatgtgagatgctggttaacccttcagagaatcagtccct

SEQ ID NO: 17764 - DNA, 122 bp, Homo sapiens
  misc_feature (61)..(62): /note="This region represents a CpG dinucleotide"
  misc_feature (61)..(61): /note="Nucleotide may be methylated to form 5-methylcytosine"
gagggacccaggcctggtgggggtgcattgctgtgcttggccagccaggtgctgcgagtccgtgtcgcagccatttctctgtgctgtgctctgaggttgtctcgccggcaccgggcactgtg

SEQ ID NO: 17765 - DNA, 122 bp, Homo sapiens
  misc_feature (61)..(62): /note="This region represents a CpG dinucleotide"
  misc_feature (61)..(61): /note="Nucleotide may be methylated to form 5-methylcytosine"
aatgcaaccacaactctcagcttatctctggctcctcatgcacctaaaccacacctgttccgaatgcctacctaagggagtctggttcccaggccaccccagctggtaggagggggaggagg

SEQ ID NO: 17766 - DNA, 122 bp, Homo sapiens
  misc_feature (61)..(62): /note="This region represents a CpG dinucleotide"
  misc_feature (61)..(61): /note="Nucleotide may be methylated to form 5-methylcytosine"
atataactactgtcaacatactttctgtagatgtatgataaaccacttatgatacatctacggagtcatgctgtatatttggttttgtaaggcacttggtggttttaatagcttttttctca

SEQ ID NO: 17767 - DNA, 122 bp, Homo sapiens
  misc_feature (61)..(62): /note="This region represents a CpG dinucleotide"
  misc_feature (61)..(61): /note="Nucleotide may be methylated to form 5-methylcytosine"
tcagcaaagcattttaactaatggaccattatttatgatctagaaacaattttgtgaaagcgatttcttagtgatgctgtttactgtgatcacatttgcccttagtataacaatacctaagt

SEQ ID NO: 17768 - DNA, 122 bp, Homo sapiens
  misc_feature (61)..(62): /note="This region represents a CpG dinucleotide"
  misc_feature (61)..(61): /note="Nucleotide may be methylated to form 5-methylcytosine"
ttaccacaaggtttcaagtttctattctggcttctcatcttagctaccattttctgtctgcgtgatgttgcaaataaattttccttttggcatggctcagctgtcaggcacctctgttctat

SEQ ID NO: 17769 - DNA, 122 bp, Homo sapiens
  misc_feature (61)..(62): /note="This region represents a CpG dinucleotide"
  misc_feature (61)..(61): /note="Nucleotide may be methylated to form 5-methylcytosine"
gaccggggagacctggttcccatggtcccaccaccctctagtgagtaggacacaagcctgcggcctgcctggcccctggaaccttttagcttgtaacgtcagactctcactccaccaggcat

SEQ ID NO: 17770 - DNA, 122 bp, Homo sapiens
  misc_feature (61)..(62): /note="This region represents a CpG dinucleotide"
  misc_feature (61)..(61): /note="Nucleotide may be methylated to form 5-methylcytosine"
gattgcccttggtaacattataaagaagatgacaggtggctctgcaaagaactgtccagacgggggagctggactgagccacagttaagagactgttgcagtagactagactaggaggagga

SEQ ID NO: 17771 - DNA, 122 bp, Homo sapiens
  misc_feature (61)..(62): /note="This region represents a CpG dinucleotide"
  misc_feature (61)..(61): /note="Nucleotide may be methylated to form 5-methylcytosine"
ccctccctacatcaggctgagatcacttgcaaactttatcctgagcacctggagagcttgcgacatggtccttacagcaggaagaatttaaaagaagataactttgggggaatgcttgttgt

SEQ ID NO: 17772 - DNA, 122 bp, Homo sapiens
  misc_feature (61)..(62): /note="This region represents a CpG dinucleotide"
  misc_feature (61)..(61): /note="Nucleotide may be methylated to form 5-methylcytosine"
acactgcctggggtgataaatactttactcaattataaactaagcaagcagacaggttgacggaaaaaaaaacttaccctgctaagtcctcagcttccttccttctctctttcctccaagtg

SEQ ID NO: 17773 - DNA, 122 bp, Homo sapiens
  misc_feature (61)..(62): /note="This region represents a CpG dinucleotide"
  misc_feature (61)..(61): /note="Nucleotide may be methylated to form 5-methylcytosine"
actgcccccttgcctggcccaccccgtggagaggtcacaagcttcagcatcagacagggccggggtcaagtccagctttggcattagctaagctgcatgaccttaagcaacccatgttaaac

SEQ ID NO: 17774 - DNA, 122 bp, Homo sapiens
  misc_feature (61)..(62): /note="This region represents a CpG dinucleotide"
  misc_feature (61)..(61): /note="Nucleotide may be methylated to form 5-methylcytosine"
cagaatggggagaggggaacaggagagtcaagtcacgtagaaggcggtgagtcagaaggacggtgcagagccaacatgtctcttgggctgtctgcatcatttaacttgtcaagatggctgtt

SEQ ID NO: 17775 - DNA, 122 bp, Homo sapiens
  misc_feature (61)..(62): /note="This region represents a CpG dinucleotide"
  misc_feature (61)..(61): /note="Nucleotide may be methylated to form 5-methylcytosine"
tcgctctgtgtctcagttcactcacctgtaaaatgagataatgattgtgtctattcatatcgtggcaggtaccatgagtcagtatagggaaagcatttagaatagttcctcgtatctattaa

SEQ ID NO: 17776 - DNA, 122 bp, Homo sapiens
  misc_feature (61)..(62): /note="This region represents a CpG dinucleotide"
  misc_feature (61)..(61): /note="Nucleotide may be methylated to form 5-methylcytosine"
aggagtaagggaaataggtggtgagggaaggtgatgacaatgaagtaaattagcaaagaacgagaggcttgaagaccacaatttatggcttctgtttatagttttggcatcttcagtctggc

SEQ ID NO: 17777 - DNA, 122 bp, Homo sapiens
  misc_feature (61)..(62): /note="This region represents a CpG dinucleotide"
  misc_feature (61)..(61): /note="Nucleotide may be methylated to form 5-methylcytosine"
ggcactggcattaggctggttccccacttctgtaggttattatgctggacataaagcctgcgtttgctgtcgagccgccctctttctgtgtgtgtgtgtgtgtgtgtgtgtgtctttcttta

SEQ ID NO: 17778 - DNA, 122 bp, Homo sapiens
  misc_feature (61)..(62): /note="This region represents a CpG dinucleotide"
  misc_feature (61)..(61): /note="Nucleotide may be methylated to form 5-methylcytosine"
ttatgctttatttgctcatgtttctcccctgtagaagagcttataatagtgcctgcctcacggggttgttagaagtattgattgttaatatgtgtaaaccatcagtgcatgtaaagtgttat

SEQ ID NO: 17779 - DNA, 122 bp, Homo sapiens
  misc_feature (61)..(62): /note="This region represents a CpG dinucleotide"
  misc_feature (61)..(61): /note="Nucleotide may be methylated to form 5-methylcytosine"
tactgcccgttagcaaatccacaatacctatagctattactatcgccatgcttggtgattcgtggatgttctggggaatcacatgaacctgcgtatctgtgactcatgcatatgttcctcct

SEQ ID NO: 17780 - DNA, 122 bp, Homo sapiens
  misc_feature (61)..(62): /note="This region represents a CpG dinucleotide"
  misc_feature (61)..(61): /note="Nucleotide may be methylated to form 5-methylcytosine"
cagtgaggtattgtctcactctcttgcatcaccataagctccctgctgtggaagagaaggcgtgggcacacacagctagctacaggaagtcccatcaaacctgggacatgcccacagaagca

SEQ ID NO: 17781 - DNA, 122 bp, Homo sapiens
  misc_feature (61)..(62): /note="This region represents a CpG dinucleotide"
  misc_feature (61)..(61): /note="Nucleotide may be methylated to form 5-methylcytosine"
cccacccgacctcgccctcctccctggccggccttcccacccggaggggctcctcagccacgcactgcgtccagcaaaaccactaagtcagggaggccagggcgggcagcccattcatcgtc

SEQ ID NO: 17782 - DNA, 122 bp, Homo sapiens
  misc_feature (61)..(62): /note="This region represents a CpG dinucleotide"
  misc_feature (61)..(61): /note="Nucleotide may be methylated to form 5-methylcytosine"
ctgtgactcactctccgcccacatcctctcactcccatcgcctgccttgcggcagagctccgactcagccgaacccatcactgcttgcgctggctcccaggccccttctagtcagacttctc

SEQ ID NO: 17783 - DNA, 122 bp, Homo sapiens
  misc_feature (61)..(62): /note="This region represents a CpG dinucleotide"
  misc_feature (61)..(61): /note="Nucleotide may be methylated to form 5-methylcytosine"
tcatggtttgtaacaatttctttgtgaattgccctcagaattctgagacaacaaacacgtcgtgtgtctactaccacgtgctgaagaattcagacaccattattctggatgattacaaatct

SEQ ID NO: 17784 - DNA, 122 bp, Homo sapiens
  misc_feature (61)..(62): /note="This region represents a CpG dinucleotide"
  misc_feature (61)..(61): /note="Nucleotide may be methylated to form 5-methylcytosine"
tcatttatataaatgtggatatccccagagaatcactagtgtagatgatcttatatgtttcgttcaactctgagaaactatgaatccataaggtgtggttgattgcagaaggacaatgatct

SEQ ID NO: 17785 - DNA, 122 bp, Homo sapiens
  misc_feature (61)..(62): /note="This region represents a CpG dinucleotide"
  misc_feature (61)..(61): /note="Nucleotide may be methylated to form 5-methylcytosine"
ctcagttttctagaagcagaaaagacaaagccacaaattaaaactatgaaccacatcttccgcccagcatgcttagttttttcatgagctgtgatcggttcagccaatgcgtgtactcccag

SEQ ID NO: 17786 - DNA, 122 bp, Homo sapiens
  misc_feature (61)..(62): /note="This region represents a CpG dinucleotide"
  misc_feature (61)..(61): /note="Nucleotide may be methylated to form 5-methylcytosine"
ccacaactatctatcacatgcttgtgagaaacccccaggagcttcctgtttcgtgtgggtcgtgagaagattgcacagcacagtacagctttcattgtctttgagctaatcttaagctagga

SEQ ID NO: 17787 - DNA, 122 bp, Homo sapiens
  misc_feature (61)..(62): /note="This region represents a CpG dinucleotide"
  misc_feature (61)..(61): /note="Nucleotide may be methylated to form 5-methylcytosine"
ggatgctcaggttgtgatcttagtgggcccgaggcacacatgagtccagggctggggctgcgctccagccagcatgaacagatcacttcctccctcctcaggtgccggaagctgcgaaggtg

SEQ ID NO: 17788 - DNA, 122 bp, Homo sapiens
  misc_feature (61)..(62): /note="This region represents a CpG dinucleotide"
  misc_feature (61)..(61): /note="Nucleotide may be methylated to form 5-methylcytosine"
tgaagaatttgagtacgaccatgtttcatgtttaatttcaagttcctttttttcagaaggcggaacacaaactcgaaccaaggttttggggaaacagagactgaatctgtttctgtttttgt

SEQ ID NO: 17789 - DNA, 122 bp, Homo sapiens
  misc_feature (61)..(62): /note="This region represents a CpG dinucleotide"
  misc_feature (61)..(61): /note="Nucleotide may be methylated to form 5-methylcytosine"
ttgctctcttccaatttgctcgtgaccccttggcctctccacccaaactgtcgaaacctgcgaggctgccacttggctatgtccacacagtgaaaggtcaggtgtcatccacggcgtgggca

SEQ ID NO: 17790 - DNA, 122 bp, Homo sapiens
  misc_feature (61)..(62): /note="This region represents a CpG dinucleotide"
  misc_feature (61)..(61): /note="Nucleotide may be methylated to form 5-methylcytosine"
ttcatcctgcattcttcccatcatactactctaagtctgattcacacacactcatgtatacgttattctactgtttttgactcatacacaaatatacatgtacacacatacacatacttgtc

SEQ ID NO: 17791 - DNA, 122 bp, Homo sapiens
  misc_feature (61)..(62): /note="This region represents a CpG dinucleotide"
  misc_feature (61)..(61): /note="Nucleotide may be methylated to form 5-methylcytosine"
aatggttcccagccccagttctcttagcaaggctttctaattcattatctcatttaatctcgccatgagtcaggcagggcagtaacacatgggaaaggagggtgggggtggggatagtgtga

SEQ ID NO: 17792 - DNA, 122 bp, Homo sapiens
  misc_feature (61)..(62): /note="This region represents a CpG dinucleotide"
  misc_feature (61)..(61): /note="Nucleotide may be methylated to form 5-methylcytosine"
accacttcttggacaggattaaagttcaactcaggaaatctcaaagtttggctactaattcgctttctatttttaaccacacttcatttcacagaataatattttcctctgtgtctgagtgg

SEQ ID NO: 17793 - DNA, 122 bp, Homo sapiens
  misc_feature (61)..(62): /note="This region represents a CpG dinucleotide"
  misc_feature (61)..(61): /note="Nucleotide may be methylated to form 5-methylcytosine"
acctgcacgtcctcaccccacccacctacagcgtttccctgaaacccattaaagtcactgcggcagaacccatgtgaagacacttaccatgtgccactttggttcaaggcaggaaacgaacc

SEQ ID NO: 17794 - DNA, 122 bp, Homo sapiens
  misc_feature (61)..(62): /note="This region represents a CpG dinucleotide"
  misc_feature (61)..(61): /note="Nucleotide may be methylated to form 5-methylcytosine"
ggactggagcctgtctccgtcttctccctctgggagggtctggtgacggcagggggtgctcgtctctcaccactggagctgtcccctcttcaggcctctgagggagggcaggctgtcagctg

SEQ ID NO: 17795 - DNA, 122 bp, Homo sapiens
  misc_feature (61)..(62): /note="This region represents a CpG dinucleotide"
  misc_feature (61)..(61): /note="Nucleotide may be methylated to form 5-methylcytosine"
cctgttcagatcccagctctgctgttcagggctgactgtgaccaagtcctgaactccctgcgccccagcaaggctgtgccttcagcacttgcttgcgcctggcttgtgccagctgagcgtga

SEQ ID NO: 17796 - DNA, 122 bp, Homo sapiens
  misc_feature (61)..(62): /note="This region represents a CpG dinucleotide"
  misc_feature (61)..(61): /note="Nucleotide may be methylated to form 5-methylcytosine"
gtcttcatttttatcctttgccaaagatttctctgtcattacttggcagaatggagcttccgctctagaagatttcaccataagcgtatgtgagtagaaagtattccctaagaacttgcagg

SEQ ID NO: 17797 - DNA, 122 bp, Homo sapiens
  misc_feature (61)..(62): /note="This region represents a CpG dinucleotide"
  misc_feature (61)..(61): /note="Nucleotide may be methylated to form 5-methylcytosine"
aaatgcagctcctgtccatgggtccctgccctgttccttaaccatgagagcagatgcccccgtttccagggaacacataagcaggtgcagttcacaagtgaatcacttgccctgggaaggtg

SEQ ID NO: 17798 - DNA, 122 bp, Homo sapiens
  misc_feature (61)..(62): /note="This region represents a CpG dinucleotide"
  misc_feature (61)..(61): /note="Nucleotide may be methylated to form 5-methylcytosine"
aaacactcattgctctatttggaactgccttgtagaacatgttcagggttaaagaacatgcgctaagctataaaaagggaaatgtttcataggggaacttccttctggttaacttttgcctt

SEQ ID NO: 17799 - DNA, 122 bp, Homo sapiens
  misc_feature (61)..(62): /note="This region represents a CpG dinucleotide"
  misc_feature (61)..(61): /note="Nucleotide may be methylated to form 5-methylcytosine"
cagtaaattgcccaaggtcctacagcagagctgagattcagtgtcagctgggattccaatcgttgaaaccctatttggctttcaagtccactctctttctgctggccacactatagtatcaa

SEQ ID NO: 17800 - DNA, 122 bp, Homo sapiens
  misc_feature (61)..(62): /note="This region represents a CpG dinucleotide"
  misc_feature (61)..(61): /note="Nucleotide may be methylated to form 5-methylcytosine"
cttccacagtggtgggataaggccaggtgtgccagccatcctgggtctggcacccactggcgccggtcagggaaggccttagggctgggccacaggagctggcagcattggcccaaccaagt

SEQ ID NO: 17801 - DNA, 122 bp, Homo sapiens
  misc_feature (61)..(62): /note="This region represents a CpG dinucleotide"
  misc_feature (61)..(61): /note="Nucleotide may be methylated to form 5-methylcytosine"
ggcccggcctggaaccagggacacatgcagtgtcttcttcaccaagtagaaggcagcagccgtgtagctcactcagtcctcccgtggggtgggtcgtgcaaggcagcattagtgagagatgt

SEQ ID NO: 17802 - DNA, 122 bp, Homo sapiens
  misc_feature (61)..(62): /note="This region represents a CpG dinucleotide"
  misc_feature (61)..(61): /note="Nucleotide may be methylated to form 5-methylcytosine"
tttacctctctggggtgattcagagtttcttgaaaatgctgttccactcttacccaattccgtgtgttgttcttagaaagcctgaggtcagcctacattttttatcagaataaaatttgacc

SEQ ID NO: 17803 - DNA, 122 bp, Homo sapiens
  misc_feature (61)..(62): /note="This region represents a CpG dinucleotide"
  misc_feature (61)..(61): /note="Nucleotide may be methylated to form 5-methylcytosine"
caaaggactgtaagcctcagtcaccaaactcccagcctgatgagcaggaggactgggagccgtgagcacacatccacttcctgacctttctgcattctgggcagcagaaaccgtcaccagcg

SEQ ID NO: 17804 - DNA, 122 bp, Homo sapiens
  misc_feature (61)..(62): /note="This region represents a CpG dinucleotide"
  misc_feature (61)..(61): /note="Nucleotide may be methylated to form 5-methylcytosine"
aggggaaggcaggggttagaagtgcctggaactctgtaccttaaagtgagaggccgctgccgggggagaagggctgggccattcggggaagtctccgggccttatctgagccagcaaaccct

SEQ ID NO: 17805 - DNA, 122 bp, Homo sapiens
  misc_feature (61)..(62): /note="This region represents a CpG dinucleotide"
  misc_feature (61)..(61): /note="Nucleotide may be methylated to form 5-methylcytosine"
cctaagcctctctggagttcagagattttccccgccctcacaatatgagtaactagaaaacgattcatctgtgtccatttgccagtggttcttcaacttcctttcagcgtctcaatgcatca

SEQ ID NO: 17806 - DNA, 122 bp, Homo sapiens
  misc_feature (61)..(62): /note="This region represents a CpG dinucleotide"
  misc_feature (61)..(61): /note="Nucleotide may be methylated to form 5-methylcytosine"
aacttcattatcttgactaaagctttacattagaggaggtttctttgtaaatttgatcttcgttagcacttattcaaggctggtgtaattgtattttatttgcaagatgttagaaagttatc

SEQ ID NO: 17807 - DNA, 122 bp, Homo sapiens
  misc_feature (61)..(62): /note="This region represents a CpG dinucleotide"
  misc_feature (61)..(61): /note="Nucleotide may be methylated to form 5-methylcytosine"
gtacgatgattttgtccatttatgtgaaagttagggtggggtggcctaatgttttcacagcggctatggtaacatttttgtaaattcagaactgctactgtgaatttcaggattttacagaa

SEQ ID NO: 17808 - DNA, 122 bp, Homo sapiens
  misc_feature (61)..(62): /note="This region represents a CpG dinucleotide"
  misc_feature (61)..(61): /note="Nucleotide may be methylated to form 5-methylcytosine"
agttaaatataatcaaggaatttccctgtctttgctatttgagattgtgaccacaacaggcggttggctgaaagggaaactgaagggcggggagggagggaaatagatgaaaaaacaaaaca

SEQ ID NO: 17809 - DNA, 122 bp, Homo sapiens
  misc_feature (61)..(62): /note="This region represents a CpG dinucleotide"
  misc_feature (61)..(61): /note="Nucleotide may be methylated to form 5-methylcytosine"
gcaaactggctgtgctgcctgtttttgtgcagccagctcctgagctaagaaggagtgttacgtgtttatatggttgggggaaaaaatgaaaagaataatgttttgtgatgtgtaaaaattac

SEQ ID NO: 17810 - DNA, 122 bp, Homo sapiens
  misc_feature (61)..(62): /note="This region represents a CpG dinucleotide"
  misc_feature (61)..(61): /note="Nucleotide may be methylated to form 5-methylcytosine"
tcaggtgtacatgacaggcctacattcctgtcaggggtgtgggctgggttagagaggatgcgggtgacactctgttccagcagggaccatgcctgcccaccaggaagcacatgccgttctca

SEQ ID NO: 17811 - DNA, 122 bp, Homo sapiens
  misc_feature (61)..(62): /note="This region represents a CpG dinucleotide"
  misc_feature (61)..(61): /note="Nucleotide may be methylated to form 5-methylcytosine"
agagcttgactcacatcacagggagccctggggctcattccatgtccacatgttgccacacggttcccatgtcctaggctgcatatgtgtagctccacaaggaaggcctctgcatgctccat

SEQ ID NO: 17812 - DNA, 122 bp, Homo sapiens
  misc_feature (61)..(62): /note="This region represents a CpG dinucleotide"
  misc_feature (61)..(61): /note="Nucleotide may be methylated to form 5-methylcytosine"
gtggcctggaaatgtcctggaagtggtggctgcattccaaaggtgagtgttccaagaaagcgggcaagccaggtgaaagtgtatcctgttcctgattcagccttggatcaggtctgtcttac

SEQ ID NO: 17813 - DNA, 122 bp, Homo sapiens
  misc_feature (61)..(62): /note="This region represents a CpG dinucleotide"
  misc_feature (61)..(61): /note="Nucleotide may be methylated to form 5-methylcytosine"
agggtgaaaacaatgttggattgctggctcaatccttcgctcctctttgactgggctgagcgatatatcctcttcaagtttcaaaaccagagattagaactttgaagggatctatcaacctc

SEQ ID NO: 17814 - DNA, 122 bp, Homo sapiens
  misc_feature (61)..(62): /note="This region represents a CpG dinucleotide"
  misc_feature (61)..(61): /note="Nucleotide may be methylated to form 5-methylcytosine"
ttagagaaccacttccccttcccttcaccctacctccgagtgcctgtgactttgtatcaccgctctggcaccacatcctcatcccagcaggatttgggaaggctgctttttgaaagcctttt

SEQ ID NO: 17815 - DNA, 122 bp, Homo sapiens
  misc_feature (61)..(62): /note="This region represents a CpG dinucleotide"
  misc_feature (61)..(61): /note="Nucleotide may be methylated to form 5-methylcytosine"
acgggggcgcaggaccctgggacacagagcccaggacagcagtggtggcgtccgtctgaacgggggcgcaggaccctgggacacagagcccaggacagcagcggtcgtgttcgtctgaacag

SEQ ID NO: 17816 - DNA, 122 bp, Homo sapiens
  misc_feature (61)..(62): /note="This region represents a CpG dinucleotide"
  misc_feature (61)..(61): /note="Nucleotide may be methylated to form 5-methylcytosine"
gcagctgttaccttcatcttctttaagagacttgaaatgaggcagcgctccaatctttaacgcctgctcatgccgtcatgcctggtcacacctagtcactcctggtctcctaccagcagtct

SEQ ID NO: 17817 - DNA, 122 bp, Homo sapiens
  misc_feature (61)..(62): /note="This region represents a CpG dinucleotide"
  misc_feature (61)..(61): /note="Nucleotide may be methylated to form 5-methylcytosine"
gagaagatttaccaccatgcagattacctgttccatagctcctggtggtggtgaaaccatcgttacttttgttaaaaatctgtgggactgaaaagaaaatcagctgttggctcagccccaaa

SEQ ID NO: 17818 - DNA, 122 bp, Homo sapiens
  misc_feature (61)..(62): /note="This region represents a CpG dinucleotide"
  misc_feature (61)..(61): /note="Nucleotide may be methylated to form 5-methylcytosine"
cctttcttgccatgttccggtcttagctaaacaacaagctctgtttccttgtggtcccatcgttggcttgacaacttgatttggattaccagtgtttattactccacttcctctttccttcc

SEQ ID NO: 17819 - DNA, 122 bp, Homo sapiens
  misc_feature (61)..(62): /note="This region represents a CpG dinucleotide"
  misc_feature (61)..(61): /note="Nucleotide may be methylated to form 5-methylcytosine"
actactgaggccttcgaagaaaccacacggctgccttgggccccaaaagctgcggaaaagcgcagtattcagttaagcaaataactacttacactgtttattttggttacgattccttaagt

SEQ ID NO: 17820 - DNA, 122 bp, Homo sapiens
  misc_feature (61)..(62): /note="This region represents a CpG dinucleotide"
  misc_feature (61)..(61): /note="Nucleotide may be methylated to form 5-methylcytosine"
ctcccagtgcagatcctacctggatacatttttattagtttggtttagagatctctttatcgacttatttgtagtccagatttatgagggtgataattcattctccattccctttaacaggt

SEQ ID NO: 17821 - DNA, 122 bp, Homo sapiens
  misc_feature (61)..(62): /note="This region represents a CpG dinucleotide"
  misc_feature (61)..(61): /note="Nucleotide may be methylated to form 5-methylcytosine"
aaaccaccaggaagaataactgctcttcatgtcagaagagggagagagagcacttctcagcgggtggtcaaggtaggattcctggaagaaggccggttctgaaaactgagagagctgtttat

SEQ ID NO: 17822 - DNA, 122 bp, Homo sapiens
  misc_feature (61)..(62): /note="This region represents a CpG dinucleotide"
  misc_feature (61)..(61): /note="Nucleotide may be methylated to form 5-methylcytosine"
cacactgtttctacagggatgagtaataatcaccacatgggttacataacttccggcccacggatgaagtaagggcaatgaacgcgatattctctaaagaacatttgggtcaagatggctgt

SEQ ID NO: 17823 - DNA, 122 bp, Homo sapiens
  misc_feature (61)..(62): /note="This region represents a CpG dinucleotide"
  misc_feature (61)..(61): /note="Nucleotide may be methylated to form 5-methylcytosine"
ctgcactccagcctgggctacagagcaagaccccgtcaaaaaaagaaaaagaaaaaagaacgtcaatgatatatcggggaatgaaaagccaaccaatcaattgtattctcaaagagagtttg

SEQ ID NO: 17824 - DNA, 122 bp, Homo sapiens
  misc_feature (61)..(62): /note="This region represents a CpG dinucleotide"
  misc_feature (61)..(61): /note="Nucleotide may be methylated to form 5-methylcytosine"
ttcagattctgctgcaactaacctttaagaaactacctcttggctgggtgcagtggctcacgcctgtaatcctagagctttgggaggccaaggctggcagatcacctgaggtcaggagttcg

SEQ ID NO: 17825 - DNA, 122 bp, Homo sapiens
  misc_feature (61)..(62): /note="This region represents a CpG dinucleotide"
  misc_feature (61)..(61): /note="Nucleotide may be methylated to form 5-methylcytosine"
gacagaacatatggtatccttggctttggacctacagaggaaacacatttttctacctgccgtatgccagaggttcttgaacacctggagggatgactgcagcacagattgccgagccctac

SEQ ID NO: 17826 - DNA, 122 bp, Homo sapiens
  misc_feature (61)..(62): /note="This region represents a CpG dinucleotide"
  misc_feature (61)..(61): /note="Nucleotide may be methylated to form 5-methylcytosine"
catgaagcttcctctcatcttttccagcattatagtcatagtgctgtaatcaagagcacacggtccaaggagggagtggtcacagttccatcaaagaggcaacgacttacaagacaaaacat

SEQ ID NO: 17827 - DNA, 122 bp, Homo sapiens
  misc_feature (61)..(62): /note="This region represents a CpG dinucleotide"
  misc_feature (61)..(61): /note="Nucleotide may be methylated to form 5-methylcytosine"
ggccatggttacacacatgcaggcaaacttaaggttggcatttatccagggattttgatccgtgccaaaagggatgatgagttatccatcctgaggtcaagatggaataaagaaaatacact

SEQ ID NO: 17828 - DNA, 122 bp, Homo sapiens
  misc_feature (61)..(62): /note="This region represents a CpG dinucleotide"
  misc_feature (61)..(61): /note="Nucleotide may be methylated to form 5-methylcytosine"
gctggaggatgtcgggggctgggccaggctgggcacaggcacatggccatggtgattgaccgcatttgcctcaccacttcacgtggggacctggcaaccacacaatggccctggggcatggt

SEQ ID NO: 17829 - DNA, 122 bp, Homo sapiens
  misc_feature (61)..(62): /note="This region represents a CpG dinucleotide"
  misc_feature (61)..(61): /note="Nucleotide may be methylated to form 5-methylcytosine"
gcttcagtggtattaccagttttccaaagtgtttataccgatttacagaccttttggcaacgtatgagagttccatttcttcctgtacttaccaatacttgcttgcttgctctcttcctccc

SEQ ID NO: 17830 - DNA, 122 bp, Homo sapiens
  misc_feature (61)..(62): /note="This region represents a CpG dinucleotide"
  misc_feature (61)..(61): /note="Nucleotide may be methylated to form 5-methylcytosine"
atctggttctcaccacaacccagacgtggctgtcattcatagtgctatgaaatgcaaggacgttgtgccccagaaggtaaaagatttacccaagtcctctcaggaagtaggtggaggggctg

SEQ ID NO: 17831 - DNA, 122 bp, Homo sapiens
  misc_feature (61)..(62): /note="This region represents a CpG dinucleotide"
  misc_feature (61)..(61): /note="Nucleotide may be methylated to form 5-methylcytosine"
agatagaaactaaagaacccacccagttggaagaagttattagtcaagtagtgctgcacacgtgaccacagaagttaaaaaggtaaataatgtgtctctacatgtggcccactccagtgaat

SEQ ID NO: 17832 - DNA, 122 bp, Homo sapiens
  misc_feature (61)..(62): /note="This region represents a CpG dinucleotide"
  misc_feature (61)..(61): /note="Nucleotide may be methylated to form 5-methylcytosine"
aaccacctcctatattaggttctcatactttagaccacctgctctaatcaccccccagggcgaggtaccaaacaactagggacagcccctgtgccccacggtcttctaaagttattcaaact

SEQ ID NO: 17833 - DNA, 122 bp, Homo sapiens
  misc_feature (61)..(62): /note="This region represents a CpG dinucleotide"
  misc_feature (61)..(61): /note="Nucleotide may be methylated to form 5-methylcytosine"
ctatcaaaagaactggtgttgaagccaccaacattcctgtgatataactcagagaacctccgtcaacacatataaggacctggcagaatccctgctgattaattcagcattcatcccaagat

SEQ ID NO: 17834 - DNA, 122 bp, Homo sapiens
  misc_feature (61)..(62): /note="This region represents a CpG dinucleotide"
  misc_feature (61)..(61): /note="Nucleotide may be methylated to form 5-methylcytosine"
gcgaatcccacagtaattgcgcatttctctccctttagtgctttggaaatttagaaagcgcgctttcatttgtacatcgcctgccgacagcccctttgctgattagagaagccttgttcccc

SEQ ID NO: 17835 - DNA, 122 bp, Homo sapiens
  misc_feature (61)..(62): /note="This region represents a CpG dinucleotide"
  misc_feature (61)..(61): /note="Nucleotide may be methylated to form 5-methylcytosine"
ctctgagctgccgtactagaatccgctcctgctcaacagcctgacaaaaaatccagactccgagtgtaaaacaggaggggtggtgcaaacacaagatgacacacctcggatgcaccaaacct

SEQ ID NO: 17836 - DNA, 122 bp, Homo sapiens
  misc_feature (61)..(62): /note="This region represents a CpG dinucleotide"
  misc_feature (61)..(61): /note="Nucleotide may be methylated to form 5-methylcytosine"
aagtgaaaacgtggtacagtgtagccgcaaagtatatccatagtatactttgtagccacacgtcaggaggaagttacctttatgcaccccttaccactgcatgcaaatttgatattttctct

SEQ ID NO: 17837 - DNA, 122 bp, Homo sapiens
  misc_feature (61)..(62): /note="This region represents a CpG dinucleotide"
  misc_feature (61)..(61): /note="Nucleotide may be methylated to form 5-methylcytosine"
ataaaatggataaacaaaccatgatctattattcttccaatgggatactacagacttgaccgtactgagaatgaatgagcaacagccacatgtatgaatatggatgaatcaccaaagacata

SEQ ID NO: 17838 - DNA, 122 bp, Homo sapiens
  misc_feature (61)..(62): /note="This region represents a CpG dinucleotide"
  misc_feature (61)..(61): /note="Nucleotide may be methylated to form 5-methylcytosine"
gcaaagaatgattcattaatcgtgcagcctcccaagccagagtaggcttaggaactccagcgcagccatgtggtagaagatttatagacaggaaaaggaaagtaatgcacagaaaatggaaa

SEQ ID NO: 17839 - DNA, 122 bp, Homo sapiens
  misc_feature (61)..(62): /note="This region represents a CpG dinucleotide"
  misc_feature (61)..(61): /note="Nucleotide may be methylated to form 5-methylcytosine"
ctgggaaaagttgtctatgcccagaagccagcatcaggcaaagttgcccaagacctgctccgccagccccttgcagctgggctgggcttccaggagcagacgcccggtgtcgcactgcagga

SEQ ID NO: 17840 - DNA, 122 bp, Homo sapiens
  misc_feature (61)..(62): /note="This region represents a CpG dinucleotide"
  misc_feature (61)..(61): /note="Nucleotide may be methylated to form 5-methylcytosine"
gatggccccgcctccctcccggccagtgtgggcgtgcagatggatgagctcaggtttggacgtgactcagaaggaaggtagtggggaaatacaaggtggtgatctcatgtggcattaaacgg

SEQ ID NO: 17841 - DNA, 122 bp, Homo sapiens
  misc_feature (61)..(62): /note="This region represents a CpG dinucleotide"
  misc_feature (61)..(61): /note="Nucleotide may be methylated to form 5-methylcytosine"
tcagagttttgtttgtttgtttcttagcacaacgtattgctgaagctttcaagaaaaccacgattgtaggctttatatcatactgtctgtggttcccatcacataatgcaaatacacctgtt

SEQ ID NO: 17842 - DNA, 122 bp, Homo sapiens
  misc_feature (61)..(62): /note="This region represents a CpG dinucleotide"
  misc_feature (61)..(61): /note="Nucleotide may be methylated to form 5-methylcytosine"
atataccacaaacttggcagcttcaaacagcatttccttatcagctctgttggtcagaagcggtgcaagcacagcatggctgggttttctgctcaggatgtctaaaggctgaaatcagggtg

SEQ ID NO: 17843 - DNA, 122 bp, Homo sapiens
  misc_feature (61)..(62): /note="This region represents a CpG dinucleotide"
  misc_feature (61)..(61): /note="Nucleotide may be methylated to form 5-methylcytosine"
tgactcccagcctgtcactccctgaggtcaggagctgagttccatggtttccaagccccacggtctggctagttaggagcccagttaagcaggctcatgactccaccccaggcttccaggct

SEQ ID NO: 17844 - DNA, 122 bp, Homo sapiens
  misc_feature (61)..(62): /note="This region represents a CpG dinucleotide"
  misc_feature (61)..(61): /note="Nucleotide may be methylated to form 5-methylcytosine"
aatgaaatgaattgtattataaccatcttggaaaaatagctgctgatctcataaattcatcgagcttcctggttccaaagccctctcttacaataatagtaagtgttgctgtgctcagtaaa

SEQ ID NO: 17845 - DNA, 122 bp, Homo sapiens
  misc_feature (61)..(62): /note="This region represents a CpG dinucleotide"
  misc_feature (61)..(61): /note="Nucleotide may be methylated to form 5-methylcytosine"
gccgggggtcgtggatggcagcccctcttgggcttggtgattggctggtgacttcaggcacgtcgagggcccctccaacctcagcctcctcccctctggtacaatgcgggctgaaagaggtg

SEQ ID NO: 17846 - DNA, 122 bp, Homo sapiens
  misc_feature (61)..(62): /note="This region represents a CpG dinucleotide"
  misc_feature (61)..(61): /note="Nucleotide may be methylated to form 5-methylcytosine"
atgaccactgctcctggttcatgattttcttctcaaccttgtctcctgttgttctcaagacgtcaacatccattgtattagttatctatgactacatatcaagtcactccaccttagcagct

SEQ ID NO: 17847 - DNA, 122 bp, Homo sapiens
  misc_feature (61)..(62): /note="This region represents a CpG dinucleotide"
  misc_feature (61)..(61): /note="Nucleotide may be methylated to form 5-methylcytosine"
tgtcacagttcttaaaaatggtgtgtccagagtttgtcccttctgacgttcggacctgtccggagtttcttcctgctggtgggtttgtggtctcacttcgtggtctggctgactttaggagt

SEQ ID NO: 17848 - DNA, 122 bp, Homo sapiens
  misc_feature (61)..(62): /note="This region represents a CpG dinucleotide"
  misc_feature (61)..(61): /note="Nucleotide may be methylated to form 5-methylcytosine"
ctgggaagcaagtaatttttttgcggtgcgttgtcttgtgcttaaggggaagacgcagagcgtttccttgagggcagggatcgttgtcacactcttgtttgtgtcttctatcagcagggcct

SEQ ID NO: 17849 - DNA, 122 bp, Homo sapiens
  misc_feature (61)..(62): /note="This region represents a CpG dinucleotide"
  misc_feature (61)..(61): /note="Nucleotide may be methylated to form 5-methylcytosine"
tcttgcactcaaaggctgtgagtggatgtggcccagccaccgtctgcttgggtgtgctgccgccagctggcttccagccttctgctctgtttcatcaccttgcagtctccaccccctcacca

SEQ ID NO: 17850 - DNA, 122 bp, Homo sapiens
  misc_feature (61)..(62): /note="This region represents a CpG dinucleotide"
  misc_feature (61)..(61): /note="Nucleotide may be methylated to form 5-methylcytosine"
taaagaaaagttctgcacttcttttgtcctgatcagtgcttctctggtaaatgtgctaaccgcaatgatagttgagattttaagggctgggtaaaatagcaaaaaacaatgaaaaggaaact

SEQ ID NO: 17851 - DNA, 122 bp, Homo sapiens
  misc_feature (61)..(62): /note="This region represents a CpG dinucleotide"
  misc_feature (61)..(61): /note="Nucleotide may be methylated to form 5-methylcytosine"
tcacttgaagataagaaggttgcagccttaaggaaaaacttcagttggcttggacctctgcgggggcaggtttactgtagtttgtggaaataacccacagctactactgaaatatgtgtaag

SEQ ID NO: 17852 - DNA, 122 bp, Homo sapiens
  misc_feature (61)..(62): /note="This region represents a CpG dinucleotide"
  misc_feature (61)..(61): /note="Nucleotide may be methylated to form 5-methylcytosine"
gagctgctttatagcaaacccaatgaacacagttctaaatacttttcccattccaagctgcgattcatagcttaagtgagttttcatcagacatttcctcaaaacactcctggtgttagaaa

SEQ ID NO: 17853 - DNA, 122 bp, Homo sapiens
  misc_feature (61)..(62): /note="This region represents a CpG dinucleotide"
  misc_feature (61)..(61): /note="Nucleotide may be methylated to form 5-methylcytosine"
cctcagggctgatgtcaaggccttactaaaactcagggtgagtgacctttccaatggaaacggatcattccagaagctcatgtgacaggggtgcctcttaataactgaaaggaaacaatgaa

SEQ ID NO: 17854 - DNA, 122 bp, Homo sapiens
  misc_feature (61)..(62): /note="This region represents a CpG dinucleotide"
  misc_feature (61)..(61): /note="Nucleotide may be methylated to form 5-methylcytosine"
tgttgtgcttctaaggtagagaagacaattctgtgaccaatggatcagagatcagaagagcgattcaacaactcactctagggataacttagggcagtcccttatgcaccagcagcttctgt

SEQ ID NO: 17855 - DNA, 122 bp, Homo sapiens
  misc_feature (61)..(62): /note="This region represents a CpG dinucleotide"
  misc_feature (61)..(61): /note="Nucleotide may be methylated to form 5-methylcytosine"
gataaagctgaggctagaatttcgctgaggtcacactgttgcttggcttcttccttttcccgttcctctttcccttcctccatcagagatttctcctgggggcactttcttgctctgtcact

SEQ ID NO: 17856 - DNA, 122 bp, Homo sapiens
  misc_feature (61)..(62): /note="This region represents a CpG dinucleotide"
  misc_feature (61)..(61): /note="Nucleotide may be methylated to form 5-methylcytosine"
tggggcagaaacaaatcacaatggtggaatgtcatcagttaaggctattttcacttctttcgtggatcttcaattgcttcaggggatatgatggcttagcttgggctcagaggcctgacatg

SEQ ID NO: 17857 - DNA, 122 bp, Homo sapiens
  misc_feature (61)..(62): /note="This region represents a CpG dinucleotide"
  misc_feature (61)..(61): /note="Nucleotide may be methylated to form 5-methylcytosine"
aggagaagagacggcagaggaagggggaagagtgcagcctgcctggcctcacttgcttcacgcatgacaacaaccactggcagacagccccgttctggaaccgtaagttgcttgttccaaat

SEQ ID NO: 17858 - DNA, 122 bp, Homo sapiens
  misc_feature (61)..(62): /note="This region represents a CpG dinucleotide"
  misc_feature (61)..(61): /note="Nucleotide may be methylated to form 5-methylcytosine"
agggtcttgctctttccctgagtctgtccatcagaactggcatgaggcctaaaaatgagccgtttcaagcccaggcatcatctactcacttacataacaaaaccttagtcatcccactgaga

SEQ ID NO: 17859 - DNA, 122 bp, Homo sapiens
  misc_feature (61)..(62): /note="This region represents a CpG dinucleotide"
  misc_feature (61)..(61): /note="Nucleotide may be methylated to form 5-methylcytosine"
tctctattaagggctttattttatatataagaaaaccgatgcttagagagatgaagtcaccggcccaaggtcacacagcaggttcaaaggattaggaattgaattccggccaatgtgggttc

SEQ ID NO: 17860 - DNA, 122 bp, Homo sapiens
  misc_feature (61)..(62): /note="This region represents a CpG dinucleotide"
  misc_feature (61)..(61): /note="Nucleotide may be methylated to form 5-methylcytosine"
taataagttaaaaataggtattttcaaaatgcaggctttatttgtatccttttttgatctcggactccagaaaggtaaatagaaaactagaaagaataacaccatccactggccaagcacat

SEQ ID NO: 17861 - DNA, 122 bp, Homo sapiens
  misc_feature (61)..(62): /note="This region represents a CpG dinucleotide"
  misc_feature (61)..(61): /note="Nucleotide may be methylated to form 5-methylcytosine"
aatgctcctgtcctgcagaacactgtcagctatgagggcaaaaatcgtgtctgtttaactcgcttgcacaatgcctggcttaatattatgctgttacctgtacttaataattattttcagag

SEQ ID NO: 17862 - DNA, 122 bp, Homo sapiens
  misc_feature (61)..(62): /note="This region represents a CpG dinucleotide"
  misc_feature (61)..(61): /note="Nucleotide may be methylated to form 5-methylcytosine"
ggttgtcatccagccctgtgtcttcttccagcactacttggccaaggaagacgtgccagacgtgcatgcccagaaagtggcagacgcaggttgccagacaccacactcccaaagcatcatcc

SEQ ID NO: 17863 - DNA, 122 bp, Homo sapiens
  misc_feature (61)..(62): /note="This region represents a CpG dinucleotide"
  misc_feature (61)..(61): /note="Nucleotide may be methylated to form 5-methylcytosine"
ccaccactggttccacattgatactgagcactctgcttgcacctggttctggctgcagggcgctgtccctgggagctcatcattcattgcagggacagaggacagcagaagaccttataatg

SEQ ID NO: 17864 - DNA, 122 bp, Homo sapiens
  misc_feature (61)..(62): /note="This region represents a CpG dinucleotide"
  misc_feature (61)..(61): /note="Nucleotide may be methylated to form 5-methylcytosine"
gccatgacccaggacacaccttgtgaggcagcttgaaaaaccagcagccagggatgtccacgtcgttgtaaggtccattgccatggtgatagctgggctgggtgtccttggggccaccacgg

SEQ ID NO: 17865 - DNA, 122 bp, Homo sapiens
  misc_feature (61)..(62): /note="This region represents a CpG dinucleotide"
  misc_feature (61)..(61): /note="Nucleotide may be methylated to form 5-methylcytosine"
cataggggctgagtcttcacctagacaggtgtcactgggtttcttgttatcacttgggtccgttgttggcaagtgtggatttgtgccttcttgtttatattcacctgggaatcaggaaagag

SEQ ID NO: 17866 - DNA, 122 bp, Homo sapiens
  misc_feature (61)..(62): /note="This region represents a CpG dinucleotide"
  misc_feature (61)..(61): /note="Nucleotide may be methylated to form 5-methylcytosine"
cactaggtctaggagatgtacctttccctcctgccgtatgcagcattttcaggtgatccacggtcatctgcaggatctcggctttttctagcttagcagatccctaaagatgagaatggcaa

SEQ ID NO: 17867 - DNA, 122 bp, Homo sapiens
  misc_feature (61)..(62): /note="This region represents a CpG dinucleotide"
  misc_feature (61)..(61): /note="Nucleotide may be methylated to form 5-methylcytosine"
acacacacacccagaggcaccctgtgggagtccctcttaagctctccccactggctcattcgctactgatgacttgtggacccagacactttcatcactctcaaccagtcttttatgtgtga

SEQ ID NO: 17868 - DNA, 122 bp, Homo sapiens
  misc_feature (61)..(62): /note="This region represents a CpG dinucleotide"
  misc_feature (61)..(61): /note="Nucleotide may be methylated to form 5-methylcytosine"
cacagctgtcccagaaaggtgcccacagcctcctagatctgtcactttctataaaagcctcgtctactcagagtggatatctggttcagaagacaaaaactccttccagctcaggtgttggg

SEQ ID NO: 17869 - DNA, 122 bp, Homo sapiens
  misc_feature (61)..(62): /note="This region represents a CpG dinucleotide"
  misc_feature (61)..(61): /note="Nucleotide may be methylated to form 5-methylcytosine"
taggcacctggaatccctggcagccagaggaatctgaatccagtgttttcaaggtggagccgcccccacccaggccttgagtcagaaacctgacttccttccattgatgtttttctctgctc

SEQ ID NO: 17870 - DNA, 122 bp, Homo sapiens
  misc_feature (61)..(62): /note="This region represents a CpG dinucleotide"
  misc_feature (61)..(61): /note="Nucleotide may be methylated to form 5-methylcytosine"
gacaatgactgaaactattactactcagtctctgcttcttccggaacagctgagcaaaagcgttctgacattgagtcttttaagcctagatcggcattatttcgtctaactgatcaagaagt

SEQ ID NO: 17871 - DNA, 122 bp, Homo sapiens
  misc_feature (61)..(62): /note="This region represents a CpG dinucleotide"
  misc_feature (61)..(61): /note="Nucleotide may be methylated to form 5-methylcytosine"
tttcaggagagtcaggaatcttcccttaggacctgacatctgagtggagacctgaatgaacggagaatgaaccttcccagacatttcaggaaatgaacaggaagtgcaaagcccctgaggta

SEQ ID NO: 17872 - DNA, 122 bp, Homo sapiens
  misc_feature (61)..(62): /note="This region represents a CpG dinucleotide"
  misc_feature (61)..(61): /note="Nucleotide may be methylated to form 5-methylcytosine"
tgccttagatctcagtttcagtgactttcgtcagagagataattggagggattctctaaccggttgtcaagggctctctttcttgattgggaacaatgatcccttcctatcttacctcccct

SEQ ID NO: 17873 - DNA, 122 bp, Homo sapiens
  misc_feature (61)..(62): /note="This region represents a CpG dinucleotide"
  misc_feature (61)..(61): /note="Nucleotide may be methylated to form 5-methylcytosine"
tatgcaatcccactgcatatgaccatggcagtagaacaagttcaattactacactggatgcgttaagtgtgctttcctagcagaaagcaccagggtggagtcaacagttcacatgctaatac

SEQ ID NO: 17874 - DNA, 122 bp, Homo sapiens
  misc_feature (61)..(62): /note="This region represents a CpG dinucleotide"
  misc_feature (61)..(61): /note="Nucleotide may be methylated to form 5-methylcytosine"
aacccttcacaatctggaactggaaagagatttctagcccccacgaggaacaaagcttgacgatgaggaaatgacaacctcccttgtttgctaactattctcaggctaaaaagagagtgctg

SEQ ID NO: 17875 - DNA, 122 bp, Homo sapiens
  misc_feature (61)..(62): /note="This region represents a CpG dinucleotide"
  misc_feature (61)..(61): /note="Nucleotide may be methylated to form 5-methylcytosine"
cctttgaagaaaagcaaaccaacagaacctgatagaccactagaagcacaagtactaggacgctttggtcaagaagctaaactgagcatattacatgcactaaaaagatgtggcaatattag

SEQ ID NO: 17876 - DNA, 122 bp, Homo sapiens
  misc_feature (61)..(62): /note="This region represents a CpG dinucleotide"
  misc_feature (61)..(61): /note="Nucleotide may be methylated to form 5-methylcytosine"
tctcccagtcctggttaggatctgtgcctgaggccttttgtggggagttggggtgggggccggagaacatctcaatctgatctcaggagagataaagacacaggagtgagaactgccagttc

SEQ ID NO: 17877 - DNA, 122 bp, Homo sapiens
  misc_feature (61)..(62): /note="This region represents a CpG dinucleotide"
  misc_feature (61)..(61): /note="Nucleotide may be methylated to form 5-methylcytosine"
gtccaagagggtggtgtcaatcatctccagctgtaaccattaggaattgggaaagaggcacgggaagtcacacccagctcttctggggagcatcgcacgccacttctgctcatatctcatta

SEQ ID NO: 17878 - DNA, 122 bp, Homo sapiens
  misc_feature (61)..(62): /note="This region represents a CpG dinucleotide"
  misc_feature (61)..(61): /note="Nucleotide may be methylated to form 5-methylcytosine"
agacaagccagagcattagatgcatggtccacttttttgttttcatcaggagagagaatccgctgtatggggtggttcctcccagttgcttcacagtatattgcataaaggagggacatgaa

SEQ ID NO: 17879 - DNA, 122 bp, Homo sapiens
  misc_feature (61)..(62): /note="This region represents a CpG dinucleotide"
  misc_feature (61)..(61): /note="Nucleotide may be methylated to form 5-methylcytosine"
gaactgctgaatacttcggcggctccttcctgttcaccgtggaatatacttcactttaaacgcaatgtttccaaactggcagtgatgtgtttggctgatattaaggtagatgtcttatcttt

SEQ ID NO: 17880 - DNA, 122 bp, Homo sapiens
  misc_feature (61)..(62): /note="This region represents a CpG dinucleotide"
  misc_feature (61)..(61): /note="Nucleotide may be methylated to form 5-methylcytosine"
cttttgtatcttgtgctgtgatgtggacagcagacccttctcccttgtatgtttaacacgcgtgttgtggtgtggtgtggtgttggctgctcaggacacaccctgtcgtccaccgcactcgg

SEQ ID NO: 17881 - DNA, 122 bp, Homo sapiens
  misc_feature (61)..(62): /note="This region represents a CpG dinucleotide"
  misc_feature (61)..(61): /note="Nucleotide may be methylated to form 5-methylcytosine"
gccttccaaccaagctgcggcaaccatggccaaggtcagccatcaccaggagggttttgacgtggagagactgggaactgcaaggacgctgcaggtcagggtttgagctaccaaggggaaag

SEQ ID NO: 17882 - DNA, 122 bp, Homo sapiens
  misc_feature (61)..(62): /note="This region represents a CpG dinucleotide"
  misc_feature (61)..(61): /note="Nucleotide may be methylated to form 5-methylcytosine"
ccttgtaatctgcttcttcccacatctgttgttaaacacttttctaattactctgtttagcgtttcttctgctttctctggtgacacatgatttctttcaaaattgggccccaaatttaagt

SEQ ID NO: 17883 - DNA, 122 bp, Homo sapiens
  misc_feature (61)..(62): /note="This region represents a CpG dinucleotide"
  misc_feature (61)..(61): /note="Nucleotide may be methylated to form 5-methylcytosine"
gaagtgcagaaggcgcctcctctgataagcctgtgatacagcaggtgttgatcctaggcccggctggtcagcttctccacaaggctgccctctgacaagctctgcgcttccaccactgcctc

SEQ ID NO: 17884 - DNA, 122 bp, Homo sapiens
  misc_feature (61)..(62): /note="This region represents a CpG dinucleotide"
  misc_feature (61)..(61): /note="Nucleotide may be methylated to form 5-methylcytosine"
ctctttactgactagacatggctggtcttctcttctatttcaaaccctctactctcttggcgaattatcccattttgagtgataaaaccatctacttgaaatgattttttgtagggacatag

SEQ ID NO: 17885 - DNA, 122 bp, Homo sapiens
  misc_feature (61)..(62): /note="This region represents a CpG dinucleotide"
  misc_feature (61)..(61): /note="Nucleotide may be methylated to form 5-methylcytosine"
gtcattaagctgctcagccaaccaatccagcaatctgtcttgcttctgcatttcaagttacgtgagtagtactgttcttattgtttaagccagtttgaattgggatttttgtgccttgcagc

SEQ ID NO: 17886 - DNA, 122 bp, Homo sapiens
  misc_feature (61)..(62): /note="This region represents a CpG dinucleotide"
  misc_feature (61)..(61): /note="Nucleotide may be methylated to form 5-methylcytosine"
actgagtctcaggttaaataacttcctcaaagtcacctcactggtaagtggcagagccaacgttgtaatgaagcctatgtgactccagaggctgtcctaatacaacatggttaattacctcc

SEQ ID NO: 17887 - DNA, 122 bp, Homo sapiens
  misc_feature (61)..(62): /note="This region represents a CpG dinucleotide"
  misc_feature (61)..(61): /note="Nucleotide may be methylated to form 5-methylcytosine"
gtgtaaaatgtttttgttccttgtctgtgaacacatttattttcatcagtctgttttcctcgtaaattggcttatcttggggtggagatttgaagaggcaataaacagtagtacaattaact

SEQ ID NO: 17888 - DNA, 122 bp, Homo sapiens
  misc_feature (61)..(62): /note="This region represents a CpG dinucleotide"
  misc_feature (61)..(61): /note="Nucleotide may be methylated to form 5-methylcytosine"
caatataaatgaataaataaatgagatgtcattttaacagtgcacaccacaggttggtttcgaggatgcaatgaatcaatgcgagtctagcacataggacaatgcctagaacggtggtgtgt

SEQ ID NO: 17889 - DNA, 122 bp, Homo sapiens
  misc_feature (61)..(62): /note="This region represents a CpG dinucleotide"
  misc_feature (61)..(61): /note="Nucleotide may be methylated to form 5-methylcytosine"
caacacctagtagccactgtaaggacaaatgcaacttaaaaacaagaggcttaattctcccggttgaaaatgggggaagaggtttccctccctctcttattctcagagcatttaccttagaa

SEQ ID NO: 17890 - DNA, 122 bp, Homo sapiens
  misc_feature (61)..(62): /note="This region represents a CpG dinucleotide"
  misc_feature (61)..(61): /note="Nucleotide may be methylated to form 5-methylcytosine"
agctgagggacaccaaaacctgccttgtcacgtccccgccctgggttcccatggttgagtcgctctcactcacaagctgtgtggcttggggcaagggcttaacttgccaggcctctctttcc

SEQ ID NO: 17891 - DNA, 122 bp, Homo sapiens
  misc_feature (61)..(62): /note="This region represents a CpG dinucleotide"
  misc_feature (61)..(61): /note="Nucleotide may be methylated to form 5-methylcytosine"
attaagaaaggaaagctagattacaattatatactcacctttcggtgtcttgaaatattccggcaaaattaaaatgaatgtgatcactattgccacaaataatttaaggagggctgtttttg

SEQ ID NO: 17892 - DNA, 122 bp, Homo sapiens
  misc_feature (61)..(62): /note="This region represents a CpG dinucleotide"
  misc_feature (61)..(61): /note="Nucleotide may be methylated to form 5-methylcytosine"
aagcaggtaaacaaatctgtgttttagaaaaatcacattggctacactccaggaagcagtcgaacaacagcgaaagcttttgggaaactgtaatcccatagaaagacaaaggattataagta

SEQ ID NO: 17893 - DNA, 122 bp, Homo sapiens
  misc_feature (61)..(62): /note="This region represents a CpG dinucleotide"
  misc_feature (61)..(61): /note="Nucleotide may be methylated to form 5-methylcytosine"
tccttagagttgggcagcttttgcaagctgtgagaagcccagctcctgcttttcctgatacggtttatgactcacagctgccaccaagatgtcagttagctctgtgacagtgaaatgacttc

SEQ ID NO: 17894 - DNA, 122 bp, Homo sapiens
  misc_feature (61)..(62): /note="This region represents a CpG dinucleotide"
  misc_feature (61)..(61): /note="Nucleotide may be methylated to form 5-methylcytosine"
acataaaagaacaatataaaaagcaaatagagccactttccatagctactgtgtctttctcgatataatcacactattagctgcatgagatcattgattgactcattgcttactaagagggg

SEQ ID NO: 17895 - DNA, 122 bp, Homo sapiens
  misc_feature (61)..(62): /note="This region represents a CpG dinucleotide"
  misc_feature (61)..(61): /note="Nucleotide may be methylated to form 5-methylcytosine"
gcttgtttgtcctttgtgtttagcacaggtgagaactggagccaaatgggaactttgctacgctgtgctcagcttgaggatttcttacccagctcactctggtctggagtctgaaagataat

SEQ ID NO: 17896 - DNA, 122 bp, Homo sapiens
  misc_feature (61)..(62): /note="This region represents a CpG dinucleotide"
  misc_feature (61)..(61): /note="Nucleotide may be methylated to form 5-methylcytosine"
gcacagatgcaattcaagccaagttcaactggattgaaagctccttgggggttgttactgcgcctcacacagctttgtgtccctcagagtaagcatgtgggtaaggtcaggttccccagaaa

SEQ ID NO: 17897 - DNA, 122 bp, Homo sapiens
  misc_feature (61)..(62): /note="This region represents a CpG dinucleotide"
  misc_feature (61)..(61): /note="Nucleotide may be methylated to form 5-methylcytosine"
aacaccagtagacccagagacaggggactgaaaaagcaagatgacagcaatcctgacttacggcctacttgagcccagagccctgcctggaagcacacggctccactggcacagcctgtgcc

SEQ ID NO: 17898 - DNA, 122 bp, Homo sapiens
  misc_feature (61)..(62): /note="This region represents a CpG dinucleotide"
  misc_feature (61)..(61): /note="Nucleotide may be methylated to form 5-methylcytosine"
agcatcaggcaatgctattggtgccaagaactggctctgcctagaggccccaccaagaagcgaaatccctttgctcagaagtcaggttacattacagaaagaaatgaattttaaacattcca

SEQ ID NO: 17899 - DNA, 122 bp, Homo sapiens
  misc_feature (61)..(62): /note="This region represents a CpG dinucleotide"
  misc_feature (61)..(61): /note="Nucleotide may be methylated to form 5-methylcytosine"
tctggagaatgattctgaatattctctatatgttttctgtgaaaatgtcagcctagtattcgtttctagtagatgtgctttcagcaaaacttgctcttaatgtctctggtgtgcagtcatct

SEQ ID NO: 17900 - DNA, 122 bp, Homo sapiens
  misc_feature (61)..(62): /note="This region represents a CpG dinucleotide"
  misc_feature (61)..(61): /note="Nucleotide may be methylated to form 5-methylcytosine"
ctcccttcaggaatttgctcctctacataacaatgggcagctggtacccagagcacctgccgcatggcctggcctgccagatgcagataaggagagatgatgactccttgtcttgagtcacc

SEQ ID NO: 17901 - DNA, 122 bp, Homo sapiens
  misc_feature (61)..(62): /note="This region represents a CpG dinucleotide"
  misc_feature (61)..(61): /note="Nucleotide may be methylated to form 5-methylcytosine"
gggaccggaggctttgtactttcactctgccgaataaagcctacagctttttctctctatcggtccatgtctctatcatttgtcacgggcagccgccacgccaattctttggcgtggctagg

SEQ ID NO: 17902 - DNA, 122 bp, Homo sapiens
  misc_feature (61)..(62): /note="This region represents a CpG dinucleotide"
  misc_feature (61)..(61): /note="Nucleotide may be methylated to form 5-methylcytosine"
ttattccccctagtgaccccactgaactctactgaaaaccttgcctcatcctcctgcccacgcctggccaaccccactgggaacagtcatctgcagggacaagcacaaattccaccctctgt

SEQ ID NO: 17903 - DNA, 122 bp, Homo sapiens
  misc_feature (61)..(62): /note="This region represents a CpG dinucleotide"
  misc_feature (61)..(61): /note="Nucleotide may be methylated to form 5-methylcytosine"
ctggggagagattgcccctgctggcataaggagaggctggtcaattctcagagacagcaacgggcccagccaggagtatgcctgtgacatgcaaactaaccaatccagagtcacaactcctc

SEQ ID NO: 17904 - DNA, 122 bp, Homo sapiens
  misc_feature (61)..(62): /note="This region represents a CpG dinucleotide"
  misc_feature (61)..(61): /note="Nucleotide may be methylated to form 5-methylcytosine"
gaggttgacatgaaacaaacaaaaaccaagagtatcagttcatgataagtgctatgtagacgattatagggcaccttaaacttagatcgggtgctacagagacaattatataatagggcacc

SEQ ID NO: 17905 - DNA, 122 bp, Homo sapiens
  misc_feature (61)..(62): /note="This region represents a CpG dinucleotide"
  misc_feature (61)..(61): /note="Nucleotide may be methylated to form 5-methylcytosine"
aaaattgttttcagtcccaaccacaggtaacagccccctccagaaatccctggcaatgtgcgggacactggcttgcaaaattacccacaaggacaatagactgatggatcgagatttaaata

SEQ ID NO: 17906 - DNA, 122 bp, Homo sapiens
  misc_feature (61)..(62): /note="This region represents a CpG dinucleotide"
  misc_feature (61)..(61): /note="Nucleotide may be methylated to form 5-methylcytosine"
ctaactggaacccctctgaaggaccactcatgtcttgtgtgtgagtaacagccatggaaacgtggttgaagaactgaactttaggacctggactacccagagcaacagctactgcattcaag

SEQ ID NO: 17907 - DNA, 122 bp, Homo sapiens
  misc_feature (61)..(62): /note="This region represents a CpG dinucleotide"
  misc_feature (61)..(61): /note="Nucleotide may be methylated to form 5-methylcytosine"
atggctttaaatttacaagtgaagactcatccatcatcaaagacccagaatgctcactgccgtcacattaaaaataacttacaaaagatatgttttcatttgtgtatcatccccttcaacac

SEQ ID NO: 17908 - DNA, 122 bp, Homo sapiens
  misc_feature (61)..(62): /note="This region represents a CpG dinucleotide"
  misc_feature (61)..(61): /note="Nucleotide may be methylated to form 5-methylcytosine"
tgtgatcatttttatttttcggctcaagcacctgttaaattttaaagttatgatgtgtaacgttgatcaccacaggaagtgtttgacaaaacacatactgaaaaacaggtcggtgtttaagt

SEQ ID NO: 17909 - DNA, 122 bp, Homo sapiens
  misc_feature (61)..(62): /note="This region represents a CpG dinucleotide"
  misc_feature (61)..(61): /note="Nucleotide may be methylated to form 5-methylcytosine"
gtaataagtgtgtgagtgaatcaatgaaggtaaaaatgagtaagtgcctgagtaattgaacgaagagatgattgcataaagcagcaaatgaatttgtaaatcacaatgactaacacttttga

SEQ ID NO: 17910 - DNA, 122 bp, Homo sapiens
  misc_feature (61)..(62): /note="This region represents a CpG dinucleotide"
  misc_feature (61)..(61): /note="Nucleotide may be methylated to form 5-methylcytosine"
tttcggatttcctaggaggtttctggtttgtcagcattctgttttgtttgcttctcttaccggccgcaaatctgtacagttctgcagcaacctcaattcttgcctcctcagaagaaagaatt

SEQ ID NO: 17911 - DNA, 122 bp, Homo sapiens
  misc_feature (61)..(62): /note="This region represents a CpG dinucleotide"
  misc_feature (61)..(61): /note="Nucleotide may be methylated to form 5-methylcytosine"
ttgaaattccccgagttgctgttaacttggcctgtctgttgcatatggggccaaactacacgcctacctgtggagcaaatgaatacagtgactcatctgtgagctgaggcttgagcaattcc

SEQ ID NO: 17912 - DNA, 122 bp, Homo sapiens
  misc_feature (61)..(62): /note="This region represents a CpG dinucleotide"
  misc_feature (61)..(61): /note="Nucleotide may be methylated to form 5-methylcytosine"
atggcgattctgtggatagagtcctgtcctcaaggaactacatttagtggagaaaagtaacgtacataaataatacaagaaaatgaacataaatgaggaaggaggaagtgctcagcggggga

SEQ ID NO: 17913 - DNA, 122 bp, Homo sapiens
  misc_feature (61)..(62): /note="This region represents a CpG dinucleotide"
  misc_feature (61)..(61): /note="Nucleotide may be methylated to form 5-methylcytosine"
cctacaggatgcatctaaactagtttggtcagcttatccattccctgaaagcaaggaagccgccacatcagtaactccgttgctaaggcaactgcttactttccatatcaactgcaaactcg

SEQ ID NO: 17914 - DNA, 122 bp, Homo sapiens
  misc_feature (61)..(62): /note="This region represents a CpG dinucleotide"
  misc_feature (61)..(61): /note="Nucleotide may be methylated to form 5-methylcytosine"
gttttgtaagttttcctatttaggagttttgttgagagcctagcagcctcacagccaaaacggagtgtctgagatgctgctgattagaagtcatgggtctgctgagtacaaggctagagtca

SEQ ID NO: 17915 - DNA, 122 bp, Homo sapiens
  misc_feature (61)..(62): /note="This region represents a CpG dinucleotide"
  misc_feature (61)..(61): /note="Nucleotide may be methylated to form 5-methylcytosine"
acaggaaatcctaagatcataaaacaatataaataatgtgtcataattgctgtcagcagccgaactttatatagtaaagctgcagggataatctagatttgggttatggctgtgcttcataa

SEQ ID NO: 17916 - DNA, 122 bp, Homo sapiens
  misc_feature (61)..(62): /note="This region represents a CpG dinucleotide"
  misc_feature (61)..(61): /note="Nucleotide may be methylated to form 5-methylcytosine"
taactatgacaagatacaaaagcatgtgtttgccataaatagccctggctaacagcaaaccgctcacactgagcagatcaaattctctataaggagcacagtctggaccatagccaaatccc

SEQ ID NO: 17917 - DNA, 122 bp, Homo sapiens
  misc_feature (61)..(62): /note="This region represents a CpG dinucleotide"
  misc_feature (61)..(61): /note="Nucleotide may be methylated to form 5-methylcytosine"
aacatcttttggtgccaactttcctttctcctttgctcatattgtagatgtactcagtctcggacactgtgggccaagacttatctaaaacaaggtttcattgaggatgctaccttggttaa

SEQ ID NO: 17918 - DNA, 122 bp, Homo sapiens
  misc_feature (61)..(62): /note="This region represents a CpG dinucleotide"
  misc_feature (61)..(61): /note="Nucleotide may be methylated to form 5-methylcytosine"
ccatttgccattttcttctcttgctacagagcccacttcagaggattcaatgagtgaatacgacaacggtgcttggatcagtgcctgccatactgtcagcactagtcgttactattttcact

SEQ ID NO: 17919 - DNA, 122 bp, Homo sapiens
  misc_feature (61)..(62): /note="This region represents a CpG dinucleotide"
  misc_feature (61)..(61): /note="Nucleotide may be methylated to form 5-methylcytosine"
ctcttaataccaaagaacaaataagcaggagatttacatgtggctctactggaaaactgccggctcctgtgatttgcttgggattgttctgaatctcagaacctgcccaaaatgaaaaagac

SEQ ID NO: 17920 - DNA, 122 bp, Homo sapiens
  misc_feature (61)..(62): /note="This region represents a CpG dinucleotide"
  misc_feature (61)..(61): /note="Nucleotide may be methylated to form 5-methylcytosine"
ggtctaaaacctgctctaactgtccatgtacggaaactggcctgggtgccttggcttacacgttaccttgtgtcatacctttgaaacaagggacctgtccaggcttccttctgatggccaac

SEQ ID NO: 17921 - DNA, 122 bp, Homo sapiens
  misc_feature (61)..(62): /note="This region represents a CpG dinucleotide"
  misc_feature (61)..(61): /note="Nucleotide may be methylated to form 5-methylcytosine"
gcaaagctgcaaaggaagttcccaaagagaaagaggaaggagacagcttgtactttcccacggctgaaacccagaactagacagacttacacagagttacacaaatggacctactccccagc

SEQ ID NO: 17922 - DNA, 122 bp, Homo sapiens
  misc_feature (61)..(62): /note="This region represents a CpG dinucleotide"
  misc_feature (61)..(61): /note="Nucleotide may be methylated to form 5-methylcytosine"
gtattaatgattcaagctcctatcattacacagttgcagagatagcaaaagttgtcattacgtgaaaaccttcctctgttgaactgaaatcttatgagtcctgtttcttgcatcttcctgaa

SEQ ID NO: 17923 - DNA, 122 bp, Homo sapiens
  misc_feature (61)..(62): /note="This region represents a CpG dinucleotide"
  misc_feature (61)..(61): /note="Nucleotide may be methylated to form 5-methylcytosine"
attcaaggtcaccaaaccagaacccaggtctctcaacgcttaacagctgaatgacacacacggcactgcacagagagacacataagacagctcatgtgggcctaaccagataccagtttcac

SEQ ID NO: 17924 - DNA, 122 bp, Homo sapiens
  misc_feature (61)..(62): /note="This region represents a CpG dinucleotide"
  misc_feature (61)..(61): /note="Nucleotide may be methylated to form 5-methylcytosine"
aagcctgggaaagtgggaagggaggggaagaaactgggacagacacctgggtcagcggctcgcccagggccccgaaccctgtgtcccagagctgagaagtcctgccccccttacctcaataa

SEQ ID NO: 17925 - DNA, 122 bp, Homo sapiens
  misc_feature (61)..(62): /note="This region represents a CpG dinucleotide"
  misc_feature (61)..(61): /note="Nucleotide may be methylated to form 5-methylcytosine"
ttcaagagcagggcctgggcaaggccaagaaccatgcagaagccttcctggtgaggtggccgtgaagccgaagcagggaggtgggtgagacagagggtggggaggatagtgtctggctcatt

SEQ ID NO: 17926 - DNA, 122 bp, Homo sapiens
  misc_feature (61)..(62): /note="This region represents a CpG dinucleotide"
  misc_feature (61)..(61): /note="Nucleotide may be methylated to form 5-methylcytosine"
cccaacttctaccacgcacagcaaggctgtgctatttaggcgtggatcacacgcacactgcgccaacttctaagctaacaatggacaaccaaagcctccggaactctgtcttgggtagagta

SEQ ID NO: 17927 - DNA, 122 bp, Homo sapiens
  misc_feature (61)..(62): /note="This region represents a CpG dinucleotide"
  misc_feature (61)..(61): /note="Nucleotide may be methylated to form 5-methylcytosine"
tcacctcctttctagcttatccccttctctccaccccttaccgccccccccccacccccccgcccgaaagctgaggtgtgtcactgctgaactgaggctggtgaagagacttgagcactctc

SEQ ID NO: 17928 - DNA, 122 bp, Homo sapiens
  misc_feature (61)..(62): /note="This region represents a CpG dinucleotide"
  misc_feature (61)..(61): /note="Nucleotide may be methylated to form 5-methylcytosine"
ctcaaacctgggccaggagtgaggagctggcctcccctaggctgaacttgactcacagaccggtttggtgtgggccatccagttgaaaggagttgtcaatgtttaatatttgctaggcttca

SEQ ID NO: 17929 - DNA, 122 bp, Homo sapiens
  misc_feature (61)..(62): /note="This region represents a CpG dinucleotide"
  misc_feature (61)..(61): /note="Nucleotide may be methylated to form 5-methylcytosine"
gcatgtcacaaagctcaggggagtaggaagttcttctctcatcacaactgagaaacccaacgtttaaataaaccacaatttgattcagttcaattgtgtgtgtttgtgtgtgcgtgcagagt

SEQ ID NO: 17930 - DNA, 122 bp, Homo sapiens
  misc_feature (61)..(62): /note="This region represents a CpG dinucleotide"
  misc_feature (61)..(61): /note="Nucleotide may be methylated to form 5-methylcytosine"
agattctcatataaggctattaacatgttgtaatctggctacatctcctggcgatcctcccgcagcagtccatcagcaatcttctccactcacattcacagccatatagcagtctactgtgt

SEQ ID NO: 17931 - DNA, 122 bp, Homo sapiens
  misc_feature (61)..(62): /note="This region represents a CpG dinucleotide"
  misc_feature (61)..(61): /note="Nucleotide may be methylated to form 5-methylcytosine"
agttattcttaatcaaattagcccttgaaacaatccggaagctcttgagtctgcagctggcgtgctgtccatccacactccccagatctacagggggcaattcacacacagcccttgcagcg

SEQ ID NO: 17932 - DNA, 122 bp, Homo sapiens
  misc_feature (61)..(62): /note="This region represents a CpG dinucleotide"
  misc_feature (61)..(61): /note="Nucleotide may be methylated to form 5-methylcytosine"
aagggtttcacgggctatgactaaagccaggcctggtttacttgtttcctcactccagaccgatatgctttctgagacattctctgaggcagatttggggcctactttagggtttattttaa

SEQ ID NO: 17933 - DNA, 122 bp, Homo sapiens
  misc_feature (61)..(62): /note="This region represents a CpG dinucleotide"
  misc_feature (61)..(61): /note="Nucleotide may be methylated to form 5-methylcytosine"
ctgcactaggggctcatccctcacttgcaggatgggcgtgcagaggagctgggcagaaatcggtatttctaatgcccagtcactgggtcaacaaaggaaaacaacccaacccaaccatgagt

SEQ ID NO: 17934 - DNA, 122 bp, Homo sapiens
  misc_feature (61)..(62): /note="This region represents a CpG dinucleotide"
  misc_feature (61)..(61): /note="Nucleotide may be methylated to form 5-methylcytosine"
ccatactactaacctgccaaaacaatgtttcctaagcgaaattttacataaattgcttctcgtgcaattttacttctcatgcacacacagactaaagagccctctaatttcctatactaatg

SEQ ID NO: 17935 - DNA, 122 bp, Homo sapiens
  misc_feature (61)..(62): /note="This region represents a CpG dinucleotide"
  misc_feature (61)..(61): /note="Nucleotide may be methylated to form 5-methylcytosine"
aatatggctcatctttgttaaaaagtatatttaattttttacatttaatatcattctaaacgggtaaggaaggtgaaagattgagttggataaaactgttagaaagtaaatatgataacaga

SEQ ID NO: 17936 - DNA, 122 bp, Homo sapiens
  misc_feature (61)..(62): /note="This region represents a CpG dinucleotide"
  misc_feature (61)..(61): /note="Nucleotide may be methylated to form 5-methylcytosine"
ttcattctgctcatgtccatttccacacccctgaagaggaagtgtactcacttaagccaacggatgcttaccagtcatgacacacaccatatctgagcagaagctttaattgttgtgcatgc

SEQ ID NO: 17937 - DNA, 122 bp, Homo sapiens
  misc_feature (61)..(62): /note="This region represents a CpG dinucleotide"
  misc_feature (61)..(61): /note="Nucleotide may be methylated to form 5-methylcytosine"
ggacagaacgtgggggacattatgtcccagctggtcctgggagggtcccatggggagacccgctggtcatgtgctttgcatgtcctgactgtaggcagagcagacctccagggacttccttc

SEQ ID NO: 17938 - DNA, 122 bp, Homo sapiens
  misc_feature (61)..(62): /note="This region represents a CpG dinucleotide"
  misc_feature (61)..(61): /note="Nucleotide may be methylated to form 5-methylcytosine"
gctcctacctttatagttaatacacataaaaagagaatatttagacaggcacttcacaaacgtgtggttagcttaggaagtcagaagattataactgcccccaagaaaatgtcgtgcctttc

SEQ ID NO: 17939 - DNA, 122 bp, Homo sapiens
  misc_feature (61)..(62): /note="This region represents a CpG dinucleotide"
  misc_feature (61)..(61): /note="Nucleotide may be methylated to form 5-methylcytosine"
gtagagagagaataagtcacataattacctcatgcactttctgattttcaaacgatgacacgtaaaagagatgggtaataggaactggtatgatcagtggttgactatccctacaagatgtc

SEQ ID NO: 17940 - DNA, 122 bp, Homo sapiens
  misc_feature (61)..(62): /note="This region represents a CpG dinucleotide"
  misc_feature (61)..(61): /note="Nucleotide may be methylated to form 5-methylcytosine"
taatacagtgcctgaagcttagacagggcttactaaacacatctgactaattctcagcagcgtgttggaagagccctcattagtattaatagcagagctgggttttgaccccagacttatag

SEQ ID NO: 17941 - DNA, 122 bp, Homo sapiens
  misc_feature (61)..(62): /note="This region represents a CpG dinucleotide"
  misc_feature (61)..(61): /note="Nucleotide may be methylated to form 5-methylcytosine"
gatttagggtttaacctttaaattcggcagcaccctttcatgaatggtctgagccaatgacgagacagcagcatttctcttttggtattgccagattagaggtctcgctggtggcttttgac

SEQ ID NO: 17942 - DNA, 122 bp, Homo sapiens
  misc_feature (61)..(62): /note="This region represents a CpG dinucleotide"
  misc_feature (61)..(61): /note="Nucleotide may be methylated to form 5-methylcytosine"
gacttaacttaataattttttacctagcacatcacttatccagtttgaacctcatacatacgaagaaacttgggctcaaataagtgatgtcttttaaggtcattgacagtaatagaaatggg

SEQ ID NO: 17943 - DNA, 122 bp, Homo sapiens
  misc_feature (61)..(62): /note="This region represents a CpG dinucleotide"
  misc_feature (61)..(61): /note="Nucleotide may be methylated to form 5-methylcytosine"
cagggagaggatttaatgtgaggccaggtgtctacactgtccctggggcagggtaactcccgtaacactcacccttttaagcccacttccctgtgttagtgtgttgagctccttggctcagg

SEQ ID NO: 17944 - DNA, 122 bp, Homo sapiens
  misc_feature (61)..(62): /note="This region represents a CpG dinucleotide"
  misc_feature (61)..(61): /note="Nucleotide may be methylated to form 5-methylcytosine"
agcacgtgctgtatagttgtgatgcccgcggtcggagccccacgggagcattgtagcacgcgctgtatggttgtgcgttgtagcgtgcgctgtatagttgtgatgcccacaggcttccttgc

SEQ ID NO: 17945 - DNA, 122 bp, Homo sapiens
  misc_feature (61)..(62): /note="This region represents a CpG dinucleotide"
  misc_feature (61)..(61): /note="Nucleotide may be methylated to form 5-methylcytosine"
gcaaacatttactgaaccgtagcactggggcccagcctccagctccactattctgtaccccgggaaggcctggggacccattccacaaacacctctgcatgtcagccttaccagcttgctac

SEQ ID NO: 17946 - DNA, 122 bp, Homo sapiens
  misc_feature (61)..(62): /note="This region represents a CpG dinucleotide"
  misc_feature (61)..(61): /note="Nucleotide may be methylated to form 5-methylcytosine"
agtcacatgggtcccttgccaagagagaagatctctctcaggaagaaaggcaggatggtgcgggggtttaaactaggtttgtattacaaaaatctggatgggttttttgttttttttgttgt

SEQ ID NO: 17947 - DNA, 122 bp, Homo sapiens
  misc_feature (61)..(62): /note="This region represents a CpG dinucleotide"
  misc_feature (61)..(61): /note="Nucleotide may be methylated to form 5-methylcytosine"
gtaaacattaaatgtgaggcgtgtgcagcttacctgctttccacagggcagtcctctgttcgttgttggaattaaacgcttttgcaaatctatgtgactctaataagcagtccagtagctta

SEQ ID NO: 17948 - DNA, 122 bp, Homo sapiens
  misc_feature (61)..(62): /note="This region represents a CpG dinucleotide"
  misc_feature (61)..(61): /note="Nucleotide may be methylated to form 5-methylcytosine"
gatctacccgcctcagcctcccaaagtgctgggattacatgagtcaccgcacccagcatacgttgttctttgcatcacaaattccagaaacatgaagataatgaatgaagcagctagaaaaa

SEQ ID NO: 17949 - DNA, 122 bp, Homo sapiens
  misc_feature (61)..(62): /note="This region represents a CpG dinucleotide"
  misc_feature (61)..(61): /note="Nucleotide may be methylated to form 5-methylcytosine"
cctagggaggggaaccaatctacacacacacatacacacacgcacgcccgcgcacacacacgcatgcatacatggacatgcgagcctcccaggctgcacttctccctgcctgtggggcccta

SEQ ID NO: 17950 - DNA, 122 bp, Homo sapiens
  misc_feature (61)..(62): /note="This region represents a CpG dinucleotide"
  misc_feature (61)..(61): /note="Nucleotide may be methylated to form 5-methylcytosine"
cacatgcccttttgtcctcccgagctctaagcctagcagctgcctgtcatagaatgttcacggacattgaaatggttcacttgcatggggtgcagagtcacactcacctaccttatgggcag

SEQ ID NO: 17951 - DNA, 122 bp, Homo sapiens
  misc_feature (61)..(62): /note="This region represents a CpG dinucleotide"
  misc_feature (61)..(61): /note="Nucleotide may be methylated to form 5-methylcytosine"
ccctaagggcaggaatctcagccattgtactatatcatcagcagctgaaacagctcctggcgcctgggaggactctgaatattttcagcataatgcatgtatgcgtgggtgagcaaatccct

SEQ ID NO: 17952 - DNA, 122 bp, Homo sapiens
  misc_feature (61)..(62): /note="This region represents a CpG dinucleotide"
  misc_feature (61)..(61): /note="Nucleotide may be methylated to form 5-methylcytosine"
ccggcaactagagtgaaagctccaaagacttcccagaaggacttcccaggtgccaggagccgtgcctggcgtatctgatgcgttcaaggtacatctgtggaatgaatttgaagcgctcccag

SEQ ID NO: 17953 - DNA, 122 bp, Homo sapiens
  misc_feature (61)..(62): /note="This region represents a CpG dinucleotide"
  misc_feature (61)..(61): /note="Nucleotide may be methylated to form 5-methylcytosine"
ggcataacagacacatgatataagacaattaatgtgatttctcaaggaagatactccagccgtgaatcattattatctaagtaaatgggaatttaatgacttttcggacaaggaactcgaaa

SEQ ID NO: 17954 - DNA, 122 bp, Homo sapiens
  misc_feature (61)..(62): /note="This region represents a CpG dinucleotide"
  misc_feature (61)..(61): /note="Nucleotide may be methylated to form 5-methylcytosine"
ccaagtgctgagatatattgggaagcccagagtcagcacttttggtggctcaggaggcagcgggccctgatttttgccgaatgcagaaagctagagcctccttgctgctcggtcccagagtc

SEQ ID NO: 17955 - DNA, 122 bp, Homo sapiens
  misc_feature (61)..(62): /note="This region represents a CpG dinucleotide"
  misc_feature (61)..(61): /note="Nucleotide may be methylated to form 5-methylcytosine"
gctttcaaatgtgaaaagtgccaggaatccttctccctgatgctgtaatgccacgtgtaacgtgaacatctgctttgtggacagtgactggcttgttggcttttatctagctctttgttggt

SEQ ID NO: 17956 - DNA, 122 bp, Homo sapiens
  misc_feature (61)..(62): /note="This region represents a CpG dinucleotide"
  misc_feature (61)..(61): /note="Nucleotide may be methylated to form 5-methylcytosine"
ctcccaccctcttttcccaaggtttcaggagtctgagatgtacttctcccaccgcccccacgggagccatacctccacatccacaatgctgcagggctgagaggctgtgagccagaggactt

SEQ ID NO: 17957 - DNA, 122 bp, Homo sapiens
  misc_feature (61)..(62): /note="This region represents a CpG dinucleotide"
  misc_feature (61)..(61): /note="Nucleotide may be methylated to form 5-methylcytosine"
ggtccaggcccagggggcctgccaggagctgggggcccagctgctgagcctggccagctacgaggaggagcactttgtggccaacatgctcaacaagatcttcgggtactgagccgggctga

SEQ ID NO: 17958 - DNA, 122 bp, Homo sapiens
  misc_feature (61)..(62): /note="This region represents a CpG dinucleotide"
  misc_feature (61)..(61): /note="Nucleotide may be methylated to form 5-methylcytosine"
catagccaatttggatttcctgaagcttaagtgtcagggcgcctgtcagggcccgaggaacgtgtttacagagctgtatatttttgggtaaaatttgtgaaagcaagatatttcagctgcaa

SEQ ID NO: 17959 - DNA, 122 bp, Homo sapiens
  misc_feature (61)..(62): /note="This region represents a CpG dinucleotide"
  misc_feature (61)..(61): /note="Nucleotide may be methylated to form 5-methylcytosine"
ttgttgtgctgcccgccttatgcccaggcttaagtgccagtgaagccttgtctgggaaaccgtttttggcctcatgtcaatttctattgcattgagggcccaagaacaatgattggtaacat

SEQ ID NO: 17960 - DNA, 122 bp, Homo sapiens
  misc_feature (61)..(62): /note="This region represents a CpG dinucleotide"
  misc_feature (61)..(61): /note="Nucleotide may be methylated to form 5-methylcytosine"
gctgttggcatgctgggtgcacggtaattagtgtttaccctgaaagctccaaatgcttcccgtggtatttcgccatcccattttgcagatgtggcccacagaggaagcttttgccccacaga

SEQ ID NO: 17961 - DNA, 122 bp, Homo sapiens
  misc_feature (61)..(62): /note="This region represents a CpG dinucleotide"
  misc_feature (61)..(61): /note="Nucleotide may be methylated to form 5-methylcytosine"
agactaaaaagaacttagtggccaaccgatggtgggaaaacagaagaggtggaaaaggaccgagtttgagccctgtgttgccaaggtggtgaggccatcaatagaaacagggaaactggctg

SEQ ID NO: 17962 - DNA, 122 bp, Homo sapiens
  misc_feature (61)..(62): /note="This region represents a CpG dinucleotide"
  misc_feature (61)..(61): /note="Nucleotide may be methylated to form 5-methylcytosine"
aatctccatctcatagtaacctcaacagaaaccacagtgctctatcaatctaatagaagacgcaatcatagaaaagagacctagacaggcagcatagggaattactcacttccttactctta

SEQ ID NO: 17963 - DNA, 122 bp, Homo sapiens
  misc_feature (61)..(62): /note="This region represents a CpG dinucleotide"
  misc_feature (61)..(61): /note="Nucleotide may be methylated to form 5-methylcytosine"
attggccaggccaacaaagtgatgatttaccggtttgtgactcgcgcgtcagtggaagagcgaatcacacaagtggccaagagaaagatgatgctgacacacctggttgtgcggcctgggct

SEQ ID NO: 17964 - DNA, 122 bp, Homo sapiens
  misc_feature (61)..(62): /note="This region represents a CpG dinucleotide"
  misc_feature (61)..(61): /note="Nucleotide may be methylated to form 5-methylcytosine"
caggtcacaaagaactgaggaactcaaggactcacactcaccaggttctccaaagcagatcggtgctagagtaccaggagtttaagagttgtgcagcagggaacctctttataggacgttct

SEQ ID NO: 17965 - DNA, 122 bp, Homo sapiens
  misc_feature (61)..(62): /note="This region represents a CpG dinucleotide"
  misc_feature (61)..(61): /note="Nucleotide may be methylated to form 5-methylcytosine"
gggcagctcactctggagccatccctgacaaggctgtgggaggggtgcgcagtgccctgccgctctcattggcaggacatgggggttagcacagacatctctaggactggattgaagagctg

SEQ ID NO: 17966 - DNA, 122 bp, Homo sapiens
  misc_feature (61)..(62): /note="This region represents a CpG dinucleotide"
  misc_feature (61)..(61): /note="Nucleotide may be methylated to form 5-methylcytosine"
cataaaaagagcttcccataaccacctaccctgggcgctcagttagtacggtaaacagagcgcgagcattaaggctttttatgataattccccacaagttgtgaaaagcgaccatccttggt

SEQ ID NO: 17967 - DNA, 122 bp, Homo sapiens
  misc_feature (61)..(62): /note="This region represents a CpG dinucleotide"
  misc_feature (61)..(61): /note="Nucleotide may be methylated to form 5-methylcytosine"
gtcatcttgcggctgatgaaattccccttgagactctctttaaagcagcttcctgctctccgcacttaatcccatgtggtataaagtaagggaggggagaagccacagatatatcaagagaa

SEQ ID NO: 17968 - DNA, 122 bp, Homo sapiens
  misc_feature (61)..(62): /note="This region represents a CpG dinucleotide"
  misc_feature (61)..(61): /note="Nucleotide may be methylated to form 5-methylcytosine"
tatgtctgtggcaatcttccttcaatgttctgggcactgtggggtaatctggggctgacacgtctgccattgcccccaagaatttgtaacattcctgagtccatcggagcagttagcagcta

SEQ ID NO: 17969 - DNA, 122 bp, Homo sapiens
  misc_feature (61)..(62): /note="This region represents a CpG dinucleotide"
  misc_feature (61)..(61): /note="Nucleotide may be methylated to form 5-methylcytosine"
agaagggcctgtggcatcattggagaggttagggctctccctaaccattagggctccctgcgcctaatggttcttccctctgtcagttttgcattaaaactagtacatgccttggcttgagc

SEQ ID NO: 17970 - DNA, 122 bp, Homo sapiens
  misc_feature (61)..(62): /note="This region represents a CpG dinucleotide"
  misc_feature (61)..(61): /note="Nucleotide may be methylated to form 5-methylcytosine"
atcttgggttgtgtggttgtgctgacaatattcctatcaccctagataatttcccattcccgctggctgagttttgtcccctcgggggatactggcaccctaggatgcacgcttccagatgg

SEQ ID NO: 17971 - DNA, 122 bp, Homo sapiens
  misc_feature (61)..(62): /note="This region represents a CpG dinucleotide"
  misc_feature (61)..(61): /note="Nucleotide may be methylated to form 5-methylcytosine"
aaggaaatttcatgctgcagcctgtcagtactgccaattctgctcatgaattttctatgccgtttgacacttatgttttctggagttataaaaggaggagtgttacttcttaataaactccc

SEQ ID NO: 17972 - DNA, 122 bp, Homo sapiens
  misc_feature (61)..(62): /note="This region represents a CpG dinucleotide"
  misc_feature (61)..(61): /note="Nucleotide may be methylated to form 5-methylcytosine"
ggagtttaaaggcaagaaggctagggtcacggagcaactgctatgggaaaggtgagccagcgcgacagcccccaccccagaagaggcccggggcaaggggatgcctgcagcttggctggtat

SEQ ID NO: 17973 - DNA, 122 bp, Homo sapiens
  misc_feature (61)..(62): /note="This region represents a CpG dinucleotide"
  misc_feature (61)..(61): /note="Nucleotide may be methylated to form 5-methylcytosine"
ccaactctcaatattgttacattggagattaagcttctaacacacaaactttagggaacacgttctagtcacagcagagagggaacacaggcagacccccagcagactccataagtagaaaa

SEQ ID NO: 17974 - DNA, 122 bp, Homo sapiens
  misc_feature (61)..(62): /note="This region represents a CpG dinucleotide"
  misc_feature (61)..(61): /note="Nucleotide may be methylated to form 5-methylcytosine"
cagcattccattcattttagacataacagtgcttactttagtctgtatggaccttttcagcgtttaaaacttttttcatctttatattttatttgactttcattcaccacaggccatgagtt

SEQ ID NO: 17975 - DNA, 122 bp, Homo sapiens
  misc_feature (61)..(62): /note="This region represents a CpG dinucleotide"
  misc_feature (61)..(61): /note="Nucleotide may be methylated to form 5-methylcytosine"
actcacagcaaatcaagtccacagcaagcaatgctgtgtcattctgacagccctgcatcacgcagccacccagcagggcctggagccttcccaggcctcaggctctgaccttgaccttctgc

SEQ ID NO: 17976 - DNA, 122 bp, Homo sapiens
  misc_feature (61)..(62): /note="This region represents a CpG dinucleotide"
  misc_feature (61)..(61): /note="Nucleotide may be methylated to form 5-methylcytosine"
gagaggcctaggtaggaggactgcttgagcttaggagttcgagattagcctgggcaacaccgtgaaaccccatctccacaaaaaacagacaaaattagccaggcatggtggggtgtgcctct

SEQ ID NO: 17977 - DNA, 122 bp, Homo sapiens
  misc_feature (61)..(62): /note="This region represents a CpG dinucleotide"
  misc_feature (61)..(61): /note="Nucleotide may be methylated to form 5-methylcytosine"
aaactgttgactgtatatccttttttcgagttttctcttcccttagattctgggacacaacgttctggttttcctgctcccttttcggtggcctctttccaatctcctgctcatttaatctg

SEQ ID NO: 17978 - DNA, 122 bp, Homo sapiens
  misc_feature (61)..(62): /note="This region represents a CpG dinucleotide"
  misc_feature (61)..(61): /note="Nucleotide may be methylated to form 5-methylcytosine"
gggtgtggctatttaaatgaccggcttctacccctgccttttcattctaagggtgaggcacgtggttccaaatatctcaagtggaatctgtgcatttcacattccccattcccaggtcagcg

SEQ ID NO: 17979 - DNA, 122 bp, Homo sapiens
  misc_feature (61)..(62): /note="This region represents a CpG dinucleotide"
  misc_feature (61)..(61): /note="Nucleotide may be methylated to form 5-methylcytosine"
gagggaagtgcattatgagggctctgtcctaagtcagctcccatccaccaagggtggtaacgctaagcttttactctctgcttaaaccatccagcaagtcatcaaagttacaaaagcccctg

SEQ ID NO: 17980 - DNA, 122 bp, Homo sapiens
  misc_feature (61)..(62): /note="This region represents a CpG dinucleotide"
  misc_feature (61)..(61): /note="Nucleotide may be methylated to form 5-methylcytosine"
agccccatgggatatagcctaaggccaaaacaaataaaaacaacaacaacaaacaaagaacgaaagacaactggtttcagtaatcatattgtttgcagcagtgtgttgttatctgagctgct

SEQ ID NO: 17981 - DNA, 122 bp, Homo sapiens
  misc_feature (61)..(62): /note="This region represents a CpG dinucleotide"
  misc_feature (61)..(61): /note="Nucleotide may be methylated to form 5-methylcytosine"
cccttggttcccgtccccaggaagccggcgagatggaactggcatctatcgggccctgaccgtgctgggggctgcaccggctcggaaagaaaccgatcagtgcaggcaccagtgcttgacgg

SEQ ID NO: 17982 - DNA, 122 bp, Homo sapiens
  misc_feature (61)..(62): /note="This region represents a CpG dinucleotide"
  misc_feature (61)..(61): /note="Nucleotide may be methylated to form 5-methylcytosine"
tgtcagatgtcgagggcagtcatatgcacggggatagcaatttgcctggactcatctccacgcctgaagaggcaggtatgagtcaggggtgagtgttgaagagtgtgatgaatgggtggaag

SEQ ID NO: 17983 - DNA, 122 bp, Homo sapiens
  misc_feature (61)..(62): /note="This region represents a CpG dinucleotide"
  misc_feature (61)..(61): /note="Nucleotide may be methylated to form 5-methylcytosine"
aactaccctgatgacgttgtacatatggcttgcacccatggcttgtttgcacccacagctcgcttgcacccaaagagaggaaaagccatgttgaaactgtctacaattccttcagtgttctt

SEQ ID NO: 17984 - DNA, 122 bp, Homo sapiens
  misc_feature (61)..(62): /note="This region represents a CpG dinucleotide"
  misc_feature (61)..(61): /note="Nucleotide may be methylated to form 5-methylcytosine"
accagctgcctctgtactgtagtaaatataaacttgatgttcacacacacagatagcaatcgggtgcacatattgtatgtctgtataaacaaagccgtgtgtatttatagacccatatcaat

SEQ ID NO: 17985 - DNA, 122 bp, Homo sapiens
  misc_feature (61)..(62): /note="This region represents a CpG dinucleotide"
  misc_feature (61)..(61): /note="Nucleotide may be methylated to form 5-methylcytosine"
aaacaaggatactaataacacctacttcatgggagtttgtgactatcaaataagataattcgtatacagttgcctggcatctagtatgtgcaataaactgagctataatcaccaccatcatc

SEQ ID NO: 17986 - DNA, 122 bp, Homo sapiens
  misc_feature (61)..(62): /note="This region represents a CpG dinucleotide"
  misc_feature (61)..(61): /note="Nucleotide may be methylated to form 5-methylcytosine"
cagctaagccatatctcacaagccagagagagaccacaggctctgaggacactcaccttgcgtgctgggccacacccacagagccagcaggaccagcctccagaccatcctgcctcctgcag

SEQ ID NO: 17987 - DNA, 122 bp, Homo sapiens
  misc_feature (61)..(62): /note="This region represents a CpG dinucleotide"
  misc_feature (61)..(61): /note="Nucleotide may be methylated to form 5-methylcytosine"
tggtgctagtggtcccacagaagcttgcagggaaccttcccgaattctctaaatgggatgcgaattttcattgaggacgttcatgggttttaagttaattagtctcacttaatcaccgaatc

SEQ ID NO: 17988 - DNA, 122 bp, Homo sapiens
  misc_feature (61)..(62): /note="This region represents a CpG dinucleotide"
  misc_feature (61)..(61): /note="Nucleotide may be methylated to form 5-methylcytosine"
gtggggtgagcccctgatgagtgtcagctgttactgtgtcgatcagtgcatctgactgttcgtatctgcctcttgcttagcctgtgtgacctcaggcacttgtgttctgggcctcagtcttc

SEQ ID NO: 17989 - DNA, 122 bp, Homo sapiens
  misc_feature (61)..(62): /note="This region represents a CpG dinucleotide"
  misc_feature (61)..(61): /note="Nucleotide may be methylated to form 5-methylcytosine"
ggaaagagctctgaaacaggaaaggtaaagactacctccctgactgagaaaaaagcctcacgtagacaaaaagaaattccctttagttatttggttggggactctgggaagaaaaagttggt

SEQ ID NO: 17990 - DNA, 122 bp, Homo sapiens
  misc_feature (61)..(62): /note="This region represents a CpG dinucleotide"
  misc_feature (61)..(61): /note="Nucleotide may be methylated to form 5-methylcytosine"
attgataaatatacctggtaagaattcaccttgcttcagattacaaaatcacaaaatgcccgtaacaaatgtgggaaggaagttagtgactggccatgaatttctaaaagtaagatgcagtt

SEQ ID NO: 17991 - DNA, 122 bp, Homo sapiens
  misc_feature (61)..(62): /note="This region represents a CpG dinucleotide"
  misc_feature (61)..(61): /note="Nucleotide may be methylated to form 5-methylcytosine"
gacagctagtgccgtctggggaccagtcactgtgctaggatcagctcgagtactaagccgcgacagttgggctagaaagcccttcctccgagccccccaaggcccaggtggcagcgggttca

SEQ ID NO: 17992 - DNA, 122 bp, Homo sapiens
  misc_feature (61)..(62): /note="This region represents a CpG dinucleotide"
  misc_feature (61)..(61): /note="Nucleotide may be methylated to form 5-methylcytosine"
caagtggaagaggggtcaacactagaccatgcatgccttagagtcattgaatttcagaaccgaaagtgacctcagaacctgtctaatttaaccagctcattttacaggtagggaaactcaga

SEQ ID NO: 17993 - DNA, 122 bp, Homo sapiens
  misc_feature (61)..(62): /note="This region represents a CpG dinucleotide"
  misc_feature (61)..(61): /note="Nucleotide may be methylated to form 5-methylcytosine"
cagtgagaagaaaatgatgccagacctcaagagaatgcagaggacattgatttaaaagaacggggatagatgttagaaggaagagaacagaaccaatcatacaaaaacagtaaaaataaaaa

SEQ ID NO: 17994 - DNA, 122 bp, Homo sapiens
  misc_feature (61)..(62): /note="This region represents a CpG dinucleotide"
  misc_feature (61)..(61): /note="Nucleotide may be methylated to form 5-methylcytosine"
cctctccacatggcagctcacaccttggaagcctgcttcatcaaagccaggagttaagagcgtgaaaacaaggtagaaattacagctttcataaccgcatcttggatgtggctacacatcac

SEQ ID NO: 17995 - DNA, 122 bp, Homo sapiens
  misc_feature (61)..(62): /note="This region represents a CpG dinucleotide"
  misc_feature (61)..(61): /note="Nucleotide may be methylated to form 5-methylcytosine"
aataaaaggcgcttctgagaaaccttggcagagatggtcagagaggcacatttagtatgacgcagtacaagttagtgttgaagggtttaattcctcggagctctactttcctcatctgtaaa

SEQ ID NO: 17996 - DNA, 122 bp, Homo sapiens
  misc_feature (61)..(62): /note="This region represents a CpG dinucleotide"
  misc_feature (61)..(61): /note="Nucleotide may be methylated to form 5-methylcytosine"
agcaatgcagtggcactgaactgtactagtagtcactgtattcttctctggcatttgcagcgaagaattatgcaaactgtttaaaaatgtcctaatctcaatccttcagtatacatcctttt

SEQ ID NO: 17997 - DNA, 122 bp, Homo sapiens
  misc_feature (61)..(62): /note="This region represents a CpG dinucleotide"
  misc_feature (61)..(61): /note="Nucleotide may be methylated to form 5-methylcytosine"
aaatttctgaaatgatagaaatagtttgtatatgttgcctactatggtaaccactggccacgggtagttattgtgcaacctgaagtatgactaatgagactgagaaactaatttttaaattg

SEQ ID NO: 17998 - DNA, 122 bp, Homo sapiens
  misc_feature (61)..(62): /note="This region represents a CpG dinucleotide"
  misc_feature (61)..(61): /note="Nucleotide may be methylated to form 5-methylcytosine"
ctgtctttaaaaaaaaaaatgaaataaaataaaataaaataaaaggcttgtagttgtatacgatctgtgtaatgatagcagttttgtaagaaaaataaaatgaaagcaaataatagataatg

SEQ ID NO: 17999 - DNA, 122 bp, Homo sapiens
  misc_feature (61)..(62): /note="This region represents a CpG dinucleotide"
  misc_feature (61)..(61): /note="Nucleotide may be methylated to form 5-methylcytosine"
taaacccaaacttcttgccatagcccaaaggccctgtgtgatttgactcctgcagatttccgctgccgcctctcctgttgcctcctttctggctcactacactgtcgtcacatgtgatttct

SEQ ID NO: 18000 - DNA, 122 bp, Homo sapiens
  misc_feature (61)..(62): /note="This region represents a CpG dinucleotide"
  misc_feature (61)..(61): /note="Nucleotide may be methylated to form 5-methylcytosine"
agtccaagaagggaatttattaacttacacaattcaaggaagggttgaataagcacaccacgagaaaggcagataagcaactgccctgcaggaacaaacagatccaggaactcaaatgccag

SEQ ID NO: 18001 - DNA, 122 bp, Homo sapiens
  misc_feature (61)..(62): /note="This region represents a CpG dinucleotide"
  misc_feature (61)..(61): /note="Nucleotide may be methylated to form 5-methylcytosine"
ctacaggacacctgggaggaggaaggaggaaggagggaggagggagaaggaagtacctagcgcccaacatccagaacctgtcaaagccagagaagacagaggagcttggaggtctgcaggcc

SEQ ID NO: 18002 - DNA, 122 bp, Homo sapiens
  misc_feature (61)..(62): /note="This region represents a CpG dinucleotide"
  misc_feature (61)..(61): /note="Nucleotide may be methylated to form 5-methylcytosine"
ggggagtgtggtagccataggatgcatcattcaaatcatcctccaaaagaggaccagttgcgaggagcatagtcagctaacagcttcttccagctgtgcaccttctggttcctctgtagtgt

SEQ ID NO: 18003 - DNA, 122 bp, Homo sapiens
  misc_feature (61)..(62): /note="This region represents a CpG dinucleotide"
  misc_feature (61)..(61): /note="Nucleotide may be methylated to form 5-methylcytosine"
aagataagctcaatgattgaatctcattaatatcacccatatcaatcacagtgctggccacgtaatacacattcaataaatgtttatgcaagaaaaggtggaattgttttcaacattttgga

SEQ ID NO: 18004 - DNA, 122 bp, Homo sapiens
  misc_feature (61)..(62): /note="This region represents a CpG dinucleotide"
  misc_feature (61)..(61): /note="Nucleotide may be methylated to form 5-methylcytosine"
gatgcagtgggaatttaacccgcattgtctgtttccatttcgtaatagtttccaaagcaacgggttcatgaattcatactgttgactaattttgctggatatatgtggcctcagtattctaa

SEQ ID NO: 18005 - DNA, 122 bp, Homo sapiens
  misc_feature (61)..(62): /note="This region represents a CpG dinucleotide"
  misc_feature (61)..(61): /note="Nucleotide may be methylated to form 5-methylcytosine"
acagaccaacatatgtaataaagttacacataactaagtatttacactaagtaatacatacgctttcacacacactcacccagattactcatacccacaccagtacaagtaaaacagaaaat

SEQ ID NO: 18006 - DNA, 122 bp, Homo sapiens
  misc_feature (61)..(62): /note="This region represents a CpG dinucleotide"
  misc_feature (61)..(61): /note="Nucleotide may be methylated to form 5-methylcytosine"
cctatagtttgtggtgacagggagcagggtaagacagtagggatgaatgctgaagtagagcggaagaggttgttaaagatgaagaaatcaagaaactgagaagcccaggactaggagagatt

SEQ ID NO: 18007 - DNA, 122 bp, Homo sapiens
  misc_feature (61)..(62): /note="This region represents a CpG dinucleotide"
  misc_feature (61)..(61): /note="Nucleotide may be methylated to form 5-methylcytosine"
gcagtctgtgtgggcacgatatatttggcagctaccactctactgactcatttgggctctcgttaggcaaagtcctcattctcatttagcacgcgctgctggtttacaccatagttcccatc

SEQ ID NO: 18008 - DNA, 122 bp, Homo sapiens
  misc_feature (61)..(62): /note="This region represents a CpG dinucleotide"
  misc_feature (61)..(61): /note="Nucleotide may be methylated to form 5-methylcytosine"
acaaagaagccaacatgtatttagtttcttttatatattaggggttttactctctccagccgtcacaactctctgtgatattttcatgaaccccactttatctatgaggacaatgagcctca

SEQ ID NO: 18009 - DNA, 122 bp, Homo sapiens
  misc_feature (61)..(62): /note="This region represents a CpG dinucleotide"
  misc_feature (61)..(61): /note="Nucleotide may be methylated to form 5-methylcytosine"
ccctgctgggggtgagggggtatttttctgtctcttcaataaaccagaagcggccgggcgcggtggcttctgcctgtaatcctagcactctgggaggcagaggcgggtggatcacctgagat

SEQ ID NO: 18010 - DNA, 122 bp, Homo sapiens
  misc_feature (61)..(62): /note="This region represents a CpG dinucleotide"
  misc_feature (61)..(61): /note="Nucleotide may be methylated to form 5-methylcytosine"
gaagttgggggcgttatctgggcccttgggatccattcccctgggtataaagtgttggtacgtggctccaggcctggcccactcagcctcccccaggaaggcttctcaagtggagaaggttc

SEQ ID NO: 18011 - DNA, 122 bp, Homo sapiens
  misc_feature (61)..(62): /note="This region represents a CpG dinucleotide"
  misc_feature (61)..(61): /note="Nucleotide may be methylated to form 5-methylcytosine"
tacagtgttcagtacagtaacatgccagacaggtttgtagtctaggagcaatcagctacacggtgtagcctaggtctgtagtaggctatgctacctaggtttatgtaagtgccctctatgac

SEQ ID NO: 18012 - DNA, 122 bp, Homo sapiens
  misc_feature (61)..(62): /note="This region represents a CpG dinucleotide"
  misc_feature (61)..(61): /note="Nucleotide may be methylated to form 5-methylcytosine"
ctagggactcctgagttagttaacagagcagggaagaagactgactctgccattaattcacgagtggcctggggccaatcctctctgggcctcaactggaaaaacagagaacttgatcaaaa

SEQ ID NO: 18013 - DNA, 122 bp, Homo sapiens
  misc_feature (61)..(62): /note="This region represents a CpG dinucleotide"
  misc_feature (61)..(61): /note="Nucleotide may be methylated to form 5-methylcytosine"
ttgccatcttaactgcatgagtgtgtaatgctgtaagtgaccctgtggcaaaaagacaagcgcagagtgggaatgactcagcttgggccctgatcatactacatccaggtgtgataatgaat

SEQ ID NO: 18014 - DNA, 122 bp, Homo sapiens
  misc_feature (61)..(62): /note="This region represents a CpG dinucleotide"
  misc_feature (61)..(61): /note="Nucleotide may be methylated to form 5-methylcytosine"
aggaccctggcaagaaattgtgtcctgtgtctcgtggcccagcctggcactcgccctcctcgccccgctcagctttagggggcaggaagcagtgcagctccttaacccacttcctgttagag

SEQ ID NO: 18015 - DNA, 122 bp, Homo sapiens
  misc_feature (61)..(62): /note="This region represents a CpG dinucleotide"
  misc_feature (61)..(61): /note="Nucleotide may be methylated to form 5-methylcytosine"
ccaaaaagaattgctgaatggccaaattggcccagaaatggtcctgtctggcaaatcctccgttcttagtatgaggttgccagggacctgagatgccgtcctccacttggtggcagtgtgtg

SEQ ID NO: 18016 - DNA, 122 bp, Homo sapiens
  misc_feature (61)..(62): /note="This region represents a CpG dinucleotide"
  misc_feature (61)..(61): /note="Nucleotide may be methylated to form 5-methylcytosine"
ggcacagcctgcagggatcttaggagctggtctttctggcagacccccagcagctccaagcgtggggctcagtgggtgtgaagagcagagtgagagtgaggctggctgcgggcagctcatta

SEQ ID NO: 18017 - DNA, 122 bp, Homo sapiens
  misc_feature (61)..(62): /note="This region represents a CpG dinucleotide"
  misc_feature (61)..(61): /note="Nucleotide may be methylated to form 5-methylcytosine"
ccaaggagcggcctgcccttggcttctgttcccagggcgagtgtgaaggctgagcttttccgttccctcttccatggagcttggctggttcctatgaactgcaagttaaggtttgttatttt

SEQ ID NO: 18018 - DNA, 122 bp, Homo sapiens
  misc_feature (61)..(62): /note="This region represents a CpG dinucleotide"
  misc_feature (61)..(61): /note="Nucleotide may be methylated to form 5-methylcytosine"
cgacacctatatagacagacacacacacacatacacacacacacacacacgtgaagttgtcgcctgcccacaactccaccgctttcctgtgccgcccaagggaaatgggtctctcttgagcc

SEQ ID NO: 18019 - DNA, 122 bp, Homo sapiens
  misc_feature (61)..(62): /note="This region represents a CpG dinucleotide"
  misc_feature (61)..(61): /note="Nucleotide may be methylated to form 5-methylcytosine"
ttgggcactctgtgctgcgtgctctacatgctaataagctatgtgtgaaagttgtgaatacgaattcttgatgtgaatatcagtcaggatgtgcaaatgctctgaaacactgtgcctcgggt

SEQ ID NO: 18020 - DNA, 122 bp, Homo sapiens
  misc_feature (61)..(62): /note="This region represents a CpG dinucleotide"
  misc_feature (61)..(61): /note="Nucleotide may be methylated to form 5-methylcytosine"
agctgggatccatgcagctggtggcttgtcggtggcaggccaaggcctgagtcatgtccccgtcacagccttcagtggagggctgacccacagaggaaattacacagcactctgtggcccat

SEQ ID NO: 18021 - DNA, 122 bp, Homo sapiens
  misc_feature (61)..(62): /note="This region represents a CpG dinucleotide"
  misc_feature (61)..(61): /note="Nucleotide may be methylated to form 5-methylcytosine"
ccacagtcaccctggctttctacctgagggtgcatagtgacacggagcccatacagagtacgtctgtgtcactgggtggagcaaacagttgaatttagggctgctgagattggatacagcag

SEQ ID NO: 18022 - DNA, 122 bp, Homo sapiens
  misc_feature (61)..(62): /note="This region represents a CpG dinucleotide"
  misc_feature (61)..(61): /note="Nucleotide may be methylated to form 5-methylcytosine"
tgcccaaagtgccgagcgtgtctgtctgaagagcgggggctgtcgggtctgctgtgcccgcgttctggctggcacattcctgcccggaagcggggcggggtacttgcaggcagcggctgcca

SEQ ID NO: 18023 - DNA, 122 bp, Homo sapiens
  misc_feature (61)..(62): /note="This region represents a CpG dinucleotide"
  misc_feature (61)..(61): /note="Nucleotide may be methylated to form 5-methylcytosine"
ttacagtggaaacaatgactatatcacaggagtcttgtaagactgaaacaaaatgatacacgtaacagtgctcagaatactagttgaatgagaatgtgatatggtttggctatgtccccacc

SEQ ID NO: 18024 - DNA, 122 bp, Homo sapiens
  misc_feature (61)..(62): /note="This region represents a CpG dinucleotide"
  misc_feature (61)..(61): /note="Nucleotide may be methylated to form 5-methylcytosine"
tacaaaaggccagtgaaaaagatcagtttcaagaaaagggtggaactattttgtcaaatgcggctaagtagtcacagagatgaggactgagaactgataaccacatttggtaatatattagt

SEQ ID NO: 18025 - DNA, 122 bp, Homo sapiens
  misc_feature (61)..(62): /note="This region represents a CpG dinucleotide"
  misc_feature (61)..(61): /note="Nucleotide may be methylated to form 5-methylcytosine"
tgtgaaacatgactcggggtgcctctcccgctgaaaacccacaagcgacttcctgctgcacgcagaatgagagccagcccctgatcggcatcatcaaggcccttccagatcagaccccagcc

SEQ ID NO: 18026 - DNA, 122 bp, Homo sapiens
  misc_feature (61)..(62): /note="This region represents a CpG dinucleotide"
  misc_feature (61)..(61): /note="Nucleotide may be methylated to form 5-methylcytosine"
aaacagtgggatcatctgtgaaacagtggaatcaccccaagaacaaactgtcagacagaccgtcctgtcgtggcatgacttgaacataaccgtcccacgtggggacgcattccgcaccggtt

SEQ ID NO: 18027 - DNA, 122 bp, Homo sapiens
  misc_feature (61)..(62): /note="This region represents a CpG dinucleotide"
  misc_feature (61)..(61): /note="Nucleotide may be methylated to form 5-methylcytosine"
ccgcttgtctggtctaatgatctcactacggaaattatcaccagtcagcagactgtcattcgtgtccgcgacttgggttttgttcttccaagtgtttggcagctacagaatttctggccagc

SEQ ID NO: 18028 - DNA, 122 bp, Homo sapiens
  misc_feature (61)..(62): /note="This region represents a CpG dinucleotide"
  misc_feature (61)..(61): /note="Nucleotide may be methylated to form 5-methylcytosine"
aaatagtccggtcccctcggcgctcgcggtcctcattctggaggaagctgactacacgtgcggcaagctcaaagaggaacttaattgtgaagaagaatgcaaccacagacactgtgattcca

SEQ ID NO: 18029 - DNA, 122 bp, Homo sapiens
  misc_feature (61)..(62): /note="This region represents a CpG dinucleotide"
  misc_feature (61)..(61): /note="Nucleotide may be methylated to form 5-methylcytosine"
ggtccggttgttaatctctctgctaaaaccacagcagctctcacacaaaacaagcttacacgacacaatcatgcggtattaaagttagggttgagtcatgccaatttccctttgattttttg

SEQ ID NO: 18030 - DNA, 122 bp, Homo sapiens
  misc_feature (61)..(62): /note="This region represents a CpG dinucleotide"
  misc_feature (61)..(61): /note="Nucleotide may be methylated to form 5-methylcytosine"
aatgaaatagtatgtgaagcattaacaccatgattattaccgtcattactgccactagaacgagatgacagtaatgcagactcagggcaggactaattttgtgctatattttaacttgcagt

SEQ ID NO: 18031 - DNA, 122 bp, Homo sapiens
  misc_feature (61)..(62): /note="This region represents a CpG dinucleotide"
  misc_feature (61)..(61): /note="Nucleotide may be methylated to form 5-methylcytosine"
gtgatcctactaatcctgtcttgcttttcaagacttctgtactcagacacaaaaacacaacgtaactctttaaaatccaagtactaaaatagcacccagagcctacatcttctttcaaaggc

SEQ ID NO: 18032 - DNA, 122 bp, Homo sapiens
  misc_feature (61)..(62): /note="This region represents a CpG dinucleotide"
  misc_feature (61)..(61): /note="Nucleotide may be methylated to form 5-methylcytosine"
aggagtgtagctataagcttgtcacaagtttttgcaaagataaactagccttgttgatttcgcagatctcaccaataaaataactttcaaacacaaggaatactatccatgtgaaatcatta

SEQ ID NO: 18033 - DNA, 122 bp, Homo sapiens
  misc_feature (61)..(62): /note="This region represents a CpG dinucleotide"
  misc_feature (61)..(61): /note="Nucleotide may be methylated to form 5-methylcytosine"
tagcaccgggaagctggcaggtgtgaggtgtgttcccggtgtccaacggacactgcaggacgcagggcaagggtgacgccgcggagcctgagcatggacgggaggcaggcggcaggacctga

SEQ ID NO: 18034 - DNA, 122 bp, Homo sapiens
  misc_feature (61)..(62): /note="This region represents a CpG dinucleotide"
  misc_feature (61)..(61): /note="Nucleotide may be methylated to form 5-methylcytosine"
aagacaacaattgagtattgggcttttaataccttgaagcagaagttaaaaagagaaaaacgagttttcctgtacttacttggctgactcactccaaggctagcagtaggcagggccctagt

SEQ ID NO: 18035 - DNA, 122 bp, Homo sapiens
  misc_feature (61)..(62): /note="This region represents a CpG dinucleotide"
  misc_feature (61)..(61): /note="Nucleotide may be methylated to form 5-methylcytosine"
tttctcaaccctcttcccctccagatcctaaactccttcctctaggaccaggctgctattcggtacccgtgtgtgtaggtaccagtatggccataccagctgttaagtcattaaaatacttt

SEQ ID NO: 18036 - DNA, 122 bp, Homo sapiens
  misc_feature (61)..(62): /note="This region represents a CpG dinucleotide"
  misc_feature (61)..(61): /note="Nucleotide may be methylated to form 5-methylcytosine"
gcaagaggtcatcatctcaaacaccaccaaaagcctagcagttaatataaataagtgcagcggctcaatgggaaatgtgtgcctgaatgagataactacttactgttaatcattactaagta

SEQ ID NO: 18037 - DNA, 122 bp, Homo sapiens
  misc_feature (61)..(62): /note="This region represents a CpG dinucleotide"
  misc_feature (61)..(61): /note="Nucleotide may be methylated to form 5-methylcytosine"
acattctcagatgtgttcaattgcaattgtgtgtcactatgacacacaatgaccaaataccgttccagcattacttgttgaaaggttacccttctcccagtgaactaccttgacatctttga

SEQ ID NO: 18038 - DNA, 122 bp, Homo sapiens
  misc_feature (61)..(62): /note="This region represents a CpG dinucleotide"
  misc_feature (61)..(61): /note="Nucleotide may be methylated to form 5-methylcytosine"
tggctgtgtcccccctcaaatctcatcttgaatggtagctcacataattcccatgtgtcacgggagggacctggtgagaggtaactgaatcatggggacgggtttttcctgtgctggttctc

SEQ ID NO: 18039 - DNA, 122 bp, Homo sapiens
  misc_feature (61)..(62): /note="This region represents a CpG dinucleotide"
  misc_feature (61)..(61): /note="Nucleotide may be methylated to form 5-methylcytosine"
ttagacagtgcttgtaaagctcctagtgtagtgcttgctttattataggcactgaacatacggtaactggtgtcattattattcattctgccaggtgaaagagcttatgctgtaggcaacag

SEQ ID NO: 18040 - DNA, 122 bp, Homo sapiens
  misc_feature (61)..(62): /note="This region represents a CpG dinucleotide"
  misc_feature (61)..(61): /note="Nucleotide may be methylated to form 5-methylcytosine"
tgatccacctgccttggcctcccaaagtacagggattacaggtgtgagccactgacctggcggatgaatttttaagactgttgtatgaatgcctgtggggtattgcccaagaataaggtgct

SEQ ID NO: 18041 - DNA, 122 bp, Homo sapiens
  misc_feature (61)..(62): /note="This region represents a CpG dinucleotide"
  misc_feature (61)..(61): /note="Nucleotide may be methylated to form 5-methylcytosine"
ttctagtggagtcaacatattacatatctaattcctccagccgcaagttgtgataacatgcgtgaaatgttgtctaccggagaagctcacttgagattcagtgcccaagttgttaaattggg

SEQ ID NO: 18042 - DNA, 122 bp, Homo sapiens
  misc_feature (61)..(62): /note="This region represents a CpG dinucleotide"
  misc_feature (61)..(61): /note="Nucleotide may be methylated to form 5-methylcytosine"
gacaaaagggaatgaccaattgagacacacaatgacagggtaaatcacacacagggaccacgtgcatgagtccatataagtgacgtcccggggaatggcaaaaccaatccatggggatagag

SEQ ID NO: 18043 - DNA, 122 bp, Homo sapiens
  misc_feature (61)..(62): /note="This region represents a CpG dinucleotide"
  misc_feature (61)..(61): /note="Nucleotide may be methylated to form 5-methylcytosine"
ggcgcctgtgacctcccgtcccctcccgcggctcccgcggcctccgacctcctgccggggcgcctcaagggcccctgccccacatcagagggtcttgcggtttcctggtttggttcaacatc

SEQ ID NO: 18044 - DNA, 122 bp, Homo sapiens
  misc_feature (61)..(62): /note="This region represents a CpG dinucleotide"
  misc_feature (61)..(61): /note="Nucleotide may be methylated to form 5-methylcytosine"
agctacaaggcctcttgttaattgtgggtttttatttttatttcctattaccctctcacacgcctgatgagattattttaccggaactgacacagctggaagcagcaggcatacgtggagcc

SEQ ID NO: 18045 - DNA, 122 bp, Homo sapiens
  misc_feature (61)..(62): /note="This region represents a CpG dinucleotide"
  misc_feature (61)..(61): /note="Nucleotide may be methylated to form 5-methylcytosine"
cccatctcccttgcgcgaaacgagcctcagcacgaaggcgacagaggggccggcagggggcgcccgagcccgtctctggagcacaaagacccccggcccctgcgcgacccggacgagctcgc

SEQ ID NO: 18046 - DNA, 122 bp, Homo sapiens
  misc_feature (61)..(62): /note="This region represents a CpG dinucleotide"
  misc_feature (61)..(61): /note="Nucleotide may be methylated to form 5-methylcytosine"
ataattatcattctattctctacctccatgagatcaacatttttacctcccatatatgagcgaaaatatgcaatgttcatcttactgtgcttggctaattttacataatgacttccagtttt

SEQ ID NO: 18047 - DNA, 122 bp, Homo sapiens
  misc_feature (61)..(62): /note="This region represents a CpG dinucleotide"
  misc_feature (61)..(61): /note="Nucleotide may be methylated to form 5-methylcytosine"
taccctgctgttctgtgtgcctcgggtcatggaagcaatgactcacacattctgcatggccgccaaggcctccttgataccagatggaccaaacctgtaccttccggtatatcccttttatg

SEQ ID NO: 18048 - DNA, 122 bp, Homo sapiens
  misc_feature (61)..(62): /note="This region represents a CpG dinucleotide"
  misc_feature (61)..(61): /note="Nucleotide may be methylated to form 5-methylcytosine"
atcaatatctgtgagatgggaaacacagaagaggaaggcagagcatcagagcaaaggtttcgttcagggcttgacatggtatgatcctgggaaacctgatgaagcagtaaggttaggaagag

SEQ ID NO: 18049 - DNA, 122 bp, Homo sapiens
  misc_feature (61)..(62): /note="This region represents a CpG dinucleotide"
  misc_feature (61)..(61): /note="Nucleotide may be methylated to form 5-methylcytosine"
gagcacagagcagagcagtgccgttgatatcctgccaatgcccagcagaataaaagcttccgaaatcagggctaaaaataaataataaaacaaaatgacaacataaacaggaagacctaaag

SEQ ID NO: 18050 - DNA, 122 bp, Homo sapiens
  misc_feature (61)..(62): /note="This region represents a CpG dinucleotide"
  misc_feature (61)..(61): /note="Nucleotide may be methylated to form 5-methylcytosine"
ggctggccttgggtgagaggggacacctggatggcaaactgatggaggctggccttgcagcgcccagaggcacccacctgtgggagttcatccgggacatcctcatccacccggagctcaac

SEQ ID NO: 18051 - DNA, 122 bp, Homo sapiens
  misc_feature (61)..(62): /note="This region represents a CpG dinucleotide"
  misc_feature (61)..(61): /note="Nucleotide may be methylated to form 5-methylcytosine"
ttttgtactacaacagcagagctgagtcacattgttgtgccagacagacaccatatggcccgcaaagccctcagatatttactatgtggccctctacagaaaaacatgccaacccctgctct

SEQ ID NO: 18052 - DNA, 122 bp, Homo sapiens
  misc_feature (61)..(62): /note="This region represents a CpG dinucleotide"
  misc_feature (61)..(61): /note="Nucleotide may be methylated to form 5-methylcytosine"
cactgccaaattgctttccacaagggcctggccaacgccgtctcctacgtgggatgtgagcgggtctgtgtcccacaccctcctcacccagggacaggaacgtgcttttacattgcagcctc

SEQ ID NO: 18053 - DNA, 122 bp, Homo sapiens
  misc_feature (61)..(62): /note="This region represents a CpG dinucleotide"
  misc_feature (61)..(61): /note="Nucleotide may be methylated to form 5-methylcytosine"
aggaaaggggccggggatgtgtctacacaggcctgactgacctggcaagaaagtgacatgcgcactgactggcccagaggaactctgataagaggagatgccagggctgaagctcctcccaa

SEQ ID NO: 18054 - DNA, 122 bp, Homo sapiens
  misc_feature (61)..(62): /note="This region represents a CpG dinucleotide"
  misc_feature (61)..(61): /note="Nucleotide may be methylated to form 5-methylcytosine"
aggtggaatcccacatgtactcatgaaccagctttattggctactatgttgcttctaccccgttttttcttttttcttaaactcattctgtgtaacgaagctgcctcactcagtagtgagaa

SEQ ID NO: 18055 - DNA, 122 bp, Homo sapiens
  misc_feature (61)..(62): /note="This region represents a CpG dinucleotide"
  misc_feature (61)..(61): /note="Nucleotide may be methylated to form 5-methylcytosine"
ctgttgtggtaatctcattcaacaaagctctgtcatgtgggaataaatcaataaaaagcacgaccagacttctagaaaaatggtgcaaaaggccaaaaggccagagagaaaaccctttagct

SEQ ID NO: 18056 - DNA, 122 bp, Homo sapiens
  misc_feature (61)..(62): /note="This region represents a CpG dinucleotide"
  misc_feature (61)..(61): /note="Nucleotide may be methylated to form 5-methylcytosine"
ttaattctactccagcttccctgaaaaataggacttgagcccaattccttgcaggcttcacggccagcagagcacagtggtgtatcaccctgctggaagctatagttgatgactttatggct

SEQ ID NO: 18057 - DNA, 122 bp, Homo sapiens
  misc_feature (61)..(62): /note="This region represents a CpG dinucleotide"
  misc_feature (61)..(61): /note="Nucleotide may be methylated to form 5-methylcytosine"
ttaaagttgcataggtattgaaaagaggaactgagaacagtcagtagaagagaaaatgaacggtgaatggggtagatgagcttaaccaccatctatcatggcaggaatccaatagaaaaacc

SEQ ID NO: 18058 - DNA, 122 bp, Homo sapiens
  misc_feature (61)..(62): /note="This region represents a CpG dinucleotide"
  misc_feature (61)..(61): /note="Nucleotide may be methylated to form 5-methylcytosine"
ttctccccactgctctagtgaccactaaccagcttcctgtctctgtgggtttgcctagtacggacatttcatcggaatgaaatcagctaacatgtgatatccttaatggttttgtagcagaa

SEQ ID NO: 18059 - DNA, 122 bp, Homo sapiens
  misc_feature (61)..(62): /note="This region represents a CpG dinucleotide"
  misc_feature (61)..(61): /note="Nucleotide may be methylated to form 5-methylcytosine"
aggaatcatgagctgatcctcataagattaagatcttctttactacactagcgtggttagcgtggaattttgctgattcatcaagtacgacattgaaaatatagcagtgaagaaagcagtta

SEQ ID NO: 18060 - DNA, 122 bp, Homo sapiens
  misc_feature (61)..(62): /note="This region represents a CpG dinucleotide"
  misc_feature (61)..(61): /note="Nucleotide may be methylated to form 5-methylcytosine"
tgaggccatgtttaagctcaggggtgacctggctgggaagagggtataaacccatgaacacgagtcagttgacagactaggattgccactttgtaaagaagagcccaagacctgatcagaat

SEQ ID NO: 18061 - DNA, 122 bp, Homo sapiens
  misc_feature (61)..(62): /note="This region represents a CpG dinucleotide"
  misc_feature (61)..(61): /note="Nucleotide may be methylated to form 5-methylcytosine"
ggccttcctcctgcaccgcctggacacagtttgtgcttctcatttggtggaaggcccagtcgttacttccttttacaaaactatttttagctgcaatgtatttatggctgcacagacaagag

SEQ ID NO: 18062 - DNA, 122 bp, Homo sapiens
  misc_feature (61)..(62): /note="This region represents a CpG dinucleotide"
  misc_feature (61)..(61): /note="Nucleotide may be methylated to form 5-methylcytosine"
tcccagaatctctcacaacttccctatgtggattaatttgtgatcacttgccagggccagcgagcaataaggcaccaattgcttctatcttaattaagttacttagggaagaaagagaaaga

SEQ ID NO: 18063 - DNA, 122 bp, Homo sapiens
  misc_feature (61)..(62): /note="This region represents a CpG dinucleotide"
  misc_feature (61)..(61): /note="Nucleotide may be methylated to form 5-methylcytosine"
agggctagtcagagagtagcagcacacctacaatcatctgtggtcatctcgaattgcaaccgttggagtatttttaagggaagtgggtattgtgggcaaagttagcaataagtgacagttag

SEQ ID NO: 18064 - DNA, 122 bp, Homo sapiens
  misc_feature (61)..(62): /note="This region represents a CpG dinucleotide"
  misc_feature (61)..(61): /note="Nucleotide may be methylated to form 5-methylcytosine"
aatgcaacataagctggattcacacaggcaatgcacaggtgagtcactattaattaacaccgttttaaaattaccaaccaatgctatataagtaaaaacaataaaggtaaaaatatatatga

SEQ ID NO: 18065 - DNA, 122 bp, Homo sapiens
  misc_feature (61)..(62): /note="This region represents a CpG dinucleotide"
  misc_feature (61)..(61): /note="Nucleotide may be methylated to form 5-methylcytosine"
aggaactgggttaaagatggcctctgctgaacacatatgtcaaaatcagctaagctaaaccgaatagggcccagttaacctcaacgatgttcaccacaacagagcaggctggaagattcccc

SEQ ID NO: 18066 - DNA, 122 bp, Homo sapiens
  misc_feature (61)..(62): /note="This region represents a CpG dinucleotide"
  misc_feature (61)..(61): /note="Nucleotide may be methylated to form 5-methylcytosine"
aaactagagcaactgccagaaactaattcaagaagaaagatcctctctgcttgtagctcccggctgattcactgggtctgatcccggaatgtcggggctcccctggagacacacagggctcc

SEQ ID NO: 18067 - DNA, 122 bp, Homo sapiens
  misc_feature (61)..(62): /note="This region represents a CpG dinucleotide"
  misc_feature (61)..(61): /note="Nucleotide may be methylated to form 5-methylcytosine"
gcattagcgctgagcagaaaagatacggacgcacagcagctcatggtagcagtccacgcacgtcgtcctgcttgatgacaccgctaagaattaatccatttgggaggagagcaaccaaatcc

SEQ ID NO: 18068 - DNA, 122 bp, Homo sapiens
  misc_feature (61)..(62): /note="This region represents a CpG dinucleotide"
  misc_feature (61)..(61): /note="Nucleotide may be methylated to form 5-methylcytosine"
accaagtatagtcctgtgatgactgtttgatctgccagaaatgtgctttctccatagcctcgtgcttgttccatccccaccttcaggtctctgtttaaacattcccctaatggcctttccta

SEQ ID NO: 18069 - DNA, 122 bp, Homo sapiens
  misc_feature (61)..(62): /note="This region represents a CpG dinucleotide"
  misc_feature (61)..(61): /note="Nucleotide may be methylated to form 5-methylcytosine"
gaaggtggagactgtatttgcatggttttccccgatagctccagcacctagcccagtacacgcccaaatgaaatgtgtgttgcattgacttgacattgaccagaggacttgcctagcttgct

SEQ ID NO: 18070 - DNA, 122 bp, Homo sapiens
  misc_feature (61)..(62): /note="This region represents a CpG dinucleotide"
  misc_feature (61)..(61): /note="Nucleotide may be methylated to form 5-methylcytosine"
tttgtcttctatattacaacagttccaggtaaagacaatccttgcacaaggcttccaactcgacccgcctactgacctggagaatgaaagtgtcctgcctcggggcccctcagatcaggtat

SEQ ID NO: 18071 - DNA, 122 bp, Homo sapiens
  misc_feature (61)..(62): /note="This region represents a CpG dinucleotide"
  misc_feature (61)..(61): /note="Nucleotide may be methylated to form 5-methylcytosine"
caggtgtattaaggacttacaatgtgaaagaaagggtgatgccttgcttatggttgtcagcgcagggtttctcagctgcagcctgattgccatttgaggccagataattctctgtatggggc

SEQ ID NO: 18072 - DNA, 122 bp, Homo sapiens
  misc_feature (61)..(62): /note="This region represents a CpG dinucleotide"
  misc_feature (61)..(61): /note="Nucleotide may be methylated to form 5-methylcytosine"
gaggtaacactgagtagcaggaaagatttgtgcctcaaatgcttctgtcctagacagtaacggtagaagttattagcacaatatgcaggtgccagcattataggtctggccagcttaggaaa

SEQ ID NO: 18073 - DNA, 122 bp, Homo sapiens
  misc_feature (61)..(62): /note="This region represents a CpG dinucleotide"
  misc_feature (61)..(61): /note="Nucleotide may be methylated to form 5-methylcytosine"
agccacgcttatatggtagatttaactttcagacagaattaatgtagataggaaaatccacggttagttaaacagtagcaatgggcaaattctcctgaggttcattcacagaaaggaaatgc

SEQ ID NO: 18074 - DNA, 122 bp, Homo sapiens
  misc_feature (61)..(62): /note="This region represents a CpG dinucleotide"
  misc_feature (61)..(61): /note="Nucleotide may be methylated to form 5-methylcytosine"
tgccctaggatgactcttacggttctggctctctaggtgcttctatgtataaactgcaggcgtcaatgctctagaaataggccatccatcagcttgtgccatctgtaaggctgtgtctcagt

SEQ ID NO: 18075 - DNA, 122 bp, Homo sapiens
  misc_feature (61)..(62): /note="This region represents a CpG dinucleotide"
  misc_feature (61)..(61): /note="Nucleotide may be methylated to form 5-methylcytosine"
tcacgtgccgccttccaggccacagtgaagacttttcatgttattctaggtgtgatggggcgccttggagtgtttcaacccggagagtgacatgatctgatttatgtttataaagtgcctgg

SEQ ID NO: 18076 - DNA, 122 bp, Homo sapiens
  misc_feature (61)..(62): /note="This region represents a CpG dinucleotide"
  misc_feature (61)..(61): /note="Nucleotide may be methylated to form 5-methylcytosine"
gggttgaggggtgggtgtctgttgctcactcacagtgaagcaatgactgcagggcatgttcgcaggaggcctctagcaagtttctcaatgggcccctgcagtacttccttctccaggcagct

SEQ ID NO: 18077 - DNA, 122 bp, Homo sapiens
  misc_feature (61)..(62): /note="This region represents a CpG dinucleotide"
  misc_feature (61)..(61): /note="Nucleotide may be methylated to form 5-methylcytosine"
ataccaatagcccaagagatgggcatgtccctgcatttcctggtcaaggtgacaacactgcgtcctcctggaagaggtctgccactcaccataccacaaaccaaatataataaaatcagaag

SEQ ID NO: 18078 - DNA, 122 bp, Homo sapiens
  misc_feature (61)..(62): /note="This region represents a CpG dinucleotide"
  misc_feature (61)..(61): /note="Nucleotide may be methylated to form 5-methylcytosine"
gacctcaggcaaggcgcttaatgttgctgcacctctattggaagaattcagtgaggaatgcgtgatagggccaaggtagagacttaacagatccaagctcagcatcccttcccatatttatt

SEQ ID NO: 18079 - DNA, 122 bp, Homo sapiens
  misc_feature (61)..(62): /note="This region represents a CpG dinucleotide"
  misc_feature (61)..(61): /note="Nucleotide may be methylated to form 5-methylcytosine"
agccttgaaaacaaaggttaaactatttttgggtcttcacatcctggttttgcagggagacgggaggtatggaggcattgcccatttcataaagctgtatgtttttgaactacgcacatggt

SEQ ID NO: 18080 - DNA, 122 bp, Homo sapiens
  misc_feature (61)..(62): /note="This region represents a CpG dinucleotide"
  misc_feature (61)..(61): /note="Nucleotide may be methylated to form 5-methylcytosine"
cttaacaacactcactgtttcttccagaggttatgagtcagacatgaactgggagaaaggcgaaggccagcccttcgaatactttgtttatggagctgcctgttccgaggttgaaatagact

SEQ ID NO: 18081 - DNA, 122 bp, Homo sapiens
  misc_feature (61)..(62): /note="This region represents a CpG dinucleotide"
  misc_feature (61)..(61): /note="Nucleotide may be methylated to form 5-methylcytosine"
tatgagtaagtaaaaacaaataagcacagctgccagttatcctgttcaacagatgtacagcgtgcaaagctgaccacagccaggtcctccttccagaaattaattccccataaaatgtcagc

SEQ ID NO: 18082 - DNA, 122 bp, Homo sapiens
  misc_feature (61)..(62): /note="This region represents a CpG dinucleotide"
  misc_feature (61)..(61): /note="Nucleotide may be methylated to form 5-methylcytosine"
gccagcccaggccttctctctctggtccttgcagtagcagagttttattctggccttccccgccccgataaagcaaggtgcctcccttccctctgtcaagtttttccgtcagactccctgct

SEQ ID NO: 18083 - DNA, 122 bp, Homo sapiens
  misc_feature (61)..(62): /note="This region represents a CpG dinucleotide"
  misc_feature (61)..(61): /note="Nucleotide may be methylated to form 5-methylcytosine"
ttctggcttgggatcttggtggccagcttcctcgggccacacctttgttatggttctgtgcgtagccagtcttcaaaggaaaaacaaagcagagactcaaggtgattttataaattttatta

SEQ ID NO: 18084 - DNA, 122 bp, Homo sapiens
  misc_feature (61)..(62): /note="This region represents a CpG dinucleotide"
  misc_feature (61)..(61): /note="Nucleotide may be methylated to form 5-methylcytosine"
tgctgccgtgtctgtgagaaggtgggcagagggttcaagaaaggaaggatttgggatcagcgtaccagggttggggagacagggcaggagcccagctttttctgcattttccactactttcc

SEQ ID NO: 18085 - DNA, 122 bp, Homo sapiens
  misc_feature (61)..(62): /note="This region represents a CpG dinucleotide"
  misc_feature (61)..(61): /note="Nucleotide may be methylated to form 5-methylcytosine"
ttaccatagttctgagtctggtgtctgtcatatctgagtaaatcacccagctatgaatctcgtgaactcattgtactgagtaatcttcttggtaatctctttttttgttttttttgagatgg

SEQ ID NO: 18086 - DNA, 122 bp, Homo sapiens
  misc_feature (61)..(62): /note="This region represents a CpG dinucleotide"
  misc_feature (61)..(61): /note="Nucleotide may be methylated to form 5-methylcytosine"
tccttgtgtttactcatttggttgcttatttccccaactagaccttgagcttgccttgggcgtgggctgtgtctgtttgcttgacacaggcagttatgtaaggacttaataaatgtttatgg

SEQ ID NO: 18087 - DNA, 122 bp, Homo sapiens
  misc_feature (61)..(62): /note="This region represents a CpG dinucleotide"
  misc_feature (61)..(61): /note="Nucleotide may be methylated to form 5-methylcytosine"
tttatgcatgtaaaggcagtgttgaaaaattgtgacaaccaggagactggggtttcagcacgatcaaaacagcacccatactagggtcaggctgttgggaattagatcatcactggggcctt

SEQ ID NO: 18088 - DNA, 122 bp, Homo sapiens
  misc_feature (61)..(62): /note="This region represents a CpG dinucleotide"
  misc_feature (61)..(61): /note="Nucleotide may be methylated to form 5-methylcytosine"
aacagctaccacatgtggctccaatctgatttcattcctgtgggtttctgggccacttcacgaagtttttgcagctggatctttgatcacagtgctttgtctattaggttagaaatttgtct

SEQ ID NO: 18089 - DNA, 122 bp, Homo sapiens
  misc_feature (61)..(62): /note="This region represents a CpG dinucleotide"
  misc_feature (61)..(61): /note="Nucleotide may be methylated to form 5-methylcytosine"
ggttccagccacaaaaatcccccagccgggagcgacagggcgtcaaggatggtggggaaacggcttatgcaacgccgggccaggtgcgcccagaggagatgggaaccgctgtgccctcttcc

SEQ ID NO: 18090 - DNA, 122 bp, Homo sapiens
  misc_feature (61)..(62): /note="This region represents a CpG dinucleotide"
  misc_feature (61)..(61): /note="Nucleotide may be methylated to form 5-methylcytosine"
ggcaccagtttggttgccctacactgtgtgtgtgtgttatacggtgtatttacataaatacgggcatgggccatttaacagggacacattctgagatatacatcatgtgaacatcatacagt

SEQ ID NO: 18091 - DNA, 122 bp, Homo sapiens
  misc_feature (61)..(62): /note="This region represents a CpG dinucleotide"
  misc_feature (61)..(61): /note="Nucleotide may be methylated to form 5-methylcytosine"
aaacaactggagccagtaagtctcccagtctttgccaagggcttcgtgtgagtgtcggggcgtgccttcaacactaagccaggcagtcagcaactctgccttggtgttgtctttctgttttt

SEQ ID NO: 18092 - DNA, 122 bp, Homo sapiens
  misc_feature (61)..(62): /note="This region represents a CpG dinucleotide"
  misc_feature (61)..(61): /note="Nucleotide may be methylated to form 5-methylcytosine"
aacctctgttttacataaggataaggcaggtttaggaccagattaacctaaccaaggaagcgtaggagtccttagatccataatttggttggtttaacattgggtcagtacctgctggcttc

SEQ ID NO: 18093 - DNA, 122 bp, Homo sapiens
  misc_feature (61)..(62): /note="This region represents a CpG dinucleotide"
  misc_feature (61)..(61): /note="Nucleotide may be methylated to form 5-methylcytosine"
gattcagctgccacgtggatgaaccttgagtaccttaagctaagtgaaataagtcagtcacgaaagaatactgtgtgattccacttgtttgaggtacctggagtagtcatagttctagagac

SEQ ID NO: 18094 - DNA, 122 bp, Homo sapiens
  misc_feature (61)..(62): /note="This region represents a CpG dinucleotide"
  misc_feature (61)..(61): /note="Nucleotide may be methylated to form 5-methylcytosine"
tttccccatctccagagaacaaaatgcatctctctctctgtgtctgtctgtctctctgtgcgtgcgtatgtgtgtctccctcaccctgtgtgtctctgctctgtgcgtggcccccgtggctg

SEQ ID NO: 18095 - DNA, 122 bp, Homo sapiens
  misc_feature (61)..(62): /note="This region represents a CpG dinucleotide"
  misc_feature (61)..(61): /note="Nucleotide may be methylated to form 5-methylcytosine"
tcacaccaaatttttctatcaaataaaactagtgacagcttgtggctttttattagagctcgccacgaactagggtaaggtgagtgtcttagcatattttaatgcagttgcttactaaaggt

SEQ ID NO: 18096 - DNA, 122 bp, Homo sapiens
  misc_feature (61)..(62): /note="This region represents a CpG dinucleotide"
  misc_feature (61)..(61): /note="Nucleotide may be methylated to form 5-methylcytosine"
acagtgcacaaccggctgggccagcccatccagcatagagatgtgaaaacctgtccaggtcgctggtgtatagccagaacaatggcacggggcagggcaaagatgctcacccaggtctcagg

SEQ ID NO: 18097 - DNA, 122 bp, Homo sapiens
  misc_feature (61)..(62): /note="This region represents a CpG dinucleotide"
  misc_feature (61)..(61): /note="Nucleotide may be methylated to form 5-methylcytosine"
agccagagcctagctgaacagttccacggtgccgggctccagtgtgttctggaaggttctcgtgggctgtgcctccagaagacggaggcggggaggagccccacaggcccagggcagtgtca

SEQ ID NO: 18098 - DNA, 122 bp, Homo sapiens
  misc_feature (61)..(62): /note="This region represents a CpG dinucleotide"
  misc_feature (61)..(61): /note="Nucleotide may be methylated to form 5-methylcytosine"
atgtgttagtctttgcatttcattgagggctcctagccatgtgagctggaaaacattcttcgtgtgtgcgtgtgtgtgtgtgtgtgtgtgtgtgtgtgtgtgtgtgtgtgtgtaaaaagata

SEQ ID NO: 18099 - DNA, 122 bp, Homo sapiens
  misc_feature (61)..(62): /note="This region represents a CpG dinucleotide"
  misc_feature (61)..(61): /note="Nucleotide may be methylated to form 5-methylcytosine"
atagacatatccaaccacatcctcttgtagagattaaaattgtgcccaaggtactttctccgcagatgtattatgcttgaaagcaatacaaatgagtcatgatattcctgattgtgaaacag

SEQ ID NO: 18100 - DNA, 122 bp, Homo sapiens
  misc_feature (61)..(62): /note="This region represents a CpG dinucleotide"
  misc_feature (61)..(61): /note="Nucleotide may be methylated to form 5-methylcytosine"
taagttgtattctgtgcataaattatttccatgtcttctctcccttttaaaggtgtgccacgtcatcaccgaggtgaaatctggaaatttctagctgagcaattccaccttaaacaccagtt

SEQ ID NO: 18101 - DNA, 122 bp, Homo sapiens
  misc_feature (61)..(62): /note="This region represents a CpG dinucleotide"
  misc_feature (61)..(61): /note="Nucleotide may be methylated to form 5-methylcytosine"
atgatttattaagaatagccacttgtgaccacatagggcacaacctgaaaacagggcagccgcctaagagaaggcccttaaatagttatgagtgaatgcccaatgtgaggtgaagaaaggga

SEQ ID NO: 18102 - DNA, 122 bp, Homo sapiens
  misc_feature (61)..(62): /note="This region represents a CpG dinucleotide"
  misc_feature (61)..(61): /note="Nucleotide may be methylated to form 5-methylcytosine"
tctttttcccaataactgctgaacagccaacacacctgccaaaataatttgaaagaagcccggcattagagcaaggtctgagcaaagtgcaaactaacaatggggccctaatatgcaagact

SEQ ID NO: 18103 - DNA, 122 bp, Homo sapiens
  misc_feature (61)..(62): /note="This region represents a CpG dinucleotide"
  misc_feature (61)..(61): /note="Nucleotide may be methylated to form 5-methylcytosine"
gaagcactctccctgtgggttggtggcatgagggagagtccaggcaggggcataagcagacgtgcaggacagtaaacaaaacccatgagataagactcctgcttagtggttatgttggggat

SEQ ID NO: 18104 - DNA, 122 bp, Homo sapiens
  misc_feature (61)..(62): /note="This region represents a CpG dinucleotide"
  misc_feature (61)..(61): /note="Nucleotide may be methylated to form 5-methylcytosine"
gggcacctgcacagcagacctgcaggtggggcagggaagggaaaggaagctggggtgcttcgtgattcttgtgtgccataccatgtctcccagtggcaggaaggctcctggggaactgggga

SEQ ID NO: 18105 - DNA, 122 bp, Homo sapiens
  misc_feature (61)..(62): /note="This region represents a CpG dinucleotide"
  misc_feature (61)..(61): /note="Nucleotide may be methylated to form 5-methylcytosine"
caggttctgtttaccacattgccttgacttcatgagttggggcacattctatttgggttgcgcaagccaagatcatcattgcataaagcaggaacccacaaattgctatttcttaggtgacc

SEQ ID NO: 18106 - DNA, 122 bp, Homo sapiens
  misc_feature (61)..(62): /note="This region represents a CpG dinucleotide"
  misc_feature (61)..(61): /note="Nucleotide may be methylated to form 5-methylcytosine"
cagagcagcaggcacaacgctgcatccctgagtttcctcttcaagtcacgtgaacacaaccgttgctcttatttatgaaccaggaacacaggtgtcagggagggtcaatgcacggtcaattg

SEQ ID NO: 18107 - DNA, 122 bp, Homo sapiens
  misc_feature (61)..(62): /note="This region represents a CpG dinucleotide"
  misc_feature (61)..(61): /note="Nucleotide may be methylated to form 5-methylcytosine"
tttcgtccaagaaaagctatgtgagtacgccaacgccggcctgaaatcttcctaagaatgcgtgcttatagcctatttgtttaaacagggggagaaagttaacattcaaacaccagagattc

SEQ ID NO: 18108 - DNA, 122 bp, Homo sapiens
  misc_feature (61)..(62): /note="This region represents a CpG dinucleotide"
  misc_feature (61)..(61): /note="Nucleotide may be methylated to form 5-methylcytosine"
caatataccttaagtgaactctgagaacccaatttggaaataaacctgtatgctgacagtcgtgttctcagcatctctcataaataccaatattctgcaaagtcatccactttcaaaactcc

SEQ ID NO: 18109 - DNA, 122 bp, Homo sapiens
  misc_feature (61)..(62): /note="This region represents a CpG dinucleotide"
  misc_feature (61)..(61): /note="Nucleotide may be methylated to form 5-methylcytosine"
cagaacatgaaaaactttctctcgaaaatataagtacaacttataacaaagacacaaaaccgcttagtatctactcaagacggtttgggactagtttgctttagactaagttctgatgacat

SEQ ID NO: 18110 - DNA, 122 bp, Homo sapiens
  misc_feature (61)..(62): /note="This region represents a CpG dinucleotide"
  misc_feature (61)..(61): /note="Nucleotide may be methylated to form 5-methylcytosine"
caggaacaatatacagatgctcccactgatcacagagagaatgtagttcttagatggagacgtcattacttgcatggcaagatcagagaagccatctgctggggccacctagaatgacacaa

SEQ ID NO: 18111 - DNA, 122 bp, Homo sapiens
  misc_feature (61)..(62): /note="This region represents a CpG dinucleotide"
  misc_feature (61)..(61): /note="Nucleotide may be methylated to form 5-methylcytosine"
ttcgccaacgcccaccccgggcctctgtgtcccctcctgcacaacgtggtgggtggatgacgggccccacctggggctgtggatgagaaacagcccataaaactttccgtaaagctctgcac

SEQ ID NO: 18112 - DNA, 122 bp, Homo sapiens
  misc_feature (61)..(62): /note="This region represents a CpG dinucleotide"
  misc_feature (61)..(61): /note="Nucleotide may be methylated to form 5-methylcytosine"
agagattagcacgttggaaccaccaacatgtcaccttgtggtgtgaggtcatctcgacttcgtaagccctcagcatacccaggcttctcccaaaatctgtgagttgcagcagccacagagag

SEQ ID NO: 18113 - DNA, 122 bp, Homo sapiens
  misc_feature (61)..(62): /note="This region represents a CpG dinucleotide"
  misc_feature (61)..(61): /note="Nucleotide may be methylated to form 5-methylcytosine"
tcataggtggcattgaaggtcaacccaggcagcctgccatcagcatgaggacctttagggcgggctctaaaataggggggtttgggaagggcatctggaggaatgcagaggactgagaagag

SEQ ID NO: 18114 - DNA, 122 bp, Homo sapiens
  misc_feature (61)..(62): /note="This region represents a CpG dinucleotide"
  misc_feature (61)..(61): /note="Nucleotide may be methylated to form 5-methylcytosine"
cttatctgcaaggccccttagggcagttctgcctcttgggaacaccttaggctgagtgatcgccttcccgtggctgagagctgagaagttcttccagactgcacaggtgtccggtctgtctg

SEQ ID NO: 18115 - DNA, 122 bp, Homo sapiens
  misc_feature (61)..(62): /note="This region represents a CpG dinucleotide"
  misc_feature (61)..(61): /note="Nucleotide may be methylated to form 5-methylcytosine"
agggcattgccccagttggcagggctgcttctcccagccctctgccctctgttttagagacgcacacagctttgagcatgacagcctgaatgccagtgtgcagggaataacgtgtgtcccta

SEQ ID NO: 18116 - DNA, 122 bp, Homo sapiens
  misc_feature (61)..(62): /note="This region represents a CpG dinucleotide"
  misc_feature (61)..(61): /note="Nucleotide may be methylated to form 5-methylcytosine"
ggtagatatcaggccctggtctgcggcttggaagtttcctgtgaataagaaaaacatcatcgcttcttgagtcacaaggatgataggatgagaaaaagaaaggacaaaggcaccagaggagg

SEQ ID NO: 18117 - DNA, 122 bp, Homo sapiens
  misc_feature (61)..(62): /note="This region represents a CpG dinucleotide"
  misc_feature (61)..(61): /note="Nucleotide may be methylated to form 5-methylcytosine"
gtcagttttagaggtgcagggctagtcctatatgcaaaacagtaatgtctgtagctattgcgggctgacttgcagaaatgagcggcttctctagaacattcatttgcataaaggaaactatc

SEQ ID NO: 18118 - DNA, 122 bp, Homo sapiens
  misc_feature (61)..(62): /note="This region represents a CpG dinucleotide"
  misc_feature (61)..(61): /note="Nucleotide may be methylated to form 5-methylcytosine"
tcttattgtgacaaatggcatcgctagccaagttcttgtcaaagaagattatctttagagcgtggtggggagtaagcaagacctgatattttctggttttgtgcttcatgctaaccagatgg

SEQ ID NO: 18119 - DNA, 122 bp, Homo sapiens
  misc_feature (61)..(62): /note="This region represents a CpG dinucleotide"
  misc_feature (61)..(61): /note="Nucleotide may be methylated to form 5-methylcytosine"
ccagagcaactccatcttgaaaaggggctgggtaaaataaggctgagacctactgggctgcgttcccaggagattaggcattctaagtcacaggatcagataaaaggttggcacaaagtaca

SEQ ID NO: 18120 - DNA, 122 bp, Homo sapiens
  misc_feature (61)..(62): /note="This region represents a CpG dinucleotide"
  misc_feature (61)..(61): /note="Nucleotide may be methylated to form 5-methylcytosine"
acttgggaagcttaacaaataacgtgggtttgtggtagctccttgacaggtgtgcttatccgtgtcgcctgtcttggcttccgatgcaaagccagcttgggaacccctggcctcatctcctt

SEQ ID NO: 18121 - DNA, 122 bp, Homo sapiens
  misc_feature (61)..(62): /note="This region represents a CpG dinucleotide"
  misc_feature (61)..(61): /note="Nucleotide may be methylated to form 5-methylcytosine"
gagagttagcgagggtgcaaacgttgtgagaattctgctcggggccttccacacacggatcggagaacaccaggttagtccaagttctaacacccactgttggtgaatctgctacccactag

SEQ ID NO: 18122 - DNA, 122 bp, Homo sapiens
  misc_feature (61)..(62): /note="This region represents a CpG dinucleotide"
  misc_feature (61)..(61): /note="Nucleotide may be methylated to form 5-methylcytosine"
gactgacttccctgaggagagactgccttctaatggcgtgaccatctgctccacttccttcgtgtttggtcagtgaatcacggcaagtcacaggccacctgagcattctactcacttctttt

SEQ ID NO: 18123 - DNA, 122 bp, Homo sapiens
  misc_feature (61)..(62): /note="This region represents a CpG dinucleotide"
  misc_feature (61)..(61): /note="Nucleotide may be methylated to form 5-methylcytosine"
ttgtgcctgacctctccttccaggtggacttacacactgggctgtcggagttctcggtgacgcagcgccggctggcccatggctggaatgagtttgttgctgacaacagcgaacctgtgtgg

SEQ ID NO: 18124 - DNA, 122 bp, Homo sapiens
  misc_feature (61)..(62): /note="This region represents a CpG dinucleotide"
  misc_feature (61)..(61): /note="Nucleotide may be methylated to form 5-methylcytosine"
cgggaggccaaagcaggcagatcacttgggctgagttcaagaccagcaccggcaacatggcgaaacacaatacaaaaaatgcaataatcagccgggcgtggtggggcacacctgtagttcca

SEQ ID NO: 18125 - DNA, 122 bp, Homo sapiens
  misc_feature (61)..(62): /note="This region represents a CpG dinucleotide"
  misc_feature (61)..(61): /note="Nucleotide may be methylated to form 5-methylcytosine"
tgcaacgagtaagacatgagtttgagaagaagcagtgatcaccttcttcttcactcttcacgctgatgaatttctacatcactgtgcatgtcctgtgctttgcagtcattccctaggagctc

SEQ ID NO: 18126 - DNA, 122 bp, Homo sapiens
  misc_feature (61)..(62): /note="This region represents a CpG dinucleotide"
  misc_feature (61)..(61): /note="Nucleotide may be methylated to form 5-methylcytosine"
aatcacgtgtcccagaggaactgaatttgactcagaagctacctgcagtctgtgactatccgcctgtgaagttcagtctatcagcaagaaggtagtagtaaaaacctgtttgagagtctagt

SEQ ID NO: 18127 - DNA, 122 bp, Homo sapiens
  misc_feature (61)..(62): /note="This region represents a CpG dinucleotide"
  misc_feature (61)..(61): /note="Nucleotide may be methylated to form 5-methylcytosine"
ccaactcacaaaaccatgccactgtgggagcagaagttgggagtccagagacctgtctttcgacttccctttgtaggggtgactccagcagcacctgagtcacctctacaaaccctggggct

SEQ ID NO: 18128 - DNA, 122 bp, Homo sapiens
  misc_feature (61)..(62): /note="This region represents a CpG dinucleotide"
  misc_feature (61)..(61): /note="Nucleotide may be methylated to form 5-methylcytosine"
tgaagaagccacaggccggcgtcttcctccctgggcctccagcagtggggagccagggagcgcacctgctgggcctgggccctctcccctgggctgggcggcctctgctggccctggggagg

SEQ ID NO: 18129 - DNA, 122 bp, Homo sapiens
  misc_feature (61)..(62): /note="This region represents a CpG dinucleotide"
  misc_feature (61)..(61): /note="Nucleotide may be methylated to form 5-methylcytosine"
atgtgctttcatgtatagaccaacagcaaagcctttactgccaagacttcctgtgtgcggcgccgctaccgtgagttcgtgtggctgagaaagcagctacagagaaatgctggtttggtgtg

SEQ ID NO: 18130 - DNA, 122 bp, Homo sapiens
  misc_feature (61)..(62): /note="This region represents a CpG dinucleotide"
  misc_feature (61)..(61): /note="Nucleotide may be methylated to form 5-methylcytosine"
cgagactccttctcaaaaacaaaaaaaaaaaaaaaaagaaaagaaaagaaaataggggaacgaaattgagttgaaactggaacaattccctcaaggaaaggggaaccaaaaccaggatgaat

SEQ ID NO: 18131 - DNA, 122 bp, Homo sapiens
  misc_feature (61)..(62): /note="This region represents a CpG dinucleotide"
  misc_feature (61)..(61): /note="Nucleotide may be methylated to form 5-methylcytosine"
gaaagaacaggaggttaaaaatagacaaccccattgagtttatcgtgagagagaaaggagcgaacgagagagaattgccacgcccctagtatggtgacactaagtgcctgttatttttgctg

SEQ ID NO: 18132 - DNA, 122 bp, Homo sapiens
  misc_feature (61)..(62): /note="This region represents a CpG dinucleotide"
  misc_feature (61)..(61): /note="Nucleotide may be methylated to form 5-methylcytosine"
atattaatcagaaaacatcctatggcaagttccccaagtttttatttgattcattacttccgcccagccctggacttatgtgtctaatactcagtcatagccttgccttcttataaggcaca

SEQ ID NO: 18133 - DNA, 122 bp, Homo sapiens
  misc_feature (61)..(62): /note="This region represents a CpG dinucleotide"
  misc_feature (61)..(61): /note="Nucleotide may be methylated to form 5-methylcytosine"
attttcaagaatgtggtaaagatttggatctctaatccaaacatgatcctttctactacacgtgccagagcacccatggaaaataaaactgggatcacaaaagggaaagtgcaaaagcctgg

SEQ ID NO: 18134 - DNA, 122 bp, Homo sapiens
  misc_feature (61)..(62): /note="This region represents a CpG dinucleotide"
  misc_feature (61)..(61): /note="Nucleotide may be methylated to form 5-methylcytosine"
gaggctcccccaccctcagctgcttccctgcaagtgccccgtgtctgcatcccatgcttgcgcagtggctaattctggtgtctcatcagacagtaattatgggggaatcagcagtgccgtca

SEQ ID NO: 18135 - DNA, 122 bp, Homo sapiens
  misc_feature (61)..(62): /note="This region represents a CpG dinucleotide"
  misc_feature (61)..(61): /note="Nucleotide may be methylated to form 5-methylcytosine"
caaatacttggcactctgtagcagtgtctctcacagtaatgctttgtttcttaacatgaccgtgaggactgcttggtcacaggcaaatactgtcctttatcagccaggacattcttaacaat

SEQ ID NO: 18136 - DNA, 122 bp, Homo sapiens
  misc_feature (61)..(62): /note="This region represents a CpG dinucleotide"
  misc_feature (61)..(61): /note="Nucleotide may be methylated to form 5-methylcytosine"
tggcgccggagctcattggcatgctgtaagcgccctgtggcctttttctcctcctccagccgctccttctcaatctgttctctctgagccctgggggagggaaacaggaatggaatgaactc

SEQ ID NO: 18137 - DNA, 122 bp, Homo sapiens
  misc_feature (61)..(62): /note="This region represents a CpG dinucleotide"
  misc_feature (61)..(61): /note="Nucleotide may be methylated to form 5-methylcytosine"
catggatccaaaagctctctctgatacatatatggtgatttccatttaattaactgtttccggggagcacctagagccattaccaaaggtgctaactgggcagccaatgggaaaactcttaa

SEQ ID NO: 18138 - DNA, 122 bp, Homo sapiens
  misc_feature (61)..(62): /note="This region represents a CpG dinucleotide"
  misc_feature (61)..(61): /note="Nucleotide may be methylated to form 5-methylcytosine"
tacttgttgaagtggaactccttctccagttccgtgagctgcttggtagtgaagttggtgcgcaccgcgttgggttgacccaggtagccgtactctccaactttccctggggcaaagtggga

SEQ ID NO: 18139 - DNA, 122 bp, Homo sapiens
  misc_feature (61)..(62): /note="This region represents a CpG dinucleotide"
  misc_feature (61)..(61): /note="Nucleotide may be methylated to form 5-methylcytosine"
acttcaagcttttgtactctagactaagttttcctcccctcctttttaaaattctgttgacgtaagtttccatttgctgttttgaaatttgttacattggtttccttgagcttcctgtcaaa

SEQ ID NO: 18140 - DNA, 122 bp, Homo sapiens
  misc_feature (61)..(62): /note="This region represents a CpG dinucleotide"
  misc_feature (61)..(61): /note="Nucleotide may be methylated to form 5-methylcytosine"
ttaggatgtgagagccgcttgcctttaaatatggaaccagctgctacgtgctcttgaccacggcaaagctggcaggacctcagatttccttatgcgcaaaatgtccccattttttgcagagt

SEQ ID NO: 18141 - DNA, 122 bp, Homo sapiens
  misc_feature (61)..(62): /note="This region represents a CpG dinucleotide"
  misc_feature (61)..(61): /note="Nucleotide may be methylated to form 5-methylcytosine"
gttatagactttatcttcccaaaacattcaaatcacatattagccaaatcacttagataccgtcctaagtgctggaactctttaagtcttgttagcagaaaaggctaaagtttaggtaaata

SEQ ID NO: 18142 - DNA, 122 bp, Homo sapiens
  misc_feature (61)..(62): /note="This region represents a CpG dinucleotide"
  misc_feature (61)..(61): /note="Nucleotide may be methylated to form 5-methylcytosine"
ggtctgcagcttcactcctgaagtcagcgagaccacgaacccaccagaaggaggaaactccgggcacatgtgaacagctgaaggattatctccagacacaccatctttaataaccgtaacac

SEQ ID NO: 18143 - DNA, 122 bp, Homo sapiens
  misc_feature (61)..(62): /note="This region represents a CpG dinucleotide"
  misc_feature (61)..(61): /note="Nucleotide may be methylated to form 5-methylcytosine"
gagtagtctccttcatagatgggctcaccgttctttccttcggtcctaacaggtagggcacgtctaaagtgagctgtggttgtgtaatgtttgtcttttcagcctctaattaggtgcgttca

SEQ ID NO: 18144 - DNA, 122 bp, Homo sapiens
  misc_feature (61)..(62): /note="This region represents a CpG dinucleotide"
  misc_feature (61)..(61): /note="Nucleotide may be methylated to form 5-methylcytosine"
tttgagaatttatattcctatgtcatgattgaattcataggctttgcagccagattgcctcgtttgaattttggcttcactgcttctcagctatataaccaagttacttaacctctctgttc

SEQ ID NO: 18145 - DNA, 122 bp, Homo sapiens
  misc_feature (61)..(62): /note="This region represents a CpG dinucleotide"
  misc_feature (61)..(61): /note="Nucleotide may be methylated to form 5-methylcytosine"
tatatgtattgaataatcatccctgacctctaggtatttaaaatctattcaggagatggccggctgcggtggctcacacctgtaatcctagcacttcgggaggctgaggcgggtggattgcc

SEQ ID NO: 18146 - DNA, 122 bp, Homo sapiens
  misc_feature (61)..(62): /note="This region represents a CpG dinucleotide"
  misc_feature (61)..(61): /note="Nucleotide may be methylated to form 5-methylcytosine"
tttctccacatagtaaatcagccctaagacacagaagaaacccagaagatttggcagtgccgacaggcatagtgtggcagttctgctctgctggtctctgagtggccatactaagtctgaag

SEQ ID NO: 18147 - DNA, 122 bp, Homo sapiens
  misc_feature (61)..(62): /note="This region represents a CpG dinucleotide"
  misc_feature (61)..(61): /note="Nucleotide may be methylated to form 5-methylcytosine"
ttgtaatttgcactttcatattgctccagtgaattttttctgaaagtctctttctgcacacgtgtcttcagatttcagtgtaccttctcccttttactaataaattaggcaaacaaagcttt

SEQ ID NO: 18148 - DNA, 122 bp, Homo sapiens
  misc_feature (61)..(62): /note="This region represents a CpG dinucleotide"
  misc_feature (61)..(61): /note="Nucleotide may be methylated to form 5-methylcytosine"
gatttttgcttcagaaaaatgtttcttttctgaaactccagctgtctctcattcataaaacggtgttttaataaggtggttgtttagtatgaaacaatgatagcgctaataatgaatcacta

SEQ ID NO: 18149 - DNA, 122 bp, Homo sapiens
  misc_feature (61)..(62): /note="This region represents a CpG dinucleotide"
  misc_feature (61)..(61): /note="Nucleotide may be methylated to form 5-methylcytosine"
aattgtgggttgaccttgccagggaatttttaagcagaactgactgcagccagtggtcagcgagggccacttcttcctagactttgcataactccaaacagccacaagccaaggacagtcat

SEQ ID NO: 18150 - DNA, 122 bp, Homo sapiens
  misc_feature (61)..(62): /note="This region represents a CpG dinucleotide"
  misc_feature (61)..(61): /note="Nucleotide may be methylated to form 5-methylcytosine"
aagctgcagaaggaggaaaaatcagagattggtgactgaccaaaggaagcacctgctttccggaaattaaaatcatgtgttaggcagctctgacttaattgccaaatggggtgaagcccagc

SEQ ID NO: 18151 - DNA, 122 bp, Homo sapiens
  misc_feature (61)..(62): /note="This region represents a CpG dinucleotide"
  misc_feature (61)..(61): /note="Nucleotide may be methylated to form 5-methylcytosine"
cccctttgtgggcctcggctttctcatccatcaaacaagaataggatgatgagaacaacgcgtcctccaggccttcaaagagttattgatggggttaaaggccacagtgttgactaagatgc

SEQ ID NO: 18152 - DNA, 122 bp, Homo sapiens
  misc_feature (61)..(62): /note="This region represents a CpG dinucleotide"
  misc_feature (61)..(61): /note="Nucleotide may be methylated to form 5-methylcytosine"
tgcttctgagtaggttaccatgaggcatgtgggtgtgcaggagggaagagctcccatctccggggatcttccatgacattctccatgacagcaggccaacaggaagtggcagaaccttcatg

SEQ ID NO: 18153 - DNA, 122 bp, Homo sapiens
  misc_feature (61)..(62): /note="This region represents a CpG dinucleotide"
  misc_feature (61)..(61): /note="Nucleotide may be methylated to form 5-methylcytosine"
ccaggccctggggaggtcaagggaacatggctgaggagaaggggagtggaacttcgctcacgccaggtggagacactggctgccctatgcccagtccatgctgcttcctgcagccaggggca

SEQ ID NO: 18154 - DNA, 122 bp, Homo sapiens
  misc_feature (61)..(62): /note="This region represents a CpG dinucleotide"
  misc_feature (61)..(61): /note="Nucleotide may be methylated to form 5-methylcytosine"
atcatactgaatactgtaggcaattgtatgcattccatcattgactgaatcatccttacacggcagtgcatgactgtgtttgagtgcttaaccacctgccagatgcctttctaagcctttaa

SEQ ID NO: 18155 - DNA, 122 bp, Homo sapiens
  misc_feature (61)..(62): /note="This region represents a CpG dinucleotide"
  misc_feature (61)..(61): /note="Nucleotide may be methylated to form 5-methylcytosine"
ctcatgtagtcctcacagttcccctaacgaggaaggtaccattcttattcccattttacacggaagaaagccaagcccccatggttcaataatttgccagaattcacagagctggccatgga

SEQ ID NO: 18156 - DNA, 122 bp, Homo sapiens
  misc_feature (61)..(62): /note="This region represents a CpG dinucleotide"
  misc_feature (61)..(61): /note="Nucleotide may be methylated to form 5-methylcytosine"
aaagattaagatgacattttgaaaagggcacctcattaagcagcctcgtccccactgcagcgcgcactcccgcacagtagccagctgcctgtttatcttatggtgatgaggtgtcacctccc

SEQ ID NO: 18157 - DNA, 122 bp, Homo sapiens
  misc_feature (61)..(62): /note="This region represents a CpG dinucleotide"
  misc_feature (61)..(61): /note="Nucleotide may be methylated to form 5-methylcytosine"
actgtcctctggacctagagccccacgagtggtgccacgagagcagcacctggggccccacgacctggaagtgtaattagtttcagactcagatagagaaatggaaagtcctgatattgatt

SEQ ID NO: 18158 - DNA, 122 bp, Homo sapiens
  misc_feature (61)..(62): /note="This region represents a CpG dinucleotide"
  misc_feature (61)..(61): /note="Nucleotide may be methylated to form 5-methylcytosine"
ttgaagagcaaaagagagtctgtgaggcgtgggagatgtgactcacttatttatgaaaggcgtggcttacacttaaggcatactgaactctaagggaccacaaaagaggagcctatgcatct

SEQ ID NO: 18159 - DNA, 122 bp, Homo sapiens
  misc_feature (61)..(62): /note="This region represents a CpG dinucleotide"
  misc_feature (61)..(61): /note="Nucleotide may be methylated to form 5-methylcytosine"
gacctcaagtgattcacccgcctcagcctcccacagtgtggtgattacagatgtgagccacggcacctggcccacttgtaatacttttaatgcttttgctttatgttggcttttccatgatc

SEQ ID NO: 18160 - DNA, 122 bp, Homo sapiens
  misc_feature (61)..(62): /note="This region represents a CpG dinucleotide"
  misc_feature (61)..(61): /note="Nucleotide may be methylated to form 5-methylcytosine"
tcataagattactgtgagaattaaatcatgcatgctagctgcttagcacagtgcctggcacgccaatggtgcttcacacacgcttgtgcatgttgcagccagcctccaagcccccagcaatc

SEQ ID NO: 18161 - DNA, 122 bp, Homo sapiens
  misc_feature (61)..(62): /note="This region represents a CpG dinucleotide"
  misc_feature (61)..(61): /note="Nucleotide may be methylated to form 5-methylcytosine"
agccacctctcagggacagtggctgccccagcctcgccccgtcctgcccctgctccgtgacgctccctggaactcagtcattctctggggaaccaacagccctcagaactgagttgcagctg

SEQ ID NO: 18162 - DNA, 122 bp, Homo sapiens
  misc_feature (61)..(62): /note="This region represents a CpG dinucleotide"
  misc_feature (61)..(61): /note="Nucleotide may be methylated to form 5-methylcytosine"
tcaagaaagttgttttgagatccctaagaccaaaagacttagtgaaagttgttttgagatcgagtgtgctgcttgcgaaaatagctcctcaaggtgtcactcttgagtcagttcttctcaca

SEQ ID NO: 18163 - DNA, 122 bp, Homo sapiens
  misc_feature (61)..(62): /note="This region represents a CpG dinucleotide"
  misc_feature (61)..(61): /note="Nucleotide may be methylated to form 5-methylcytosine"
gcttacctgcatctggtgtcaagaatcagaatgggagagacagaacctggagaaaggctgcgtcttcagagtggggctccactcctccagctccagggctggacctgaaggttgtctttcca

SEQ ID NO: 18164 - DNA, 122 bp, Homo sapiens
  misc_feature (61)..(62): /note="This region represents a CpG dinucleotide"
  misc_feature (61)..(61): /note="Nucleotide may be methylated to form 5-methylcytosine"
ggatgacctaggtgtggaaaacataaattctaagatcttgatgtgaaatcatgcttgatacgtttgtgacacagtaagaatgacagtgtgggagaatacgactattgataaagataataagg

SEQ ID NO: 18165 - DNA, 122 bp, Homo sapiens
  misc_feature (61)..(62): /note="This region represents a CpG dinucleotide"
  misc_feature (61)..(61): /note="Nucleotide may be methylated to form 5-methylcytosine"
gaaaggagttagccagcttgctttaggcagacagtaagggaagcgtccctgaagaacctacgacgtgccccaaaagtgcttacaccagatgttttgtgcacataagggaatttgcacagggg

SEQ ID NO: 18166 - DNA, 122 bp, Homo sapiens
  misc_feature (61)..(62): /note="This region represents a CpG dinucleotide"
  misc_feature (61)..(61): /note="Nucleotide may be methylated to form 5-methylcytosine"
ctcctctgtgctctcaccccaggcttgcctggcggggacagcagacaccaagtgaggtggcgacagactggtctgctgagcggattagtggggtagagtttccccagggtggaggtgtgaag

SEQ ID NO: 18167 - DNA, 122 bp, Homo sapiens
  misc_feature (61)..(62): /note="This region represents a CpG dinucleotide"
  misc_feature (61)..(61): /note="Nucleotide may be methylated to form 5-methylcytosine"
ctttcctattgctatgatacccagtacggattcctacacagaactggttctaagaattgccgtcatctggctaagcttcttcccggtattgctatggtgacatttacttagtaaacatttcc

SEQ ID NO: 18168 - DNA, 122 bp, Homo sapiens
  misc_feature (61)..(62): /note="This region represents a CpG dinucleotide"
  misc_feature (61)..(61): /note="Nucleotide may be methylated to form 5-methylcytosine"
attttgccattacgggttgatcctgttggcttgtcagtctccaacagttctctatacagacgcaaatgttctggagaggcaggccacaggtcagccccagactgtgaacccagctcaggcag

SEQ ID NO: 18169 - DNA, 122 bp, Homo sapiens
  misc_feature (61)..(62): /note="This region represents a CpG dinucleotide"
  misc_feature (61)..(61): /note="Nucleotide may be methylated to form 5-methylcytosine"
agtcactccccattttctttgaactctgtggccctaggcaacctctaatccgctgtgtctcgtctgctcctggctctttttgggtcttatctgtattgctatttgctcatctgtaacttcac

SEQ ID NO: 18170 - DNA, 122 bp, Homo sapiens
  misc_feature (61)..(62): /note="This region represents a CpG dinucleotide"
  misc_feature (61)..(61): /note="Nucleotide may be methylated to form 5-methylcytosine"
gatgtgacgccatgacaagtcaggctggtcataattggccccagttaactcgcatagatgcgtcaccctttcatacacactccagggcaagaaattttgtattgtttctttgaagttatcca

SEQ ID NO: 18171 - DNA, 122 bp, Homo sapiens
  misc_feature (61)..(62): /note="This region represents a CpG dinucleotide"
  misc_feature (61)..(61): /note="Nucleotide may be methylated to form 5-methylcytosine"
ttttaaattttgctgatttagtgggtgtggaatggcatgtccttgttttagtttacatttcgttgataataaatgaagttggacatcttttcacacatttaatgggcctcctggttgctctc

SEQ ID NO: 18172 - DNA, 122 bp, Homo sapiens
  misc_feature (61)..(62): /note="This region represents a CpG dinucleotide"
  misc_feature (61)..(61): /note="Nucleotide may be methylated to form 5-methylcytosine"
atgaatgaggactggtaattacattaaatggagaacctagctcagcaaaaactaacaaaacggaaacagtaaaaaccctatttttggatgtccagttgtgcaactgagatctaatctatcct

SEQ ID NO: 18173 - DNA, 122 bp, Homo sapiens
  misc_feature (61)..(62): /note="This region represents a CpG dinucleotide"
  misc_feature (61)..(61): /note="Nucleotide may be methylated to form 5-methylcytosine"
aaagccgggagagaggatagaggggcgttctcgctgcgctgcgtgtcagctctggtaagccgtctagcatgtcattagtggggacctgaggcgccagcgggaaagtcccctccccgtgggct

SEQ ID NO: 18174 - DNA, 122 bp, Homo sapiens
  misc_feature (61)..(62): /note="This region represents a CpG dinucleotide"
  misc_feature (61)..(61): /note="Nucleotide may be methylated to form 5-methylcytosine"
cccagccatggtctggtttcttaaccaccgtgtcctgtggcctcttgtgcagtccaagcacgtatcacagcattttgtttccccattggtcagtacttgtcagggacatcacttatcttcct

SEQ ID NO: 18175 - DNA, 122 bp, Homo sapiens
  misc_feature (61)..(62): /note="This region represents a CpG dinucleotide"
  misc_feature (61)..(61): /note="Nucleotide may be methylated to form 5-methylcytosine"
gccctccgggctcttagggcagaatatctagatgtcttctacagggctctctactggtcccgttaccatcttggccacattgggcccatccttctccatgcatgcttgctggtgatgctaga

SEQ ID NO: 18176 - DNA, 122 bp, Homo sapiens
  misc_feature (61)..(62): /note="This region represents a CpG dinucleotide"
  misc_feature (61)..(61): /note="Nucleotide may be methylated to form 5-methylcytosine"
ggcttttgtaaatatcctggctgggggattcaccatatgcaaatgccttaggcatcctggcggtgagggcacagaacactgtgtccatctgtgactcagccaggccccacaaagagcaatca

SEQ ID NO: 18177 - DNA, 122 bp, Homo sapiens
  misc_feature (61)..(62): /note="This region represents a CpG dinucleotide"
  misc_feature (61)..(61): /note="Nucleotide may be methylated to form 5-methylcytosine"
gagatggtttcaaaaaggaggtcatggacagcagaggcaaatgctgctgagaggttaatacgagaacctaaaaatgtctcctggatttcacaacatgtagatcatcagtgagctcagtggaa

SEQ ID NO: 18178 - DNA, 122 bp, Homo sapiens
  misc_feature (61)..(62): /note="This region represents a CpG dinucleotide"
  misc_feature (61)..(61): /note="Nucleotide may be methylated to form 5-methylcytosine"
gggccttcttcaacactccacccctaggctgtgttcaaaactgcagcgtaactgagaaaacggtggcagcctggggtgaatgcagtccctcccttttcctaatccatgaaactcctctacat

SEQ ID NO: 18179 - DNA, 122 bp, Homo sapiens
  misc_feature (61)..(62): /note="This region represents a CpG dinucleotide"
  misc_feature (61)..(61): /note="Nucleotide may be methylated to form 5-methylcytosine"
tataaattacccaatctgtggtagtctgttatagtaacagcaaacaggccgggacacatacgcaacgtgatattcaagggagtgtgacagaattgcctatggaataaaaataagcaaatcgg

SEQ ID NO: 18180 - DNA, 122 bp, Homo sapiens
  misc_feature (61)..(62): /note="This region represents a CpG dinucleotide"
  misc_feature (61)..(61): /note="Nucleotide may be methylated to form 5-methylcytosine"
ctatgacaccttcaaaggagatgactacaatgaggagaatcctactgaacccggcagcgacggcaccatgtcagacaaggaaattactcatgatgtcaaaggtaaccccatgtagagccatg

SEQ ID NO: 18181 - DNA, 122 bp, Homo sapiens
  misc_feature (61)..(62): /note="This region represents a CpG dinucleotide"
  misc_feature (61)..(61): /note="Nucleotide may be methylated to form 5-methylcytosine"
caggtgagctttgaaggtgtggcagcagaagagattcctgggcagaaagtgtggagggggcggttgaggtcagaaccttaggaaatcaggacagggaggagtcaaagccacaatctgaggaa

SEQ ID NO: 18182 - DNA, 122 bp, Homo sapiens
  misc_feature (61)..(62): /note="This region represents a CpG dinucleotide"
  misc_feature (61)..(61): /note="Nucleotide may be methylated to form 5-methylcytosine"
agagtgaaactccatcttgagaaaacaaaaaaccagcttcagctgaactccaagccaacacgcagcagcaactactgctatgtgagtgagtcatcttggacttaccagttcagtgaagcctc

SEQ ID NO: 18183 - DNA, 122 bp, Homo sapiens
  misc_feature (61)..(62): /note="This region represents a CpG dinucleotide"
  misc_feature (61)..(61): /note="Nucleotide may be methylated to form 5-methylcytosine"
gctgggcctgctccgtcttcccctctcctaacttcaccatgctcaggtctgtctcctgtacgttagctgctgctgcaacctgtcaccctccaacttggggtgtaacaaactaatttcctaag

SEQ ID NO: 18184 - DNA, 122 bp, Homo sapiens
  misc_feature (61)..(62): /note="This region represents a CpG dinucleotide"
  misc_feature (61)..(61): /note="Nucleotide may be methylated to form 5-methylcytosine"
tgaattctttgactctcctttcctttcatcaaggggaggagtttatgtcctttgaaatgacgtagacttttgtgactgcctcagtgaacagattatgacagaacaatgctttgtaacttccc

SEQ ID NO: 18185 - DNA, 122 bp, Homo sapiens
  misc_feature (61)..(62): /note="This region represents a CpG dinucleotide"
  misc_feature (61)..(61): /note="Nucleotide may be methylated to form 5-methylcytosine"
ggtgcagagaccacagcatcccatagaattctttatcagatcccacagttatggaggatccgtatcatactccccttatttcagatcattcactgtggctctgcttctctgatcgagccaaa

SEQ ID NO: 18186 - DNA, 122 bp, Homo sapiens
  misc_feature (61)..(62): /note="This region represents a CpG dinucleotide"
  misc_feature (61)..(61): /note="Nucleotide may be methylated to form 5-methylcytosine"
cactacaataacattctgtgtttatattgggcaaaggggacaggacacattttctacaagcgcaaacttcaggatggaaatgttaataccttgtatttgtagagtgcattggagcttgtgag

SEQ ID NO: 18187 - DNA, 122 bp, Homo sapiens
  misc_feature (61)..(62): /note="This region represents a CpG dinucleotide"
  misc_feature (61)..(61): /note="Nucleotide may be methylated to form 5-methylcytosine"
tgtgttgctgttttactgcctgccctggtcctgatccctgtcattaatagagctgggtggcgtctggaatgaatcagagcttctttgatgaaatggcatactccccatcatcaggccgaggt

SEQ ID NO: 18188 - DNA, 122 bp, Homo sapiens
  misc_feature (61)..(62): /note="This region represents a CpG dinucleotide"
  misc_feature (61)..(61): /note="Nucleotide may be methylated to form 5-methylcytosine"
ttagagtgacagggtgctgggctgtcaccaatcatacacaaagtggacaaggcattgagacgtagtcattttgacagagaagtgacattttgatacagcctaaaaacaaattgttaaatttt

SEQ ID NO: 18189 - DNA, 122 bp, Homo sapiens
  misc_feature (61)..(62): /note="This region represents a CpG dinucleotide"
  misc_feature (61)..(61): /note="Nucleotide may be methylated to form 5-methylcytosine"
actctttgccaaccattcagagcccccactaggtctaggagatgtacctttccctcctgccgtatgcagcattttcaggtgatccacggtcatctgcaggatctcggctttttctagcttag

SEQ ID NO: 18190 - DNA, 122 bp, Homo sapiens
  misc_feature (61)..(62): /note="This region represents a CpG dinucleotide"
  misc_feature (61)..(61): /note="Nucleotide may be methylated to form 5-methylcytosine"
aagctggagctagtgccgtgggagttcaaggcagaggtggacactcctggttggggaaatcgagtactactttgaagaaggcagtactgaagacaggccttgaagggcaggtgtttctggaa

SEQ ID NO: 18191 - DNA, 122 bp, Homo sapiens
  misc_feature (61)..(62): /note="This region represents a CpG dinucleotide"
  misc_feature (61)..(61): /note="Nucleotide may be methylated to form 5-methylcytosine"
tgtgtgtgtgtgtgagagagagagagagagagagagagagagagagagagagagagagcgcgcagaccctgtgaagacaagactaattggataaagttcaggcctggctcaggagcagctct

SEQ ID NO: 18192 - DNA, 122 bp, Homo sapiens
  misc_feature (61)..(62): /note="This region represents a CpG dinucleotide"
  misc_feature (61)..(61): /note="Nucleotide may be methylated to form 5-methylcytosine"
gtgtaacacactatcagtccatgattcatagtgtccatataaaaaagcaaaatggtcgggcgtggtagctcatgcctgtaatcccagcactttaggaggctgaggtgggtggactgcctgag

SEQ ID NO: 18193 - DNA, 122 bp, Homo sapiens
  misc_feature (61)..(62): /note="This region represents a CpG dinucleotide"
  misc_feature (61)..(61): /note="Nucleotide may be methylated to form 5-methylcytosine"
catcagccaggggtggcgactgcaggggcctcactccactccaggctgcatgcagagccacgtggagaactttaaaagaatacctgagcctggacttcactccagaccagttatatcagttc

SEQ ID NO: 18194 - DNA, 122 bp, Homo sapiens
  misc_feature (61)..(62): /note="This region represents a CpG dinucleotide"
  misc_feature (61)..(61): /note="Nucleotide may be methylated to form 5-methylcytosine"
tccaagtcacagcctatgaatagatgctcttcctccctccgaaagagaagccagagtgcccggaacaccacaggggaagcttgaagacttgtacccctttggagtctttttattttaaaaga

SEQ ID NO: 18195 - DNA, 122 bp, Homo sapiens
  misc_feature (61)..(62): /note="This region represents a CpG dinucleotide"
  misc_feature (61)..(61): /note="Nucleotide may be methylated to form 5-methylcytosine"
atcaataatgagtagcgactgttattatccccattttacagatatgaaactgaggtatgacgtaattacttaacttgcttgaggtcacacaggttgtaatggaagagcgaggatttatacca

SEQ ID NO: 18196 - DNA, 122 bp, Homo sapiens
  misc_feature (61)..(62): /note="This region represents a CpG dinucleotide"
  misc_feature (61)..(61): /note="Nucleotide may be methylated to form 5-methylcytosine"
ccttcaaggctggttctgggtcccggaaccatcctttcctggttcaggctgggtgcaggccgtccagcaccacctctctgactcaaggctggaattagtggggaggtgagtgaggctcttgt

SEQ ID NO: 18197 - DNA, 122 bp, Homo sapiens
  misc_feature (61)..(62): /note="This region represents a CpG dinucleotide"
  misc_feature (61)..(61): /note="Nucleotide may be methylated to form 5-methylcytosine"
tcttcctacttctgggcattaaatcctgctgtcccacaggacctggataggctgtcctcacgagaagtgggtaaagattcactacaaaaacaacatgactcatgaatggctctggatcccag

SEQ ID NO: 18198 - DNA, 122 bp, Homo sapiens
  misc_feature (61)..(62): /note="This region represents a CpG dinucleotide"
  misc_feature (61)..(61): /note="Nucleotide may be methylated to form 5-methylcytosine"
gaaacataactacccagatgaaacaatggaagagccataagtgcaatagaaatttagagacgaaggcatcagacttcctaaaaagtgacatttgagtcagtccttgaagattatttagttca

SEQ ID NO: 18199 - DNA, 122 bp, Homo sapiens
  misc_feature (61)..(62): /note="This region represents a CpG dinucleotide"
  misc_feature (61)..(61): /note="Nucleotide may be methylated to form 5-methylcytosine"
ggccttcctcaatggggaaaaggtattcccaaatccattttctgcagggaatccacggagcgagagcggtgaaactgatgacaggaaagccctgccttcatgttcatgcttgtattttaact

SEQ ID NO: 18200 - DNA, 122 bp, Homo sapiens
  misc_feature (61)..(62): /note="This region represents a CpG dinucleotide"
  misc_feature (61)..(61): /note="Nucleotide may be methylated to form 5-methylcytosine"
cgtctcttctacaagaggacagtcagaacaaacacaacacagtctcacatccaggggaaacgtgaatgaaatggcttcagaaagacccagacacccagaagtgccagcaccaggtgacagag

SEQ ID NO: 18201 - DNA, 122 bp, Homo sapiens
  misc_feature (61)..(62): /note="This region represents a CpG dinucleotide"
  misc_feature (61)..(61): /note="Nucleotide may be methylated to form 5-methylcytosine"
tttatcattatgtgtgatgtgagcttagagcctagctctaagctccccaaaggtggtgaccgtataatcatttcccacccccattacctaggacaggactctggccacagtggagggtcaga

SEQ ID NO: 18202 - DNA, 122 bp, Homo sapiens
  misc_feature (61)..(62): /note="This region represents a CpG dinucleotide"
  misc_feature (61)..(61): /note="Nucleotide may be methylated to form 5-methylcytosine"
ttaccagggtgctcctttaggcctggctctgacatcttcattcacctgctgtgtgtgtgacgctttaaaatccaaagctttgaaagtactgtgttattagtcacttccaaatgtaattttcc

SEQ ID NO: 18203 - DNA, 122 bp, Homo sapiens
  misc_feature (61)..(62): /note="This region represents a CpG dinucleotide"
  misc_feature (61)..(61): /note="Nucleotide may be methylated to form 5-methylcytosine"
tggctggcgagcaatcatcaggggctaggttgaagctagtcttgcccacctggaagttgccggcctccattacaggagcaaggacaaacagcagtgtagcactgcagcggatccaattctgc

SEQ ID NO: 18204 - DNA, 122 bp, Homo sapiens
  misc_feature (61)..(62): /note="This region represents a CpG dinucleotide"
  misc_feature (61)..(61): /note="Nucleotide may be methylated to form 5-methylcytosine"
agcacacagctcagacccactagcccgtggattcccatggaaatgtggctcccagccaagcggccccatatgctgagtgggaggcccccatacacacaaccagaacaaacttcctgagagcc

SEQ ID NO: 18205 - DNA, 122 bp, Homo sapiens
  misc_feature (61)..(62): /note="This region represents a CpG dinucleotide"
  misc_feature (61)..(61): /note="Nucleotide may be methylated to form 5-methylcytosine"
agatgaatagctccttaatggctagagaatgcaaaataacacataagaaaaagaaagcttcgatagtagagtaaaaatttggaagaaagaaacgagaaaatataaacaaacaactatgagtg

SEQ ID NO: 18206 - DNA, 122 bp, Homo sapiens
  misc_feature (61)..(62): /note="This region represents a CpG dinucleotide"
  misc_feature (61)..(61): /note="Nucleotide may be methylated to form 5-methylcytosine"
agagggaaggagatcccggttcaaacagcataagtgactcacccagcatcacagagctagcgtgtgggtggaactgagagtcatgcatcagctcctgcaccacagctgcctccctggcaggg

SEQ ID NO: 18207 - DNA, 122 bp, Homo sapiens
  misc_feature (61)..(62): /note="This region represents a CpG dinucleotide"
  misc_feature (61)..(61): /note="Nucleotide may be methylated to form 5-methylcytosine"
ggactttctctgtcagagtttggagaaaacactcatgcatttgattcacagccaggagtccgcttgccttttactgatcttctgtttgtcagcagtttccacattaagacagttgagtgagt

SEQ ID NO: 18208 - DNA, 122 bp, Homo sapiens
  misc_feature (61)..(62): /note="This region represents a CpG dinucleotide"
  misc_feature (61)..(61): /note="Nucleotide may be methylated to form 5-methylcytosine"
ctactctagctgtgtctatcttggacaaattgcttaatctctctggagaataatatgtagcggcaaagttaagaagatgactcatgtaaagttattactatgcctgccactcaagaagtgtt

SEQ ID NO: 18209 - DNA, 122 bp, Homo sapiens
  misc_feature (61)..(62): /note="This region represents a CpG dinucleotide"
  misc_feature (61)..(61): /note="Nucleotide may be methylated to form 5-methylcytosine"
agctccactcatgctcctgtggctgtcccagtatattgctttattcagagccaaaaggagcgtttacaaacatttgtagaaagtcctccttagagtacacagtgctagtgtttattgatgct

SEQ ID NO: 18210 - DNA, 122 bp, Homo sapiens
  misc_feature (61)..(62): /note="This region represents a CpG dinucleotide"
  misc_feature (61)..(61): /note="Nucleotide may be methylated to form 5-methylcytosine"
gctctgtgtactccacactgcacgtagtggtgtctgtaaccccggggtttgtgaatggcacgtcccattttaaaacttaaaatgaactgccgattctgtgcatgttgtatagcttgtttttg

SEQ ID NO: 18211 - DNA, 122 bp, Homo sapiens
  misc_feature (61)..(62): /note="This region represents a CpG dinucleotide"
  misc_feature (61)..(61): /note="Nucleotide may be methylated to form 5-methylcytosine"
tcttacagagcatcaagtttccactggccagagttagaatgcaagctgtaacctaccagtcgtcctggaatgacccccgatcccttcctgtttcattgcattctacagatgaacacaaagac

SEQ ID NO: 18212 - DNA, 122 bp, Homo sapiens
  misc_feature (61)..(62): /note="This region represents a CpG dinucleotide"
  misc_feature (61)..(61): /note="Nucleotide may be methylated to form 5-methylcytosine"
acacctaatcttaccttcgtaacacagccgcttggtctctagatgtgtttctgtttaaatcgtcgtagccctctagagcgccggctttcgggtcaggccggggttcaagtcccagccttcgc

SEQ ID NO: 18213 - DNA, 122 bp, Homo sapiens
  misc_feature (61)..(62): /note="This region represents a CpG dinucleotide"
  misc_feature (61)..(61): /note="Nucleotide may be methylated to form 5-methylcytosine"
gtgagaactccatgggaatgaaaactgctgcctgcacagaagccttgccacccagctcttcgggcgagtcatgttcagttctgccctcctcccaggcacacacctccggatgttctggaaga

SEQ ID NO: 18214 - DNA, 122 bp, Homo sapiens
  misc_feature (61)..(62): /note="This region represents a CpG dinucleotide"
  misc_feature (61)..(61): /note="Nucleotide may be methylated to form 5-methylcytosine"
gcctgccaaaggctttgccacagtgactcaatgagatcagatggccttccctctgctgcacgctgagagcaaccagagcaggcctttgccaggacttgggggaaggtgggacctggcctgga

SEQ ID NO: 18215 - DNA, 122 bp, Homo sapiens
  misc_feature (61)..(62): /note="This region represents a CpG dinucleotide"
  misc_feature (61)..(61): /note="Nucleotide may be methylated to form 5-methylcytosine"
ggggagcaaaagacagggacgctgccatcgatgatgtcagcatgacaggctgggggttcgcgctggcacaggcgccggcagccacatcggcaggcaggagggtcccgctgcacagctgaggg

SEQ ID NO: 18216 - DNA, 122 bp, Homo sapiens
  misc_feature (61)..(62): /note="This region represents a CpG dinucleotide"
  misc_feature (61)..(61): /note="Nucleotide may be methylated to form 5-methylcytosine"
aggtactcagtcttttctttccttctaataagtaggtgagtattttccttggtttgcacacgaggaaatggaggctcagagagcttaggtagcttactcaaagccacacagctgggttaaat

SEQ ID NO: 18217 - DNA, 122 bp, Homo sapiens
  misc_feature (61)..(62): /note="This region represents a CpG dinucleotide"
  misc_feature (61)..(61): /note="Nucleotide may be methylated to form 5-methylcytosine"
aattttcccagaacttatgagtcccaggtcctcattgcagtggtaagcgctgagtgctcacgggggtgtgtgtgggacaggatgtggtttgagttctgtgatcctcaccccgacctcatgcg

SEQ ID NO: 18218 - DNA, 122 bp, Homo sapiens
  misc_feature (61)..(62): /note="This region represents a CpG dinucleotide"
  misc_feature (61)..(61): /note="Nucleotide may be methylated to form 5-methylcytosine"
ctcaggtgattcacccaccttggcctctcaaagtgctgggattacaggcatgagccaccacgcctggacaagagtttttaaaaaatcaacatcccgtggccaggtgtggtaactcatgcctg

SEQ ID NO: 18219 - DNA, 122 bp, Homo sapiens
  misc_feature (61)..(62): /note="This region represents a CpG dinucleotide"
  misc_feature (61)..(61): /note="Nucleotide may be methylated to form 5-methylcytosine"
gggctttctaacttgggcagcacaacttctcaaatactgtcagttagcagtggggaaactcgtcagtcttacttcctgtggttctctgtggcttggcttgagtggatggggaaaaaccaaat

SEQ ID NO: 18220 - DNA, 122 bp, Homo sapiens
  misc_feature (61)..(62): /note="This region represents a CpG dinucleotide"
  misc_feature (61)..(61): /note="Nucleotide may be methylated to form 5-methylcytosine"
ggatcattcataccttgaaccctagcctacctgagtaccaaaactataattcccctgccacgtagcgtgatcacttgggaaggccaaagtcttaaaagatagagaaaaacatgcattttaat

SEQ ID NO: 18221 - DNA, 122 bp, Homo sapiens
  misc_feature (61)..(62): /note="This region represents a CpG dinucleotide"
  misc_feature (61)..(61): /note="Nucleotide may be methylated to form 5-methylcytosine"
cttgatggtgaatgccttctggaagcaacccgagtggagggcagggagttacttttgctacggagccagctcagagtggattctgtaagctgagcctcatctggagcttgagtccgcacctc

SEQ ID NO: 18222 - DNA, 122 bp, Homo sapiens
  misc_feature (61)..(62): /note="This region represents a CpG dinucleotide"
  misc_feature (61)..(61): /note="Nucleotide may be methylated to form 5-methylcytosine"
gtattatcatgtgttggtaacaacctcttccctcatagtacttacataagtaagcacttacgtaagtaagcacttacgtaagtacttacataagtaagtacatagtgatgtacttacatcac

SEQ ID NO: 18223 - DNA, 122 bp, Homo sapiens
  misc_feature (61)..(62): /note="This region represents a CpG dinucleotide"
  misc_feature (61)..(61): /note="Nucleotide may be methylated to form 5-methylcytosine"
acacgtcctctttagcagatgctttctttataagtgtgacttatgttagaaaaggtttaccgtttttccatttcaaaagtaatccatggtcattaggggtaggaggaggaggaagagagagg

SEQ ID NO: 18224 - DNA, 122 bp, Homo sapiens
  misc_feature (61)..(62): /note="This region represents a CpG dinucleotide"
  misc_feature (61)..(61): /note="Nucleotide may be methylated to form 5-methylcytosine"
tggaatggagcagcctgtatggcaaggacacaccagtgatgagtcagaagccaggggtcacgttacagcgagagccctccagcaatcagctgtggtcagggatcaaagccatggcctcccca

SEQ ID NO: 18225 - DNA, 122 bp, Homo sapiens
  misc_feature (61)..(62): /note="This region represents a CpG dinucleotide"
  misc_feature (61)..(61): /note="Nucleotide may be methylated to form 5-methylcytosine"
cttgggagaagcttggcggtcataagcttgagctcacctatcaggtagagagcttccacacgctcctgggaatttccttgacctagcttgaccctgtaaggcacaagttgctttcctttcac

SEQ ID NO: 18226 - DNA, 122 bp, Homo sapiens
  misc_feature (61)..(62): /note="This region represents a CpG dinucleotide"
  misc_feature (61)..(61): /note="Nucleotide may be methylated to form 5-methylcytosine"
tctgctttcaaatgttggcatgactcattccctcactcctttgagaatgagctcaaatttcgttttgtcagtgagaaccgaaactgtatacacccacatagcttactgtgtatatttacagg

SEQ ID NO: 18227 - DNA, 122 bp, Homo sapiens
  misc_feature (61)..(62): /note="This region represents a CpG dinucleotide"
  misc_feature (61)..(61): /note="Nucleotide may be methylated to form 5-methylcytosine"
gtttcctgttatgaaaatctcctctgctgggtgcagtggctcatgccatgactgagatcacgccattgcacttcagcctgggcgacagggcgagactccatcccaaaaaaaaaaaagaaaat

SEQ ID NO: 18228 - DNA, 122 bp, Homo sapiens
  misc_feature (61)..(62): /note="This region represents a CpG dinucleotide"
  misc_feature (61)..(61): /note="Nucleotide may be methylated to form 5-methylcytosine"
atccaggctttttaaatcttgtgtttccaccactttctagggcccctttgtctatggaaacgggaaaagagagtttagaacacatattagctgtttaagttgtcttgacttagacgtgacaa

SEQ ID NO: 18229 - DNA, 122 bp, Homo sapiens
  misc_feature (61)..(62): /note="This region represents a CpG dinucleotide"
  misc_feature (61)..(61): /note="Nucleotide may be methylated to form 5-methylcytosine"
ccctgtggactcacctctgcagccacaacaacaccctcctctccttggcgtggaagccagcgctcctggcccactcccagtaggggatgtcctctgagttgtttttcctgtgcggggagggg

SEQ ID NO: 18230 - DNA, 122 bp, Homo sapiens
  misc_feature (61)..(62): /note="This region represents a CpG dinucleotide"
  misc_feature (61)..(61): /note="Nucleotide may be methylated to form 5-methylcytosine"
gaaagatgtcaggagggggagaagcagatgacatgggtaagaggagaattcttacttctacgtggctccaacggaaatttgcagccataaaacccaaaggaggtatttgctgaatcacaggc

SEQ ID NO: 18231 - DNA, 122 bp, Homo sapiens
  misc_feature (61)..(62): /note="This region represents a CpG dinucleotide"
  misc_feature (61)..(61): /note="Nucleotide may be methylated to form 5-methylcytosine"
cgggctccccgtggcagtaccctcttttgaagactttctttccttgctctgatggcgtgacgtggtgctcaaagagacttggcagagtccctgctttaccttttacgagtgcctttggaggt

SEQ ID NO: 18232 - DNA, 122 bp, Homo sapiens
  misc_feature (61)..(62): /note="This region represents a CpG dinucleotide"
  misc_feature (61)..(61): /note="Nucleotide may be methylated to form 5-methylcytosine"
gtagccacatgcacagagaaagccagtcctgcaggaagagatggaggaagcagaagggcacggaggaaacagccctccacagaaagagacagatttgctgctttgtagttcctggttgggga

SEQ ID NO: 18233 - DNA, 122 bp, Homo sapiens
  misc_feature (61)..(62): /note="This region represents a CpG dinucleotide"
  misc_feature (61)..(61): /note="Nucleotide may be methylated to form 5-methylcytosine"
atcacatcaccagcaatctccctcctaggtagaagccccaaagaattaacaacaaaaggacgcaaacagatacttgtacacccatggtcacagcagcctgactcacaacagaacaaacagcc

SEQ ID NO: 18234 - DNA, 122 bp, Homo sapiens
  misc_feature (61)..(62): /note="This region represents a CpG dinucleotide"
  misc_feature (61)..(61): /note="Nucleotide may be methylated to form 5-methylcytosine"
tttattttcttggagtctttccagatacaacaaaactaataccattcgttcaagataccacgtaagatagtaaaataaagtacatctaggcattgacttaggatctctgagtgtgggagaaa

SEQ ID NO: 18235 - DNA, 122 bp, Homo sapiens
  misc_feature (61)..(62): /note="This region represents a CpG dinucleotide"
  misc_feature (61)..(61): /note="Nucleotide may be methylated to form 5-methylcytosine"
cctggctgcatattcacatttgcaatcactcatcaaatccaatatcttattctatatgtacgagaagggaagtaatttacccaaagtcacatagtttaggacacatttgttcgttgtctacc

SEQ ID NO: 18236 - DNA, 122 bp, Homo sapiens
  misc_feature (61)..(62): /note="This region represents a CpG dinucleotide"
  misc_feature (61)..(61): /note="Nucleotide may be methylated to form 5-methylcytosine"
gaagccaggtacatgaccttggaaaactggtctctcatctatatgacaagtctaccatcccgcctcacagggtgcttgcaggtcagagggtaggtttgtggacatcacagtagagaagaacg

SEQ ID NO: 18237 - DNA, 122 bp, Homo sapiens
  misc_feature (61)..(62): /note="This region represents a CpG dinucleotide"
  misc_feature (61)..(61): /note="Nucleotide may be methylated to form 5-methylcytosine"
atctaagtggatgctaaggaacatccccaggatgctacaaagagttttcctttgttaagacgtcttttacaaactagctcggtgtcatgagcactgtggtgaggcacagaaagtaaaaacaa

SEQ ID NO: 18238 - DNA, 122 bp, Homo sapiens
  misc_feature (61)..(62): /note="This region represents a CpG dinucleotide"
  misc_feature (61)..(61): /note="Nucleotide may be methylated to form 5-methylcytosine"
actcagacctacttagtctgggtggggctttgacacaagtgtaagcttctggtgagcgagcgtcaggtgcagccaacgctagaaatttctggcttttgagctctaagaccttgaacaagcct

SEQ ID NO: 18239 - DNA, 122 bp, Homo sapiens
  misc_feature (61)..(62): /note="This region represents a CpG dinucleotide"
  misc_feature (61)..(61): /note="Nucleotide may be methylated to form 5-methylcytosine"
tatcgaatgatgttaaaattacatgaaagacatattctgtgtttaaacaaaatccccaagcgtctcctccctgcttctccacaaacaaaaattattttttgacattttctttaaggttttat

SEQ ID NO: 18240 - DNA, 122 bp, Homo sapiens
  misc_feature (61)..(62): /note="This region represents a CpG dinucleotide"
  misc_feature (61)..(61): /note="Nucleotide may be methylated to form 5-methylcytosine"
acaggcatgggcgagaggccactgaacttctctatgaagctgcagccaagcaggtggctccgtgtcccctcttcttccccatcacccctcccttgaccgtcagtgtgagagtttgttgaggc

SEQ ID NO: 18241 - DNA, 122 bp, Homo sapiens
  misc_feature (61)..(62): /note="This region represents a CpG dinucleotide"
  misc_feature (61)..(61): /note="Nucleotide may be methylated to form 5-methylcytosine"
tctgtgatgtgagagtcagaaatgagtaatttcagaagtatcttgccagctctagcccttcggtattcaatactgcctctcaattcacactttactgagcagggagttaaagaagacccagg

SEQ ID NO: 18242 - DNA, 122 bp, Homo sapiens
  misc_feature (61)..(62): /note="This region represents a CpG dinucleotide"
  misc_feature (61)..(61): /note="Nucleotide may be methylated to form 5-methylcytosine"
ttcatgacatttgcaacagagaggagcctggcccctcctcttcctgtggaacctgggattcgaacggccaggcaggaagcactctagtagggactgtggcttagcaagagtccctgtttcct

SEQ ID NO: 18243 - DNA, 122 bp, Homo sapiens
  misc_feature (61)..(62): /note="This region represents a CpG dinucleotide"
  misc_feature (61)..(61): /note="Nucleotide may be methylated to form 5-methylcytosine"
gaggctgtggttattcacctttgccactgtcttccggtgtgcccagtcacaggagctgcacggcaatgcatctgagaccatgcggtgtcaccttcacagaagtgctctggcacagagactcc

SEQ ID NO: 18244 - DNA, 122 bp, Homo sapiens
  misc_feature (61)..(62): /note="This region represents a CpG dinucleotide"
  misc_feature (61)..(61): /note="Nucleotide may be methylated to form 5-methylcytosine"
gcctaagatcttcacatgaagccaggagactataatagaagagctcacctaaaacaagttcgtcagagaaagactgggctaggaaaaaaaccactaaggctgggcacggtggctcacggctg

SEQ ID NO: 18245 - DNA, 122 bp, Homo sapiens
  misc_feature (61)..(62): /note="This region represents a CpG dinucleotide"
  misc_feature (61)..(61): /note="Nucleotide may be methylated to form 5-methylcytosine"
attctgtccacacctagactcttgtttcctggaccttacaatactccagagcatatgttacgttcagctgcatgtttgttttaaagaaccgtgtctgctgggattcagtgaatgttttcctc

SEQ ID NO: 18246 - DNA, 122 bp, Homo sapiens
  misc_feature (61)..(62): /note="This region represents a CpG dinucleotide"
  misc_feature (61)..(61): /note="Nucleotide may be methylated to form 5-methylcytosine"
aggtggggggtgcagcactaggcgaggggggtgttgcaggcctgagccaggcaggggctgcgggtcggggtcaggtggtaggtgcggggtcaggcaggagagtgcggagtcaggccctgggg

SEQ ID NO: 18247 - DNA, 122 bp, Homo sapiens
  misc_feature (61)..(62): /note="This region represents a CpG dinucleotide"
  misc_feature (61)..(61): /note="Nucleotide may be methylated to form 5-methylcytosine"
gcctctgctcacccgccctgctcattacacactaattataataggttagcggctaaaagacgctcctgctagtgccatggcagtttacagatgccacggcaacatcaggaagttacgctata

SEQ ID NO: 18248 - DNA, 122 bp, Homo sapiens
  misc_feature (61)..(62): /note="This region represents a CpG dinucleotide"
  misc_feature (61)..(61): /note="Nucleotide may be methylated to form 5-methylcytosine"
ctcaactgtaaggacatgtgactggtctccttataagaagaggagattaaaacacagacacgcacagaaggagagatacatgcaaacatcagaggaaaacagctatctacaagccaaggaga

SEQ ID NO: 18249 - DNA, 122 bp, Homo sapiens
  misc_feature (61)..(62): /note="This region represents a CpG dinucleotide"
  misc_feature (61)..(61): /note="Nucleotide may be methylated to form 5-methylcytosine"
cggggccgcgcgagttgccgttaggacagttaaaaccgttagctgcctgtcgtggcggggcggggccctgggacaggacggaatccctattggtcagaagaggacctgggggcggggccgcg

SEQ ID NO: 18250 - DNA, 122 bp, Homo sapiens
  misc_feature (61)..(62): /note="This region represents a CpG dinucleotide"
  misc_feature (61)..(61): /note="Nucleotide may be methylated to form 5-methylcytosine"
actcattttcactttgctcctgtggttactaagagacatgatttattgtaaagtgtatctcggggctgcttcctgagccagaaagagaagttgtctttgacattccttccccctcatcctac

SEQ ID NO: 18251 - DNA, 122 bp, Homo sapiens
  misc_feature (61)..(62): /note="This region represents a CpG dinucleotide"
  misc_feature (61)..(61): /note="Nucleotide may be methylated to form 5-methylcytosine"
tatgtgttacctttcttgctcctttggtctagtgattttgccttgtgcattctcaggccccgtgctgattccccttccccatttcctctcctcaccgtcgatggccccagtgctatgagcag

SEQ ID NO: 18252 - DNA, 122 bp, Homo sapiens
  misc_feature (61)..(62): /note="This region represents a CpG dinucleotide"
  misc_feature (61)..(61): /note="Nucleotide may be methylated to form 5-methylcytosine"
gataggctttctaaaaagaattatttttatttgggaataaagcattgcaatgggaatatgcgtgccaaggtaaactatgtgcttattcaggtaggtaaagtaagacaaagtttaaaaaaata

SEQ ID NO: 18253 - DNA, 122 bp, Homo sapiens
  misc_feature (61)..(62): /note="This region represents a CpG dinucleotide"
  misc_feature (61)..(61): /note="Nucleotide may be methylated to form 5-methylcytosine"
aacctggtgtactgtgcgtgctgtggggctgtgtctctgctgccctcggtgtgcagagtccgctgggtgaagctcttcctagtttctagctcatctttgggcaggctcacggctgtgatgga

SEQ ID NO: 18254 - DNA, 122 bp, Homo sapiens
  misc_feature (61)..(62): /note="This region represents a CpG dinucleotide"
  misc_feature (61)..(61): /note="Nucleotide may be methylated to form 5-methylcytosine"
tgtgggtggaattgaccacatggtgataagcaaaatagtcatgatcttttccccataattcgtacagtttagtaggctgattgaaatgagtaaataggcaattactctaacataatacttgc

SEQ ID NO: 18255 - DNA, 122 bp, Homo sapiens
  misc_feature (61)..(62): /note="This region represents a CpG dinucleotide"
  misc_feature (61)..(61): /note="Nucleotide may be methylated to form 5-methylcytosine"
aaatgtaattgttgacagagcatgaactatgattgacatgaggtcagaaagtccaaaggtcgcagggttagtgattcatatcagcttgtcagagcctttcctgtaatacactccatacttgg

SEQ ID NO: 18256 - DNA, 122 bp, Homo sapiens
  misc_feature (61)..(62): /note="This region represents a CpG dinucleotide"
  misc_feature (61)..(61): /note="Nucleotide may be methylated to form 5-methylcytosine"
accacagctcctgttcttcctgctgtcatcttacaatcagcaagaagcggggtggggaggcgggctggaaccaaaacccgggagacctacctctgtttatccacaagctttgctttatctca

SEQ ID NO: 18257 - DNA, 122 bp, Homo sapiens
  misc_feature (61)..(62): /note="This region represents a CpG dinucleotide"
  misc_feature (61)..(61): /note="Nucleotide may be methylated to form 5-methylcytosine"
atgttgacttctgagtaatcccagttctgggaggcctctaacatttccagtttggccgggcgcggtggctcacccctgtaatcccagcactttggtgattctccccggggcctgaaagcttg

SEQ ID NO: 18258 - DNA, 122 bp, Homo sapiens
  misc_feature (61)..(62): /note="This region represents a CpG dinucleotide"
  misc_feature (61)..(61): /note="Nucleotide may be methylated to form 5-methylcytosine"
ctgggagaggctctagagcatggaggctttttcactgaaatctgtttgctcttctcagagcgtagcccaaggcgtgcaaatgtaaacacctgtaatgtaatgagaagtgagttggagatgag

SEQ ID NO: 18259 - DNA, 122 bp, Homo sapiens
  misc_feature (61)..(62): /note="This region represents a CpG dinucleotide"
  misc_feature (61)..(61): /note="Nucleotide may be methylated to form 5-methylcytosine"
ggtctcactctgtctcagagtctagcgagtatagagtgtatggcctgcctgctgggccaccgcagccttctggtcttctggcctttgcctggactgactgccctgactgccagctgtgtctc

SEQ ID NO: 18260 - DNA, 122 bp, Homo sapiens
  misc_feature (61)..(62): /note="This region represents a CpG dinucleotide"
  misc_feature (61)..(61): /note="Nucleotide may be methylated to form 5-methylcytosine"
taatatttcagcctctccttaggcgaaagaagccattgttctgagcttggcacgagctcccggacccttcacgtattgtgtacatacagctttgtgctcacagaaaaatgcatttttttccc

SEQ ID NO: 18261 - DNA, 122 bp, Homo sapiens
  misc_feature (61)..(62): /note="This region represents a CpG dinucleotide"
  misc_feature (61)..(61): /note="Nucleotide may be methylated to form 5-methylcytosine"
catgacattttgatggagctaaaaaattcctatcacctagtgatatcttgggtgtcataacgtcaaagtgctatgcattactcacgtttgtggtgatgctggtgtaaacatacctactgcac

SEQ ID NO: 18262 - DNA, 122 bp, Homo sapiens
  misc_feature (61)..(62): /note="This region represents a CpG dinucleotide"
  misc_feature (61)..(61): /note="Nucleotide may be methylated to form 5-methylcytosine"
acctgttattgcttttgtttctgtttgaaaggagatactgtatttttttgtatttccttacgtgtctgggcaagaggggaagataattctcccattagatgcttagaaattgttgagaaatt

SEQ ID NO: 18263 - DNA, 122 bp, Homo sapiens
  misc_feature (61)..(62): /note="This region represents a CpG dinucleotide"
  misc_feature (61)..(61): /note="Nucleotide may be methylated to form 5-methylcytosine"
ctctccaaaatgggactagggtgaaatttcttcacagtatgaaaataatggcccagggaacgaagcaaatgccaagagctgagccttagggaatgactagtaggcccagattcttggggtga

SEQ ID NO: 18264 - DNA, 122 bp, Homo sapiens
  misc_feature (61)..(62): /note="This region represents a CpG dinucleotide"
  misc_feature (61)..(61): /note="Nucleotide may be methylated to form 5-methylcytosine"
ggaattttaccaggggcacaagactgggagtgttctagaaggacaaccagtggaaagatacggagatgagaaatatcaaagctgacatgtttctgggattgaaaaggatatagcaaaaacat

SEQ ID NO: 18265 - DNA, 122 bp, Homo sapiens
  misc_feature (61)..(62): /note="This region represents a CpG dinucleotide"
  misc_feature (61)..(61): /note="Nucleotide may be methylated to form 5-methylcytosine"
aaagcagcccagaatcagggcatcaagccttacactgaggcactcttgggctttgtcaagcggccccatggacagtgactctgcccatggctagaggacagtgactcaccccaggcttcaag

SEQ ID NO: 18266 - DNA, 122 bp, Homo sapiens
  misc_feature (61)..(62): /note="This region represents a CpG dinucleotide"
  misc_feature (61)..(61): /note="Nucleotide may be methylated to form 5-methylcytosine"
tcaactgagtcgttccataatgtgagcaagtcatttactctcccaaagcctcagtttcttcgtctacaaaatagaggtagctaatacctaccctctcactacctcaaagggttgctgggaag

SEQ ID NO: 18267 - DNA, 122 bp, Homo sapiens
  misc_feature (61)..(62): /note="This region represents a CpG dinucleotide"
  misc_feature (61)..(61): /note="Nucleotide may be methylated to form 5-methylcytosine"
tcaatctctttgttcatatgcacaggctcttaatctctgttttccctttctttagagtaccgtagtctcagatgataaacttctctgaagctaatttcttcactgctgccctggagtgtctc

SEQ ID NO: 18268 - DNA, 122 bp, Homo sapiens
  misc_feature (61)..(62): /note="This region represents a CpG dinucleotide"
  misc_feature (61)..(61): /note="Nucleotide may be methylated to form 5-methylcytosine"
ttagaaagccccaaaattctaaaattctatttagcagtctctggctttccatgactgccacgtcatttgtggctaaccagtgtcagccagctggtgatgtattgcacagctactaaatgcct

SEQ ID NO: 18269 - DNA, 122 bp, Homo sapiens
  misc_feature (61)..(62): /note="This region represents a CpG dinucleotide"
  misc_feature (61)..(61): /note="Nucleotide may be methylated to form 5-methylcytosine"
aaagaaagctgacgcctgtcctagcctgtccccactggccttgccctaaaagcagcagggcgtctggtcccagagcccaaggcctcactggctgggcagccaatagcatccctatatcaaga

SEQ ID NO: 18270 - DNA, 122 bp, Homo sapiens
  misc_feature (61)..(62): /note="This region represents a CpG dinucleotide"
  misc_feature (61)..(61): /note="Nucleotide may be methylated to form 5-methylcytosine"
tgtatatagagatctatatctagacactctcatgcagagcaatgcatactgagtgtggcccgtgtgttatggtggtagcagggccacctggcaggtagttgcagtgtgaccactgaaaatcc

SEQ ID NO: 18271 - DNA, 122 bp, Homo sapiens
  misc_feature (61)..(62): /note="This region represents a CpG dinucleotide"
  misc_feature (61)..(61): /note="Nucleotide may be methylated to form 5-methylcytosine"
ctcactttcagcatttctgagacacaaacaagatgcataaacataatattaaacaaacaacggtagagaccttgttttcatcaaagacagacagcaagactactaatgtacaaaaattcttt

SEQ ID NO: 18272 - DNA, 122 bp, Homo sapiens
  misc_feature (61)..(62): /note="This region represents a CpG dinucleotide"
  misc_feature (61)..(61): /note="Nucleotide may be methylated to form 5-methylcytosine"
tggtaaagggacttgctcaaggccacacatctcaaatcaagccatttgcagtggagccaacgcatagggtcaccatgccacacctaagtgccctgtgatgcactaagctgttcatgtaagtc

SEQ ID NO: 18273 - DNA, 122 bp, Homo sapiens
  misc_feature (61)..(62): /note="This region represents a CpG dinucleotide"
  misc_feature (61)..(61): /note="Nucleotide may be methylated to form 5-methylcytosine"
tctccacatgtcaccaagccagaaagctctggaaattggctgcctccatgggacagtcatcgcagactttgccaaagcaaaagtgctgatgtcactcatcatactagcagttggctgctaag

SEQ ID NO: 18274 - DNA, 122 bp, Homo sapiens
  misc_feature (61)..(62): /note="This region represents a CpG dinucleotide"
  misc_feature (61)..(61): /note="Nucleotide may be methylated to form 5-methylcytosine"
tctgtgttttgcacaaagatacctagtggcaaggttaagcaggggtagaaatccaacctgcgttttaattgacaagccatgtgcctgactcaaggctgtgtcagctcaagaaaggcactatc

SEQ ID NO: 18275 - DNA, 122 bp, Homo sapiens
  misc_feature (61)..(62): /note="This region represents a CpG dinucleotide"
  misc_feature (61)..(61): /note="Nucleotide may be methylated to form 5-methylcytosine"
ttgttctcatcatagcaatccacctactgctgtaggcttgatgttatcactcctgccattcgggcaggtgtctggagggtggaagtagggacaaagaccttagaaaagtggtagggtgatga

SEQ ID NO: 18276 - DNA, 122 bp, Homo sapiens
  misc_feature (61)..(62): /note="This region represents a CpG dinucleotide"
  misc_feature (61)..(61): /note="Nucleotide may be methylated to form 5-methylcytosine"
ctgggattacaggtgtgagcaaccatgcccggccaagggtttttaactttagctgacctccggaggttacaagtttgaaaacggcaggaggaaacccagagagttgtaaacttacgaaggtc

SEQ ID NO: 18277 - DNA, 122 bp, Homo sapiens
  misc_feature (61)..(62): /note="This region represents a CpG dinucleotide"
  misc_feature (61)..(61): /note="Nucleotide may be methylated to form 5-methylcytosine"
cctttcaggagatgtcgaagttctcttacaacaagacatagagaaatagctcgagttgcacgctagttcaaaatgggcctactgaaaatgtgtttggattagatgagctctagctttaggca

SEQ ID NO: 18278 - DNA, 122 bp, Homo sapiens
  misc_feature (61)..(62): /note="This region represents a CpG dinucleotide"
  misc_feature (61)..(61): /note="Nucleotide may be methylated to form 5-methylcytosine"
gggaagtagagaagaggcagatagagacaaggggaaaaaaatccaacacggatggacagacgtatctggtttaaatcccagggcagcctgggccagttctactcaaatagagtgtgtcctgg

SEQ ID NO: 18279 - DNA, 122 bp, Homo sapiens
  misc_feature (61)..(62): /note="This region represents a CpG dinucleotide"
  misc_feature (61)..(61): /note="Nucleotide may be methylated to form 5-methylcytosine"
ttacatttcctgggtcactttgaccttctcaaaggccgcagccaccattgagctggtattcgctcatgctgacatcctactccaaccctctctgcctcatcaaatacagccttgattttggt

SEQ ID NO: 18280 - DNA, 122 bp, Homo sapiens
  misc_feature (61)..(62): /note="This region represents a CpG dinucleotide"
  misc_feature (61)..(61): /note="Nucleotide may be methylated to form 5-methylcytosine"
ctgacttctatcaccttggattagcgttgcctgttccagaactacatggaaatggaaccacgcagctgtgctcttctgctttttggcctgaatactcactgtcagggctgatgcaagaggag

SEQ ID NO: 18281 - DNA, 122 bp, Homo sapiens
  misc_feature (61)..(62): /note="This region represents a CpG dinucleotide"
  misc_feature (61)..(61): /note="Nucleotide may be methylated to form 5-methylcytosine"
tattgaatgcagttttttcattgtggttttttggtatttaataaaaatgttgcagttccacggttgctagattgaaaagctatctgagatcttttgaaggttactctgtaaatatattgttg

SEQ ID NO: 18282 - DNA, 122 bp, Homo sapiens
  misc_feature (61)..(62): /note="This region represents a CpG dinucleotide"
  misc_feature (61)..(61): /note="Nucleotide may be methylated to form 5-methylcytosine"
gagggagaagtcccatcaggacgtagatgtgaccagaggagaaatgctggtggaggacaccggcccccgtggcacttggtttctgttgtgtcgctgggctgggctcaccctagagtctgaag

SEQ ID NO: 18283 - DNA, 122 bp, Homo sapiens
  misc_feature (61)..(62): /note="This region represents a CpG dinucleotide"
  misc_feature (61)..(61): /note="Nucleotide may be methylated to form 5-methylcytosine"
gtaacacaattcaaggcagacacaggaaagagcacaagtacaatatgggtaaaggaactgcgtatgtttttaagagaaaagcaactcactgataaaaagacatttcatttggttttgaaagt

SEQ ID NO: 18284 - DNA, 122 bp, Homo sapiens
  misc_feature (61)..(62): /note="This region represents a CpG dinucleotide"
  misc_feature (61)..(61): /note="Nucleotide may be methylated to form 5-methylcytosine"
ttccctgttaatcattttcaatccaatcacatgatctccaaatctacttaatcctcctaacgtaagcattcttcattcattcacccaacaaatacttactgagcatctattgtccagcactg

SEQ ID NO: 18285 - DNA, 122 bp, Homo sapiens
  misc_feature (61)..(62): /note="This region represents a CpG dinucleotide"
  misc_feature (61)..(61): /note="Nucleotide may be methylated to form 5-methylcytosine"
actgctactccttgcagcaagagcttcagtgaggatgcagcattttttatgtcctgaggacgtatgtgttgagtaagtgtttgtcaagtgaattcaggtaaagtcaatcttgcttcacctct

SEQ ID NO: 18286 - DNA, 122 bp, Homo sapiens
  misc_feature (61)..(62): /note="This region represents a CpG dinucleotide"
  misc_feature (61)..(61): /note="Nucleotide may be methylated to form 5-methylcytosine"
caatggatctgataaccaaaatgcttactaagtgactaatacacaggtacatatacagtgcggctactgtgcacaaaggggatgattaatggtttgagtgcaatgaagcaagatggcacaag

SEQ ID NO: 18287 - DNA, 122 bp, Homo sapiens
  misc_feature (61)..(62): /note="This region represents a CpG dinucleotide"
  misc_feature (61)..(61): /note="Nucleotide may be methylated to form 5-methylcytosine"
tttgtgttttcaaacacacaaacatatttcactacctggcttctcagaactgattcgaagcgataagttggaaagcaacaaggccgtaaaaggagtcaaatgcatacagcaggaaaccacag

SEQ ID NO: 18288 - DNA, 122 bp, Homo sapiens
  misc_feature (61)..(62): /note="This region represents a CpG dinucleotide"
  misc_feature (61)..(61): /note="Nucleotide may be methylated to form 5-methylcytosine"
agtcctgccaggcctcaagtagtaaaaaaactgatcatactcacctgggcccagtggaggcggcagtgagctatggttttaccatggcaactgtagcctggatgacagaataagactggtct

SEQ ID NO: 18289 - DNA, 122 bp, Homo sapiens
  misc_feature (61)..(62): /note="This region represents a CpG dinucleotide"
  misc_feature (61)..(61): /note="Nucleotide may be methylated to form 5-methylcytosine"
ttgcaattccagttttgtacacgtatcagtggcctgcagcttcccacaggcatctctttacgtgacaccagggaagctccaaagcaggcaaggcaaggtgctgtcagattacacttacttaa

SEQ ID NO: 18290 - DNA, 122 bp, Homo sapiens
  misc_feature (61)..(62): /note="This region represents a CpG dinucleotide"
  misc_feature (61)..(61): /note="Nucleotide may be methylated to form 5-methylcytosine"
cactgcacaatgtaaacttttgaccctcaactttttgacctgcagttgtaacgcactaaccgcaaagatacacaaagccgagcctcttctttcagggggaaggggccccccagcatctcagg

SEQ ID NO: 18291 - DNA, 122 bp, Homo sapiens
  misc_feature (61)..(62): /note="This region represents a CpG dinucleotide"
  misc_feature (61)..(61): /note="Nucleotide may be methylated to form 5-methylcytosine"
tgagctgagtaactgggtgggtgatgatgtcactgactaggatagggaagctaggacaagcggagttcacggaaacacagcaattcccctctatggggcacgtctcaccctatgtggttaca

SEQ ID NO: 18292 - DNA, 122 bp, Homo sapiens
  misc_feature (61)..(62): /note="This region represents a CpG dinucleotide"
  misc_feature (61)..(61): /note="Nucleotide may be methylated to form 5-methylcytosine"
aggctgcagtgtggttggaagtggcatgcagctgagggaacagtctggaagcttcatttgcgcagcaaactcacttttttttacataggctgtttctggtctagtttgatgagaggtactct

SEQ ID NO: 18293 - DNA, 122 bp, Homo sapiens
  misc_feature (61)..(62): /note="This region represents a CpG dinucleotide"
  misc_feature (61)..(61): /note="Nucleotide may be methylated to form 5-methylcytosine"
ttgcatctcacatgggtgtctctgagaaggcgcagcctgcctgacttcagtccctagttgcgcagccgtgtctgcctgccgggcttgctgagcgcctgcgagttgaagttgagtgtgccttc

SEQ ID NO: 18294 - DNA, 122 bp, Homo sapiens
  misc_feature (61)..(62): /note="This region represents a CpG dinucleotide"
  misc_feature (61)..(61): /note="Nucleotide may be methylated to form 5-methylcytosine"
cgtcaaagtgcttgagccacaacaacaacccctgaacgtgaggctgattaaagagggttacgtgaactgccgaattaagccgtccaaaattggataaagtgattgtgaaatctgttttgagt

SEQ ID NO: 18295 - DNA, 122 bp, Homo sapiens
  misc_feature (61)..(62): /note="This region represents a CpG dinucleotide"
  misc_feature (61)..(61): /note="Nucleotide may be methylated to form 5-methylcytosine"
gccggatgcggaggagtgcaactcggatttgaaggtcaccgagcgcgttaatgaaatccccggaagtgtgtctgccaacaatccttttattttggctttacctgctgttcgcctgatgcctg

SEQ ID NO: 18296 - DNA, 122 bp, Homo sapiens
  misc_feature (61)..(62): /note="This region represents a CpG dinucleotide"
  misc_feature (61)..(61): /note="Nucleotide may be methylated to form 5-methylcytosine"
cttagcatgaggcaagctctgcctaacattttacatgcattaactcacataatctttacacgtactctctgaggtattgtcacctctactatttaaatcatggctttagagaggttatgtca

SEQ ID NO: 18297 - DNA, 122 bp, Homo sapiens
  misc_feature (61)..(62): /note="This region represents a CpG dinucleotide"
  misc_feature (61)..(61): /note="Nucleotide may be methylated to form 5-methylcytosine"
gctgcatgtagaagcatttaaagacatagaatgctgtgtcacacagaagttgtgtttaaccgattagcagattagttaacaagggcacagacatggcttagacagttgatgaagtgactatt

SEQ ID NO: 18298 - DNA, 122 bp, Homo sapiens
  misc_feature (61)..(62): /note="This region represents a CpG dinucleotide"
  misc_feature (61)..(61): /note="Nucleotide may be methylated to form 5-methylcytosine"
gtaagtgcactctatgatgttcccacaatggcaaaatcaccgatgacacatttcttagaacgtatccctgtcattaagcgacacataactctctatatatcacactaggatcactgaaagct

SEQ ID NO: 18299 - DNA, 122 bp, Homo sapiens
  misc_feature (61)..(62): /note="This region represents a CpG dinucleotide"
  misc_feature (61)..(61): /note="Nucleotide may be methylated to form 5-methylcytosine"
tcaagacatcataactttcttcctttaaattgcaacagaacattgcaaaatgcacattatcgtcagatagtaacatgagtaaattagcacatgggaagtgaatgttacaagatctcaaagag

SEQ ID NO: 18300 - DNA, 122 bp, Homo sapiens
  misc_feature (61)..(62): /note="This region represents a CpG dinucleotide"
  misc_feature (61)..(61): /note="Nucleotide may be methylated to form 5-methylcytosine"
cttccgtgggtaattagacatggctactctggtcacagcgtttcagctgcttagctatgccgctaacgtcacgtgtcgaagtttttacttcagtaataagaattgtatagtattcaagaagg

SEQ ID NO: 18301 - DNA, 122 bp, Homo sapiens
  misc_feature (61)..(62): /note="This region represents a CpG dinucleotide"
  misc_feature (61)..(61): /note="Nucleotide may be methylated to form 5-methylcytosine"
gctctactccagattcggtccatcacagggggtgtgtgcacaggctatctccccagagtacggggaattcagcctgtagatggtcccttaatccaggagaatctcaccagttcctagctcag

SEQ ID NO: 18302 - DNA, 122 bp, Homo sapiens
  misc_feature (61)..(62): /note="This region represents a CpG dinucleotide"
  misc_feature (61)..(61): /note="Nucleotide may be methylated to form 5-methylcytosine"
ggggccttttgagcttctctcttcattccccagttgacaccctctccactccagaggtgacggtctgtggcacacaagttttgaaatacagttcccaggcctgtgaagacctggtcagggac

SEQ ID NO: 18303 - DNA, 122 bp, Homo sapiens
  misc_feature (61)..(62): /note="This region represents a CpG dinucleotide"
  misc_feature (61)..(61): /note="Nucleotide may be methylated to form 5-methylcytosine"
tagttctttgtctgccttcctgtggtgctgtctttgggtacatgagttcctctttctatacgttagttgaatcatatttgtaaataatgacatccttggtatctttttcactatgaaggatc

SEQ ID NO: 18304 - DNA, 122 bp, Homo sapiens
  misc_feature (61)..(62): /note="This region represents a CpG dinucleotide"
  misc_feature (61)..(61): /note="Nucleotide may be methylated to form 5-methylcytosine"
catggtaaatgaatgtcatctttgtctcagaaccacagtagcctggttctgctggtggatcgtgctagctgatttgagctgggtttttaactcagttattgaaatggctttgagagcaggac

SEQ ID NO: 18305 - DNA, 122 bp, Homo sapiens
  misc_feature (61)..(62): /note="This region represents a CpG dinucleotide"
  misc_feature (61)..(61): /note="Nucleotide may be methylated to form 5-methylcytosine"
ccagagcctggtcttcctcatccttcctgtgcaccagctccaactgctgctgagggctcccgggacagctacaaggcaccacaatgacctagaggcttcggaaagttgcacaacaggatatg

SEQ ID NO: 18306 - DNA, 122 bp, Homo sapiens
  misc_feature (61)..(62): /note="This region represents a CpG dinucleotide"
  misc_feature (61)..(61): /note="Nucleotide may be methylated to form 5-methylcytosine"
tccatgatgtctggtaggttacaaagagagaaggcattaaatgtgttgttaaccagcaagcgcatgaggtagaaattttggaggattaaggctttattgaacccaccaaatcatactccagg

SEQ ID NO: 18307 - DNA, 122 bp, Homo sapiens
  misc_feature (61)..(62): /note="This region represents a CpG dinucleotide"
  misc_feature (61)..(61): /note="Nucleotide may be methylated to form 5-methylcytosine"
aaagagaatgagagttaacatttgggtgcctcctgcatgctagccattttgtttacacaccgtgcatgagaataggtattaaagaaaaattcctgtggcaatacttgtgaataggtatacaa

SEQ ID NO: 18308 - DNA, 122 bp, Homo sapiens
  misc_feature (61)..(62): /note="This region represents a CpG dinucleotide"
  misc_feature (61)..(61): /note="Nucleotide may be methylated to form 5-methylcytosine"
aggttatatgtttcggttactgtgctctcactcaaaactggcaaacagattttttgtttacgcaaattaaactcaatcttggcaacctgctccatggatgctggtttgggaggactaatgtc

SEQ ID NO: 18309 - DNA, 122 bp, Homo sapiens
  misc_feature (61)..(62): /note="This region represents a CpG dinucleotide"
  misc_feature (61)..(61): /note="Nucleotide may be methylated to form 5-methylcytosine"
gggttggcattagaaaaataatgaacaatatcagcggatattagtgaccgaggaagcaggcgccagtttagctctagacaccacactgagattcacacaattagaagtttacagtcaactgt

SEQ ID NO: 18310 - DNA, 122 bp, Homo sapiens
  misc_feature (61)..(62): /note="This region represents a CpG dinucleotide"
  misc_feature (61)..(61): /note="Nucleotide may be methylated to form 5-methylcytosine"
aacttggcccatgcctgctctgaagctttgacagctgcaggctggattaactgatccattcgtcaaactggttgtcagagccagcatgttttagttatccttcagtttctaacagaaaaatc

SEQ ID NO: 18311 - DNA, 122 bp, Homo sapiens
  misc_feature (61)..(62): /note="This region represents a CpG dinucleotide"
  misc_feature (61)..(61): /note="Nucleotide may be methylated to form 5-methylcytosine"
ccccagttagcctgctctaaaagacaaaaacacaaacaaaaaacccacttgactttagcacgtacagtaatgagtttcaaacatgtctgtgtgcaatctacagtaagaaatagatgtcttct

SEQ ID NO: 18312 - DNA, 122 bp, Homo sapiens
  misc_feature (61)..(62): /note="This region represents a CpG dinucleotide"
  misc_feature (61)..(61): /note="Nucleotide may be methylated to form 5-methylcytosine"
ggataatgcctgagccttctggagtccgtcaggtgtgaagtgagcgctggagctgatgctcgctctgcttcagggcggttttcctggtgtgttcgcagtgtgacaggaaaatcaccttgcct

SEQ ID NO: 18313 - DNA, 122 bp, Homo sapiens
  misc_feature (61)..(62): /note="This region represents a CpG dinucleotide"
  misc_feature (61)..(61): /note="Nucleotide may be methylated to form 5-methylcytosine"
catctttctcccggcttagcttggctctctggccacaggtcaatgactgatgacagttagcgtggccttcaccgtattggggccatggaacggggtagctcctagggtgctggagctcgaac

SEQ ID NO: 18314 - DNA, 122 bp, Homo sapiens
  misc_feature (61)..(62): /note="This region represents a CpG dinucleotide"
  misc_feature (61)..(61): /note="Nucleotide may be methylated to form 5-methylcytosine"
tctatgggaacagattatcttagaggccataacatgttcttttataaaggagccacatagcggactgcagaagagctccaggatcagcttggcccactagtctccatgatcctcttagtatt

SEQ ID NO: 18315 - DNA, 122 bp, Homo sapiens
  misc_feature (61)..(62): /note="This region represents a CpG dinucleotide"
  misc_feature (61)..(61): /note="Nucleotide may be methylated to form 5-methylcytosine"
ggttatctccttggcttaatagcctagttatggctgtttgcttaaacacacatacgcacacgcacacacaagcttaagcaggaagggaaatttatgaggagaatacaaggaacccaagaaca

SEQ ID NO: 18316 - DNA, 122 bp, Homo sapiens
  misc_feature (61)..(62): /note="This region represents a CpG dinucleotide"
  misc_feature (61)..(61): /note="Nucleotide may be methylated to form 5-methylcytosine"
gaggggaggcaccagtgagatggggactttacagcaacttcctcaaaagctaagtgtgcccgacacacactcagagcttctggtcagcttgttagtgctctggacaacccagtgtctccaga

SEQ ID NO: 18317 - DNA, 122 bp, Homo sapiens
  misc_feature (61)..(62): /note="This region represents a CpG dinucleotide"
  misc_feature (61)..(61): /note="Nucleotide may be methylated to form 5-methylcytosine"
tcgatgctattccagcctttcagatggcctgttgtgtgacgctggctgtgtctcaatttccggtttgatcaatggttttacattacttcagccacaaaatctttcatgtgcttgcaacaaat

SEQ ID NO: 18318 - DNA, 122 bp, Homo sapiens
  misc_feature (61)..(62): /note="This region represents a CpG dinucleotide"
  misc_feature (61)..(61): /note="Nucleotide may be methylated to form 5-methylcytosine"
actgattttgccaagaggccaaatggcaatatcttttaccaaagtggcacggctcaaaaccgcaggcgtccaaaggtgaaggtgtacatgcatttgatccttctttctgttatcaccttttc

SEQ ID NO: 18319 - DNA, 122 bp, Homo sapiens
  misc_feature (61)..(62): /note="This region represents a CpG dinucleotide"
  misc_feature (61)..(61): /note="Nucleotide may be methylated to form 5-methylcytosine"
cctcctgcacaacacggttaagtcagaactcagtgatagaactgctggaccagggccaggcgcagtggctcacgcctgtaatcccagcactttgggaggctgaggcgggtggatcacctgag

SEQ ID NO: 18320 - DNA, 122 bp, Homo sapiens
  misc_feature (61)..(62): /note="This region represents a CpG dinucleotide"
  misc_feature (61)..(61): /note="Nucleotide may be methylated to form 5-methylcytosine"
tacaggacctgacggtaatacatttaaatattacatctccaccccaaggtgaacatgagtcgtatgttacacacgtgtctgtttaacacgtgtcagcaccacctttgtaaatatctgcagct

SEQ ID NO: 18321 - DNA, 122 bp, Homo sapiens
  misc_feature (61)..(62): /note="This region represents a CpG dinucleotide"
  misc_feature (61)..(61): /note="Nucleotide may be methylated to form 5-methylcytosine"
cctcactcagaggagaggagcccacccctcccaggacacctggctgagccggaacagcagcgcaggggagctgtgacagcagagagcagcaccaggtcacacaagcagccgccccggaagga

SEQ ID NO: 18322 - DNA, 122 bp, Homo sapiens
  misc_feature (61)..(62): /note="This region represents a CpG dinucleotide"
  misc_feature (61)..(61): /note="Nucleotide may be methylated to form 5-methylcytosine"
gggggaaaagatgtcaggcactcagcgagcgacggctggctattgataaaaccaatctctcgctcaaattcgtaattcatggccttctccttggagccccctcagagaaaaagttccctctt

SEQ ID NO: 18323 - DNA, 122 bp, Homo sapiens
  misc_feature (61)..(62): /note="This region represents a CpG dinucleotide"
  misc_feature (61)..(61): /note="Nucleotide may be methylated to form 5-methylcytosine"
ctcaagtgatccacccacctcagcctcccaaagtgctgggattacaggtgtgagccactacgcctggccctgtgaggtatttttcagcagctttctagactgacaagagcagctggaagcat

SEQ ID NO: 18324 - DNA, 122 bp, Homo sapiens
  misc_feature (61)..(62): /note="This region represents a CpG dinucleotide"
  misc_feature (61)..(61): /note="Nucleotide may be methylated to form 5-methylcytosine"
taattaaggaagtgtgcttgggcaacttccttgtcaaattataaagccaacatgagccatcgtatctttctgatcattcagattatcctcaggacaagcacatgtctctgtttgtatgaatg

SEQ ID NO: 18325 - DNA, 122 bp, Homo sapiens
  misc_feature (61)..(62): /note="This region represents a CpG dinucleotide"
  misc_feature (61)..(61): /note="Nucleotide may be methylated to form 5-methylcytosine"
tgtaagttacctaataccacattataagccaccctcacacttagtggcttaaaacaaccacgctttattattgttcatgcatctgtgggtcagttggacagttctgctcatcagggccagga

SEQ ID NO: 18326 - DNA, 122 bp, Homo sapiens
  misc_feature (61)..(62): /note="This region represents a CpG dinucleotide"
  misc_feature (61)..(61): /note="Nucleotide may be methylated to form 5-methylcytosine"
atgcaggatcacactggattttacagctgactggaactgtctgtcttcagacgcagcctccgtatgactacatttcataacagaagatccttctttttgattttctcttgtgtgatcatctg

SEQ ID NO: 18327 - DNA, 122 bp, Homo sapiens
  misc_feature (61)..(62): /note="This region represents a CpG dinucleotide"
  misc_feature (61)..(61): /note="Nucleotide may be methylated to form 5-methylcytosine"
cagtgattaagaatgtggactttggagtctggcagggctggatttatccctcagctcagccgtgtgaccttggccctctaccagcccagccctccccagcctgtagttcctgccccagcctt

SEQ ID NO: 18328 - DNA, 122 bp, Homo sapiens
  misc_feature (61)..(62): /note="This region represents a CpG dinucleotide"
  misc_feature (61)..(61): /note="Nucleotide may be methylated to form 5-methylcytosine"
tccctgggaggagaaggcccaaggtttcccctccacttcaagatctgggctccgaggctccggagcccccttcactgggccgcgtttcttgtgccacctcttccttaggctccttctgcagg

SEQ ID NO: 18329 - DNA, 122 bp, Homo sapiens
  misc_feature (61)..(62): /note="This region represents a CpG dinucleotide"
  misc_feature (61)..(61): /note="Nucleotide may be methylated to form 5-methylcytosine"
ctcgctgaaaaggaacgctaaatgactgtgttcttttaaggacagaaggaaggacacatacgacttgattagggaggtaagtcgccaaaatggcgcacattgcacaatatgcagaaaacagc

SEQ ID NO: 18330 - DNA, 122 bp, Homo sapiens
  misc_feature (61)..(62): /note="This region represents a CpG dinucleotide"
  misc_feature (61)..(61): /note="Nucleotide may be methylated to form 5-methylcytosine"
tgaatgcctgcagatgagaaccagccgcggtgcccagaaaggaacagtgtgcgggtgaggcgggctctccactttgctgtatcctccccaggcccccacccccagcacgtgggcagtgaggt

SEQ ID NO: 18331 - DNA, 122 bp, Homo sapiens
  misc_feature (61)..(62): /note="This region represents a CpG dinucleotide"
  misc_feature (61)..(61): /note="Nucleotide may be methylated to form 5-methylcytosine"
gctgtggcactgcctacccatcaggggtgtggtgaggtcactggaaagggtgacctaatacgttgctaatgctcagatggggattgctgggagtgttgcctttctcagttgtcacagggcca

SEQ ID NO: 18332 - DNA, 122 bp, Homo sapiens
  misc_feature (61)..(62): /note="This region represents a CpG dinucleotide"
  misc_feature (61)..(61): /note="Nucleotide may be methylated to form 5-methylcytosine"
tctcgctctttcctttggccttttgttatttctgagggctacagatcctggaactgcagccgtgatgggaagaacaggacacagggtgcccagcaggaaatgccaggcactgaatggaaggt

SEQ ID NO: 18333 - DNA, 122 bp, Homo sapiens
  misc_feature (61)..(62): /note="This region represents a CpG dinucleotide"
  misc_feature (61)..(61): /note="Nucleotide may be methylated to form 5-methylcytosine"
tctggaagatcatcgcagaaccagtaacatgacccatcgcctccacaaggcgcggcgtctcgactgttcttagagtgtatttctagtaaaatcagaagctcaccaaagcaacatgcttgaga

SEQ ID NO: 18334 - DNA, 122 bp, Homo sapiens
  misc_feature (61)..(62): /note="This region represents a CpG dinucleotide"
  misc_feature (61)..(61): /note="Nucleotide may be methylated to form 5-methylcytosine"
ctgcaggaaatgaacacagacaccaaatggagatactgtgtctgagattgaagccagcaccgtggaatcagagctgccaggagggagacgtggactctcgaccctgtggccacacttggttc

SEQ ID NO: 18335 - DNA, 122 bp, Homo sapiens
  misc_feature (61)..(62): /note="This region represents a CpG dinucleotide"
  misc_feature (61)..(61): /note="Nucleotide may be methylated to form 5-methylcytosine"
aagaaaataacagcatgtgcactattctatagcacattttcaatatgctatttccagccacgtgctcagcccagcaagctcttcctagcattgtttttctttgcttcatttcctcttaaatg

SEQ ID NO: 18336 - DNA, 122 bp, Homo sapiens
  misc_feature (61)..(62): /note="This region represents a CpG dinucleotide"
  misc_feature (61)..(61): /note="Nucleotide may be methylated to form 5-methylcytosine"
caacatctggtacttttgcaatcatgaatacctggctttaggcttcccagcatgggggatcgttttggtcaagggcacaatgacactccctgggttcggataataggggtgtgaaaggagat

SEQ ID NO: 18337 - DNA, 122 bp, Homo sapiens
  misc_feature (61)..(62): /note="This region represents a CpG dinucleotide"
  misc_feature (61)..(61): /note="Nucleotide may be methylated to form 5-methylcytosine"
attgtactgactcattatcccagaatacgtacaaacattctcagtgatctgagttcctggcgtattttcttttgtattgcaatctcacaaataatgtgtagagaaagaaaggaactgcatgc

SEQ ID NO: 18338 - DNA, 122 bp, Homo sapiens
  misc_feature (61)..(62): /note="This region represents a CpG dinucleotide"
  misc_feature (61)..(61): /note="Nucleotide may be methylated to form 5-methylcytosine"
tatattattataggtctttaaggagtacatttgtaacttcctgttttcatttcctttcaccgcagagaaatcacagaacagaaactctgcttttctctggccaactaatcactacttgagtt

SEQ ID NO: 18339 - DNA, 122 bp, Homo sapiens
  misc_feature (61)..(62): /note="This region represents a CpG dinucleotide"
  misc_feature (61)..(61): /note="Nucleotide may be methylated to form 5-methylcytosine"
aattctaagaatagggcccaagaatctacggtctagggagcttccaggcgattctcattacgccaaagctgggaaaccactgcaatattgggttgttgccagtgaagagtttgctaaactcc

SEQ ID NO: 18340 - DNA, 122 bp, Homo sapiens
  misc_feature (61)..(62): /note="This region represents a CpG dinucleotide"
  misc_feature (61)..(61): /note="Nucleotide may be methylated to form 5-methylcytosine"
tccacaaacgtaatttggttttatcaaaaacttcctgcattcttcttgcttctctcactccgttgcaggctgcagtgaaagcagacttccttgatgagtcggggaagtggatgatatccccg

SEQ ID NO: 18341 - DNA, 122 bp, Homo sapiens
  misc_feature (61)..(62): /note="This region represents a CpG dinucleotide"
  misc_feature (61)..(61): /note="Nucleotide may be methylated to form 5-methylcytosine"
aaccggaaaatacagactaatcagaggattaggtgaaaagtgctatagaattcagaaaagcgatgtcactgcaggatggagttgctaataatctacagcagtgtgagacaactgtaggaatt

SEQ ID NO: 18342 - DNA, 122 bp, Homo sapiens
  misc_feature (61)..(62): /note="This region represents a CpG dinucleotide"
  misc_feature (61)..(61): /note="Nucleotide may be methylated to form 5-methylcytosine"
aaggggccagagaaaactacacctcagtatattgtctcttttccagcaaatgtggctgcccgcttccagggcagttcagcaaccttggctgataaaataggaacctgagcctcatctacagt

SEQ ID NO: 18343 - DNA, 122 bp, Homo sapiens
  misc_feature (61)..(62): /note="This region represents a CpG dinucleotide"
  misc_feature (61)..(61): /note="Nucleotide may be methylated to form 5-methylcytosine"
tgcctcaagtgtgcaggaacaagctgtaatggcaaagtagcatgggctcttcagaactaacgaggttaggctgggcgaggtggctcacacctgtaatcccagtattttgggaggccgaggcg

SEQ ID NO: 18344 - DNA, 122 bp, Homo sapiens
  misc_feature (61)..(62): /note="This region represents a CpG dinucleotide"
  misc_feature (61)..(61): /note="Nucleotide may be methylated to form 5-methylcytosine"
caaaagcttatgttactcatccttttattttgtaaggggaggaaatggagatccagtgtgcgttaatttgttggcctaagattacacagctactaaatggcagagccaggatccggtttttc

SEQ ID NO: 18345 - DNA, 122 bp, Homo sapiens
  misc_feature (61)..(62): /note="This region represents a CpG dinucleotide"
  misc_feature (61)..(61): /note="Nucleotide may be methylated to form 5-methylcytosine"
cctttttggggtcatttcaaaatcagtcaagagaattattagtctgttagacttcctctacggttaggattatttttataggtgttcgaacaggaaaggacatagaataaaatctcctcccc

SEQ ID NO: 18346 - DNA, 122 bp, Homo sapiens
  misc_feature (61)..(62): /note="This region represents a CpG dinucleotide"
  misc_feature (61)..(61): /note="Nucleotide may be methylated to form 5-methylcytosine"
taatcacagtatttctcctgacaggtaattatgaggtacttgcgtgaccccagcaatccccggtgccgcccacatcattgcaagtgcgggtaactcctgaaatgactctaattggactttat

SEQ ID NO: 18347 - DNA, 122 bp, Homo sapiens
  misc_feature (61)..(62): /note="This region represents a CpG dinucleotide"
  misc_feature (61)..(61): /note="Nucleotide may be methylated to form 5-methylcytosine"
catccggaaggatgtcagcaagtgaccctatcgctgtggcttcctcttcctcctctgagacgttgtctttttggagaccttaagggctgctcctggtttctcagtgatgagtgctggctcca

SEQ ID NO: 18348 - DNA, 122 bp, Homo sapiens
  misc_feature (61)..(62): /note="This region represents a CpG dinucleotide"
  misc_feature (61)..(61): /note="Nucleotide may be methylated to form 5-methylcytosine"
cccttccagccgtgatgactgtgcctcagcctgccctttgtcctcgcagctgctgtcacgcgtgtgacacaagagaacactgatgcagccctggccatcaatgggcatcaagccaggcactt

SEQ ID NO: 18349 - DNA, 122 bp, Homo sapiens
  misc_feature (61)..(62): /note="This region represents a CpG dinucleotide"
  misc_feature (61)..(61): /note="Nucleotide may be methylated to form 5-methylcytosine"
cctattcagtgcaacaaacctgagaagagattgtatcagtcttgaaccttttcattttcacgagacagcaaggccaactcaaagcagcttagccaaaaaaggaaggtttttgtctcatgccc

SEQ ID NO: 18350 - DNA, 122 bp, Homo sapiens
  misc_feature (61)..(62): /note="This region represents a CpG dinucleotide"
  misc_feature (61)..(61): /note="Nucleotide may be methylated to form 5-methylcytosine"
aaactccatggctcattagttaaaacctctcttgctcctaacactgttaactccctaggccgtgacttcctccattcttctgcctagcaaatcctaactgtccaactattctaatctacaac

SEQ ID NO: 18351 - DNA, 122 bp, Homo sapiens
  misc_feature (61)..(62): /note="This region represents a CpG dinucleotide"
  misc_feature (61)..(61): /note="Nucleotide may be methylated to form 5-methylcytosine"
ggagtttgaggccatagcggcatacctattactgtatttcactgaatcaggctgtgtttccgtcgaaggcaaagttcagtgcccacttcccttttcttcttcaatacaaaggttgcctctct

SEQ ID NO: 18352 - DNA, 122 bp, Homo sapiens
  misc_feature (61)..(62): /note="This region represents a CpG dinucleotide"
  misc_feature (61)..(61): /note="Nucleotide may be methylated to form 5-methylcytosine"
taatgataatggtggtagtagtagctgcaggagcagcaggattaaaagcaggatcatttacgaggaaaagcccaagagagaaaagtatgagtcagaagtaatgatccctacagttgggagcc

SEQ ID NO: 18353 - DNA, 122 bp, Homo sapiens
  misc_feature (61)..(62): /note="This region represents a CpG dinucleotide"
  misc_feature (61)..(61): /note="Nucleotide may be methylated to form 5-methylcytosine"
tggttaagaacgctgagatttgtggcatttaaatttgctctatgcgcatctgcccaacctcggcaacacaggagtcttgaaaaacaatagccacaatcaacaatgactgtccaagaagttga

SEQ ID NO: 18354 - DNA, 122 bp, Homo sapiens
  misc_feature (61)..(62): /note="This region represents a CpG dinucleotide"
  misc_feature (61)..(61): /note="Nucleotide may be methylated to form 5-methylcytosine"
ggacattgctggctgtcatgtggattaagtgagattgataaaggtaaaacgcacacacaacgcctggctggaaggtacacaatgagtgttcactaaatcagaattggaaacatgctgtcttg

SEQ ID NO: 18355 - DNA, 122 bp, Homo sapiens
  misc_feature (61)..(62): /note="This region represents a CpG dinucleotide"
  misc_feature (61)..(61): /note="Nucleotide may be methylated to form 5-methylcytosine"
gatgctgagcagctccatccagcagagccacaaccggctcctgaagctggaaggagacagcgtctggctccacaccctgctcatcaaccagagtgaccagcaacgtctgcaggcaaggtccc

SEQ ID NO: 18356 - DNA, 122 bp, Homo sapiens
  misc_feature (61)..(62): /note="This region represents a CpG dinucleotide"
  misc_feature (61)..(61): /note="Nucleotide may be methylated to form 5-methylcytosine"
tgaaatttagagcatacagttttagcaattttcctgtgctcccattagggccttcttaagcgtaatacagtagtctctcccccatctgtggtttcattttcgttggttttagttactggagg

SEQ ID NO: 18357 - DNA, 122 bp, Homo sapiens
  misc_feature (61)..(62): /note="This region represents a CpG dinucleotide"
  misc_feature (61)..(61): /note="Nucleotide may be methylated to form 5-methylcytosine"
ttcacgtgtcctagaatcttagaattctgagttggaataagcctatcaaaatgcagaccacgcatcggacggttgggcgggtcggggaggggaggtccacaggcctgggctcaaatcctgac

SEQ ID NO: 18358 - DNA, 122 bp, Homo sapiens
  misc_feature (61)..(62): /note="This region represents a CpG dinucleotide"
  misc_feature (61)..(61): /note="Nucleotide may be methylated to form 5-methylcytosine"
ttaacatcaacacagaccttaagactgatagaacagcctctttaagtctcacagactatccggtagtgtgataatgatgagaaacatttgcagtctattctctgaagcctgctacaggctcc

SEQ ID NO: 18359 - DNA, 122 bp, Homo sapiens
  misc_feature (61)..(62): /note="This region represents a CpG dinucleotide"
  misc_feature (61)..(61): /note="Nucleotide may be methylated to form 5-methylcytosine"
ttggtaaatggtgcaggtacacttgaaaagaatgtttattcttctgttgttggatgaagtcgtctgtaaatgtcaattagatcaagttggatgatacttctgtttaaaggttgtatatccat

SEQ ID NO: 18360 - DNA, 122 bp, Homo sapiens
  misc_feature (61)..(62): /note="This region represents a CpG dinucleotide"
  misc_feature (61)..(61): /note="Nucleotide may be methylated to form 5-methylcytosine"
gaggaattggcctcatcagatcggttggtgatttcccgcagcagtgcccagcagcctgagcgctcaacctgagaagatgaacagtgagtcattcagatatgatgaaagagcacaggaaaaag

SEQ ID NO: 18361 - DNA, 122 bp, Homo sapiens
  misc_feature (61)..(62): /note="This region represents a CpG dinucleotide"
  misc_feature (61)..(61): /note="Nucleotide may be methylated to form 5-methylcytosine"
caggcccttgtgcactgctgtatcacttaatcctccttcaccaggaggcagagagggtagcgtttgcagatggggacacaagctctggagaggttaatgacttgccggagatgggagttcca

SEQ ID NO: 18362 - DNA, 122 bp, Homo sapiens
  misc_feature (61)..(62): /note="This region represents a CpG dinucleotide"
  misc_feature (61)..(61): /note="Nucleotide may be methylated to form 5-methylcytosine"
attcctgcgtcaaaaatccagcttgtgggctgaaacctctcaatcctgacaaataagtctcgcaactacatctgagataattacatttagtggcaattcctgctaggcaattaattgcttga

SEQ ID NO: 18363 - DNA, 122 bp, Homo sapiens
  misc_feature (61)..(62): /note="This region represents a CpG dinucleotide"
  misc_feature (61)..(61): /note="Nucleotide may be methylated to form 5-methylcytosine"
tgttttctctttacttgaggccaacacataacaatgaaagcactgggctactggtgctttcggattgtgaaagtcaggtggagcctgtttgcactctgagtgcactcattcaagaggtcagt

SEQ ID NO: 18364 - DNA, 122 bp, Homo sapiens
  misc_feature (61)..(62): /note="This region represents a CpG dinucleotide"
  misc_feature (61)..(61): /note="Nucleotide may be methylated to form 5-methylcytosine"
ttctctctttgcatcactgcccacagcagtggggcaggccaggccccattctggtggccacgttcaggctctcaaagcccagcctggggcagagtcccaaaccacctatggcctaggatgga

SEQ ID NO: 18365 - DNA, 122 bp, Homo sapiens
  misc_feature (61)..(62): /note="This region represents a CpG dinucleotide"
  misc_feature (61)..(61): /note="Nucleotide may be methylated to form 5-methylcytosine"
gagcccatttccctgcagcacagttacatcatcatcaagagaatgcattccccaaatccacggcttcctaatccattagcacaacaggctggtggagagcttggctttctcagtcacatggg

SEQ ID NO: 18366 - DNA, 122 bp, Homo sapiens
  misc_feature (61)..(62): /note="This region represents a CpG dinucleotide"
  misc_feature (61)..(61): /note="Nucleotide may be methylated to form 5-methylcytosine"
gaaaatagtttctactcggggccaccgtgtgagcaaatgtgtgagtgtgtgcaaagcgcccgggccaggccctggcacgcatcggcgcccatgttggctggtgtcaggggtggtggcggtgg

SEQ ID NO: 18367 - DNA, 122 bp, Homo sapiens
  misc_feature (61)..(62): /note="This region represents a CpG dinucleotide"
  misc_feature (61)..(61): /note="Nucleotide may be methylated to form 5-methylcytosine"
caaatggctagtcaaccatatccttagtgttctctcctgagcacacttcctcattttttgcgatatggacaggctaaggatttcccaaatttttaggtttttgttcctttttgcttaacaat

SEQ ID NO: 18368 - DNA, 122 bp, Homo sapiens
  misc_feature (61)..(62): /note="This region represents a CpG dinucleotide"
  misc_feature (61)..(61): /note="Nucleotide may be methylated to form 5-methylcytosine"
ggcaccactgagctccggatccaggtaaccgacgccaatgataatcccccggtattcaaccgagacgtgtacagagtcagccttcgggaaaacgtgccaccaggcaccactgtgttgcaagt

SEQ ID NO: 18369 - DNA, 122 bp, Homo sapiens
  misc_feature (61)..(62): /note="This region represents a CpG dinucleotide"
  misc_feature (61)..(61): /note="Nucleotide may be methylated to form 5-methylcytosine"
tcacaggacctgaccggctaatctgtgaaggatgactcattcatcaatgctgaagatgaccgcagcactgagctgcagctctgtcttccaccaggcttcctttgcacaacgtcacccaattt

SEQ ID NO: 18370 - DNA, 122 bp, Homo sapiens
  misc_feature (61)..(62): /note="This region represents a CpG dinucleotide"
  misc_feature (61)..(61): /note="Nucleotide may be methylated to form 5-methylcytosine"
cctctagcatctacagggcttggcatacacgtgaaatgcatgttgagtgatgaacgggagcgcacaggactcttaagaaccgagaccgtccccacagccaacgtatgaagaaatcccatgtt

SEQ ID NO: 18371 - DNA, 122 bp, Homo sapiens
  misc_feature (61)..(62): /note="This region represents a CpG dinucleotide"
  misc_feature (61)..(61): /note="Nucleotide may be methylated to form 5-methylcytosine"
ttgagttttgtgctatgcttttcagcttccaggggacccaagtgttcattccaaagggatcgcttgaaaaatataatctcaggatttacaaatcaaacccaaaatacaaggataagcaggcc

SEQ ID NO: 18372 - DNA, 122 bp, Homo sapiens
  misc_feature (61)..(62): /note="This region represents a CpG dinucleotide"
  misc_feature (61)..(61): /note="Nucleotide may be methylated to form 5-methylcytosine"
tgcccagttctttctcatgcaaatccacgtgagtcctggttcaaggcaagctcagcttatcgtgcaaatcatcctctgtgactcagaagggaacgtgtaatggggctaacgctaagttttaa

SEQ ID NO: 18373 - DNA, 122 bp, Homo sapiens
  misc_feature (61)..(62): /note="This region represents a CpG dinucleotide"
  misc_feature (61)..(61): /note="Nucleotide may be methylated to form 5-methylcytosine"
ttccttggttataaatagccttagtgtgttggctttctcacatgccatgtgtaatagtaacgaacaggtcacgtgggcagactcagggcctcctggttagccagggtgatgcaggtaatggt

SEQ ID NO: 18374 - DNA, 122 bp, Homo sapiens
  misc_feature (61)..(62): /note="This region represents a CpG dinucleotide"
  misc_feature (61)..(61): /note="Nucleotide may be methylated to form 5-methylcytosine"
acataacccatgaccagaacattaaaaggctgtaaacaaacaattgcttcaatataaaaacgcatacctcgtgaatttggaaacatgtcaggttgatagaaaagtgaactcgggtagaacct

SEQ ID NO: 18375 - DNA, 122 bp, Homo sapiens
  misc_feature (61)..(62): /note="This region represents a CpG dinucleotide"
  misc_feature (61)..(61): /note="Nucleotide may be methylated to form 5-methylcytosine"
agttgtcagttaatacagtgatggtctaagctttgcatctaagcttgtgcccagaggttccgtgcctagaagacaggcaggctggcatgaagcacatggttaaatattctggttccatgtgt

SEQ ID NO: 18376 - DNA, 122 bp, Homo sapiens
  misc_feature (61)..(62): /note="This region represents a CpG dinucleotide"
  misc_feature (61)..(61): /note="Nucleotide may be methylated to form 5-methylcytosine"
caatgcagagggcgtgtttcctctccctggctgtcccttcaagcagggggaggtcctagccgtagcatccaccttctgctgcggccagaaaagagccagtgaaaaccactcagaacttccct

SEQ ID NO: 18377 - DNA, 122 bp, Homo sapiens
  misc_feature (61)..(62): /note="This region represents a CpG dinucleotide"
  misc_feature (61)..(61): /note="Nucleotide may be methylated to form 5-methylcytosine"
caagtcacatggcatgagctgggcattaggcaaggacatggcatcccaggcttcacaggtcggggacattctgtccacaaaggccaaagagggcaactacaaaggaaaagtcttatctaaga

SEQ ID NO: 18378 - DNA, 122 bp, Homo sapiens
  misc_feature (61)..(62): /note="This region represents a CpG dinucleotide"
  misc_feature (61)..(61): /note="Nucleotide may be methylated to form 5-methylcytosine"
gttctaaccaacccccttcttgggctgtagccagttatttcattggctggatggccaaatcgcgctgtgggtaggtcaatcaatcctgcaacatttggcaattatgacacctgattccactc

SEQ ID NO: 18379 - DNA, 122 bp, Homo sapiens
  misc_feature (61)..(62): /note="This region represents a CpG dinucleotide"
  misc_feature (61)..(61): /note="Nucleotide may be methylated to form 5-methylcytosine"
tgtacagtgtgtcattctgtggggactttccatcttgtaattcagatttgggttcatagacgttgttgacctttgttgcatcattccctagagaaggacttcattcactgaggagcctacca

SEQ ID NO: 18380 - DNA, 122 bp, Homo sapiens
  misc_feature (61)..(62): /note="This region represents a CpG dinucleotide"
  misc_feature (61)..(61): /note="Nucleotide may be methylated to form 5-methylcytosine"
tcactagccacctcagccattcacacccagtgggctaaacaaggatacatttataggacacgtgtcactcactgggcagggtggggctggggcagagaggggtatcatttattgtgttaacg

SEQ ID NO: 18381 - DNA, 122 bp, Homo sapiens
  misc_feature (61)..(62): /note="This region represents a CpG dinucleotide"
  misc_feature (61)..(61): /note="Nucleotide may be methylated to form 5-methylcytosine"
aagctgctaatcttaagaaagaaagaggaaactaatatttcttacatttcagtaatcacacggcagcgtgctgtgtgctttatgttcatatgtaacaccagctctgcaagggagataccata

SEQ ID NO: 18382 - DNA, 122 bp, Homo sapiens
  misc_feature (61)..(62): /note="This region represents a CpG dinucleotide"
  misc_feature (61)..(61): /note="Nucleotide may be methylated to form 5-methylcytosine"
tcttttggggttggagaataaagttctttacctcatcagttagactctatctaaggtacacgagggcttgctagtctcctaagttagtctgctaataaatgttaaccctaataactgaaatt

SEQ ID NO: 18383 - DNA, 122 bp, Homo sapiens
  misc_feature (61)..(62): /note="This region represents a CpG dinucleotide"
  misc_feature (61)..(61): /note="Nucleotide may be methylated to form 5-methylcytosine"
tcatcccagccccttctaaacctcagttgctccagggtacaaaacaggcatcaacccaatcgcaccgggctggcgctggtggaaggtttaaagagaaggtgaccattccagcggctcgtgag

SEQ ID NO: 18384 - DNA, 122 bp, Homo sapiens
  misc_feature (61)..(62): /note="This region represents a CpG dinucleotide"
  misc_feature (61)..(61): /note="Nucleotide may be methylated to form 5-methylcytosine"
agtgcctgacggccgggacagagactgcagagaagcagcaacgggcccaggagcgccaagcgtggcccgcagccaccagaggctggagagaggcctgggaaggattctccgtgagagactag

SEQ ID NO: 18385 - DNA, 122 bp, Homo sapiens
  misc_feature (61)..(62): /note="This region represents a CpG dinucleotide"
  misc_feature (61)..(61): /note="Nucleotide may be methylated to form 5-methylcytosine"
gctctggtcagccagaagtttcagcataagccagggctcccaaggcacagaagcctgtcacgtgcatttagtgaagctgtaactacacaatgttctcaaatactcctgaagaggtgacagat

SEQ ID NO: 18386 - DNA, 122 bp, Homo sapiens
  misc_feature (61)..(62): /note="This region represents a CpG dinucleotide"
  misc_feature (61)..(61): /note="Nucleotide may be methylated to form 5-methylcytosine"
agtagtaaaaatgaaacaaactagtgtggttctataaatgtctaaaacaatttgactatacgaaaaatagaagcctaggataatagggcaggaggtagagggagtcattcagaaatatgcga

SEQ ID NO: 18387 - DNA, 122 bp, Homo sapiens
  misc_feature (61)..(62): /note="This region represents a CpG dinucleotide"
  misc_feature (61)..(61): /note="Nucleotide may be methylated to form 5-methylcytosine"
gtcagttttatttttttcttacataaaaatatacttaagcagccagtatttcctcacacacgctgaagttaataattcacaaaccaactaacattcatcaaggatcagaaaatttaaaggtt

SEQ ID NO: 18388 - DNA, 122 bp, Homo sapiens
  misc_feature (61)..(62): /note="This region represents a CpG dinucleotide"
  misc_feature (61)..(61): /note="Nucleotide may be methylated to form 5-methylcytosine"
ttaattcatccttatctcagccagctgattgcatttcttgtcagatctgtttccaggcaacgtctggtactaatgggtgagagtccagtttattcttccatgccctgccacctctgtgcaag

SEQ ID NO: 18389 - DNA, 122 bp, Homo sapiens
  misc_feature (61)..(62): /note="This region represents a CpG dinucleotide"
  misc_feature (61)..(61): /note="Nucleotide may be methylated to form 5-methylcytosine"
tgagaactggcatttatggggcacggactgtgcaccaggcactgtgctgaatgctttctgcgcatgattttgtttgacactcacaacatctgtgtgaggtggggcctgtcactctcccagtt

SEQ ID NO: 18390 - DNA, 122 bp, Homo sapiens
  misc_feature (61)..(62): /note="This region represents a CpG dinucleotide"
  misc_feature (61)..(61): /note="Nucleotide may be methylated to form 5-methylcytosine"
cacactgtacctgggagaatgagcacaggagccagtgtggcttagcaggtggctcagccacgcagcgagcatcagcggaaccagggagggcccaggagcttgctgagctgctgcccctggca

SEQ ID NO: 18391 - DNA, 122 bp, Homo sapiens
  misc_feature (61)..(62): /note="This region represents a CpG dinucleotide"
  misc_feature (61)..(61): /note="Nucleotide may be methylated to form 5-methylcytosine"
gagaaattcgatctgaatatctatgaagattcttggctccacagatcagccgggaaccaacgcagaggttacttggctagagtggacgttaccaaatgtacaacgaaggatgacagaaataa

SEQ ID NO: 18392 - DNA, 122 bp, Homo sapiens
  misc_feature (61)..(62): /note="This region represents a CpG dinucleotide"
  misc_feature (61)..(61): /note="Nucleotide may be methylated to form 5-methylcytosine"
ccagggctttcctggacacattgcaatcctaacctcagggtaaaagccatgtccctgttccgccacagcatggcaaaatcaattccagttggattaaaaagttacatgtttttaaaaaaatg

SEQ ID NO: 18393 - DNA, 122 bp, Homo sapiens
  misc_feature (61)..(62): /note="This region represents a CpG dinucleotide"
  misc_feature (61)..(61): /note="Nucleotide may be methylated to form 5-methylcytosine"
gggcagcaagctctctgaggccaacccttccacctctcccattggtggccagcactgtagcggggtgagctgtgctctatagaggcttctgaaccactgatctgcacactcctagcgaggca

SEQ ID NO: 18394 - DNA, 122 bp, Homo sapiens
  misc_feature (61)..(62): /note="This region represents a CpG dinucleotide"
  misc_feature (61)..(61): /note="Nucleotide may be methylated to form 5-methylcytosine"
aacagtaccttaatttggcctgtatttattggacttggtgttctttttgctgtgagaagacggtgaaggtgattcttgaatgtttgttttctgtgttgcatcatgtttgtacaacacggtaa

SEQ ID NO: 18395 - DNA, 122 bp, Homo sapiens
  misc_feature (61)..(62): /note="This region represents a CpG dinucleotide"
  misc_feature (61)..(61): /note="Nucleotide may be methylated to form 5-methylcytosine"
caccatgaagcaaagtgataacacaaggagaatgcagctctgtcctggaaggagggttgacgactgacagatgatacatgttgagtcaatggaatgaggcagttgcaggctattgttggaac

SEQ ID NO: 18396 - DNA, 122 bp, Homo sapiens
  misc_feature (61)..(62): /note="This region represents a CpG dinucleotide"
  misc_feature (61)..(61): /note="Nucleotide may be methylated to form 5-methylcytosine"
atgcctttgaaaggcaagaagtctattttcccttcctgtttttcccttcttcagctgaaacgcaaacgtggtggtgaatcatcttgaattaagctgaaaagggtaacatggaagagatggca

SEQ ID NO: 18397 - DNA, 122 bp, Homo sapiens
  misc_feature (61)..(62): /note="This region represents a CpG dinucleotide"
  misc_feature (61)..(61): /note="Nucleotide may be methylated to form 5-methylcytosine"
ccctcgtggccctaggcaattttattgcaacagcaatgggaagccttttgaagactttcacgcagtggcacagcctgatctgatttcctgttgagacctagttcatttgcctaggacttcat

SEQ ID NO: 18398 - DNA, 122 bp, Homo sapiens
  misc_feature (61)..(62): /note="This region represents a CpG dinucleotide"
  misc_feature (61)..(61): /note="Nucleotide may be methylated to form 5-methylcytosine"
caggaaggtcttgtcttacaaaactcaaatgcatgtgagatgaatagcactgtttatatacgtgtcatggcttccactggttttgcaagacctcatttgatgatctaagtacatgtgatcat

SEQ ID NO: 18399 - DNA, 122 bp, Homo sapiens
  misc_feature (61)..(62): /note="This region represents a CpG dinucleotide"
  misc_feature (61)..(61): /note="Nucleotide may be methylated to form 5-methylcytosine"
atcaggcctcaaactccttatccgcagttcgttctcaaaaaacagccaacgcggcagctccgggtgaccaggattgcaacaccaaatgtgtttgttccccatgtttgtgaaatacctcagag

SEQ ID NO: 18400 - DNA, 122 bp, Homo sapiens
  misc_feature (61)..(62): /note="This region represents a CpG dinucleotide"
  misc_feature (61)..(61): /note="Nucleotide may be methylated to form 5-methylcytosine"
ggggaacccgcaggggttgggggcaggtttgtctgtcccagagccccaggctggtgatgacgcctcctggggataaacctcatctctctgttgtttaccccatgtgcggtgactttgtcatt

SEQ ID NO: 18401 - DNA, 122 bp, Homo sapiens
  misc_feature (61)..(62): /note="This region represents a CpG dinucleotide"
  misc_feature (61)..(61): /note="Nucleotide may be methylated to form 5-methylcytosine"
ctttttaagaggagggggaaacatgaaattttcctcacctagtctccacacacactatgacgtccattctgagtagttgtacaaagtactggcatattatagaggaacagaaaatagacaca

SEQ ID NO: 18402 - DNA, 122 bp, Homo sapiens
  misc_feature (61)..(62): /note="This region represents a CpG dinucleotide"
  misc_feature (61)..(61): /note="Nucleotide may be methylated to form 5-methylcytosine"
gaatgttgtcataattgcagtggacagggtgagttcaccacgagtcatgttctcagaagccgtgggcgttttgctttaggaggcaataacaagaactcttctgtgtggacttggacacagtc

SEQ ID NO: 18403 - DNA, 122 bp, Homo sapiens
  misc_feature (61)..(62): /note="This region represents a CpG dinucleotide"
  misc_feature (61)..(61): /note="Nucleotide may be methylated to form 5-methylcytosine"
atgttagttcatttttcttacttattgttttcccttgatttttaacttactaaagtacagcgagatgactaggttagtgaagaaaatgcattcgatggccagtctgcattccagcagccaca

SEQ ID NO: 18404 - DNA, 122 bp, Homo sapiens
  misc_feature (61)..(62): /note="This region represents a CpG dinucleotide"
  misc_feature (61)..(61): /note="Nucleotide may be methylated to form 5-methylcytosine"
gctaaagcaactctatcttggaagctatttcaccatgttggcttcccatcaacccctattcgaggaaggcctctaagatttccagtttatgtattgatcctagtgtaagaacatgtattaat

SEQ ID NO: 18405 - DNA, 122 bp, Homo sapiens
  misc_feature (61)..(62): /note="This region represents a CpG dinucleotide"
  misc_feature (61)..(61): /note="Nucleotide may be methylated to form 5-methylcytosine"
ggaagtctcactttaggagcctggctcagaagttccgcaacttcaactggtgtcatgtgacgtgcttggcagtcaccacccccatccttacagcaaagaatagcagggcagcctttcatggg

SEQ ID NO: 18406 - DNA, 122 bp, Homo sapiens
  misc_feature (61)..(62): /note="This region represents a CpG dinucleotide"
  misc_feature (61)..(61): /note="Nucleotide may be methylated to form 5-methylcytosine"
gcaaatgcaatagaccatctgtaaaaggaagctgttgatctgacttccagagcatgctggcgacaaggttgaagggacaggacagagctcctactactaaaatgaatggcaatgtcattttc

SEQ ID NO: 18407 - DNA, 122 bp, Homo sapiens
  misc_feature (61)..(62): /note="This region represents a CpG dinucleotide"
  misc_feature (61)..(61): /note="Nucleotide may be methylated to form 5-methylcytosine"
tgtttcagatgaagaactggaagacaaccccaaccagagtgacctgattgagcaggcagccgagatgctttatggattgatccacgcccgctacatccttaccaaccgtggcatcgcccaga

SEQ ID NO: 18408 - DNA, 122 bp, Homo sapiens
  misc_feature (61)..(62): /note="This region represents a CpG dinucleotide"
  misc_feature (61)..(61): /note="Nucleotide may be methylated to form 5-methylcytosine"
tgatgggactcttctgattacctttctctccatagtcaactttggatagggtgctcaggacgttactttttagtttaataaacctttaggtttagttaaccatcttcattttttattaagat

SEQ ID NO: 18409 - DNA, 122 bp, Homo sapiens
  misc_feature (61)..(62): /note="This region represents a CpG dinucleotide"
  misc_feature (61)..(61): /note="Nucleotide may be methylated to form 5-methylcytosine"
ttagttcgcttcagcagctatagatttaccttctgatgtagttaaacaacattttagatacgtgctgaacagcagtcttggacacctcattaatatgtagtaaggaagagagcaaaccaaca

SEQ ID NO: 18410 - DNA, 122 bp, Homo sapiens
  misc_feature (61)..(62): /note="This region represents a CpG dinucleotide"
  misc_feature (61)..(61): /note="Nucleotide may be methylated to form 5-methylcytosine"
gtcatcttgggcaggtcactctgtccctcagtttccacctttgcaatttgggactagtaacgccatccaactcatagggttgttatgagttgtaatgaggattcagtggatttaacccattt

SEQ ID NO: 18411 - DNA, 122 bp, Homo sapiens
  misc_feature (61)..(62): /note="This region represents a CpG dinucleotide"
  misc_feature (61)..(61): /note="Nucleotide may be methylated to form 5-methylcytosine"
tttgcctgcttatctagtatcttttactgctaacacgaatttatgttcatcttttctctccgtcacccttaagtcctttgctggctaatccttccaccccccaccatcattgctttttccaa

SEQ ID NO: 18412 - DNA, 122 bp, Homo sapiens
  misc_feature (61)..(62): /note="This region represents a CpG dinucleotide"
  misc_feature (61)..(61): /note="Nucleotide may be methylated to form 5-methylcytosine"
cagcatcataagggcgtcagaccaagcagggcctcatataaatctgagcttcattctgagcgtattgggaagcccagcaggtttaagcagtggcaagggtggggacggggtgggcaggtcgt

SEQ ID NO: 18413 - DNA, 122 bp, Homo sapiens
  misc_feature (61)..(62): /note="This region represents a CpG dinucleotide"
  misc_feature (61)..(61): /note="Nucleotide may be methylated to form 5-methylcytosine"
gtggttggtcctgctctgcaaagcctttggagacagtcacctcctgactattctctgagccgttaacctggaggtatggttcttgcctttgggtccaaaacagcagccagagctccagccat

SEQ ID NO: 18414 - DNA, 122 bp, Homo sapiens
  misc_feature (61)..(62): /note="This region represents a CpG dinucleotide"
  misc_feature (61)..(61): /note="Nucleotide may be methylated to form 5-methylcytosine"
ggaattgagaatgaacttcctggtactgtaatgaaaataaggtctgctcaacacagtaaacgtttcctctcttctttaaaactgcgcagtcatttggcctttgtgtttaggaagggcagatt

SEQ ID NO: 18415 - DNA, 122 bp, Homo sapiens
  misc_feature (61)..(62): /note="This region represents a CpG dinucleotide"
  misc_feature (61)..(61): /note="Nucleotide may be methylated to form 5-methylcytosine"
agtaaggcactgtccttgcccttaaggaatttaaagtctggtagacgagagccatagacacggacaatgataatacaacctgctaagtgctaggacacttagcaggttgtattatatccatc

SEQ ID NO: 18416 - DNA, 122 bp, Homo sapiens
  misc_feature (61)..(62): /note="This region represents a CpG dinucleotide"
  misc_feature (61)..(61): /note="Nucleotide may be methylated to form 5-methylcytosine"
aggaggagactgctgacccagagcgcattacctaaaatctggtacccagagtgcacccttcgccctcgttggagttctctcctctctgccaagctttgctccgtgccagaggtgtgctccat

SEQ ID NO: 18417 - DNA, 122 bp, Homo sapiens
  misc_feature (61)..(62): /note="This region represents a CpG dinucleotide"
  misc_feature (61)..(61): /note="Nucleotide may be methylated to form 5-methylcytosine"
cctccatgccctgcctggactgagccttcagatcctgtggatgtcagttcctaactctgtcgagatagtgcccccttctctcaggacttccacagccccagcaaagccctggagatggagga

SEQ ID NO: 18418 - DNA, 122 bp, Homo sapiens
  misc_feature (61)..(62): /note="This region represents a CpG dinucleotide"
  misc_feature (61)..(61): /note="Nucleotide may be methylated to form 5-methylcytosine"
tttcccaggccggcgcgctgcttgctgggaaatttagtttgggttcagatcgctaggggccggccaaagtgcgtaaaaactaccttcccatcaaccactgtggcaccggcgggagggggcgg

SEQ ID NO: 18419 - DNA, 122 bp, Homo sapiens
  misc_feature (61)..(62): /note="This region represents a CpG dinucleotide"
  misc_feature (61)..(61): /note="Nucleotide may be methylated to form 5-methylcytosine"
ttgtgcttcttatgactcagtcggccagcctgttagcattgatttgttcttggtggacaccgttgggcagaaggccctgctaaccacagaagcgagggtgaagtgtgcgctcaccaccatca

SEQ ID NO: 18420 - DNA, 122 bp, Homo sapiens
  misc_feature (61)..(62): /note="This region represents a CpG dinucleotide"
  misc_feature (61)..(61): /note="Nucleotide may be methylated to form 5-methylcytosine"
caggacttccccggagggctgcggcgtacaggctggcgcagaacgaaccttggcctgggccgtatctccggctcccagcctcagcgcggccctcccgagttaaggtgggcccggcccgcgcc

SEQ ID NO: 18421 - DNA, 122 bp, Homo sapiens
  misc_feature (61)..(62): /note="This region represents a CpG dinucleotide"
  misc_feature (61)..(61): /note="Nucleotide may be methylated to form 5-methylcytosine"
ggtgatccgcctgtctcggcctcccaaagtgctaggattacaggcatgagccaccatgcccggccctagtgggtgcaaccttaagcaagacagaggatatttactttcctatatcgatatga

SEQ ID NO: 18422 - DNA, 122 bp, Homo sapiens
  misc_feature (61)..(62): /note="This region represents a CpG dinucleotide"
  misc_feature (61)..(61): /note="Nucleotide may be methylated to form 5-methylcytosine"
attaacttggcaaagccatacagcattgagcttgggaactaggatccaaggccaggggtgcgtaacttttcagtccacaattccggcctttacaccaggcagtattccaaagttaccacatc

SEQ ID NO: 18423 - DNA, 122 bp, Homo sapiens
  misc_feature (61)..(62): /note="This region represents a CpG dinucleotide"
  misc_feature (61)..(61): /note="Nucleotide may be methylated to form 5-methylcytosine"
tacaggaattattcagctccattataatcttacaggattactgtcctatatgcagtttgtcgtttactgcaatatcattatacagcacatgactatattgtctatggtaactgggctttatg

SEQ ID NO: 18424 - DNA, 122 bp, Homo sapiens
  misc_feature (61)..(62): /note="This region represents a CpG dinucleotide"
  misc_feature (61)..(61): /note="Nucleotide may be methylated to form 5-methylcytosine"
aaattatcctttgtcctcttggccatagctcttgctttcttgtcatgtttgagctcaattcgctttttcactagttcctcttttctccttttctcctctaaggctaaaagggacaaaacaag

SEQ ID NO: 18425 - DNA, 122 bp, Homo sapiens
  misc_feature (61)..(62): /note="This region represents a CpG dinucleotide"
  misc_feature (61)..(61): /note="Nucleotide may be methylated to form 5-methylcytosine"
ggtaaattacattctctcaagaacgaatatttctatgctacttagaatcatgtcttgcttcgtattttaatcttctaccctattgcaagggacaggtgactttctatatttacctcagaaag

SEQ ID NO: 18426 - DNA, 122 bp, Homo sapiens
  misc_feature (61)..(62): /note="This region represents a CpG dinucleotide"
  misc_feature (61)..(61): /note="Nucleotide may be methylated to form 5-methylcytosine"
ttgacttgtttcaggcactcattttatttgacccttgcgagtagcaacgtctgtttcttgcgtacttttccacctgtgtttaaaaaacccccaagacgtgcaaaagttgggcttcgccaata

SEQ ID NO: 18427 - DNA, 122 bp, Homo sapiens
  misc_feature (61)..(62): /note="This region represents a CpG dinucleotide"
  misc_feature (61)..(61): /note="Nucleotide may be methylated to form 5-methylcytosine"
taagacaggggtcaggagggcccgtcgcagaggagatattttaaacctctgcgtggctgacgtgagcattccagacagaagagcaggtgccaagtctccgaggcagagacaatgccagtgta

SEQ ID NO: 18428 - DNA, 122 bp, Homo sapiens
  misc_feature (61)..(62): /note="This region represents a CpG dinucleotide"
  misc_feature (61)..(61): /note="Nucleotide may be methylated to form 5-methylcytosine"
agaacccaaccagaaaaccacaggagtaaatgatgttgcaaagcccaggtcctgtcttcacggaaatcttaagtattgtggttaatgccaggcagagtctatgtaacgattttaaatggcct

SEQ ID NO: 18429 - DNA, 122 bp, Homo sapiens
  misc_feature (61)..(62): /note="This region represents a CpG dinucleotide"
  misc_feature (61)..(61): /note="Nucleotide may be methylated to form 5-methylcytosine"
ctactaaaattgtgagtcagaagccaaactaattttggctactaaattagttacttccctcgggcctaccaatcttcatatgtataccatggcttattttgacttagctggttaatttatcc

SEQ ID NO: 18430 - DNA, 122 bp, Homo sapiens
  misc_feature (61)..(62): /note="This region represents a CpG dinucleotide"
  misc_feature (61)..(61): /note="Nucleotide may be methylated to form 5-methylcytosine"
ggagcaccacggcaggaaggaccgggatcttcatggcgtcaagtttggggtgctctgaggcggggcctcagtgcttgctctttatattgccaaggaggcagatgagcacagaaatggggtcc

SEQ ID NO: 18431 - DNA, 122 bp, Homo sapiens
  misc_feature (61)..(62): /note="This region represents a CpG dinucleotide"
  misc_feature (61)..(61): /note="Nucleotide may be methylated to form 5-methylcytosine"
tttctgcaggaactagagactgggcagagggtgagtgctggctggctctcggggtgtgcacgcaccctcagctgatacattttggaaagtgagttcacctgctctgacacaccctttctacc

SEQ ID NO: 18432 - DNA, 122 bp, Homo sapiens
  misc_feature (61)..(62): /note="This region represents a CpG dinucleotide"
  misc_feature (61)..(61): /note="Nucleotide may be methylated to form 5-methylcytosine"
tatgcgagctccaagtttgaactgtagaaatttctgctcccacatatcttccaaatcttgcgccagcaatatatcctgttcatcttcttcatcatgaaggtcagctttcttctttgccagtc

SEQ ID NO: 18433 - DNA, 122 bp, Homo sapiens
  misc_feature (61)..(62): /note="This region represents a CpG dinucleotide"
  misc_feature (61)..(61): /note="Nucleotide may be methylated to form 5-methylcytosine"
agcaatgcttgaggttgggctgctaacaagctcactcaactagtgtttcctgacggccaacgtcagaataattccatctccatgagaagtacagaaagaaccacaaaccaaacctccaaatt

SEQ ID NO: 18434 - DNA, 122 bp, Homo sapiens
  misc_feature (61)..(62): /note="This region represents a CpG dinucleotide"
  misc_feature (61)..(61): /note="Nucleotide may be methylated to form 5-methylcytosine"
tcattgaaagaataacccaaatgaattagtggacattaggctacagattaacaattttcacgcctggcaggtctagcatttagtagaaacaactcaactaatattcgaaggcatatgtaaac

SEQ ID NO: 18435 - DNA, 122 bp, Homo sapiens
  misc_feature (61)..(62): /note="This region represents a CpG dinucleotide"
  misc_feature (61)..(61): /note="Nucleotide may be methylated to form 5-methylcytosine"
tactcgatgccctgcttggggctgctcagtgtggccagtggggatgtggtatcagctggacggaggcctggctactcctgatctgaggtaccttgacattgaccagcccttgcctggtgtgg

SEQ ID NO: 18436 - DNA, 122 bp, Homo sapiens
  misc_feature (61)..(62): /note="This region represents a CpG dinucleotide"
  misc_feature (61)..(61): /note="Nucleotide may be methylated to form 5-methylcytosine"
ctcaaaaatccagttactcaactacctgatttgccagtggagctggccctggttcttgtccgtgggacagggtgagtcaggggattgaattgggggttctctggactcagggcctagggctt

SEQ ID NO: 18437 - DNA, 122 bp, Homo sapiens
  misc_feature (61)..(62): /note="This region represents a CpG dinucleotide"
  misc_feature (61)..(61): /note="Nucleotide may be methylated to form 5-methylcytosine"
tatgagttttcacttcccttttcttctaaggttttgcttggaatctgccatcagcaatgccgaggcctggccttggtggaaatggaggtgctgcttaacttttcttccaaaacatagtacaa

SEQ ID NO: 18438 - DNA, 122 bp, Homo sapiens
  misc_feature (61)..(62): /note="This region represents a CpG dinucleotide"
  misc_feature (61)..(61): /note="Nucleotide may be methylated to form 5-methylcytosine"
agttggaagcctcagatgagctactccagggaaagtgctgggactggcattctggctgcccgtcttcttcccagccttgccttgctgggagacttgacctgtccccctgcactctggccact

SEQ ID NO: 18439 - DNA, 122 bp, Homo sapiens
  misc_feature (61)..(62): /note="This region represents a CpG dinucleotide"
  misc_feature (61)..(61): /note="Nucleotide may be methylated to form 5-methylcytosine"
ggtttacaggcataagccaccaatcccaaatcccggggctatgatttttgaaatcatgttcgtgagaaggcagagcacatgtgttgagagtcagactttaaacctgggttcaaatcattagt

SEQ ID NO: 18440 - DNA, 122 bp, Homo sapiens
  misc_feature (61)..(62): /note="This region represents a CpG dinucleotide"
  misc_feature (61)..(61): /note="Nucleotide may be methylated to form 5-methylcytosine"
ttcgggacatcaaaaaattgaagaattgcactactatgcactcgagaccaagaactgaaacgtagatttggaaaatattcagtaaagggacaactggaaaggaaagaaaagcagctgcctga

SEQ ID NO: 18441 - DNA, 122 bp, Homo sapiens
  misc_feature (61)..(62): /note="This region represents a CpG dinucleotide"
  misc_feature (61)..(61): /note="Nucleotide may be methylated to form 5-methylcytosine"
tggggatggttggttcagtacccaacatcctgacagcacatctgaccatgtatattgtatcggagaccacatcctcagctcagaaaaagagctgaactcatttcaaatagaaagcacactgc

SEQ ID NO: 18442 - DNA, 122 bp, Homo sapiens
  misc_feature (61)..(62): /note="This region represents a CpG dinucleotide"
  misc_feature (61)..(61): /note="Nucleotide may be methylated to form 5-methylcytosine"
ctagggatttcatcagaaacgggtgtggttctctctgctgggatgagcccatctttgttgcgctgtatcatccaagaacaactatggagtctgggaagggtgattggtcattccagtccagc

SEQ ID NO: 18443 - DNA, 122 bp, Homo sapiens
  misc_feature (61)..(62): /note="This region represents a CpG dinucleotide"
  misc_feature (61)..(61): /note="Nucleotide may be methylated to form 5-methylcytosine"
aatgtcacttcctttgtgtaaatattcccaggcgaagtcaggccctctgtcttctgtgatcgtagtctatcctgctcacatcttcttggtagtgtggtgtttaggtgatagaagctgagact

SEQ ID NO: 18444 - DNA, 122 bp, Homo sapiens
  misc_feature (61)..(62): /note="This region represents a CpG dinucleotide"
  misc_feature (61)..(61): /note="Nucleotide may be methylated to form 5-methylcytosine"
gagttcctttggggcacaatgctagcctctttctgccttttccttttaattcctggcttacgttaccctatttcagtttttatttttaaatttaaaatgtgatcatgtccctctggtcttcc

SEQ ID NO: 18445 - DNA, 122 bp, Homo sapiens
  misc_feature (61)..(62): /note="This region represents a CpG dinucleotide"
  misc_feature (61)..(61): /note="Nucleotide may be methylated to form 5-methylcytosine"
gtccttcagatatcttctctttggtgctttgtttgggaacagattagcctcatacttcctcgcttgtaaaactgctatcccatctcttgctcaatgcttttcttgtaccgaagggtgagggg

SEQ ID NO: 18446 - DNA, 122 bp, Homo sapiens
  misc_feature (61)..(62): /note="This region represents a CpG dinucleotide"
  misc_feature (61)..(61): /note="Nucleotide may be methylated to form 5-methylcytosine"
caggctgtcaatgtacctttgaccaaattgcagcttgcattcccataccaaatgtggtttcgcagaaccccagctcactctaacagaaccagctgggaccagagagggtcctggtttgctct

SEQ ID NO: 18447 - DNA, 122 bp, Homo sapiens
  misc_feature (61)..(62): /note="This region represents a CpG dinucleotide"
  misc_feature (61)..(61): /note="Nucleotide may be methylated to form 5-methylcytosine"
tgagctgtattaacataattacgtggaaaagatctcacaatggaagacattcaaagaccacgccaaagtagaatcaggaggacctggctatggctcactgaccggtccaacttcttcacctt

SEQ ID NO: 18448 - DNA, 122 bp, Homo sapiens
  misc_feature (61)..(62): /note="This region represents a CpG dinucleotide"
  misc_feature (61)..(61): /note="Nucleotide may be methylated to form 5-methylcytosine"
ctagggagcctaggaaatctacttcccagcaagagctataaaacctcacatcctaattgacggagacaaggaggaacagtgattcagaggcaactctaggggagcagccagctcaggcctga

SEQ ID NO: 18449 - DNA, 122 bp, Homo sapiens
  misc_feature (61)..(62): /note="This region represents a CpG dinucleotide"
  misc_feature (61)..(61): /note="Nucleotide may be methylated to form 5-methylcytosine"
gatatttaccagctgaaagtcaccaagtcagcccagcccacaccgaaggcagcagaaacacgtggtgagcagaacctaagccaagctactaaattctgagtggtttcttatatagcaacaga

SEQ ID NO: 18450 - DNA, 122 bp, Homo sapiens
  misc_feature (61)..(62): /note="This region represents a CpG dinucleotide"
  misc_feature (61)..(61): /note="Nucleotide may be methylated to form 5-methylcytosine"
tttttccccaccaatgagttggtacaaagccatttcatgttccatgccaaaccagtaattcgcaatactcatcaaaatctgcctccgtccactgactcagcactcctgctttcctagcatag

SEQ ID NO: 18451 - DNA, 122 bp, Homo sapiens
  misc_feature (61)..(62): /note="This region represents a CpG dinucleotide"
  misc_feature (61)..(61): /note="Nucleotide may be methylated to form 5-methylcytosine"
cacaaaaatgagcaatacccaacaattgatttatggcttctactcacaagccattcaaaccgcagacattcagcattaactgctacagagataaatctggtcaacaacttgattggcctctg

SEQ ID NO: 18452 - DNA, 122 bp, Homo sapiens
  misc_feature (61)..(62): /note="This region represents a CpG dinucleotide"
  misc_feature (61)..(61): /note="Nucleotide may be methylated to form 5-methylcytosine"
tacgaagagatcttttcatctcctctccgtgaacacttggggaggggctgggactccaggcgacacggaaacgccaccacacgcacactcgacggagcacaacactttctgagctgccatcc

SEQ ID NO: 18453 - DNA, 122 bp, Homo sapiens
  misc_feature (61)..(62): /note="This region represents a CpG dinucleotide"
  misc_feature (61)..(61): /note="Nucleotide may be methylated to form 5-methylcytosine"
aatatcaatataatagtatggcatagaccttacagtaatagtgccgttacagccaaaactcgcaaatcaattgaggtttattcagtaaaggtgaggaatttcagagaaagatcacaaaagga

SEQ ID NO: 18454 - DNA, 122 bp, Homo sapiens
  misc_feature (61)..(62): /note="This region represents a CpG dinucleotide"
  misc_feature (61)..(61): /note="Nucleotide may be methylated to form 5-methylcytosine"
ctctcctgccaccgcggcggggcctgcacttccttcctaaactccccgggacagcaatcccgcctcacagactcaaatgccatcagcgggaacaatcggaggaagtgtggcgctttctccgc

SEQ ID NO: 18455 - DNA, 122 bp, Homo sapiens
  misc_feature (61)..(62): /note="This region represents a CpG dinucleotide"
  misc_feature (61)..(61): /note="Nucleotide may be methylated to form 5-methylcytosine"
cataatcaatagcgtctgcaagcctagttctgcatgttaaaaacaaagcacaatgttagccgcacagagcagctcatgcttctccccacacagagacaatagtgagtcgtaatagactcacc

SEQ ID NO: 18456 - DNA, 122 bp, Homo sapiens
  misc_feature (61)..(62): /note="This region represents a CpG dinucleotide"
  misc_feature (61)..(61): /note="Nucleotide may be methylated to form 5-methylcytosine"
tggagggggttggagatgctcctgctggggaccttgatgcaacacccttagtcagattttcgtaatctggctgaggcttgccctgtaattctctaaaaatataatatgatgaaacaaccaag

SEQ ID NO: 18457 - DNA, 122 bp, Homo sapiens
  misc_feature (61)..(62): /note="This region represents a CpG dinucleotide"
  misc_feature (61)..(61): /note="Nucleotide may be methylated to form 5-methylcytosine"
taggggtgcaggctttcatgtgtttgcaatggagagtcattaacaggacaaaaaaaaaatcggtggccctttgtctatgaactcaataagagcctgggcaagaaaaaaagaaatgtaggtaa

SEQ ID NO: 18458 - DNA, 122 bp, Homo sapiens
  misc_feature (61)..(62): /note="This region represents a CpG dinucleotide"
  misc_feature (61)..(61): /note="Nucleotide may be methylated to form 5-methylcytosine"
tctctgaagaaaggcttagtaagagtcccacatcaaaagcaaaagcatttctttctctcacgggaccccagaataggaggaatgtgttctctagaggcaaccacctcccagaactactcttt

SEQ ID NO: 18459 - DNA, 122 bp, Homo sapiens
  misc_feature (61)..(62): /note="This region represents a CpG dinucleotide"
  misc_feature (61)..(61): /note="Nucleotide may be methylated to form 5-methylcytosine"
acctcgaccagcactatgcacacaagagacctcggtgaatggagtggtgtgtttagacaacgattgctggagaacagtgtacccatagttagctcattcctgtaaaggatatgctatcaacc

SEQ ID NO: 18460 - DNA, 122 bp, Homo sapiens
  misc_feature (61)..(62): /note="This region represents a CpG dinucleotide"
  misc_feature (61)..(61): /note="Nucleotide may be methylated to form 5-methylcytosine"
ttaaattatgcatgttgttttgcacacatttgcatgttcaattcacatgcctgagttattcgtctacaagataaaaccaagcatagtaattcaagtaacctgtgtctgatttctcttcaccc

SEQ ID NO: 18461 - DNA, 122 bp, Homo sapiens
  misc_feature (61)..(62): /note="This region represents a CpG dinucleotide"
  misc_feature (61)..(61): /note="Nucleotide may be methylated to form 5-methylcytosine"
aaatagaggccctattccagggctgtttctcgcagactagccacagaaaatgcagcccagcgccacttcctttcagtagcaacacgtttccaacacgtttgttaagcgggaacggaagtgag

SEQ ID NO: 18462 - DNA, 122 bp, Homo sapiens
  misc_feature (61)..(62): /note="This region represents a CpG dinucleotide"
  misc_feature (61)..(61): /note="Nucleotide may be methylated to form 5-methylcytosine"
gatgtacagctcggaggactccaccctggcctctgttccccctgctgccacctttggggccgatgacttggtactgaccctgagcaacccccagatgtcattggagggtacaggtgggtctc

SEQ ID NO: 18463 - DNA, 122 bp, Homo sapiens
  misc_feature (61)..(62): /note="This region represents a CpG dinucleotide"
  misc_feature (61)..(61): /note="Nucleotide may be methylated to form 5-methylcytosine"
ctggaaccgaagggagtcagtggagcatctcttaccatttccatgcccagtgttaattgtcgtcgggaaattacagactcagatgaagttccatgccacagcaaatgggatcgggcttttcc

SEQ ID NO: 18464 - DNA, 122 bp, Homo sapiens
  misc_feature (61)..(62): /note="This region represents a CpG dinucleotide"
  misc_feature (61)..(61): /note="Nucleotide may be methylated to form 5-methylcytosine"
tgtcactgaaaacctattaacctgtcacagtttgggaaatggtacattacttaccttcctcgagatcaaactttttatacccattgttcctgcttattggaatgtccttctcctattttatc

SEQ ID NO: 18465 - DNA, 122 bp, Homo sapiens
  misc_feature (61)..(62): /note="This region represents a CpG dinucleotide"
  misc_feature (61)..(61): /note="Nucleotide may be methylated to form 5-methylcytosine"
ttatcacactaataaaatcaactgtaatgaactagtacccagtttataatcagattccctcggaaaggaatttcctttttgaaagactaaaatatgcctttcaaaaattcttttcagagttg

SEQ ID NO: 18466 - DNA, 122 bp, Homo sapiens
  misc_feature (61)..(62): /note="This region represents a CpG dinucleotide"
  misc_feature (61)..(61): /note="Nucleotide may be methylated to form 5-methylcytosine"
ttccttcccaaagagcagatcccaaggcatttactccttggtctgtctcgctttatctgtcgcccctcccagcgctgagagcctcccctggctgtcagcagcactgtgtccaggctcttgtc

SEQ ID NO: 18467 - DNA, 122 bp, Homo sapiens
  misc_feature (61)..(62): /note="This region represents a CpG dinucleotide"
  misc_feature (61)..(61): /note="Nucleotide may be methylated to form 5-methylcytosine"
gcaaagacgcctgcgatttcctttggtctacagttctgtcctagacttcgttcggctgatcgatgaaggagacaagctggcccacggggaggtcaatacaatcgatgcggacctcgacgaaa

SEQ ID NO: 18468 - DNA, 122 bp, Homo sapiens
  misc_feature (61)..(62): /note="This region represents a CpG dinucleotide"
  misc_feature (61)..(61): /note="Nucleotide may be methylated to form 5-methylcytosine"
caggagcactcttctgtgcatttcacactggatgccacagattaggctgcggatatttcacggttggtgataaacatttgtttggagaagccttgagcagagcaacactcctaaggctgggg

SEQ ID NO: 18469 - DNA, 122 bp, Homo sapiens
  misc_feature (61)..(62): /note="This region represents a CpG dinucleotide"
  misc_feature (61)..(61): /note="Nucleotide may be methylated to form 5-methylcytosine"
tcattatccccaaactaacctcacaagcatacatcacaggctgatgcaacccacatcctgcggcacagttagccggcccctgacaacaatgtttaaagtgtggccaagggtgaaatattgcc

SEQ ID NO: 18470 - DNA, 122 bp, Homo sapiens
  misc_feature (61)..(62): /note="This region represents a CpG dinucleotide"
  misc_feature (61)..(61): /note="Nucleotide may be methylated to form 5-methylcytosine"
tgcttctggtggaggaagcagcttagatctaaacatcaactcagctccgacagagcctcgcggaaatccagagctgcctctgggatcagaattttgaggacctctgctccctgcacttggga

SEQ ID NO: 18471 - DNA, 122 bp, Homo sapiens
  misc_feature (61)..(62): /note="This region represents a CpG dinucleotide"
  misc_feature (61)..(61): /note="Nucleotide may be methylated to form 5-methylcytosine"
caaacctctgcctacatgaaaatgttcgagtcattaattaaatttttcatgttcctccggcgatacagagagagcctgagaaattatatgataagaagagagaacaaagaactagaatttcc

SEQ ID NO: 18472 - DNA, 122 bp, Homo sapiens
  misc_feature (61)..(62): /note="This region represents a CpG dinucleotide"
  misc_feature (61)..(61): /note="Nucleotide may be methylated to form 5-methylcytosine"
gttgtgataattctcatttcacagatgagagaactggtgcttagggacacttacagggtgcgttcaaggtcataaaactgctaagagagatggagcagaaactggaacctggtctgtttgat

SEQ ID NO: 18473 - DNA, 122 bp, Homo sapiens
  misc_feature (61)..(62): /note="This region represents a CpG dinucleotide"
  misc_feature (61)..(61): /note="Nucleotide may be methylated to form 5-methylcytosine"
tagtgtgtttagatttatgagggagtgaatgaccttctctgccacagttttttacattttcgtttttccaggactgattttccatctggcctaaccagagtctgaagttgctgaatcaaaca

SEQ ID NO: 18474 - DNA, 122 bp, Homo sapiens
  misc_feature (61)..(62): /note="This region represents a CpG dinucleotide"
  misc_feature (61)..(61): /note="Nucleotide may be methylated to form 5-methylcytosine"
aggatactgttgaaatagctgcaaaagtcagtggccaataagaccctaaaaaatgagatgcgggccaagctggttaagaccaactgtacccagcatggtgctggatttgacctaggtttctc

SEQ ID NO: 18475 - DNA, 122 bp, Homo sapiens
  misc_feature (61)..(62): /note="This region represents a CpG dinucleotide"
  misc_feature (61)..(61): /note="Nucleotide may be methylated to form 5-methylcytosine"
tgcaactggtgtggggcaactgttgccatctgtctggtgggatgtcaccagggaaggtctcgcccattcactccttcatgcaccgctgggcttgggccttttgtttggttggctggggaggg

SEQ ID NO: 18476 - DNA, 122 bp, Homo sapiens
  misc_feature (61)..(62): /note="This region represents a CpG dinucleotide"
  misc_feature (61)..(61): /note="Nucleotide may be methylated to form 5-methylcytosine"
ctcttaataagagcgactgttacgcatgatctgctgggtggcctcaggcacaggtggttccgtttcccctaggttgggaaaccagtcccaaaggaatgcattgcatgttggctctataccag

SEQ ID NO: 18477 - DNA, 122 bp, Homo sapiens
  misc_feature (61)..(62): /note="This region represents a CpG dinucleotide"
  misc_feature (61)..(61): /note="Nucleotide may be methylated to form 5-methylcytosine"
gccaccgcgcccggccaatgtcttcattttctaattggggaatccgttgagggcgcagctcggccttaaaaacctgtacttgcgattctaagaccagcgcgggttttccgtgccccaccttg

SEQ ID NO: 18478 - DNA, 122 bp, Homo sapiens
  misc_feature (61)..(62): /note="This region represents a CpG dinucleotide"
  misc_feature (61)..(61): /note="Nucleotide may be methylated to form 5-methylcytosine"
tttggaactactgattattttgataaagatttcattgctgcttattcaatagtaattcaacgctggcatcaagccgctgctccgacaggatgtggatcccatcatttaaaatgctaggcatc

SEQ ID NO: 18479 - DNA, 122 bp, Homo sapiens
  misc_feature (61)..(62): /note="This region represents a CpG dinucleotide"
  misc_feature (61)..(61): /note="Nucleotide may be methylated to form 5-methylcytosine"
tctttacttcccttttgtattttttagaaaacagccactcctcgcagtcttttcaccttgcgagtaacagtaagtaccaagttttatgcctttcaacattctgactcctaggttcatcagaa

SEQ ID NO: 18480 - DNA, 122 bp, Homo sapiens
  misc_feature (61)..(62): /note="This region represents a CpG dinucleotide"
  misc_feature (61)..(61): /note="Nucleotide may be methylated to form 5-methylcytosine"
ccccactctttttgtcttgctctgaggatgccaggactttaaggacattgtcagcgagcacgtaagttcacccctgcaaggtcaaaggcaggacagaaagaagacccaaaggtcccagttag

SEQ ID NO: 18481 - DNA, 122 bp, Homo sapiens
  misc_feature (61)..(62): /note="This region represents a CpG dinucleotide"
  misc_feature (61)..(61): /note="Nucleotide may be methylated to form 5-methylcytosine"
atagtttcaggtatatttttgctgcacagtcagtccgagtgtaccacgtagggcaaaccacgtaacttctcagggccttgactgtttcatttgtaaaccagagaaaaggacttgggtgacct

SEQ ID NO: 18482 - DNA, 122 bp, Homo sapiens
  misc_feature (61)..(62): /note="This region represents a CpG dinucleotide"
  misc_feature (61)..(61): /note="Nucleotide may be methylated to form 5-methylcytosine"
ccataaccaagacacaccagaatagttccaccagctatgcaggatgtgcctggctgattccgtgttttggggggcatatttttgtgagaggagtgactcaaattttttctgttcctctttct

SEQ ID NO: 18483 - DNA, 122 bp, Homo sapiens
  misc_feature (61)..(62): /note="This region represents a CpG dinucleotide"
  misc_feature (61)..(61): /note="Nucleotide may be methylated to form 5-methylcytosine"
ggttttgcaaccacagtgtctaagacaatcagaagggttccagggaggtcttgtctgtagcgatgtgacagatgaggaaactgcagctcagaggacaatgacttgcccacgttgcacagctc

SEQ ID NO: 18484 - DNA, 122 bp, Homo sapiens
  misc_feature (61)..(62): /note="This region represents a CpG dinucleotide"
  misc_feature (61)..(61): /note="Nucleotide may be methylated to form 5-methylcytosine"
tcttcctccgagcctcacaggatcttctggtaggaggagctggttttctttcatgtcatacgtttctcatgccccacccaggaagctggagcctccttctctgctcatccagataaatgatc

SEQ ID NO: 18485 - DNA, 122 bp, Homo sapiens
  misc_feature (61)..(62): /note="This region represents a CpG dinucleotide"
  misc_feature (61)..(61): /note="Nucleotide may be methylated to form 5-methylcytosine"
ggtccctttttgtgatatgagcatgagaagcacctgtaggcctagtaaaaattcctcatacgagagagatggttagtccagagtaagagaaagctactaagactgaactatatccattcaac

SEQ ID NO: 18486 - DNA, 122 bp, Homo sapiens
  misc_feature (61)..(62): /note="This region represents a CpG dinucleotide"
  misc_feature (61)..(61): /note="Nucleotide may be methylated to form 5-methylcytosine"
tatggcagggattgatgctggtgattcattgagtggcaaatctttctttagagtcatttccgaattgatgttccaggactgtgtctgtaaatgtgtgcttgtgtgtgtcaaggagaatagct

SEQ ID NO: 18487 - DNA, 122 bp, Homo sapiens
  misc_feature (61)..(62): /note="This region represents a CpG dinucleotide"
  misc_feature (61)..(61): /note="Nucleotide may be methylated to form 5-methylcytosine"
tggaagtgggttagagagaggtgggggtatggaagaggtgacttctttagatggggtgatcgggaaaggccttcccagagagggtgacttttgagctgagtcttgaaagatgagaaggccac

SEQ ID NO: 18488 - DNA, 122 bp, Homo sapiens
  misc_feature (61)..(62): /note="This region represents a CpG dinucleotide"
  misc_feature (61)..(61): /note="Nucleotide may be methylated to form 5-methylcytosine"
atgtagctgtcctgttttctccccattaatcacttcatgccccttttacatctgtctacccggatgactcactgttggattgtacaggaagaggcaaagactctgcacaattccagagggca

SEQ ID NO: 18489 - DNA, 122 bp, Homo sapiens
  misc_feature (61)..(62): /note="This region represents a CpG dinucleotide"
  misc_feature (61)..(61): /note="Nucleotide may be methylated to form 5-methylcytosine"
gcctgcttccatagctgtaatgatacagagggctcatcctaaaagacaataaagtagaatcgatgccatataaccatgattcaccactgtagttcatgcacctgtggtctaaggatgaaatc

SEQ ID NO: 18490 - DNA, 122 bp, Homo sapiens
  misc_feature (61)..(62): /note="This region represents a CpG dinucleotide"
  misc_feature (61)..(61): /note="Nucleotide may be methylated to form 5-methylcytosine"
ggtgggagcttggctgagtgggctctcagccactgaggcagaccctgaaggaggtgacagcggcaggccatctgctaactgcaccccctactagtgggcagcagtggacaccattgaaagct

SEQ ID NO: 18491 - DNA, 122 bp, Homo sapiens
  misc_feature (61)..(62): /note="This region represents a CpG dinucleotide"
  misc_feature (61)..(61): /note="Nucleotide may be methylated to form 5-methylcytosine"
gtgatgcaactgtgacaatagctcacagatacacccccaaagagcaactgaagattcatacgcagctggcagatattatcatagttgctgcaggtaagtccttagtgactgttattttttgg

SEQ ID NO: 18492 - DNA, 122 bp, Homo sapiens
  misc_feature (61)..(62): /note="This region represents a CpG dinucleotide"
  misc_feature (61)..(61): /note="Nucleotide may be methylated to form 5-methylcytosine"
aaaaaagaatactaacacaagctgcctctaggcctcgtttgatctagacactactcctcccggtcaggtcaggctcaaatcatctctaggtgacctcaaatcttactggcagcaaggtcaga

SEQ ID NO: 18493 - DNA, 122 bp, Homo sapiens
  misc_feature (61)..(62): /note="This region represents a CpG dinucleotide"
  misc_feature (61)..(61): /note="Nucleotide may be methylated to form 5-methylcytosine"
aaaaggaaaacaacaaggacaaatttcccgtttcccggcaggaggtgaaggacggggaaacgaaaaaggaagcccaagagctggaggaagacagagccgaaggcctgacaaattaacttcta

SEQ ID NO: 18494 - DNA, 122 bp, Homo sapiens
  misc_feature (61)..(62): /note="This region represents a CpG dinucleotide"
  misc_feature (61)..(61): /note="Nucleotide may be methylated to form 5-methylcytosine"
tttggttttctaatgcctgtaaattagagcttctgagccatgtggggagcaacccctacccgcaaaggagtgatgtaatgtctgggggctgcaatggttttttcctttgagatggataccat

SEQ ID NO: 18495 - DNA, 122 bp, Homo sapiens
  misc_feature (61)..(62): /note="This region represents a CpG dinucleotide"
  misc_feature (61)..(61): /note="Nucleotide may be methylated to form 5-methylcytosine"
agaggccattattccactcccgggtttcgaaaccactcctgagttcacctgctgctataacggtgactcttcttggatgatttagttgagtcttgcctggagtccaaagatctgcttgagtg

SEQ ID NO: 18496 - DNA, 122 bp, Homo sapiens
  misc_feature (61)..(62): /note="This region represents a CpG dinucleotide"
  misc_feature (61)..(61): /note="Nucleotide may be methylated to form 5-methylcytosine"
gttgtcttgcttaagtccaagcctgactcagaattggtgtcactgtctgtgtcaggctctcgttccctcttgtgccttttgtcctgtggttccatgatgccaccacaaaccttctctgatga

SEQ ID NO: 18497 - DNA, 122 bp, Homo sapiens
  misc_feature (61)..(62): /note="This region represents a CpG dinucleotide"
  misc_feature (61)..(61): /note="Nucleotide may be methylated to form 5-methylcytosine"
tcctcccactctccaccctcaagtaggtcaccatgtctattgcttccttctttatgtccacgtgtacccaatgtttagctcctacttataaatgagaacatgcaatatttgattttatgttc

SEQ ID NO: 18498 - DNA, 122 bp, Homo sapiens
  misc_feature (61)..(62): /note="This region represents a CpG dinucleotide"
  misc_feature (61)..(61): /note="Nucleotide may be methylated to form 5-methylcytosine"
gcctggtcctactaaatcagcatctgcattttaacagatccccaggtgactcacagcacacgacagtgtgttcctccatgcctgatgactcccaagttacctcctgtcctgacatctgtccc

SEQ ID NO: 18499 - DNA, 122 bp, Homo sapiens
  misc_feature (61)..(62): /note="This region represents a CpG dinucleotide"
  misc_feature (61)..(61): /note="Nucleotide may be methylated to form 5-methylcytosine"
taagccctcggcaaatcatggatccgctgttcatctatgctcttattctgataggagcctcgtacgttctttgaaattgctctgagctgctactttgatatcctttggagccatacattttg

SEQ ID NO: 18500 - DNA, 122 bp, Homo sapiens
  misc_feature (61)..(62): /note="This region represents a CpG dinucleotide"
  misc_feature (61)..(61): /note="Nucleotide may be methylated to form 5-methylcytosine"
aaagaggatgactaaacctccaagtcatattttactctttaaggattgagatgtgcattgcgatgaactaacttttaagtggtttacgacacacaggaaagaagtcatacttataatttcaa

SEQ ID NO: 18501 - DNA, 122 bp, Homo sapiens
  misc_feature (61)..(62): /note="This region represents a CpG dinucleotide"
  misc_feature (61)..(61): /note="Nucleotide may be methylated to form 5-methylcytosine"
cattacttaagccctcaacaccatcaaatatttatttaacatccactgtgggttaagaatcgcaacccagggccccaaagcaacttacaagctaaaggaaggagtggaggcacagttccttg

SEQ ID NO: 18502 - DNA, 122 bp, Homo sapiens
  misc_feature (61)..(62): /note="This region represents a CpG dinucleotide"
  misc_feature (61)..(61): /note="Nucleotide may be methylated to form 5-methylcytosine"
tccctgagtcagggcacctcctgagaagtgacgagggctgagaagttgcctctggattagcgaccttgacaggagctctcccgcaggaccagtgggaccaaaagccggctggagtggatgga

SEQ ID NO: 18503 - DNA, 122 bp, Homo sapiens
  misc_feature (61)..(62): /note="This region represents a CpG dinucleotide"
  misc_feature (61)..(61): /note="Nucleotide may be methylated to form 5-methylcytosine"
tgtcaggtctccttactcaggaacctctgattgacagtggtaaggccgagctcctcctgtcgcgtctgcctctcccagacacgtgctgattgctcttcagctggctttttatagttcagact

SEQ ID NO: 18504 - DNA, 122 bp, Homo sapiens
  misc_feature (61)..(62): /note="This region represents a CpG dinucleotide"
  misc_feature (61)..(61): /note="Nucleotide may be methylated to form 5-methylcytosine"
atgccagtctcctgtggctctgtcccctccaccttcctcccgtggccccatccaggaaatcggcccacaagagaggccgacgctgcttctgaccagagctaccgagcgcctctctggagaca

SEQ ID NO: 18505 - DNA, 122 bp, Homo sapiens
  misc_feature (61)..(62): /note="This region represents a CpG dinucleotide"
  misc_feature (61)..(61): /note="Nucleotide may be methylated to form 5-methylcytosine"
caggcatgagccatcatgcatggcctctggacatatttcgatgtgctcctctgagcatctcgcctggccttcctgctctctgagcccacagaccccagggaggaggggaggtgccaggacac

SEQ ID NO: 18506 - DNA, 122 bp, Homo sapiens
  misc_feature (61)..(62): /note="This region represents a CpG dinucleotide"
  misc_feature (61)..(61): /note="Nucleotide may be methylated to form 5-methylcytosine"
ccccagcagactcctttgagtgctagttggagcaggagctgtggccacgttgaccaagaccgtcctcgagaggaacctctgccctccttggcgaggctggtctgggtgtggacactgctttt

SEQ ID NO: 18507 - DNA, 122 bp, Homo sapiens
  misc_feature (61)..(62): /note="This region represents a CpG dinucleotide"
  misc_feature (61)..(61): /note="Nucleotide may be methylated to form 5-methylcytosine"
tgctattgttaatctatgagttgcttcaccatttcctgtttggtttctcatctcttctgtcgcctgcataattaggtcgtgtatttaattccctctgtctaaaatattagaggagttactgt

SEQ ID NO: 18508 - DNA, 122 bp, Homo sapiens
  misc_feature (61)..(62): /note="This region represents a CpG dinucleotide"
  misc_feature (61)..(61): /note="Nucleotide may be methylated to form 5-methylcytosine"
ctcctgggttcaagcggttctcctgcctccgtctctaaagtagctgggattacaggcatgcgccaccacaccgggctaatttgatatttagagatatggagacgtggtttctccgtgttggt

SEQ ID NO: 18509 - DNA, 122 bp, Homo sapiens
  misc_feature (61)..(62): /note="This region represents a CpG dinucleotide"
  misc_feature (61)..(61): /note="Nucleotide may be methylated to form 5-methylcytosine"
ttcaaactctaaatgacctaaccttgacaggagccatgacagtaaaaaaaaggcaaggtacgaaagtgttgagcttgcccaggtttggaggtttgccccatcatttaagccaaataaatcaa

SEQ ID NO: 18510 - DNA, 122 bp, Homo sapiens
  misc_feature (61)..(62): /note="This region represents a CpG dinucleotide"
  misc_feature (61)..(61): /note="Nucleotide may be methylated to form 5-methylcytosine"
gctcacaagtccctgttgtatcagcgacttgctttctcagcagttgagtcatgccaagtccgcctgacctgcctggttggcttctccaacagctgaaggccccatgctgaggctgccctgct

SEQ ID NO: 18511 - DNA, 122 bp, Homo sapiens
  misc_feature (61)..(62): /note="This region represents a CpG dinucleotide"
  misc_feature (61)..(61): /note="Nucleotide may be methylated to form 5-methylcytosine"
tagaaaaatcagtctagcagaggccagatggatggagctgaggaagcaggcactgatgttcgaggagtttgaaggctcttgcagaagtccaggcagcatcatgaatgagtcatctcagcttg

SEQ ID NO: 18512 - DNA, 122 bp, Homo sapiens
  misc_feature (61)..(62): /note="This region represents a CpG dinucleotide"
  misc_feature (61)..(61): /note="Nucleotide may be methylated to form 5-methylcytosine"
gagcgaggggcctccgacttggccccggcctggcacaccgtcccggaggcccatcccggccgctcctccaggtggggcttcaccgccccccgccccgcccccgagaccagcttctagaggcg

SEQ ID NO: 18513 - DNA, 122 bp, Homo sapiens
  misc_feature (61)..(62): /note="This region represents a CpG dinucleotide"
  misc_feature (61)..(61): /note="Nucleotide may be methylated to form 5-methylcytosine"
catatgtgtcaagactaaaaattaagcacggggtaaagtctttggcaaaggacaaatagtcggcaagttcacagattagaatttagaattccatcatgaagtggactaaattgttagtttaa

SEQ ID NO: 18514 - DNA, 122 bp, Homo sapiens
  misc_feature (61)..(62): /note="This region represents a CpG dinucleotide"
  misc_feature (61)..(61): /note="Nucleotide may be methylated to form 5-methylcytosine"
cctatacagccatatgtagcgatgtcataagttgtttttcaagctggcctttgctccctacgaagacaggaacgttttgcaatcagtgtcctttagagaatgttggctcaccaaagactagt

SEQ ID NO: 18515 - DNA, 122 bp, Homo sapiens
  misc_feature (61)..(62): /note="This region represents a CpG dinucleotide"
  misc_feature (61)..(61): /note="Nucleotide may be methylated to form 5-methylcytosine"
cacataagtggacttttcttactgtctactgtggctatccaccctgcccaaggtgacacgcgcccagggaaggaatgtaatcaggaagtcaactcagctgcattccaaagccaactggaaat

SEQ ID NO: 18516 - DNA, 122 bp, Homo sapiens
  misc_feature (61)..(62): /note="This region represents a CpG dinucleotide"
  misc_feature (61)..(61): /note="Nucleotide may be methylated to form 5-methylcytosine"
agtatctaggagggctgtctcagagggtgtggagaggtaccactcccatccacttcccatcgacccagacagtagtgccgtgcagctgaagaccagagagcatactttccagggacaattaa

SEQ ID NO: 18517 - DNA, 122 bp, Homo sapiens
  misc_feature (61)..(62): /note="This region represents a CpG dinucleotide"
  misc_feature (61)..(61): /note="Nucleotide may be methylated to form 5-methylcytosine"
tgctttcagccatttcttcattcattcaatcaacaaactggctgagctgcaaccctgagccggggaattcagccactccagacacagcccctgccctccgggaagtctcgggagacctggct

SEQ ID NO: 18518 - DNA, 122 bp, Homo sapiens
  misc_feature (61)..(62): /note="This region represents a CpG dinucleotide"
  misc_feature (61)..(61): /note="Nucleotide may be methylated to form 5-methylcytosine"
gaaatgactcacttccgcatggacaagcatgagatggcaaagccgaaatcaatccacaagcgtcctgagatactgaaaatgggacgcagctgtatcgctggaaatgtgtggatcaactgaac

SEQ ID NO: 18519 - DNA, 122 bp, Homo sapiens
  misc_feature (61)..(62): /note="This region represents a CpG dinucleotide"
  misc_feature (61)..(61): /note="Nucleotide may be methylated to form 5-methylcytosine"
aactaggcaactattatagcgtagtagtgaacaccaatgttactgcaaccaggctactcacgttcaaatcttcactcttctggtatttaaatgagtcacctaatctccttgtgcttaaactc

SEQ ID NO: 18520 - DNA, 122 bp, Homo sapiens
  misc_feature (61)..(62): /note="This region represents a CpG dinucleotide"
  misc_feature (61)..(61): /note="Nucleotide may be methylated to form 5-methylcytosine"
ttttttcctctgtcagtcttatttattggctggttattaatcctcatccttgttgacttacggtaataggatggttgttgcagcactagatactgtgtacacatacgaggctagaaaaatgg

SEQ ID NO: 18521 - DNA, 122 bp, Homo sapiens
  misc_feature (61)..(62): /note="This region represents a CpG dinucleotide"
  misc_feature (61)..(61): /note="Nucleotide may be methylated to form 5-methylcytosine"
tttatggtattttgtcatgacagcccaagctgagcaatatcagtatcactctcttatttacgtctacattagataacatgtgtcactttcatggcacatgactatggtgctaatagaagttt

SEQ ID NO: 18522 - DNA, 122 bp, Homo sapiens
  misc_feature (61)..(62): /note="This region represents a CpG dinucleotide"
  misc_feature (61)..(61): /note="Nucleotide may be methylated to form 5-methylcytosine"
gagggagataattctagcagttgtgagtaggatatcctggcgatcagttcagcctcatcccgtcagcaggccttaagcaaagcaggaagccaaaacaagaggaagtctcatcagaacctggt

SEQ ID NO: 18523 - DNA, 122 bp, Homo sapiens
  misc_feature (61)..(62): /note="This region represents a CpG dinucleotide"
  misc_feature (61)..(61): /note="Nucleotide may be methylated to form 5-methylcytosine"
acatgttgccattgaaatgggaacaaaagtgtggtgatgccttctgccacagtcatcaggcgttgataatctgcacagaacaaggaaaaaggaaagggaagagtccaagtaaaaacacaatc

SEQ ID NO: 18524 - DNA, 122 bp, Homo sapiens
  misc_feature (61)..(62): /note="This region represents a CpG dinucleotide"
  misc_feature (61)..(61): /note="Nucleotide may be methylated to form 5-methylcytosine"
gcagcagcagcatttactatgtctcactgcacctgctgcaagctgcttggagcaagtctccgtccttcccactccatcgcttagctgctggttcatgcaccacccagccctgccccatgttg

SEQ ID NO: 18525 - DNA, 122 bp, Homo sapiens
  misc_feature (61)..(62): /note="This region represents a CpG dinucleotide"
  misc_feature (61)..(61): /note="Nucleotide may be methylated to form 5-methylcytosine"
gctcctgaatgggtggaggttccaactgaaattgaagagagcacctgagtttttttccctcgatagataacctgaagcaataggaagaaaactgtctcagaagaggtatggggcaggaaaga

SEQ ID NO: 18526 - DNA, 122 bp, Homo sapiens
  misc_feature (61)..(62): /note="This region represents a CpG dinucleotide"
  misc_feature (61)..(61): /note="Nucleotide may be methylated to form 5-methylcytosine"
cttgaagagcgacattaactgaaatggctcatggctcatcctttgattcaggcctgcctgcgtggagagctggacagacttcctcctgactaatgagccctcgcatcctaattgggccaggg

SEQ ID NO: 18527 - DNA, 122 bp, Homo sapiens
  misc_feature (61)..(62): /note="This region represents a CpG dinucleotide"
  misc_feature (61)..(61): /note="Nucleotide may be methylated to form 5-methylcytosine"
tacgtgctctctttcaaaatgccctgggctaactggacttggcagcacaggttgctagagcgtgtaccaccctgagtcaagaggctcactgtccccaccctacacaagtcacttaacctctc

SEQ ID NO: 18528 - DNA, 122 bp, Homo sapiens
  misc_feature (61)..(62): /note="This region represents a CpG dinucleotide"
  misc_feature (61)..(61): /note="Nucleotide may be methylated to form 5-methylcytosine"
gcaaccttgaacttctggcagagcgctccgctgaatgcccctcccattcgtgggttccaccgcactctggaaacatgaaaactgtcctttgcacgcaaggctacggggctgagatcaaagcc

SEQ ID NO: 18529 - DNA, 122 bp, Homo sapiens
  misc_feature (61)..(62): /note="This region represents a CpG dinucleotide"
  misc_feature (61)..(61): /note="Nucleotide may be methylated to form 5-methylcytosine"
ctcaaatggttttagagcttacaacagtgcattgttagcacatggggctttggccattaccgggctgctacaatttatgatagaccacaccctaaagctagccagaaaggaggatgcactct

SEQ ID NO: 18530 - DNA, 122 bp, Homo sapiens
  misc_feature (61)..(62): /note="This region represents a CpG dinucleotide"
  misc_feature (61)..(61): /note="Nucleotide may be methylated to form 5-methylcytosine"
tcttgccatcatttcccctaaaaggtgacacatggcctaaggagagtcataaaacaagcacgcacacacacaaagtctggctctggaagaaataaaaggaggaggttggggcagggtagtgt

SEQ ID NO: 18531 - DNA, 122 bp, Homo sapiens
  misc_feature (61)..(62): /note="This region represents a CpG dinucleotide"
  misc_feature (61)..(61): /note="Nucleotide may be methylated to form 5-methylcytosine"
agaaggaagctgaggtagagaaagtttaagtaacttgtccaaggttgagcatcttgtcaacgtcattttactactggcatgtgaaacaggtgagttatattttttagaatattaattctcat

SEQ ID NO: 18532 - DNA, 122 bp, Homo sapiens
  misc_feature (61)..(62): /note="This region represents a CpG dinucleotide"
  misc_feature (61)..(61): /note="Nucleotide may be methylated to form 5-methylcytosine"
agtcattacagttcctcctcctcccattaaaatgggagcatacagaggttagaaagtaaacgtagttctaatcaaagtttggcttacagcagatctcctgggcctgcaggttatctgcctaa

SEQ ID NO: 18533 - DNA, 122 bp, Homo sapiens
  misc_feature (61)..(62): /note="This region represents a CpG dinucleotide"
  misc_feature (61)..(61): /note="Nucleotide may be methylated to form 5-methylcytosine"
atttggactcataattacacctctgggccatgtggcaaacaactctgattaccctctagacgggaggacagtgacaatttagggccaaagcaactaataaaattaggcaaaataagtggcac

SEQ ID NO: 18534 - DNA, 122 bp, Homo sapiens
  misc_feature (61)..(62): /note="This region represents a CpG dinucleotide"
  misc_feature (61)..(61): /note="Nucleotide may be methylated to form 5-methylcytosine"
tttctctaaagctacacacactctttggtctcagctgcagaagccaaatgacaaagagaacgtcatcgtctggaaagcatcgcaataagatgcacacgatgtgccaccgctgtggctctgaa

SEQ ID NO: 18535 - DNA, 122 bp, Homo sapiens
  misc_feature (61)..(62): /note="This region represents a CpG dinucleotide"
  misc_feature (61)..(61): /note="Nucleotide may be methylated to form 5-methylcytosine"
ccatctaaagaaatacataaaaaatcaagcatttgtggcccatactcttcctgccatgcccgttggtctctacctcatggctcacatggcatgtaatagcgagtcagtgtttttgttttaca

SEQ ID NO: 18536 - DNA, 122 bp, Homo sapiens
  misc_feature (61)..(62): /note="This region represents a CpG dinucleotide"
  misc_feature (61)..(61): /note="Nucleotide may be methylated to form 5-methylcytosine"
ctttcctcttgggccaatcattgggtatttacattcactgtggtcacctgagccaggtaccgcaattgcatgtcctggagtagaaactgatgtgatacccaagactaacacttagttccttc

SEQ ID NO: 18537 - DNA, 122 bp, Homo sapiens
  misc_feature (61)..(62): /note="This region represents a CpG dinucleotide"
  misc_feature (61)..(61): /note="Nucleotide may be methylated to form 5-methylcytosine"
ttcatacacacacacacacacacacacacacacacttcctattttagtgtgtcataagaacgaggatgtagcaaattcaggaaatttagtttactaggctgaacattaatttcctttgtccc

SEQ ID NO: 18538 - DNA, 122 bp, Homo sapiens
  misc_feature (61)..(62): /note="This region represents a CpG dinucleotide"
  misc_feature (61)..(61): /note="Nucleotide may be methylated to form 5-methylcytosine"
tctcagttgtattcttccgttgaaatctttttttactgaaatttattttcgcatatagcacgaggagggggccaagataattcagtatttcgttaatcaggcatatagatctagagcgggga

SEQ ID NO: 18539 - DNA, 122 bp, Homo sapiens
  misc_feature (61)..(62): /note="This region represents a CpG dinucleotide"
  misc_feature (61)..(61): /note="Nucleotide may be methylated to form 5-methylcytosine"
tcttccccccaacatctggtcccactggaaggtctgcaggggcaatgacacgcacagagccgtcacctcctgtgatgacaatgccttcttctggacacctcccacaggacctgcctgcagct

SEQ ID NO: 18540 - DNA, 122 bp, Homo sapiens
  misc_feature (61)..(62): /note="This region represents a CpG dinucleotide"
  misc_feature (61)..(61): /note="Nucleotide may be methylated to form 5-methylcytosine"
aacataactagaacaatgtaaaagctggaattcaagcccaagttctctgctgataaagcccgtgttctttctaagaatattaactgcctctcaattccatgaaatcacattatgtaatatgc

SEQ ID NO: 18541 - DNA, 122 bp, Homo sapiens
  misc_feature (61)..(62): /note="This region represents a CpG dinucleotide"
  misc_feature (61)..(61): /note="Nucleotide may be methylated to form 5-methylcytosine"
aaagaaagaaaatatagtttctgaaatttgggattgccgagtagcagacccagtgggctccgggacaggatggagaggcctgggtggcgtccgtgaggctgcctggctagcagcggcgccca

SEQ ID NO: 18542 - DNA, 122 bp, Homo sapiens
  misc_feature (61)..(62): /note="This region represents a CpG dinucleotide"
  misc_feature (61)..(61): /note="Nucleotide may be methylated to form 5-methylcytosine"
ggccctgggatgaggggtggttcacttcctactgctgctgtgacgagtggccacaaacttcgtgacttcacacaacacacgtttattatcttgcatttctgcaggtcagaagtccaaaatag

SEQ ID NO: 18543 - DNA, 122 bp, Homo sapiens
  misc_feature (61)..(62): /note="This region represents a CpG dinucleotide"
  misc_feature (61)..(61): /note="Nucleotide may be methylated to form 5-methylcytosine"
aatggctgtgttttctttggcagaagctagaccaagtttcacatcacagttgagaggagacgtgcataggaactgcgtcatctggttccacactcgctccagtgatgtttgagccccagcat

SEQ ID NO: 18544 - DNA, 122 bp, Homo sapiens
  misc_feature (61)..(62): /note="This region represents a CpG dinucleotide"
  misc_feature (61)..(61): /note="Nucleotide may be methylated to form 5-methylcytosine"
ctgcctgcacttggacagcctcaatactgcacttctgtctaatttatagctgcaaagctccgtcggcaaaggcagacctgcctcggaacagaggaaatgcagagaaaacggtcaggctcttc

SEQ ID NO: 18545 - DNA, 122 bp, Homo sapiens
  misc_feature (61)..(62): /note="This region represents a CpG dinucleotide"
  misc_feature (61)..(61): /note="Nucleotide may be methylated to form 5-methylcytosine"
ctttgttcaaaaatccctttgtacagctctctctctgttcgagagctgttaaagacacatcgagtcattgccctggccatcgtcagaagccagaagaacagtaggaaagggagctctttcgc

SEQ ID NO: 18546 - DNA, 122 bp, Homo sapiens
  misc_feature (61)..(62): /note="This region represents a CpG dinucleotide"
  misc_feature (61)..(61): /note="Nucleotide may be methylated to form 5-methylcytosine"
aggtacagaaaacacatatacgcacacacgcacacacgtgcgcgtgcgcgcacacacacacgcagctgggtttaattaagaggaaagtggtcagatgaattacattttcttaaagaaatatt

SEQ ID NO: 18547 - DNA, 122 bp, Homo sapiens
  misc_feature (61)..(62): /note="This region represents a CpG dinucleotide"
  misc_feature (61)..(61): /note="Nucleotide may be methylated to form 5-methylcytosine"
aaatgtcaccaatttccccttcatcagataatttcaggagacagaaccgtttctgtagggcgagagggagggagtatgtgtacatgtgctgctacctcccctccctttccacatcagccctt

SEQ ID NO: 18548 - DNA, 122 bp, Homo sapiens
  misc_feature (61)..(62): /note="This region represents a CpG dinucleotide"
  misc_feature (61)..(61): /note="Nucleotide may be methylated to form 5-methylcytosine"
atatgacaacagtggcctggaagagatcatcacagttgttccccttatttatcaaaatcccgattgttttattttaaacagcacacatctgagctagtaacagtttggtccaagcagcagag

SEQ ID NO: 18549 - DNA, 122 bp, Homo sapiens
  misc_feature (61)..(62): /note="This region represents a CpG dinucleotide"
  misc_feature (61)..(61): /note="Nucleotide may be methylated to form 5-methylcytosine"
agtttcttatctgcttgtcattaagcagatatccacgaatctacacttttgtaccaaacacgtaaaacagatcccctatttatttagatggttatttaatgtcgaaagaaatattaagctta

SEQ ID NO: 18550 - DNA, 122 bp, Homo sapiens
  misc_feature (61)..(62): /note="This region represents a CpG dinucleotide"
  misc_feature (61)..(61): /note="Nucleotide may be methylated to form 5-methylcytosine"
gggttaattgggctgagtgtggccacaaagcagaaagacttgctgtgctttctgaacttacgtaagttacaaacactattaaaatgtcacaaacaaataagagaatgaggactgtacttagg

SEQ ID NO: 18551 - DNA, 122 bp, Homo sapiens
  misc_feature (61)..(62): /note="This region represents a CpG dinucleotide"
  misc_feature (61)..(61): /note="Nucleotide may be methylated to form 5-methylcytosine"
gaaaaatgtgtgtcatcaagatttttctgtaccgtttaatttgttaggcctttctgggcacgctgactttgtgcaacattgaactaccttattagaagaaacactcgcaacagttaatgaga

SEQ ID NO: 18552 - DNA, 122 bp, Homo sapiens
  misc_feature (61)..(62): /note="This region represents a CpG dinucleotide"
  misc_feature (61)..(61): /note="Nucleotide may be methylated to form 5-methylcytosine"
gcctatttttaaaaatgtaagtccttcctttgaggccccccggaactggcagcaggccgacgggcaatcgttcctctggccgcacactttcaagtgaccgaatgtacccaaactgtttgata

SEQ ID NO: 18553 - DNA, 122 bp, Homo sapiens
  misc_feature (61)..(62): /note="This region represents a CpG dinucleotide"
  misc_feature (61)..(61): /note="Nucleotide may be methylated to form 5-methylcytosine"
ctctgggcaagagtgtgtgtgtttgcctgtacaattcagtcatcagcttactgcaggtgccgtttcctgttcttgaggcatctttaactgcatgatggtggctatgtggttttagttggttg

SEQ ID NO: 18554 - DNA, 122 bp, Homo sapiens
  misc_feature (61)..(62): /note="This region represents a CpG dinucleotide"
  misc_feature (61)..(61): /note="Nucleotide may be methylated to form 5-methylcytosine"
gtaaggagtgaaagaggaagccttttattttctccctggagatcagaaccagagcagctacgataagaaagtaggttggagacgcaagagaatttgcataagtgtttctgagaaccatatat

SEQ ID NO: 18555 - DNA, 122 bp, Homo sapiens
  misc_feature (61)..(62): /note="This region represents a CpG dinucleotide"
  misc_feature (61)..(61): /note="Nucleotide may be methylated to form 5-methylcytosine"
ctctattctgttacgtcattaacagtgccttactgtgcaaggcaccaaaggacataaatacgtacttgcaaagattccagatgagctgttcatgtgggccccttgctgactatattccagcc

SEQ ID NO: 18556 - DNA, 122 bp, Homo sapiens
  misc_feature (61)..(62): /note="This region represents a CpG dinucleotide"
  misc_feature (61)..(61): /note="Nucleotide may be methylated to form 5-methylcytosine"
ctccagatgatctcaatgcttgctcaagtttgagaaccactgaaccgcagtatgactctccgtgtcacctggctaactctgcctcactttcaggtctcagtgtagacaccacctcttctagg

SEQ ID NO: 18557 - DNA, 122 bp, Homo sapiens
  misc_feature (61)..(62): /note="This region represents a CpG dinucleotide"
  misc_feature (61)..(61): /note="Nucleotide may be methylated to form 5-methylcytosine"
ttttctgagtaagggcttgcctctaatcaagtcaaacagaagcctgtgtcactgtcctgacgctataagtagttaaagtcaggctgataaaaatatatggacaaggctatgaatgaaatagg

SEQ ID NO: 18558 - DNA, 122 bp, Homo sapiens
  misc_feature (61)..(62): /note="This region represents a CpG dinucleotide"
  misc_feature (61)..(61): /note="Nucleotide may be methylated to form 5-methylcytosine"
ggatggattatactatccactgtttcaggcttctactggggatcttggtatgtatccccccgtggttaagggggaactactgtattttgttaacctccagcactttacacaaaaggggaact

SEQ ID NO: 18559 - DNA, 122 bp, Homo sapiens
  misc_feature (61)..(62): /note="This region represents a CpG dinucleotide"
  misc_feature (61)..(61): /note="Nucleotide may be methylated to form 5-methylcytosine"
acgtagtaatcgaagaggaaacaaaatacgtgtctttatttcttcactgatcttgtctgacgatgacaaaaaatatcttagtgactgtgaccttagcagcatggctacctgatttatcccag

SEQ ID NO: 18560 - DNA, 122 bp, Homo sapiens
  misc_feature (61)..(62): /note="This region represents a CpG dinucleotide"
  misc_feature (61)..(61): /note="Nucleotide may be methylated to form 5-methylcytosine"
acaaatggggtttggatggttcactgtctgtgttcagcatatctatccagagccccaattcgtctctccttccggtgaccgatgcctgattactactgtggtacctaggcagggcctccggg

SEQ ID NO: 18561 - DNA, 122 bp, Homo sapiens
  misc_feature (61)..(62): /note="This region represents a CpG dinucleotide"
  misc_feature (61)..(61): /note="Nucleotide may be methylated to form 5-methylcytosine"
ggtgtgagtttgtgtacccgattctactgtgaggagttcaggttgctttacctgctgttgcgtcttaacagggtgagacatgtgcctgtggttacaggcctgtcccaggagaacttgtccta

SEQ ID NO: 18562 - DNA, 122 bp, Homo sapiens
  misc_feature (61)..(62): /note="This region represents a CpG dinucleotide"
  misc_feature (61)..(61): /note="Nucleotide may be methylated to form 5-methylcytosine"
aacaaacctgaacaacaatgcattcacttctcctcccagctgaggccatcagtcaagctacgttacaacccgggtcaagggaaaatgcacttaaccagtgagaatcccatatccaggatggc

SEQ ID NO: 18563 - DNA, 122 bp, Homo sapiens
  misc_feature (61)..(62): /note="This region represents a CpG dinucleotide"
  misc_feature (61)..(61): /note="Nucleotide may be methylated to form 5-methylcytosine"
ctgggttgaaggcagcagagctagagttagaagccctgtttaccctggtgaatcctaatccgtgtcccaagcatcatgtcttctgtgactcacatccatcactcacccaactgtgtggactt

SEQ ID NO: 18564 - DNA, 122 bp, Homo sapiens
  misc_feature (61)..(62): /note="This region represents a CpG dinucleotide"
  misc_feature (61)..(61): /note="Nucleotide may be methylated to form 5-methylcytosine"
ttcctatcagcacagtgcagatgtgcaacacaacaggtttatttaacaactgaatagctacgtcagtgttggaggggtgggtaaagagaaacaaagctttcactttccttttgggttttgtt

SEQ ID NO: 18565 - DNA, 122 bp, Homo sapiens
  misc_feature (61)..(62): /note="This region represents a CpG dinucleotide"
  misc_feature (61)..(61): /note="Nucleotide may be methylated to form 5-methylcytosine"
tagtttcagccaaaaagttttcagaaagttatgagtcactgaatataggattataatgagcgtctgtgagtaaacttaactaaagcacagattctattttgtatgtgggaagtcacacacac

SEQ ID NO: 18566 - DNA, 122 bp, Homo sapiens
  misc_feature (61)..(62): /note="This region represents a CpG dinucleotide"
  misc_feature (61)..(61): /note="Nucleotide may be methylated to form 5-methylcytosine"
agtcacagtttttcacagtgatcctaagtcttccatgctgtggtacagaccccaagttttcgcaactcagaggtgggccaagtgcaaggggacctgagtcagagccaggtttgatcctgacc

SEQ ID NO: 18567 - DNA, 122 bp, Homo sapiens
  misc_feature (61)..(62): /note="This region represents a CpG dinucleotide"
  misc_feature (61)..(61): /note="Nucleotide may be methylated to form 5-methylcytosine"
cactgcttttagcaccattaatatttcagtggctctcgggatgcaggttgtatattcccacgggagacacaccacctgcttcggactcctggcaaatggttttgcctagacaggtgaagaca

SEQ ID NO: 18568 - DNA, 122 bp, Homo sapiens
  misc_feature (61)..(62): /note="This region represents a CpG dinucleotide"
  misc_feature (61)..(61): /note="Nucleotide may be methylated to form 5-methylcytosine"
tcatctttcagaattaaatgaagtgatgcacgtaaaatgcttagtgtagtttctgtcatacggcgaataagggtttatgtgcccagtaagggttatctgctattattattgttctggtgatg

SEQ ID NO: 18569 - DNA, 122 bp, Homo sapiens
  misc_feature (61)..(62): /note="This region represents a CpG dinucleotide"
  misc_feature (61)..(61): /note="Nucleotide may be methylated to form 5-methylcytosine"
gacccctcccctccctcttctcctcgtcctggattctccagcagctttcactctctcacccgcacttccccagcccgggctccttctgcagggcctctgccctcactgatcccccttctgaa

SEQ ID NO: 18570 - DNA, 122 bp, Homo sapiens
  misc_feature (61)..(62): /note="This region represents a CpG dinucleotide"
  misc_feature (61)..(61): /note="Nucleotide may be methylated to form 5-methylcytosine"
ttgtttagttaaggtaacagaaacttcaactggtgtttcaattggaggaaatttaatacacggtatagttacaaaagggtcagaaagcctagaatagccaaaagagaaaagtaaacttcctt

SEQ ID NO: 18571 - DNA, 122 bp, Homo sapiens
  misc_feature (61)..(62): /note="This region represents a CpG dinucleotide"
  misc_feature (61)..(61): /note="Nucleotide may be methylated to form 5-methylcytosine"
ctgcatgtggggctcaaggccaaaagcactgccacactcgagcaactccacacttccccacggcttactgtaaagatgctgaccaaaaccaccagggctggaaccgctgccctgcccaacct

SEQ ID NO: 18572 - DNA, 122 bp, Homo sapiens
  misc_feature (61)..(62): /note="This region represents a CpG dinucleotide"
  misc_feature (61)..(61): /note="Nucleotide may be methylated to form 5-methylcytosine"
cggtggaagaggttgcggaagagctgacgtaggtaagagtagtcgggcttgtcgtcaaaccgcagggagcggcagaagttgaggtatgttgagaattcggctggagggtgttgcagaggata

SEQ ID NO: 18573 - DNA, 122 bp, Homo sapiens
  misc_feature (61)..(62): /note="This region represents a CpG dinucleotide"
  misc_feature (61)..(61): /note="Nucleotide may be methylated to form 5-methylcytosine"
tgagatgcccaacctgcgtggaaagcctccacccaccttgcagcataagtgcggaggaaacggtgacaaaatcattgccccgctccctaatggggctattactttaaagttatggggccaag

SEQ ID NO: 18574 - DNA, 122 bp, Homo sapiens
  misc_feature (61)..(62): /note="This region represents a CpG dinucleotide"
  misc_feature (61)..(61): /note="Nucleotide may be methylated to form 5-methylcytosine"
gataatctgtgtgccactatgaaaaggaaataggcagatagccaacacttctttatcaaacgggctggagctgagactgtcagacggagacatggacactacttggtcacagagactagccc

SEQ ID NO: 18575 - DNA, 122 bp, Homo sapiens
  misc_feature (61)..(62): /note="This region represents a CpG dinucleotide"
  misc_feature (61)..(61): /note="Nucleotide may be methylated to form 5-methylcytosine"
ttgcactgggtattgcagtctgttggtcatcagcaggtgactgcctattgccaaaagagacgatgagatgaaaagtaggaattcatgatttcagaatctagcctcacttggagaaagcacct

SEQ ID NO: 18576 - DNA, 122 bp, Homo sapiens
  misc_feature (61)..(62): /note="This region represents a CpG dinucleotide"
  misc_feature (61)..(61): /note="Nucleotide may be methylated to form 5-methylcytosine"
ccttgcctgtgttccaggttccagtaaactcctggcttactgagggcagtgtctgtctttcgtcctccagcagtgtctagaacagtgccttgctcataggcactgagtcagtacccatctgg

SEQ ID NO: 18577 - DNA, 122 bp, Homo sapiens
  misc_feature (61)..(62): /note="This region represents a CpG dinucleotide"
  misc_feature (61)..(61): /note="Nucleotide may be methylated to form 5-methylcytosine"
ttggggggcaatggagtcaggggctggctgggaggagtcccaaggctaattcttcttgttcgcctatttgcatccgctgttaggctgaggatcattttaataaataacaatgaacaggaatg

SEQ ID NO: 18578 - DNA, 122 bp, Homo sapiens
  misc_feature (61)..(62): /note="This region represents a CpG dinucleotide"
  misc_feature (61)..(61): /note="Nucleotide may be methylated to form 5-methylcytosine"
aatataactatttaagtggtttttctatagcttcttcctgtcagtgcacacaggcatacacgtctactggtaatcacgagaactaacatttattagttatcgaatgaatgcctggcaccatc

SEQ ID NO: 18579 - DNA, 122 bp, Homo sapiens
  misc_feature (61)..(62): /note="This region represents a CpG dinucleotide"
  misc_feature (61)..(61): /note="Nucleotide may be methylated to form 5-methylcytosine"
tggagaggattttggaatgtcgcatagctcctggctgggcaaggtggctgggagtcatcccgcctgcaggtagacagagggtgtggagctcagggatcatgagtaagcagtgggaagtggac

SEQ ID NO: 18580 - DNA, 122 bp, Homo sapiens
  misc_feature (61)..(62): /note="This region represents a CpG dinucleotide"
  misc_feature (61)..(61): /note="Nucleotide may be methylated to form 5-methylcytosine"
acatgacctcaggcaaattacttaaatcctctgagcctcagttgcttcatctgaagaatgcgaccagacaggtggattttcaggcatgcaataaggtggcacaccttcaatcagagattctt

SEQ ID NO: 18581 - DNA, 122 bp, Homo sapiens
  misc_feature (61)..(62): /note="This region represents a CpG dinucleotide"
  misc_feature (61)..(61): /note="Nucleotide may be methylated to form 5-methylcytosine"
agcatctgtgtgtatgcagtgttatctaaggacacacccacagacacggacacgtccttacgcagagaacagccgctgcctcttagtgttcaggatgatacgtttttccttaatatcatcct

SEQ ID NO: 18582 - DNA, 122 bp, Homo sapiens
  misc_feature (61)..(62): /note="This region represents a CpG dinucleotide"
  misc_feature (61)..(61): /note="Nucleotide may be methylated to form 5-methylcytosine"
tattttccactactaagtggcagggctgcattcaaacccaggcagtgttttttcagtgctcgtaactattatgcaacacacaacaaaaccttcaactatgaacacctctatcaccagagaac

SEQ ID NO: 18583 - DNA, 122 bp, Homo sapiens
  misc_feature (61)..(62): /note="This region represents a CpG dinucleotide"
  misc_feature (61)..(61): /note="Nucleotide may be methylated to form 5-methylcytosine"
gaactctgaaagaaggtggaatcttcagttcactttctcttctgcccaatctagagtaagcgtggcatgcttcctgggagagaacccgagctagactccagttacttcctgctgcatcaaac

SEQ ID NO: 18584 - DNA, 122 bp, Homo sapiens
  misc_feature (61)..(62): /note="This region represents a CpG dinucleotide"
  misc_feature (61)..(61): /note="Nucleotide may be methylated to form 5-methylcytosine"
gcattggaaagacatccgatacagaggggcttttatagtccttcactaggggtgttggcacgccatgcagcatctttccttgttattgtttttactcatttgcatgcaaacatctgattagc

SEQ ID NO: 18585 - DNA, 122 bp, Homo sapiens
  misc_feature (61)..(62): /note="This region represents a CpG dinucleotide"
  misc_feature (61)..(61): /note="Nucleotide may be methylated to form 5-methylcytosine"
tcagaccactgtgcaggccagtgacggcctggaggggcctggcccctacccgtgacttcacgtgccctgcagagattcagccatgggtgtgagccacagaggaggccaatacggaggctcgg

SEQ ID NO: 18586 - DNA, 122 bp, Homo sapiens
  misc_feature (61)..(62): /note="This region represents a CpG dinucleotide"
  misc_feature (61)..(61): /note="Nucleotide may be methylated to form 5-methylcytosine"
tgataaaaacagttacttcagctagtgccaaattctaggagtagctttggtctcccataacggccaccaaatattaattgcaaataaataacctaagtaaaagcagtgtgtttgttctgcat

SEQ ID NO: 18587 - DNA, 122 bp, Homo sapiens
  misc_feature (61)..(62): /note="This region represents a CpG dinucleotide"
  misc_feature (61)..(61): /note="Nucleotide may be methylated to form 5-methylcytosine"
gccccacacacgagcggcctgatgctcggaggccctgtggcccctgggtgactcagtgagcggcagggatagggctggatccacagccccgccccaagcttcctgccaccgtgggaaccaca

SEQ ID NO: 18588 - DNA, 122 bp, Homo sapiens
  misc_feature (61)..(62): /note="This region represents a CpG dinucleotide"
  misc_feature (61)..(61): /note="Nucleotide may be methylated to form 5-methylcytosine"
tgagagcttcaggtgaggaggctgagggaacagtgagagcccaaaggacatcctaggtcacgcgaaggagtctacactttatctgaagtgccaacgtaagtctttgaagaattccaagcaag

SEQ ID NO: 18589 - DNA, 122 bp, Homo sapiens
  misc_feature (61)..(62): /note="This region represents a CpG dinucleotide"
  misc_feature (61)..(61): /note="Nucleotide may be methylated to form 5-methylcytosine"
tgaaaaagttattttaaagggctctatcatcaccaagttatgtgggccccatctaacctacgccaatttcaaaaatgacacatggataggagataatttactctttcaagtcacacaagatt

SEQ ID NO: 18590 - DNA, 122 bp, Homo sapiens
  misc_feature (61)..(62): /note="This region represents a CpG dinucleotide"
  misc_feature (61)..(61): /note="Nucleotide may be methylated to form 5-methylcytosine"
cctccaatgactggtcggtccagtccccttgctttaagggaaatcaatgctaaagagctacgacacttccagaactcctcgaggaactggctgaggcctttgttgcaaattttgtggtagct

SEQ ID NO: 18591 - DNA, 122 bp, Homo sapiens
  misc_feature (61)..(62): /note="This region represents a CpG dinucleotide"
  misc_feature (61)..(61): /note="Nucleotide may be methylated to form 5-methylcytosine"
tggcttcctgtgcccctctttacagaacacctttctgcaatgattgtgctttcctcctgccgtgctgcccagctcaccatgactcactgctggttggtataccaaagaggacttgcaaagca

SEQ ID NO: 18592 - DNA, 122 bp, Homo sapiens
  misc_feature (61)..(62): /note="This region represents a CpG dinucleotide"
  misc_feature (61)..(61): /note="Nucleotide may be methylated to form 5-methylcytosine"
accatggcaggagtgctggaaaggtggtgtcagctaacagttgcttcagccagataaggacggtaacttcagtccaataaaaacctcatcagttaccaactaaatcagggcatggtgttttt

SEQ ID NO: 18593 - DNA, 122 bp, Homo sapiens
  misc_feature (61)..(62): /note="This region represents a CpG dinucleotide"
  misc_feature (61)..(61): /note="Nucleotide may be methylated to form 5-methylcytosine"
cttacccagcccctagcccctattgggtgagctctgctgccaatcactttccccaccccccgcctcattgtttgcaatctgttgcattttgttccaggccatgtggcctgtgagtgaactag

SEQ ID NO: 18594 - DNA, 122 bp, Homo sapiens
  misc_feature (61)..(62): /note="This region represents a CpG dinucleotide"
  misc_feature (61)..(61): /note="Nucleotide may be methylated to form 5-methylcytosine"
ctcctaatcctcgctggtcatgctgatctaagagcctaagtagggccttcttatctctcacgttgtacttgggcttgaaagcatacttcccatctattacttcaattttgggattgttgact

SEQ ID NO: 18595 - DNA, 122 bp, Homo sapiens
  misc_feature (61)..(62): /note="This region represents a CpG dinucleotide"
  misc_feature (61)..(61): /note="Nucleotide may be methylated to form 5-methylcytosine"
aattctttccatcccaaaccatcctgtctaagctctgaggaggcacaggtggctctaaggcggcactggcttttgcctgcaggggcaccatcctcagctacaggtctaacaggaacttggtg

SEQ ID NO: 18596 - DNA, 122 bp, Homo sapiens
  misc_feature (61)..(62): /note="This region represents a CpG dinucleotide"
  misc_feature (61)..(61): /note="Nucleotide may be methylated to form 5-methylcytosine"
agttttcccccaccctcttgggtgactggttttcctacagcctaaatctggtgctgaaaacgtcaccgcttctcacttttactttgttagctcatatggtgccaccttaagaagacctactg

SEQ ID NO: 18597 - DNA, 122 bp, Homo sapiens
  misc_feature (61)..(62): /note="This region represents a CpG dinucleotide"
  misc_feature (61)..(61): /note="Nucleotide may be methylated to form 5-methylcytosine"
cccgcgtttagagtatgcctacggcgcctactaacgtctagacctaggagaggcgtctcccgcccctcgacccacagccagccgccacttgatagctaacgcgtcttccggccggtacacac

SEQ ID NO: 18598 - DNA, 122 bp, Homo sapiens
  misc_feature (61)..(62): /note="This region represents a CpG dinucleotide"
  misc_feature (61)..(61): /note="Nucleotide may be methylated to form 5-methylcytosine"
ttagtctgcactggtcactgtcatctagagccaattgttcaagaggaaggaaacactcaacgccaaggagaagagagtcatcaccgctgctttccaaaattgttgtatgagctgctccctca

SEQ ID NO: 18599 - DNA, 122 bp, Homo sapiens
  misc_feature (61)..(62): /note="This region represents a CpG dinucleotide"
  misc_feature (61)..(61): /note="Nucleotide may be methylated to form 5-methylcytosine"
tcttggggccctccctctcagacccaggcacccatgctgtgagaatcccagcctaggatacgtgtagcctctccagtcaacagccctggtggagtggccagcccagagtgagtcagcatcaa

SEQ ID NO: 18600 - DNA, 122 bp, Homo sapiens
  misc_feature (61)..(62): /note="This region represents a CpG dinucleotide"
  misc_feature (61)..(61): /note="Nucleotide may be methylated to form 5-methylcytosine"
gaaaaaaaaaaaaagtcacagagcatttatcactgatgtttcctgttcccacccacaagccgctctcactactactttagttatgatagcacagtgttcacggaagttttaaaaatcaaaaa

SEQ ID NO: 18601 - DNA, 122 bp, Homo sapiens
  misc_feature (61)..(62): /note="This region represents a CpG dinucleotide"
  misc_feature (61)..(61): /note="Nucleotide may be methylated to form 5-methylcytosine"
gtttctggcaggacttctgatatcctgtgccagactgaccacaagtccctgccttggcatcgtagtgccaatataaaagccagggtaaaatattatctttcaaaatgtaaggctccagtgac

SEQ ID NO: 18602 - DNA, 122 bp, Homo sapiens
  misc_feature (61)..(62): /note="This region represents a CpG dinucleotide"
  misc_feature (61)..(61): /note="Nucleotide may be methylated to form 5-methylcytosine"
agcccacagtccttgaggcatgcaagtggccaagttgcggctcacacaggatggaagttacgccagccccacgggccggcagatagcagcccagcctgggtcccccacccttcggttactga

SEQ ID NO: 18603 - DNA, 122 bp, Homo sapiens
  misc_feature (61)..(62): /note="This region represents a CpG dinucleotide"
  misc_feature (61)..(61): /note="Nucleotide may be methylated to form 5-methylcytosine"
agtcatccaccaagttgcagccatcaaccaacagtttatgaagaaccccacagcagactgcgacaggttccacaaatgctgtggcagtgtcccctggtatcctctctcagtactgatcacct

SEQ ID NO: 18604 - DNA, 122 bp, Homo sapiens
  misc_feature (61)..(62): /note="This region represents a CpG dinucleotide"
  misc_feature (61)..(61): /note="Nucleotide may be methylated to form 5-methylcytosine"
gcaagtactgactttaaaaattttcatatcacagctaacaaacgtatacatttgtccctgcgtaaaatggtaaacagatggctcttcattcctacgacaatgatatcatgctcttactaaaa

SEQ ID NO: 18605 - DNA, 122 bp, Homo sapiens
  misc_feature (61)..(62): /note="This region represents a CpG dinucleotide"
  misc_feature (61)..(61): /note="Nucleotide may be methylated to form 5-methylcytosine"
acctcttgatccacccgcctcagcctcccaaagtgctgggattacaggtgtaagctaccacgcccggccttgtgtgcatttcaatggctgctgttgactcacacttatgtgtcattaataaa

SEQ ID NO: 18606 - DNA, 122 bp, Homo sapiens
  misc_feature (61)..(62): /note="This region represents a CpG dinucleotide"
  misc_feature (61)..(61): /note="Nucleotide may be methylated to form 5-methylcytosine"
gcccacctcagcctcccaaagtgctgggattacaggcgtgagccaccgtgcccagccgagcgtgtctgtcttgttcactggtgtattttcttaatgcctggaatgatgtctagcaaacaata

SEQ ID NO: 18607 - DNA, 122 bp, Homo sapiens
  misc_feature (61)..(62): /note="This region represents a CpG dinucleotide"
  misc_feature (61)..(61): /note="Nucleotide may be methylated to form 5-methylcytosine"
aggctgtcacctgtcatccaggcaaatgtaatcggtcctacctctaagcctttacaatgtcgtgtccacatcttttacagggcaactgccagccctgcacagctacctccttctgcctcaag

SEQ ID NO: 18608 - DNA, 122 bp, Homo sapiens
  misc_feature (61)..(62): /note="This region represents a CpG dinucleotide"
  misc_feature (61)..(61): /note="Nucleotide may be methylated to form 5-methylcytosine"
ccaacagaccgttctgtttctctattttgaaaacacggaaataacttttttctaacttcccgtagtttaccctgagtcacagatgtttgaaaagaaattccagcctgttatataagttctac

SEQ ID NO: 18609 - DNA, 122 bp, Homo sapiens
  misc_feature (61)..(62): /note="This region represents a CpG dinucleotide"
  misc_feature (61)..(61): /note="Nucleotide may be methylated to form 5-methylcytosine"
acagtgcgtggcacgtagtcgagtgctatgtgggcctgatgactactgcagacgggcctgcgcagctgtgtgccagcgcattcatgacttcattccaaggggagtaaacatgggggtgcagc

SEQ ID NO: 18610 - DNA, 122 bp, Homo sapiens
  misc_feature (61)..(62): /note="This region represents a CpG dinucleotide"
  misc_feature (61)..(61): /note="Nucleotide may be methylated to form 5-methylcytosine"
ttccgacccagcctcttccccagaacgctgagtgtggactgcggcggtgggggaaaggagcggttgcccacaaaccatccgagcacagggagccgctcagacccgacgccggcgggacaggc

SEQ ID NO: 18611 - DNA, 122 bp, Homo sapiens
  misc_feature (61)..(62): /note="This region represents a CpG dinucleotide"
  misc_feature (61)..(61): /note="Nucleotide may be methylated to form 5-methylcytosine"
caggcagcagcaccagcaggctcagctccttcctggcgtagggcagctccagcagctgcgcgcgcacctcgcccacgtgggcgagcttaaacgtggcctcctgatacatcatctgcactggc

SEQ ID NO: 18612 - DNA, 122 bp, Homo sapiens
  misc_feature (61)..(62): /note="This region represents a CpG dinucleotide"
  misc_feature (61)..(61): /note="Nucleotide may be methylated to form 5-methylcytosine"
ctagagacgacagagaaaccagaagagccacaactcaaaataaaaaagatgagttatatacgcctacatatgaatgaggaagatttttggaattaatgcttagccagaaaaaccgaaaaaga

SEQ ID NO: 18613 - DNA, 122 bp, Homo sapiens
  misc_feature (61)..(62): /note="This region represents a CpG dinucleotide"
  misc_feature (61)..(61): /note="Nucleotide may be methylated to form 5-methylcytosine"
tcagagtgagttgaggcgagcctgcaggactgtgttccctctgcaggctgtaggggaggacgtgtttccttgccttctccactggtaaaggccacccacatttctcagctcatgccccttcg

SEQ ID NO: 18614 - DNA, 122 bp, Homo sapiens
  misc_feature (61)..(62): /note="This region represents a CpG dinucleotide"
  misc_feature (61)..(61): /note="Nucleotide may be methylated to form 5-methylcytosine"
aggggcagggcagggccaggtcgaatgctaaggccatgcccagagcagggtcaaggcagacgcagggccacatcatggcagggccaggttagcacagggccgaggaaaggccagggcaggta

SEQ ID NO: 18615 - DNA, 122 bp, Homo sapiens
  misc_feature (61)..(62): /note="This region represents a CpG dinucleotide"
  misc_feature (61)..(61): /note="Nucleotide may be methylated to form 5-methylcytosine"
gaagaacaggctgggactgccggcgtctgaagccctctcctcccctgtgagcttgggcaacgcggcggcatgcggctgcagccactgggaacgagcctggctttggggacttgacttggccg

SEQ ID NO: 18616 - DNA, 122 bp, Homo sapiens
  misc_feature (61)..(62): /note="This region represents a CpG dinucleotide"
  misc_feature (61)..(61): /note="Nucleotide may be methylated to form 5-methylcytosine"
ggccctgagcacaattacaaaccaaaccagattcatccactgaagcctcttcccttttgacgttttcaatcatcatcttttccttttctattagattttgaatatccttaagtggcactcat

SEQ ID NO: 18617 - DNA, 122 bp, Homo sapiens
  misc_feature (61)..(62): /note="This region represents a CpG dinucleotide"
  misc_feature (61)..(61): /note="Nucleotide may be methylated to form 5-methylcytosine"
aaaagaaaaaaagagagagagggcagaaggatgcttcaaagatgagggggtgtctggtaacgatgataatgatagcatgattcagggcactgtgcaaccaatctggagaagggtggtagggg

SEQ ID NO: 18618 - DNA, 122 bp, Homo sapiens
  misc_feature (61)..(62): /note="This region represents a CpG dinucleotide"
  misc_feature (61)..(61): /note="Nucleotide may be methylated to form 5-methylcytosine"
ttaattatgaaagttgcactagaacccaggtcgtttgatgtccaattttgtattattccacggcactataaagccttctgatggcttggaagctggctgaccctgagatatttgtccccaca

SEQ ID NO: 18619 - DNA, 122 bp, Homo sapiens
  misc_feature (61)..(62): /note="This region represents a CpG dinucleotide"
  misc_feature (61)..(61): /note="Nucleotide may be methylated to form 5-methylcytosine"
ttctgtgacctgccagcaaatgctggtttaatcttcaggtcctagtaccctgccagcttgcgctgaccaaggggagtgtttatagcttttttgacctgttggtagcttaaagtgatttagcc

SEQ ID NO: 18620 - DNA, 122 bp, Homo sapiens
  misc_feature (61)..(62): /note="This region represents a CpG dinucleotide"
  misc_feature (61)..(61): /note="Nucleotide may be methylated to form 5-methylcytosine"
ggctctgattggtaaagttgctataagaagcctgagaaccatgtaatttatctctagctgcgagatatcaatgccttatgctttgtgtttgcttccaccgtgtagagttggggaaagcatat

SEQ ID NO: 18621 - DNA, 122 bp, Homo sapiens
  misc_feature (61)..(62): /note="This region represents a CpG dinucleotide"
  misc_feature (61)..(61): /note="Nucleotide may be methylated to form 5-methylcytosine"
ctgaggctcaggatgaggatttgatccagggctgctaattcttctgacagagcacagccacgtggcttatgcctgcagcaggcccttcccaaaggctgttcaggccagggcaaggtgctgag

SEQ ID NO: 18622 - DNA, 122 bp, Homo sapiens
  misc_feature (61)..(62): /note="This region represents a CpG dinucleotide"
  misc_feature (61)..(61): /note="Nucleotide may be methylated to form 5-methylcytosine"
atgtcaatagtgccgaggttgagaaaccataggctagaccatctgatccatgctgagtcacgctgtgttgccttctcatgttacatcaggatgcctttctttgaaaggttactaaccaccct

SEQ ID NO: 18623 - DNA, 122 bp, Homo sapiens
  misc_feature (61)..(62): /note="This region represents a CpG dinucleotide"
  misc_feature (61)..(61): /note="Nucleotide may be methylated to form 5-methylcytosine"
tggagctcccagtcaagtggctgacattcaattccagctgagctccttattattctctctcgtcattcttgtgagtcatgttcccaatttgatttgagcagtaggaaggctgcgtgtgccac

SEQ ID NO: 18624 - DNA, 122 bp, Homo sapiens
  misc_feature (61)..(62): /note="This region represents a CpG dinucleotide"
  misc_feature (61)..(61): /note="Nucleotide may be methylated to form 5-methylcytosine"
ctcctgagtttaagtccacgtttacgcccaaccacactcttcacggttcaacgctccacccgccctccactgactcatctagaggtcgagtctcgaggtttctttaaaacacgtaagtgtct

SEQ ID NO: 18625 - DNA, 122 bp, Homo sapiens
  misc_feature (61)..(62): /note="This region represents a CpG dinucleotide"
  misc_feature (61)..(61): /note="Nucleotide may be methylated to form 5-methylcytosine"
agttagcatctgggcactactagttatgctcattgccactgagatgtcactgcttctaggcgtcttagtggacaaaaccaagaattatatgtatgtatactggcccatgtatacacactgct

SEQ ID NO: 18626 - DNA, 122 bp, Homo sapiens
  misc_feature (61)..(62): /note="This region represents a CpG dinucleotide"
  misc_feature (61)..(61): /note="Nucleotide may be methylated to form 5-methylcytosine"
aaaaaaaaaaaaaaagaaaagaagagtacactcagcctcaaggaatgcatattatctcaacgccactgtgcagatatatagctagtagaattgtgtcataggaatgagcagttcatatagct

SEQ ID NO: 18627 - DNA, 122 bp, Homo sapiens
  misc_feature (61)..(62): /note="This region represents a CpG dinucleotide"
  misc_feature (61)..(61): /note="Nucleotide may be methylated to form 5-methylcytosine"
taagaatccagtatagctttctctatatttcctcttagaattaatgcttgagagaaacaacgggtgcctgacatactggaacctgcccattgctattttctgatgctcttctccgtccaata

SEQ ID NO: 18628 - DNA, 122 bp, Homo sapiens
  misc_feature (61)..(62): /note="This region represents a CpG dinucleotide"
  misc_feature (61)..(61): /note="Nucleotide may be methylated to form 5-methylcytosine"
gtgtctctccttagcacataagaccctgtccgaggactgtggcatgacgtgctggagtcacgattctgtcacccagtcaggtcatcagtgtcagagagctaggtggccaggttggagttgat

SEQ ID NO: 18629 - DNA, 122 bp, Homo sapiens
  misc_feature (61)..(62): /note="This region represents a CpG dinucleotide"
  misc_feature (61)..(61): /note="Nucleotide may be methylated to form 5-methylcytosine"
gtcctgttcttaccttgtcctgactcctgttggacatgcctcatttcctgtataaacttgcgtcactaagaagacagtaaattcttactcactttgttaaacatacatactttcctgtagga

SEQ ID NO: 18630 - DNA, 122 bp, Homo sapiens
  misc_feature (61)..(62): /note="This region represents a CpG dinucleotide"
  misc_feature (61)..(61): /note="Nucleotide may be methylated to form 5-methylcytosine"
ctgcaattgtgtttagggagataaatgcacgcccatctgagagtttcttctcttttcccgcggtgtgtacctgggagatcatacttagccatgtgcatgtccaggaagttgcttctccctgg

SEQ ID NO: 18631 - DNA, 122 bp, Homo sapiens
  misc_feature (61)..(62): /note="This region represents a CpG dinucleotide"
  misc_feature (61)..(61): /note="Nucleotide may be methylated to form 5-methylcytosine"
aaatgtattaccaggctgaggaagtaccctttagttccttgtttgctcagagtttaatagcgtatgtgttggattttttcagattatattcttgcatctacggagatggtcatagggctttt

SEQ ID NO: 18632 - DNA, 122 bp, Homo sapiens
  misc_feature (61)..(62): /note="This region represents a CpG dinucleotide"
  misc_feature (61)..(61): /note="Nucleotide may be methylated to form 5-methylcytosine"
acaaatttgagtgtcatatttttctcttaggagtttgcatgaagccccaaatcctcaaggcgcatatgccaacgcaggagcccaggcataaactatcctgccgaccttttcacctcatcatc

SEQ ID NO: 18633 - DNA, 122 bp, Homo sapiens
  misc_feature (61)..(62): /note="This region represents a CpG dinucleotide"
  misc_feature (61)..(61): /note="Nucleotide may be methylated to form 5-methylcytosine"
gcagatttcatgctgtttcttctttttcttcaaggagtccacatactctagatctacccacgtcaccacattgcctgacacgttggggctgcggctttgaactgccgttttgtttgcatttc

SEQ ID NO: 18634 - DNA, 122 bp, Homo sapiens
  misc_feature (61)..(62): /note="This region represents a CpG dinucleotide"
  misc_feature (61)..(61): /note="Nucleotide may be methylated to form 5-methylcytosine"
tcattgtagacaggattgagagtgtttttctttatggttgttttcttcttcttcagcctccgcccatcacagagcaaggacactttcacatagggatctgtgccaatggggacagagaaaag

SEQ ID NO: 18635 - DNA, 122 bp, Homo sapiens
  misc_feature (61)..(62): /note="This region represents a CpG dinucleotide"
  misc_feature (61)..(61): /note="Nucleotide may be methylated to form 5-methylcytosine"
aacccatcagctccagacagaggaagtccatggtgagtgggaagtagacttttcaaccagcggagaagcctccctactgaacaggaagcatgctttgtcccagaaagactgaagaaaaatgc

SEQ ID NO: 18636 - DNA, 122 bp, Homo sapiens
  misc_feature (61)..(62): /note="This region represents a CpG dinucleotide"
  misc_feature (61)..(61): /note="Nucleotide may be methylated to form 5-methylcytosine"
aagtctcagaaacgtaaataagttgcccgggctcacagggctagtaaatggcaatacagacgggaacttagggctcctgcttttgctgttaaccaccagatcacactatctcttcttggagg

SEQ ID NO: 18637 - DNA, 122 bp, Homo sapiens
  misc_feature (61)..(62): /note="This region represents a CpG dinucleotide"
  misc_feature (61)..(61): /note="Nucleotide may be methylated to form 5-methylcytosine"
ccaccagagcggcccacacaacgcggcctctggacctgcagggagtcagagggccatccccggaggccgagataggctaagccgcccatatcccacgggcaagtcctatcctggcgttccca

SEQ ID NO: 18638 - DNA, 122 bp, Homo sapiens
  misc_feature (61)..(62): /note="This region represents a CpG dinucleotide"
  misc_feature (61)..(61): /note="Nucleotide may be methylated to form 5-methylcytosine"
taaacacagaatcactgctacggtaactataactactactgtgcatttttattcctgaaacgatgttctttctttcacctttcaaagtagactaaaaggtaggaggtctggaaaaagctcta

SEQ ID NO: 18639 - DNA, 122 bp, Homo sapiens
  misc_feature (61)..(62): /note="This region represents a CpG dinucleotide"
  misc_feature (61)..(61): /note="Nucleotide may be methylated to form 5-methylcytosine"
gataacatactgagcttatcaacatctcttgtaaaattgtctagctctggccgggcacggcgggtcacgcctgtagtaccagcactttgagaggccaaggtgggtggatcacctgaggtcag

SEQ ID NO: 18640 - DNA, 122 bp, Homo sapiens
  misc_feature (61)..(62): /note="This region represents a CpG dinucleotide"
  misc_feature (61)..(61): /note="Nucleotide may be methylated to form 5-methylcytosine"
tgtgcccatgaagcagccacaggtgtttgcccgtttagatgcagtaggtgtttgcttttccgatgtgtggaggcagggcccagaggtttactaagcccctgttctcacttttgcagtgccgt

SEQ ID NO: 18641 - DNA, 122 bp, Homo sapiens
  misc_feature (61)..(62): /note="This region represents a CpG dinucleotide"
  misc_feature (61)..(61): /note="Nucleotide may be methylated to form 5-methylcytosine"
cttccgtgcagtgttctaaagcctcttgctcctgtctctcctgtgggaaacccatagttacggcttcaagcagagacccaagcaccacctcagggtcttgaccttgtgtgggaataatctat

SEQ ID NO: 18642 - DNA, 122 bp, Homo sapiens
  misc_feature (61)..(62): /note="This region represents a CpG dinucleotide"
  misc_feature (61)..(61): /note="Nucleotide may be methylated to form 5-methylcytosine"
cacccacaaggaagggaggtggacacgtacacacacaaacacacacttcaatcaggaactcggtgatcacatgcccacggtgagagagaaaaaaggaaacacgaccccacagcttcctctgc

SEQ ID NO: 18643 - DNA, 122 bp, Homo sapiens
  misc_feature (61)..(62): /note="This region represents a CpG dinucleotide"
  misc_feature (61)..(61): /note="Nucleotide may be methylated to form 5-methylcytosine"
gagcatttccttttcagagattttctgactctgtgtgtatgttttcagtttttctttctgcgttctgcttaaggcagcattgtcacccctgtggatccccacgactgtgaaacaagacagaa

SEQ ID NO: 18644 - DNA, 122 bp, Homo sapiens
  misc_feature (61)..(62): /note="This region represents a CpG dinucleotide"
  misc_feature (61)..(61): /note="Nucleotide may be methylated to form 5-methylcytosine"
agtagaattaagagtttgagttaatcccctcagtattccatattcttttagataaagaggcggaggaagtactgctccctggctgtgattactgatgacacagtatagctgcttataattct

SEQ ID NO: 18645 - DNA, 122 bp, Homo sapiens
  misc_feature (61)..(62): /note="This region represents a CpG dinucleotide"
  misc_feature (61)..(61): /note="Nucleotide may be methylated to form 5-methylcytosine"
aaacaaacagttgagcattgtagtgaattcatgctttgtaaatagtactggtcatagccacgatggctgtcagcccacaaacatctaactcatgtttgacctctaatgttcaccatcactga

SEQ ID NO: 18646 - DNA, 122 bp, Homo sapiens
  misc_feature (61)..(62): /note="This region represents a CpG dinucleotide"
  misc_feature (61)..(61): /note="Nucleotide may be methylated to form 5-methylcytosine"
tccatgggtcaagtcaaaactgtttgtttgtaagtctcttccttgggggtggggatgcaacgaagagcttgtggtcacagttgaccacaagctgaatatgactcaacctgctggagctcttg

SEQ ID NO: 18647 - DNA, 122 bp, Homo sapiens
  misc_feature (61)..(62): /note="This region represents a CpG dinucleotide"
  misc_feature (61)..(61): /note="Nucleotide may be methylated to form 5-methylcytosine"
ttcctaactatatttgcaaatgttggctggaaaccatgggggcctggccagaaatcgccacgtgagccatctcaggtccagataagtcaaaatgttgtaacagaggaatagcgccaaagggt

SEQ ID NO: 18648 - DNA, 122 bp, Homo sapiens
  misc_feature (61)..(62): /note="This region represents a CpG dinucleotide"
  misc_feature (61)..(61): /note="Nucleotide may be methylated to form 5-methylcytosine"
aatgggttggctaagtgattctctgctccatgtagcatcatatgggtttaaactaggtgacgctcagcctgatgggaggagggtggctgggctgacctagacagtccttgagactctccaca

SEQ ID NO: 18649 - DNA, 122 bp, Homo sapiens
  misc_feature (61)..(62): /note="This region represents a CpG dinucleotide"
  misc_feature (61)..(61): /note="Nucleotide may be methylated to form 5-methylcytosine"
ttcatgtagaattcctgccaagaattttcataattagactgaataaggccaaactctgtccgtacatgcctcaccgcgtcgactgccctaagagttcttctgcagccccagcaaagcctggg

SEQ ID NO: 18650 - DNA, 122 bp, Homo sapiens
  misc_feature (61)..(62): /note="This region represents a CpG dinucleotide"
  misc_feature (61)..(61): /note="Nucleotide may be methylated to form 5-methylcytosine"
ttactacagatattatctgaagctttaaagcctcctggagtgaaagctagttcataaccacgctgtttggagcgaagaaaactacctggaattcttgttctccaaagatatggaattatccc

SEQ ID NO: 18651 - DNA, 122 bp, Homo sapiens
  misc_feature (61)..(62): /note="This region represents a CpG dinucleotide"
  misc_feature (61)..(61): /note="Nucleotide may be methylated to form 5-methylcytosine"
tttcctcattttacagacagggaaagcaaaaaacataagcatggtaatgcatatataatacgtgtctatggcagaggcattcgaaccagaatgactccatcttgaataggggctggtaaaat

SEQ ID NO: 18652 - DNA, 122 bp, Homo sapiens
  misc_feature (61)..(62): /note="This region represents a CpG dinucleotide"
  misc_feature (61)..(61): /note="Nucleotide may be methylated to form 5-methylcytosine"
ggaaggagttttcagtggggatggaatccaggctgcaaagagaaagcatttgtatgtgaacgcttctggaaaattacttaaagctgggctcagtggcacacgcctgtagtcccagctgccca

SEQ ID NO: 18653 - DNA, 122 bp, Homo sapiens
  misc_feature (61)..(62): /note="This region represents a CpG dinucleotide"
  misc_feature (61)..(61): /note="Nucleotide may be methylated to form 5-methylcytosine"
ctccttccccttcaagtcttaacctcagtgtgactttctctgggtaagcttccttgactccgccactctgacttaggcagcccttgactggattctcatagcaacactctgagtcacggcac

SEQ ID NO: 18654 - DNA, 122 bp, Homo sapiens
  misc_feature (61)..(62): /note="This region represents a CpG dinucleotide"
  misc_feature (61)..(61): /note="Nucleotide may be methylated to form 5-methylcytosine"
gtgaaatcgctagtcaaacagtgagtagcagcagtagctccacttcctttgccaggggttcgtaacccctcagttccctatccgacccctgtggtcctcagtgtctgctccttgggtttctt

SEQ ID NO: 18655 - DNA, 122 bp, Homo sapiens
  misc_feature (61)..(62): /note="This region represents a CpG dinucleotide"
  misc_feature (61)..(61): /note="Nucleotide may be methylated to form 5-methylcytosine"
ccccatgtgtaaactttccttgtacttcttaatggagcaactgggaaatgaaagatggtgcgaaggaggctgaaggaacatccacagaccagtactgctggtgtcattcatctgagtcatct

SEQ ID NO: 18656 - DNA, 122 bp, Homo sapiens
  misc_feature (61)..(62): /note="This region represents a CpG dinucleotide"
  misc_feature (61)..(61): /note="Nucleotide may be methylated to form 5-methylcytosine"
cctgatgagagtcccaatcagcaccttcagcgcattactcaatgatgtgctcagagcctgcgtgagctcccgccgcacaaacatcctatcccatctcagcccttctatcgcatccccagtgc

SEQ ID NO: 18657 - DNA, 122 bp, Homo sapiens
  misc_feature (61)..(62): /note="This region represents a CpG dinucleotide"
  misc_feature (61)..(61): /note="Nucleotide may be methylated to form 5-methylcytosine"
tcgtagagggaggatgacacgggtccgtacgcccagtcggtgaacttcctggacaggctccggagccgcttctccttgatctcacgactgaggatgtacttcaggatctgggacaggaggag

SEQ ID NO: 18658 - DNA, 122 bp, Homo sapiens
  misc_feature (61)..(62): /note="This region represents a CpG dinucleotide"
  misc_feature (61)..(61): /note="Nucleotide may be methylated to form 5-methylcytosine"
aaagttatctgtgaagagtattagttgtttaataaagcgtgcctgccctcccgatgaacccgccagtgactctgcagctggggtcattccaagttcacgcagtggacttttgactgccttct

SEQ ID NO: 18659 - DNA, 122 bp, Homo sapiens
  misc_feature (61)..(62): /note="This region represents a CpG dinucleotide"
  misc_feature (61)..(61): /note="Nucleotide may be methylated to form 5-methylcytosine"
ttgactttagcagggaacttcctcttaaaatacctaggactgagtgtatcaggcagtcagcgggtgtttatttcatgctcacattgtacaaagcactacactaggtctagggtaaagataca

SEQ ID NO: 18660 - DNA, 122 bp, Homo sapiens
  misc_feature (61)..(62): /note="This region represents a CpG dinucleotide"
  misc_feature (61)..(61): /note="Nucleotide may be methylated to form 5-methylcytosine"
ctgtgacaaaccaggccttcagcacttatgtgacttgcgacatgttggtaaatttccaaccgtctcccatgagtgcagacaggatgggggtgcagtatataataataataatcctacactgt

SEQ ID NO: 18661 - DNA, 122 bp, Homo sapiens
  misc_feature (61)..(62): /note="This region represents a CpG dinucleotide"
  misc_feature (61)..(61): /note="Nucleotide may be methylated to form 5-methylcytosine"
tggaacaaggaaatggatttcaaaagcactacctatgtggccagggcgagtaaactggggcgataaagcttacacaactgagttatgagtcctaaatgagataacaagaaaagcagagcatg

SEQ ID NO: 18662 - DNA, 122 bp, Homo sapiens
  misc_feature (61)..(62): /note="This region represents a CpG dinucleotide"
  misc_feature (61)..(61): /note="Nucleotide may be methylated to form 5-methylcytosine"
ggggtaagagacagtggcaggccttgctctgatcctgaaagcttctgctcagaagtgacacgtcactccctcaaaacacatggtcaggcctgaagataatgagccggaaagtataatcctct

SEQ ID NO: 18663 - DNA, 122 bp, Homo sapiens
  misc_feature (61)..(62): /note="This region represents a CpG dinucleotide"
  misc_feature (61)..(61): /note="Nucleotide may be methylated to form 5-methylcytosine"
ttgcactgcaaataatccttttcattctggtcacctgcatgctcttcactcaggtgaccacgtggcttacttcctcactcccttccagtctttgctcaaaagtcatctcctcaatgagacct

SEQ ID NO: 18664 - DNA, 122 bp, Homo sapiens
  misc_feature (61)..(62): /note="This region represents a CpG dinucleotide"
  misc_feature (61)..(61): /note="Nucleotide may be methylated to form 5-methylcytosine"
tgaatatgataatccaggcaacattgttagcacagaaccctacacatgttgttagctattcgttaagaataaatgtatacagatcaggcatttgattgcaaccatcaaagcaccagtattca

SEQ ID NO: 18665 - DNA, 122 bp, Homo sapiens
  misc_feature (61)..(62): /note="This region represents a CpG dinucleotide"
  misc_feature (61)..(61): /note="Nucleotide may be methylated to form 5-methylcytosine"
tacaaatgtatcctataaaccatcctgtaagccctccccagagggacctctgaccgtttacgagagtgaaccaccatagcccacagtcaaagtcggggaatacagcactcagggcccaagtt

SEQ ID NO: 18666 - DNA, 122 bp, Homo sapiens
  misc_feature (61)..(62): /note="This region represents a CpG dinucleotide"
  misc_feature (61)..(61): /note="Nucleotide may be methylated to form 5-methylcytosine"
cttctatttaattttgtcccagtgcaagaagcagacaccttaagagcacgttaatttcatcgtgactgaaactttgggagaccttgtataccacagaggcagactgctgtttaaaactttct

SEQ ID NO: 18667 - DNA, 122 bp, Homo sapiens
  misc_feature (61)..(62): /note="This region represents a CpG dinucleotide"
  misc_feature (61)..(61): /note="Nucleotide may be methylated to form 5-methylcytosine"
gccactgagatcatatctgtgtgcttggggaagggagagtgccgggattatcagacattgcgttagaactcagtgccctgtcacagtggaatgcaacacagggtggaactcagctggtgccc

SEQ ID NO: 18668 - DNA, 122 bp, Homo sapiens
  misc_feature (61)..(62): /note="This region represents a CpG dinucleotide"
  misc_feature (61)..(61): /note="Nucleotide may be methylated to form 5-methylcytosine"
agccttggtttggtgactaatgattcattgtgctgctgctctggaagggccatacactcacggagaccaggatcttaagcctcagggccaccctctgtaagccaagtggaggcaaaattgag

SEQ ID NO: 18669 - DNA, 122 bp, Homo sapiens
  misc_feature (61)..(62): /note="This region represents a CpG dinucleotide"
  misc_feature (61)..(61): /note="Nucleotide may be methylated to form 5-methylcytosine"
tataacaggcctcagagagatcccctgcttcttctagcatgtgaggttacagtgagaaaacgactggctatgaggaagcaggccctcaccagacactaaatctgtcaataccttaattttgg

SEQ ID NO: 18670 - DNA, 122 bp, Homo sapiens
  misc_feature (61)..(62): /note="This region represents a CpG dinucleotide"
  misc_feature (61)..(61): /note="Nucleotide may be methylated to form 5-methylcytosine"
tcaatgtccacatcattccatctgcatcgtcttcctacaaacagtttttcttctactattcggttatttctcctttttttgtttcctatttcagaatcaaatttattttacttgcaaagtca

SEQ ID NO: 18671 - DNA, 122 bp, Homo sapiens
  misc_feature (61)..(62): /note="This region represents a CpG dinucleotide"
  misc_feature (61)..(61): /note="Nucleotide may be methylated to form 5-methylcytosine"
ctcagtgttgccctcctgccaccaccctattttctcaataacaacagcattgctcaggggcgactctgcctcccatcaggacacaaaagctcctatgtttcccattgcaccccatcactgtc

SEQ ID NO: 18672 - DNA, 122 bp, Homo sapiens
  misc_feature (61)..(62): /note="This region represents a CpG dinucleotide"
  misc_feature (61)..(61): /note="Nucleotide may be methylated to form 5-methylcytosine"
gttcaaaacgtagagtgagctgaggctcctgagaagagccaactagaatgcatcagggctcgcttggaacgggaagcaaaagacaatttgacagactgccacagatgttctattattaagca

SEQ ID NO: 18673 - DNA, 122 bp, Homo sapiens
  misc_feature (61)..(62): /note="This region represents a CpG dinucleotide"
  misc_feature (61)..(61): /note="Nucleotide may be methylated to form 5-methylcytosine"
tcagttggcagtttagctggggctgactggttccagatgacctcactcaaatgcctgacacgtgtcttggtgttggctgcagtgatgagatgactggactatgtttccctcctcatcaagaa

SEQ ID NO: 18674 - DNA, 122 bp, Homo sapiens
  misc_feature (61)..(62): /note="This region represents a CpG dinucleotide"
  misc_feature (61)..(61): /note="Nucleotide may be methylated to form 5-methylcytosine"
ctcaggtgatccacccaccttggcctcccaaagtgttgaaattacaggtgtgagccactgcgcttggcctaaaggacattttgggaaccggtgttaatgtctattgaaaccttttatttttg

SEQ ID NO: 18675 - DNA, 122 bp, Homo sapiens
  misc_feature (61)..(62): /note="This region represents a CpG dinucleotide"
  misc_feature (61)..(61): /note="Nucleotide may be methylated to form 5-methylcytosine"
tctccctgaccttgactgccaggagcaggctttggaatacaaagaggtggagaagaagggcggtagagaaagggtaacaagctgttcttccagatttcctagcaagtcttagataatggtaa

SEQ ID NO: 18676 - DNA, 122 bp, Homo sapiens
  misc_feature (61)..(62): /note="This region represents a CpG dinucleotide"
  misc_feature (61)..(61): /note="Nucleotide may be methylated to form 5-methylcytosine"
ggcacttctctaagcagcaccatgctgtataaaacaggcatagggctcacatcaggcatacggctcacatcagcacacaatggccacgcggctcacaccaggcgcatggcacgtgacaggca

SEQ ID NO: 18677 - DNA, 122 bp, Homo sapiens
  misc_feature (61)..(62): /note="This region represents a CpG dinucleotide"
  misc_feature (61)..(61): /note="Nucleotide may be methylated to form 5-methylcytosine"
tgagcacttcccgtccccgcagggcggcggcggtgggggtggcggtggcggggggctgcacgtggccattcccgactcggtcctcaccccgcccggcgccgacggcgcggccgcccgcaaga

SEQ ID NO: 18678 - DNA, 122 bp, Homo sapiens
  misc_feature (61)..(62): /note="This region represents a CpG dinucleotide"
  misc_feature (61)..(61): /note="Nucleotide may be methylated to form 5-methylcytosine"
atcccagttcttcttctttctggctctgcaacctggggtgagtggcctactttgtacctccgtttccactttcagagcctgcctatgacagcatttacttaatagcattggtgagcagagtc

SEQ ID NO: 18679 - DNA, 122 bp, Homo sapiens
  misc_feature (61)..(62): /note="This region represents a CpG dinucleotide"
  misc_feature (61)..(61): /note="Nucleotide may be methylated to form 5-methylcytosine"
ggcccacataaacattttctatttttgttctggaccttaagtactaagttaatagtcttacgagaggcagatgcagatgacttccaaggaaaaccaaggccattttaggccaaggcatggca

SEQ ID NO: 18680 - DNA, 122 bp, Homo sapiens
  misc_feature (61)..(62): /note="This region represents a CpG dinucleotide"
  misc_feature (61)..(61): /note="Nucleotide may be methylated to form 5-methylcytosine"
cacgggaaaaaccacaggtcactctatcttggttctagagataaagtccccgacaccggacgagtttttcgccagccccaaggaccagcaagccaggtccaaagaatcataaagttactgat

SEQ ID NO: 18681 - DNA, 122 bp, Homo sapiens
  misc_feature (61)..(62): /note="This region represents a CpG dinucleotide"
  misc_feature (61)..(61): /note="Nucleotide may be methylated to form 5-methylcytosine"
actgaagcaatcaatgattcatatccaagccatctggtcccaacccattttttttcttctcgtatcttgctatctttctcacttgcaatacaatgatcaaatttatatttgaaacacgtatt

SEQ ID NO: 18682 - DNA, 122 bp, Homo sapiens
  misc_feature (61)..(62): /note="This region represents a CpG dinucleotide"
  misc_feature (61)..(61): /note="Nucleotide may be methylated to form 5-methylcytosine"
agtgaatcagtagtagtgtggtctctgaagtcaactttaaaagaattgatccatcagctccgccaagagtcaataaatctgcaggagtcatgataagacccatgatcaagataaacctgccg

SEQ ID NO: 18683 - DNA, 122 bp, Homo sapiens
  misc_feature (61)..(62): /note="This region represents a CpG dinucleotide"
  misc_feature (61)..(61): /note="Nucleotide may be methylated to form 5-methylcytosine"
ggctacacactaaatttctcccacccactttttctttttcttaaagtcaacctttagtttcgtggtggttatgaatttattggttttactttcaatatgaaatagacatgcatacttcctct

SEQ ID NO: 18684 - DNA, 122 bp, Homo sapiens
  misc_feature (61)..(62): /note="This region represents a CpG dinucleotide"
  misc_feature (61)..(61): /note="Nucleotide may be methylated to form 5-methylcytosine"
tggataaatggggagtcagccgtgacagctgccgcttgcaagtgtcttcattgtgccagtcgctcctcacacatcctttcatttaatcctcacattatgaggtgtaatgtctttaataagct

SEQ ID NO: 18685 - DNA, 122 bp, Homo sapiens
  misc_feature (61)..(62): /note="This region represents a CpG dinucleotide"
  misc_feature (61)..(61): /note="Nucleotide may be methylated to form 5-methylcytosine"
aggggagcacagaggccaaagcagctcttgtctttacttttcagtcacacagcatgttctcgtggccactggccaaaatggcttttttttttttttttgagatggagtctcactcttgttgc

SEQ ID NO: 18686 - DNA, 122 bp, Homo sapiens
  misc_feature (61)..(62): /note="This region represents a CpG dinucleotide"
  misc_feature (61)..(61): /note="Nucleotide may be methylated to form 5-methylcytosine"
gggtgttcataaacaaaggcatggcagtaatacagctgagggagatggagcggagggcgacggaacaggtacttgcctcaattaaccctaaaaatgtgcttatgagggaggataactgttcc

SEQ ID NO: 18687 - DNA, 122 bp, Homo sapiens
  misc_feature (61)..(62): /note="This region represents a CpG dinucleotide"
  misc_feature (61)..(61): /note="Nucleotide may be methylated to form 5-methylcytosine"
cttacccctgcctgagtctgtggatcctcacctagatgtggggcccatagatctgcccagcgcatttgctgcctcatgttcccaggcacctgactgtaggccatagcctcaccctgcacagg

SEQ ID NO: 18688 - DNA, 122 bp, Homo sapiens
  misc_feature (61)..(62): /note="This region represents a CpG dinucleotide"
  misc_feature (61)..(61): /note="Nucleotide may be methylated to form 5-methylcytosine"
gaatgcggtgactgatgtcccaactcttaacttctgactcaaagttatactcatcacttccggccacctttcattggctgaagcaactcgcagggctatactatactttagtcaggtgggga

SEQ ID NO: 18689 - DNA, 122 bp, Homo sapiens
  misc_feature (61)..(62): /note="This region represents a CpG dinucleotide"
  misc_feature (61)..(61): /note="Nucleotide may be methylated to form 5-methylcytosine"
aaactgactttacgattacaactcaaaaatgtttacaagatctttagataatagtgtatgcgcagaaagatgaggaaacctctgaccaagaagtctagacacagattaagggcccaggaggg

SEQ ID NO: 18690 - DNA, 122 bp, Homo sapiens
  misc_feature (61)..(62): /note="This region represents a CpG dinucleotide"
  misc_feature (61)..(61): /note="Nucleotide may be methylated to form 5-methylcytosine"
gaaagatgcctatttagtaagcaaataattgcaacacagtctgatatttgtaattcttagcggaagagaggcagaaaagaaagagtagtagcttcacattccttgaaggtgagggtgagact

SEQ ID NO: 18691 - DNA, 122 bp, Homo sapiens
  misc_feature (61)..(62): /note="This region represents a CpG dinucleotide"
  misc_feature (61)..(61): /note="Nucleotide may be methylated to form 5-methylcytosine"
cacggggactcccagcccctacccggcaagagaggcatcactgaggctgcatctgccatgcgctcctggtgtgactgcaccctgtcaggccagacccggcttgagccaacttagccaagcca

SEQ ID NO: 18692 - DNA, 122 bp, Homo sapiens
  misc_feature (61)..(62): /note="This region represents a CpG dinucleotide"
  misc_feature (61)..(61): /note="Nucleotide may be methylated to form 5-methylcytosine"
gaagcaaactagctgatgatgctgtgccacgagaaccaaaaggaacatacaaatcagaaacgtctgttatccaaacccaactgagaaggctctgtctcaggaagggacctccccatttacat

SEQ ID NO: 18693 - DNA, 122 bp, Homo sapiens
  misc_feature (61)..(62): /note="This region represents a CpG dinucleotide"
  misc_feature (61)..(61): /note="Nucleotide may be methylated to form 5-methylcytosine"
agaagatatggctctaagtaagttgtgttctagatccatttacactgtgagtaacattcacgacaccctctgggactcctggatgcagctggtgacccagacccaggaatgacacagccagg

SEQ ID NO: 18694 - DNA, 122 bp, Homo sapiens
  misc_feature (61)..(62): /note="This region represents a CpG dinucleotide"
  misc_feature (61)..(61): /note="Nucleotide may be methylated to form 5-methylcytosine"
agacgccagaacattctcattgcgttttcactgctttggttaacatcttggtctcctgtccgcactctaaagaaccatttgaggactcaggggagtcatgtcctgggagtgactatgggtcc

SEQ ID NO: 18695 - DNA, 122 bp, Homo sapiens
  misc_feature (61)..(62): /note="This region represents a CpG dinucleotide"
  misc_feature (61)..(61): /note="Nucleotide may be methylated to form 5-methylcytosine"
tggcctcttgcgagatggtttcttcattcatctcctttgtagcgcttggatggtggggaacgggggagggctgagtctcttttttaacctcagacagacgcagaagcagaaagaggggaact

SEQ ID NO: 18696 - DNA, 122 bp, Homo sapiens
  misc_feature (61)..(62): /note="This region represents a CpG dinucleotide"
  misc_feature (61)..(61): /note="Nucleotide may be methylated to form 5-methylcytosine"
atacatgcccttctaaactgtgctttcaggagactgggcattgtgctcctttcctcctcacggtccaggatggtaacaaagtgacctcggaagccacatattgagatggcataacccctgtc

SEQ ID NO: 18697 - DNA, 122 bp, Homo sapiens
  misc_feature (61)..(62): /note="This region represents a CpG dinucleotide"
  misc_feature (61)..(61): /note="Nucleotide may be methylated to form 5-methylcytosine"
ttccgtgtaaaaccacagtgtgactgtatttcctgcacacactttgcatcccacacagcccggacacactgcagcactggaggggcacaatgccttgctttaaaacatggctcagaagaacc

SEQ ID NO: 18698 - DNA, 122 bp, Homo sapiens
  misc_feature (61)..(62): /note="This region represents a CpG dinucleotide"
  misc_feature (61)..(61): /note="Nucleotide may be methylated to form 5-methylcytosine"
aaaagccaaatgcagaaaattaattgttaagtattctatcaccacagctctatcctcctccgcccacccacccttgaggaagacaagcccaaagttagttgatgctatggaatcacaaggat

SEQ ID NO: 18699 - DNA, 122 bp, Homo sapiens
  misc_feature (61)..(62): /note="This region represents a CpG dinucleotide"
  misc_feature (61)..(61): /note="Nucleotide may be methylated to form 5-methylcytosine"
aacacagcagtatttcttaggccagacgaccagctcccagcataaagctgtagcccccagcggagaggaagctgtcctcctctacttcctctcttctaaagacaaacatcttgtgcaagaat

SEQ ID NO: 18700 - DNA, 122 bp, Homo sapiens
  misc_feature (61)..(62): /note="This region represents a CpG dinucleotide"
  misc_feature (61)..(61): /note="Nucleotide may be methylated to form 5-methylcytosine"
gctaggaactaagttcctaaggcactctgctctataaacaagcttgtcacactacataaacgtggcatgtcaagggattgaaagtctgctctaaataatgacaggaaagggaaactgccata

SEQ ID NO: 18701 - DNA, 122 bp, Homo sapiens
  misc_feature (61)..(62): /note="This region represents a CpG dinucleotide"
  misc_feature (61)..(61): /note="Nucleotide may be methylated to form 5-methylcytosine"
ctcagtccacaaacgtgggcgtaaaaggcctcatgattcaggtggagtgatggtgcgatgcgtggtgcagtgataagtcctcctgcccgacgccttatggatcatctgacatttccagaacg

SEQ ID NO: 18702 - DNA, 122 bp, Homo sapiens
  misc_feature (61)..(62): /note="This region represents a CpG dinucleotide"
  misc_feature (61)..(61): /note="Nucleotide may be methylated to form 5-methylcytosine"
ccatataagtcttttttaaaaaatgctttctaatctgatagttgtgtatccgagagttaacgctgggagtcattgtttgagtcaagtgttacctcaccagagcatttccttattaaaaaaaa

SEQ ID NO: 18703 - DNA, 122 bp, Homo sapiens
  misc_feature (61)..(62): /note="This region represents a CpG dinucleotide"
  misc_feature (61)..(61): /note="Nucleotide may be methylated to form 5-methylcytosine"
taaaatgcttgcttacagccctacgacaaagaaggctcccagaaacaggaactgtaatttcgacacccaactccctacacccatggccctcacccaggccttcatctctctctcacgggtcc

SEQ ID NO: 18704 - DNA, 122 bp, Homo sapiens
  misc_feature (61)..(62): /note="This region represents a CpG dinucleotide"
  misc_feature (61)..(61): /note="Nucleotide may be methylated to form 5-methylcytosine"
tacatacatatatgcaccaaatagcagagttctaatgtattattcaccctgctccccagacgttattccatgagagcaagaactggatctggcttgcttactgctttgttctcataccaggc

SEQ ID NO: 18705 - DNA, 122 bp, Homo sapiens
  misc_feature (61)..(62): /note="This region represents a CpG dinucleotide"
  misc_feature (61)..(61): /note="Nucleotide may be methylated to form 5-methylcytosine"
tcagcaaactccccaaacctagcagagtaggcagaaggctccaaaaagctagggagaagccggagctggcaaggggccttacagacccaggaagccctccccatgctctgggcctcccttgc

SEQ ID NO: 18706 - DNA, 122 bp, Homo sapiens
  misc_feature (61)..(62): /note="This region represents a CpG dinucleotide"
  misc_feature (61)..(61): /note="Nucleotide may be methylated to form 5-methylcytosine"
ctactgttccccagggctctccagtgggactgtggtctagttgtccacgatggcaacacacggtgaatgctttgcttcccctccctgtcttacttccctactctcttaccagtacttcctgg

SEQ ID NO: 18707 - DNA, 122 bp, Homo sapiens
  misc_feature (61)..(62): /note="This region represents a CpG dinucleotide"
  misc_feature (61)..(61): /note="Nucleotide may be methylated to form 5-methylcytosine"
acatgtagatggcgtagtataactacaagccaactgccaactatgatctcagcaagatgacgacacctaacacatcactaattctgatttgaacaaaccatggtaaaacattacatcctgca

SEQ ID NO: 18708 - DNA, 122 bp, Homo sapiens
  misc_feature (61)..(62): /note="This region represents a CpG dinucleotide"
  misc_feature (61)..(61): /note="Nucleotide may be methylated to form 5-methylcytosine"
ttgctttgttttgttttgtttaattcagggttcaggagatctaagtatttgcagtggacacgaagccattggagaagaaaagactgaagatgcacaaaggaaaagagtataaaggaaatggg

SEQ ID NO: 18709 - DNA, 122 bp, Homo sapiens
  misc_feature (61)..(62): /note="This region represents a CpG dinucleotide"
  misc_feature (61)..(61): /note="Nucleotide may be methylated to form 5-methylcytosine"
tcataaaaagaccaactttagcaccattttcaatcaagaatattccttgaggccaggcggcgtggctcacacctgtaatcccagcactctgggaggcttggggcgggtggatcacctgagct

SEQ ID NO: 18710 - DNA, 122 bp, Homo sapiens
  misc_feature (61)..(62): /note="This region represents a CpG dinucleotide"
  misc_feature (61)..(61): /note="Nucleotide may be methylated to form 5-methylcytosine"
acctctgagtgggaggcagccctggctgagctgtctcctcaccttagcatccgcctgtcccggcgcccatgtagcttccttgtcatccatcttctgggctggcccaggacacgtgcccccat

SEQ ID NO: 18711 - DNA, 122 bp, Homo sapiens
  misc_feature (61)..(62): /note="This region represents a CpG dinucleotide"
  misc_feature (61)..(61): /note="Nucleotide may be methylated to form 5-methylcytosine"
gttgtggccgagtgatgtggacaagctgtcacccactgacaacctgccgcgggggagccgcgcccacatcaccctcggctgtgcagctgacgtagaggccgtgcagacgggccttgacctct

SEQ ID NO: 18712 - DNA, 122 bp, Homo sapiens
  misc_feature (61)..(62): /note="This region represents a CpG dinucleotide"
  misc_feature (61)..(61): /note="Nucleotide may be methylated to form 5-methylcytosine"
gagtgtgggcgtggtaggtcagggaacgacttattcagctaatgcttccaaaaccctccccgctaaaggaaaagcatctggagactaaatatgtaaaatgacattggctatagagtcccacc

SEQ ID NO: 18713 - DNA, 122 bp, Homo sapiens
  misc_feature (61)..(62): /note="This region represents a CpG dinucleotide"
  misc_feature (61)..(61): /note="Nucleotide may be methylated to form 5-methylcytosine"
ctgctgattactcagccacgcccaagatcctgctactaccctggtttctggctccacattcgtcactattgagatgacttactggtcacagtaaaagcaagttgataaaggtggccagtggg

SEQ ID NO: 18714 - DNA, 122 bp, Homo sapiens
  misc_feature (61)..(62): /note="This region represents a CpG dinucleotide"
  misc_feature (61)..(61): /note="Nucleotide may be methylated to form 5-methylcytosine"
ccccggggtcactccagccaggctgtgccaggtgaatgctcaggtatgcggaggcggaggcggaggcaggacggccctgggagggagcaggaggaggggccggcagcctggaagggaaagga

SEQ ID NO: 18715 - DNA, 122 bp, Homo sapiens
  misc_feature (61)..(62): /note="This region represents a CpG dinucleotide"
  misc_feature (61)..(61): /note="Nucleotide may be methylated to form 5-methylcytosine"
aagcttcactaaggctgagaagcaacttaagctgtcaggaataggtgttagtactgaggacggggcagctcactctggccccatgtttagactcctgtcttcattgtcctgactcctgaaga

SEQ ID NO: 18716 - DNA, 122 bp, Homo sapiens
  misc_feature (61)..(62): /note="This region represents a CpG dinucleotide"
  misc_feature (61)..(61): /note="Nucleotide may be methylated to form 5-methylcytosine"
taagaagctccagccgcaggcacggaaataaacagcttctccctgccctgtatacgtctccgattttacccaggatggggctgaggaagcaacacagattcccaaacgttactttttttttt

SEQ ID NO: 18717 - DNA, 122 bp, Homo sapiens
  misc_feature (61)..(62): /note="This region represents a CpG dinucleotide"
  misc_feature (61)..(61): /note="Nucleotide may be methylated to form 5-methylcytosine"
aaaaacagtgaagacaaagacagatgagacgcaggaagcagttcgcaccaaggctgtgcccggaacgtcctctcttttctttccacattaattactctcaagtcacccgggcttccttgtca

SEQ ID NO: 18718 - DNA, 122 bp, Homo sapiens
  misc_feature (61)..(62): /note="This region represents a CpG dinucleotide"
  misc_feature (61)..(61): /note="Nucleotide may be methylated to form 5-methylcytosine"
tggtgttctttgcagaaatgtttccctttctgagacaaactaaaactttgtctatcctttcgtcctgttatttctttcctatcaagtgtgtaagaatgtacatttgacagtgcattctaaaa

SEQ ID NO: 18719 - DNA, 122 bp, Homo sapiens
  misc_feature (61)..(62): /note="This region represents a CpG dinucleotide"
  misc_feature (61)..(61): /note="Nucleotide may be methylated to form 5-methylcytosine"
aattcacttgtctaacatgagcttatttgactagtagacctacatagaatcaaagttgtacgtctgccttatgtctaatgctgacaactctgaaggcatattggttttttaaactaaaccaa

SEQ ID NO: 18720 - DNA, 122 bp, Homo sapiens
  misc_feature (61)..(62): /note="This region represents a CpG dinucleotide"
  misc_feature (61)..(61): /note="Nucleotide may be methylated to form 5-methylcytosine"
agacctttgggcgaggacagtgaagatgaggacagtaaagctcggcagctttgattcaaacgtagcacttgcagaaagacctgtggttgtaccttaatgtaagtactgaaaaaagcacagta

SEQ ID NO: 18721 - DNA, 122 bp, Homo sapiens
  misc_feature (61)..(62): /note="This region represents a CpG dinucleotide"
  misc_feature (61)..(61): /note="Nucleotide may be methylated to form 5-methylcytosine"
ttatttttttgaaacctctctttttacaagctgtgcaaatcttgaccccttggtgtcaggcgatgaaccttgttctgttttgttgctgttacctttaggaactgaactatccagccatcttc

SEQ ID NO: 18722 - DNA, 122 bp, Homo sapiens
  misc_feature (61)..(62): /note="This region represents a CpG dinucleotide"
  misc_feature (61)..(61): /note="Nucleotide may be methylated to form 5-methylcytosine"
gaatcccaagcttgtatttcctggtaggagctctccattgaactccagtcttatcatctacgtggatatttaatagacatctcaaactgaatctaatatcatctgagcttccctcccaaact

SEQ ID NO: 18723 - DNA, 122 bp, Homo sapiens
  misc_feature (61)..(62): /note="This region represents a CpG dinucleotide"
  misc_feature (61)..(61): /note="Nucleotide may be methylated to form 5-methylcytosine"
agtatttccattcattatataatcatggggttgatcgaatccctgactgggcatctttctcgtctccctgctgtgaagtaacatatgggccctcctgctggttaagcacttgagtcaccttc

SEQ ID NO: 18724 - DNA, 122 bp, Homo sapiens
  misc_feature (61)..(62): /note="This region represents a CpG dinucleotide"
  misc_feature (61)..(61): /note="Nucleotide may be methylated to form 5-methylcytosine"
ttagctcctggtactattcacattttctgcagtccgttatgccacttttgcatcatgagacgctattccttatgttgatctatacctctgacagatgaaccatcccaaaagaagagtccata

SEQ ID NO: 18725 - DNA, 122 bp, Homo sapiens
  misc_feature (61)..(62): /note="This region represents a CpG dinucleotide"
  misc_feature (61)..(61): /note="Nucleotide may be methylated to form 5-methylcytosine"
ttatgcttcacaggtttgttgtggcctgttcagcctggaaatcctgtcccgagactgatgcggaaaagctagttcagctgactttttgtgcttttcatgatatgatacagctgatgaactct

SEQ ID NO: 18726 - DNA, 122 bp, Homo sapiens
  misc_feature (61)..(62): /note="This region represents a CpG dinucleotide"
  misc_feature (61)..(61): /note="Nucleotide may be methylated to form 5-methylcytosine"
acaatggatgaatttacatacagttctgtgctctgtagagaaatgtagttgctttagagtcggaacggcaaaatgtggctcttctgaacctagaagagaaaattctgacccctcctccttcc

SEQ ID NO: 18727 - DNA, 122 bp, Homo sapiens
  misc_feature (61)..(62): /note="This region represents a CpG dinucleotide"
  misc_feature (61)..(61): /note="Nucleotide may be methylated to form 5-methylcytosine"
tggtgaaagtaggacacagttgcaccacctgacttgcatcacctcattgccttctagtggcgttataagcttggttccctgctgactgacacctgggaaggggtggtgggcacctcagggca

SEQ ID NO: 18728 - DNA, 122 bp, Homo sapiens
  misc_feature (61)..(62): /note="This region represents a CpG dinucleotide"
  misc_feature (61)..(61): /note="Nucleotide may be methylated to form 5-methylcytosine"
aaactctaaagtacaaaaaaaacccaccaaaaacccaaagtaactacaaagctaatgtaacgtaaatgcaatataacaggcatttttattactcttttctaatgtgggctattaaatttcaa

SEQ ID NO: 18729 - DNA, 122 bp, Homo sapiens
  misc_feature (61)..(62): /note="This region represents a CpG dinucleotide"
  misc_feature (61)..(61): /note="Nucleotide may be methylated to form 5-methylcytosine"
tctgcagttggtgttgggccccaccctgccctgggcgcctctcttcctgaggcttggggacggtcctctgccctcatagtttgactaactccagatatgttgagagaggagagaacccgtga

SEQ ID NO: 18730 - DNA, 122 bp, Homo sapiens
  misc_feature (61)..(62): /note="This region represents a CpG dinucleotide"
  misc_feature (61)..(61): /note="Nucleotide may be methylated to form 5-methylcytosine"
ttctcagcttctcaaagcaaatttttctttgttcaccggtatagaatcatcattggaagccgcctttgctacccaaggtaccaagttcggagctctgtctggtttcacttcacattatgtga

SEQ ID NO: 18731 - DNA, 122 bp, Homo sapiens
  misc_feature (61)..(62): /note="This region represents a CpG dinucleotide"
  misc_feature (61)..(61): /note="Nucleotide may be methylated to form 5-methylcytosine"
tgggaaggctgcttctgtctctgcatgtgtcatcactggaggatgccagtccagcttgaccgctgtgtgcaggcagcatgaccaaactcgctgccactcagtagccatcaaaacgagtagga

SEQ ID NO: 18732 - DNA, 122 bp, Homo sapiens
  misc_feature (61)..(62): /note="This region represents a CpG dinucleotide"
  misc_feature (61)..(61): /note="Nucleotide may be methylated to form 5-methylcytosine"
agcaggcctggcctgggagggccctgattctcatcttaagcaacactggtacctattccacgtggcccgctctgggcagccaacaggttaaggaggccactcctctggagtcaggggtcccc

SEQ ID NO: 18733 - DNA, 122 bp, Homo sapiens
  misc_feature (61)..(62): /note="This region represents a CpG dinucleotide"
  misc_feature (61)..(61): /note="Nucleotide may be methylated to form 5-methylcytosine"
agaggtgcattttaggatatcataaatacacttcatttaggatgctttattttctttttccggttgtgattaatgtttcttggtggaaaagcccacttgaagaaagctggtttcttggggta

SEQ ID NO: 18734 - DNA, 122 bp, Homo sapiens
  misc_feature (61)..(62): /note="This region represents a CpG dinucleotide"
  misc_feature (61)..(61): /note="Nucleotide may be methylated to form 5-methylcytosine"
gcagtcacgcacacatttaccggggacagcatgtgaaagccttgggaagagatgacctgccggtaccgaatgtcaaagccctgtgtattttgcaaacagataaccatggcgcccactgcccc

SEQ ID NO: 18735 - DNA, 122 bp, Homo sapiens
  misc_feature (61)..(62): /note="This region represents a CpG dinucleotide"
  misc_feature (61)..(61): /note="Nucleotide may be methylated to form 5-methylcytosine"
ttcttcattacttctgcaaaatgccactagcacctttgaccaactgttaatattgcatgacgctgacatcttgtgatgtagctggagtttgagaaatggagctgagggttgattcgggtcca

SEQ ID NO: 18736 - DNA, 122 bp, Homo sapiens
  misc_feature (61)..(62): /note="This region represents a CpG dinucleotide"
  misc_feature (61)..(61): /note="Nucleotide may be methylated to form 5-methylcytosine"
ggtgcaagtggtggtgatccgggagcagtcgaggcccgtgacaaaaccaggatgacccagcgttttctaaccgcgctgaggcagtcgcctctccgggtcgctccactcccggactccggcag

SEQ ID NO: 18737 - DNA, 122 bp, Homo sapiens
  misc_feature (61)..(62): /note="This region represents a CpG dinucleotide"
  misc_feature (61)..(61): /note="Nucleotide may be methylated to form 5-methylcytosine"
agggtattgaatcttgtgggggtgagtcaaacattcagaatctgaaggttatgaggtggacggagaacttggggagaatggaacagtcattcacaacacatgtactgtagacagctcaggca

SEQ ID NO: 18738 - DNA, 122 bp, Homo sapiens
  misc_feature (61)..(62): /note="This region represents a CpG dinucleotide"
  misc_feature (61)..(61): /note="Nucleotide may be methylated to form 5-methylcytosine"
aaggcccaggatttggtggacagaggtggggggaacccaccgtttacggaggagctaggacgtgtcaggcagcaagccaccttggggaacaggtattactattcctgttatatagatgagga

SEQ ID NO: 18739 - DNA, 122 bp, Homo sapiens
  misc_feature (61)..(62): /note="This region represents a CpG dinucleotide"
  misc_feature (61)..(61): /note="Nucleotide may be methylated to form 5-methylcytosine"
attcttcctcttccaggaggccatttgcccagagacagagagcaggagcagctggccaagcgaggcactgcatatgcacagaaggaagctgtcctcaatccacaagagccctgccagctgct

SEQ ID NO: 18740 - DNA, 122 bp, Homo sapiens
  misc_feature (61)..(62): /note="This region represents a CpG dinucleotide"
  misc_feature (61)..(61): /note="Nucleotide may be methylated to form 5-methylcytosine"
tgtttgcacttgggcagggctctcgagtccttggaagctgccgtttattttaaaacagcccggactccttgaggaagctgaggagagaggaaatggcagaggcgacctcgcctcacacttcc

SEQ ID NO: 18741 - DNA, 122 bp, Homo sapiens
  misc_feature (61)..(62): /note="This region represents a CpG dinucleotide"
  misc_feature (61)..(61): /note="Nucleotide may be methylated to form 5-methylcytosine"
cagtaaagttcagtctagggttaataaaagattctagggttcactaagacaaagagtagtcgcagtagcagagccttgggtgaagctaaggtccccaggagatctgggatgtctgtgaggaa

SEQ ID NO: 18742 - DNA, 122 bp, Homo sapiens
  misc_feature (61)..(62): /note="This region represents a CpG dinucleotide"
  misc_feature (61)..(61): /note="Nucleotide may be methylated to form 5-methylcytosine"
aaacagaaactgggtggagactgtctcaaaatatgtaggacatttgtgacaagctggggacggaccaagaaggtggtgctgaggcagcactaatatgaattagcgttacaacaatgtcccag

SEQ ID NO: 18743 - DNA, 122 bp, Homo sapiens
  misc_feature (61)..(62): /note="This region represents a CpG dinucleotide"
  misc_feature (61)..(61): /note="Nucleotide may be methylated to form 5-methylcytosine"
tgttggttaagctggtcttgatccacctgcctcagcctcccaaagtgctgagattataggcgtaagccactgtgcctggtgtaatcttaactgctttttaggaaatggtgtaagaaaaggct

SEQ ID NO: 18744 - DNA, 122 bp, Homo sapiens
  misc_feature (61)..(62): /note="This region represents a CpG dinucleotide"
  misc_feature (61)..(61): /note="Nucleotide may be methylated to form 5-methylcytosine"
atgacaatggacggccacaataaatgttacccagctggtcattctaggaaaagctgataccgcccttcccttcctgttctagtttatggccagccaggctctgaaggttcgacagtctgact

SEQ ID NO: 18745 - DNA, 122 bp, Homo sapiens
  misc_feature (61)..(62): /note="This region represents a CpG dinucleotide"
  misc_feature (61)..(61): /note="Nucleotide may be methylated to form 5-methylcytosine"
ccaggcttatttcaatcactgttatttgcctgtctctacagaaactgcatgcttatttgacgtgtttgtgtgtgtgtatatacatatacagacagcaatctgtatgtgtaaatactggaatt

SEQ ID NO: 18746 - DNA, 122 bp, Homo sapiens
  misc_feature (61)..(62): /note="This region represents a CpG dinucleotide"
  misc_feature (61)..(61): /note="Nucleotide may be methylated to form 5-methylcytosine"
atctttaacccagaatttcaaaacttaagtgatcacaaaatccaactgttacctaacacccgtcttatcttgaaggacaaggaaacattggtctttagaattttaagggggaaatattctga

SEQ ID NO: 18747 - DNA, 122 bp, Homo sapiens
  misc_feature (61)..(62): /note="This region represents a CpG dinucleotide"
  misc_feature (61)..(61): /note="Nucleotide may be methylated to form 5-methylcytosine"
tcaagcaaagccagaatggccacttggtggggatgttgcagaggggataaaatatcagggcgatgcttgcaagagaagattgctaaggtcctttctaatccctgggaattaacatttaagag

SEQ ID NO: 18748 - DNA, 122 bp, Homo sapiens
  misc_feature (61)..(62): /note="This region represents a CpG dinucleotide"
  misc_feature (61)..(61): /note="Nucleotide may be methylated to form 5-methylcytosine"
ggcagggatgtcattcacttctgtgactcagtgctctgaatcaggcccagtgaagactgacgtgcagcctgtattggcagaatgaatgaataaatactacacacgcatattttgaattgaaa

SEQ ID NO: 18749 - DNA, 122 bp, Homo sapiens
  misc_feature (61)..(62): /note="This region represents a CpG dinucleotide"
  misc_feature (61)..(61): /note="Nucleotide may be methylated to form 5-methylcytosine"
gattatttctggaacttgattcgcatatttgcttttccaccacctggaatgtggggctaccggcaagataactatgtaccgataagttcagacactggtagcaaagactgagagtctgtctc

SEQ ID NO: 18750 - DNA, 122 bp, Homo sapiens
  misc_feature (61)..(62): /note="This region represents a CpG dinucleotide"
  misc_feature (61)..(61): /note="Nucleotide may be methylated to form 5-methylcytosine"
ttttccttagcacacacctccattataacactgaggttttctgtcctgttagttggatgccgttcatggcttggaaccccatttcttcttaaagttgtgcttctcagtgctgactgccttcc

SEQ ID NO: 18751 - DNA, 122 bp, Homo sapiens
  misc_feature (61)..(62): /note="This region represents a CpG dinucleotide"
  misc_feature (61)..(61): /note="Nucleotide may be methylated to form 5-methylcytosine"
ttcagaaaccaaagttacacagctgtgaagtcaagattctaactcagtttttttgcttcgcggtataagctttgaatcaccttgcagtacttaaagctgcagcttcaagtgaatcatgataa

SEQ ID NO: 18752 - DNA, 122 bp, Homo sapiens
  misc_feature (61)..(62): /note="This region represents a CpG dinucleotide"
  misc_feature (61)..(61): /note="Nucleotide may be methylated to form 5-methylcytosine"
tggctcctctgaaagcaccttatccccgtcaccggctcctctaaaagcagcgtgtccccccgctaccccgtcaccacctgtgtgggagacccagtaatcgtggccacagaggtttcccgtcg

SEQ ID NO: 18753 - DNA, 122 bp, Homo sapiens
  misc_feature (61)..(62): /note="This region represents a CpG dinucleotide"
  misc_feature (61)..(61): /note="Nucleotide may be methylated to form 5-methylcytosine"
ttcctgttcacatgtggctttctggttggtaaaggttttattaaatcagaggaatttgaacggaaagataatcatagtagcccaccaccaattgcctagggaaagggagagtgttgagtaga

SEQ ID NO: 18754 - DNA, 122 bp, Homo sapiens
  misc_feature (61)..(62): /note="This region represents a CpG dinucleotide"
  misc_feature (61)..(61): /note="Nucleotide may be methylated to form 5-methylcytosine"
gtgagcttggcaactcttcaagggatcacaatggtgtatctcatctggacctagaggtctcgaaggaggagataagtggaaatgttttgtgggctggagcttagtcattctcctcggtgact

SEQ ID NO: 18755 - DNA, 122 bp, Homo sapiens
  misc_feature (61)..(62): /note="This region represents a CpG dinucleotide"
  misc_feature (61)..(61): /note="Nucleotide may be methylated to form 5-methylcytosine"
cttgggtaaataggagtgcggttgctgagtcataagggtatgcatttggttagtagttgacggaagttttctaaagtagttctactggtttacactctgctggcagagtgtaagagttctag

SEQ ID NO: 18756 - DNA, 122 bp, Homo sapiens
  misc_feature (61)..(62): /note="This region represents a CpG dinucleotide"
  misc_feature (61)..(61): /note="Nucleotide may be methylated to form 5-methylcytosine"
agcctgggagaacagggtcagaggccatgtcatgctttgcccgtgatgaccttaagctgtcgtttagcctcagctagaactgtaattctctagattgcattgtttctgtatagaattgtgac

SEQ ID NO: 18757 - DNA, 122 bp, Homo sapiens
  misc_feature (61)..(62): /note="This region represents a CpG dinucleotide"
  misc_feature (61)..(61): /note="Nucleotide may be methylated to form 5-methylcytosine"
cacgtctgcgttttgtaagctttactaagacgtgctaactcatttcatcctggcagcagccgcacgaggcaggttatacctcttttcccatttgatgatgggtaaattgaggcacgcagaag

SEQ ID NO: 18758 - DNA, 122 bp, Homo sapiens
  misc_feature (61)..(62): /note="This region represents a CpG dinucleotide"
  misc_feature (61)..(61): /note="Nucleotide may be methylated to form 5-methylcytosine"
atgagtaattattgtgctctgtcttttactgttattgaaggtcactgtttaacactccctcgccattcccctaaccactcccctttgccttaaattcattaagctgtattctttgtatttcc

SEQ ID NO: 18759 - DNA, 122 bp, Homo sapiens
  misc_feature (61)..(62): /note="This region represents a CpG dinucleotide"
  misc_feature (61)..(61): /note="Nucleotide may be methylated to form 5-methylcytosine"
ccaattaaaaccagaatgagctcaaattagaaaaaccaaacacaccaaatgacaagaatgcggagtaaccagcactgtcatatgctgctggtggatgtataaactgataaaaatccctttga

SEQ ID NO: 18760 - DNA, 122 bp, Homo sapiens
  misc_feature (61)..(62): /note="This region represents a CpG dinucleotide"
  misc_feature (61)..(61): /note="Nucleotide may be methylated to form 5-methylcytosine"
gttgggctgagtcctccctgaggatgcaaacacacacacacggacacacacacacacacacggacacacacaaacacacctcgctggttgggctgagtcctccctgaggacacacacagaca

SEQ ID NO: 18761 - DNA, 122 bp, Homo sapiens
  misc_feature (61)..(62): /note="This region represents a CpG dinucleotide"
  misc_feature (61)..(61): /note="Nucleotide may be methylated to form 5-methylcytosine"
gatgttcttaaagccccgcaggtgactcaggtgagcagcaaggttgagaacagcaagagccgatgctgggctttgcaggtgggtggctgctgatagtcttgcttcgttgtggttccccatga

SEQ ID NO: 18762 - DNA, 122 bp, Homo sapiens
  misc_feature (61)..(62): /note="This region represents a CpG dinucleotide"
  misc_feature (61)..(61): /note="Nucleotide may be methylated to form 5-methylcytosine"
ggaggctgtgatgtgagtgagaaagttccaactctaagctcccaaccaaggttcccacagcgagtcaacttgggtcaggtgcccactccagcttgaacaaggtgtggcaagaaataagagat

SEQ ID NO: 18763 - DNA, 122 bp, Homo sapiens
  misc_feature (61)..(62): /note="This region represents a CpG dinucleotide"
  misc_feature (61)..(61): /note="Nucleotide may be methylated to form 5-methylcytosine"
cttcatcagcttcatggtaaatctgcctctgacaggcaattgtgcaattcacaatccaggcgtatttgttgagcactttcagagacattaagtctgggtccttatccaatggactttcttga

SEQ ID NO: 18764 - DNA, 122 bp, Homo sapiens
  misc_feature (61)..(62): /note="This region represents a CpG dinucleotide"
  misc_feature (61)..(61): /note="Nucleotide may be methylated to form 5-methylcytosine"
agaatcaaaatattaagatccctcagagcaaggtcaattaagcttttgacatttaaatttcgaaggatttttttttttaaagcatatctgggcaagtaaagaacataagcactagttccaaa

SEQ ID NO: 18765 - DNA, 122 bp, Homo sapiens
  misc_feature (61)..(62): /note="This region represents a CpG dinucleotide"
  misc_feature (61)..(61): /note="Nucleotide may be methylated to form 5-methylcytosine"
ctgacttcatccctctggtttcctgttgagccctctggaatgcatgtttccctgcagtgacgcatagtcagggaaggcaggcgctggggccgtgccctgactgagtgtgaggtaagggctct

SEQ ID NO: 18766 - DNA, 122 bp, Homo sapiens
  misc_feature (61)..(62): /note="This region represents a CpG dinucleotide"
  misc_feature (61)..(61): /note="Nucleotide may be methylated to form 5-methylcytosine"
caccccgcactctgctcctgccccaccaccctaacagtgtgggcagggcccttcctgttccgccaggtttacgaggacagaccaagccacgcgcacaccccgcactctgctcctgcctcacc

SEQ ID NO: 18767 - DNA, 122 bp, Homo sapiens
  misc_feature (61)..(62): /note="This region represents a CpG dinucleotide"
  misc_feature (61)..(61): /note="Nucleotide may be methylated to form 5-methylcytosine"
gaatctcttcatacatacagcaaggctagtttttttgagtgtttttgtgagactgaaatacgatgagatttatgaatctactttggtaagccagaccaatgctttgtggaagttagtcattt

SEQ ID NO: 18768 - DNA, 122 bp, Homo sapiens
  misc_feature (61)..(62): /note="This region represents a CpG dinucleotide"
  misc_feature (61)..(61): /note="Nucleotide may be methylated to form 5-methylcytosine"
ataattatgaagaggctgctagctagctaattcagggaagtgaacactgaaacttccaggcgtgaaggcagcagggctggagtgtagcaggcaggcaggcgcctcccaagaggccacctctt

SEQ ID NO: 18769 - DNA, 122 bp, Homo sapiens
  misc_feature (61)..(62): /note="This region represents a CpG dinucleotide"
  misc_feature (61)..(61): /note="Nucleotide may be methylated to form 5-methylcytosine"
tcttgaaagtccatgacttttacataccctgttgtatgacttcaaataaacctttcttaacgtgcatagagacagagttgcatccacaaaattgcgcaggtccctaacctaaaattagacct

SEQ ID NO: 18770 - DNA, 122 bp, Homo sapiens
  misc_feature (61)..(62): /note="This region represents a CpG dinucleotide"
  misc_feature (61)..(61): /note="Nucleotide may be methylated to form 5-methylcytosine"
aggccatctagttaatatccacagaacagatctgctgattagtgaaagcttcctgcacagcgggggcccatggtgagcaatcatttggcacacctgctgtctcatgatctgtgaccattcca

SEQ ID NO: 18771 - DNA, 122 bp, Homo sapiens
  misc_feature (61)..(62): /note="This region represents a CpG dinucleotide"
  misc_feature (61)..(61): /note="Nucleotide may be methylated to form 5-methylcytosine"
agcggctgttcaggactcctcgaacctgtctgaagatctgcttacccgtcgggtgacccgcgttcttccatgtcctgctctgcacacggagttagctccgcccgcgtctcctttatttaccc

SEQ ID NO: 18772 - DNA, 122 bp, Homo sapiens
  misc_feature (61)..(62): /note="This region represents a CpG dinucleotide"
  misc_feature (61)..(61): /note="Nucleotide may be methylated to form 5-methylcytosine"
aaacttcaggaggttttagctagtggcgatccaaagacattaaatattgctttgtgggtacgtctccaccttgcgtcttacttggtgactgttcagtggtaggcaaatgtcagaacccagta

SEQ ID NO: 18773 - DNA, 122 bp, Homo sapiens
  misc_feature (61)..(62): /note="This region represents a CpG dinucleotide"
  misc_feature (61)..(61): /note="Nucleotide may be methylated to form 5-methylcytosine"
gcttgatatgtaccagatagggctggaacactttgtcataccagttagtgaggaaactatcgaaggttactgaggctcatgtgcaaaggacttgagtcagcttgaaggaggtgccactggtc

SEQ ID NO: 18774 - DNA, 122 bp, Homo sapiens
  misc_feature (61)..(62): /note="This region represents a CpG dinucleotide"
  misc_feature (61)..(61): /note="Nucleotide may be methylated to form 5-methylcytosine"
ctcagcaataaaagggaatcaactattaatacatgcaacaactccaacggatctcaaggacgttatgttgagtgaaagccaatctcaaaggattacgtaatgtatcattccatttatatgcc

SEQ ID NO: 18775 - DNA, 122 bp, Homo sapiens
  misc_feature (61)..(62): /note="This region represents a CpG dinucleotide"
  misc_feature (61)..(61): /note="Nucleotide may be methylated to form 5-methylcytosine"
tgggtgtgagtgttttgtggctctgaagtcctgtattctgactttgcttttcctttgcgccgcttgtctggtctaatgatctcactacggaaattatcaccagtcagcagactgtcattcgt

SEQ ID NO: 18776 - DNA, 122 bp, Homo sapiens
  misc_feature (61)..(62): /note="This region represents a CpG dinucleotide"
  misc_feature (61)..(61): /note="Nucleotide may be methylated to form 5-methylcytosine"
aatcaagggggtcaggatcggctatttgtacatattttagatgtacggcatcacatactgcgtgcggtcatgaaaggctcacaaaaagctagtcacatcctggcaaaagatgttgtgtgata

SEQ ID NO: 18777 - DNA, 122 bp, Homo sapiens
  misc_feature (61)..(62): /note="This region represents a CpG dinucleotide"
  misc_feature (61)..(61): /note="Nucleotide may be methylated to form 5-methylcytosine"
acaggtatgcactggtaacatgcagatgatttcatccagctaagctggttggagtaggagcgataccaaagggtacacccatctgtgagtcacatcttgaaaaacactgagaggaaccttct

SEQ ID NO: 18778 - DNA, 122 bp, Homo sapiens
  misc_feature (61)..(62): /note="This region represents a CpG dinucleotide"
  misc_feature (61)..(61): /note="Nucleotide may be methylated to form 5-methylcytosine"
taaactgaagtcatccgtggtttgccgtgaggtctcctgagtttattggagcctttattgcgtctatgacagagagagagaaagtgctcacatttcacctgcatgggaattataaatgtcaa

SEQ ID NO: 18779 - DNA, 122 bp, Homo sapiens
  misc_feature (61)..(62): /note="This region represents a CpG dinucleotide"
  misc_feature (61)..(61): /note="Nucleotide may be methylated to form 5-methylcytosine"
gtgtctgaacttaaggattggataaaggtgtgttagtcatgtcaggagatggggcagcttcgtgggtatgactcagaaggtattacgtgcctacatcaccatgtatgtacaagttgtatttt

SEQ ID NO: 18780 - DNA, 122 bp, Homo sapiens
  misc_feature (61)..(62): /note="This region represents a CpG dinucleotide"
  misc_feature (61)..(61): /note="Nucleotide may be methylated to form 5-methylcytosine"
ttgtctccttagctccaatgcctttgtcctgattcagtgactcatttcttatatgtccatcgttttctaataggtttccttgctcctgattttttaatcatttattctatcctccatctctt

SEQ ID NO: 18781 - DNA, 122 bp, Homo sapiens
  misc_feature (61)..(62): /note="This region represents a CpG dinucleotide"
  misc_feature (61)..(61): /note="Nucleotide may be methylated to form 5-methylcytosine"
ctcacccagagcaacttccagtcttctaagctctgttcattgtaggtgccctatccaggtcggccactttataatattttagaacatatttttactgtactttttctatgtttagatgtatt

SEQ ID NO: 18782 - DNA, 122 bp, Homo sapiens
  misc_feature (61)..(62): /note="This region represents a CpG dinucleotide"
  misc_feature (61)..(61): /note="Nucleotide may be methylated to form 5-methylcytosine"
gggcaaccccttaatgagccttagcaggtggcatgtgggccagcgtgtcccagcacgagacgttcttgtgctgggtcccttcagctttagcctcagtgggcaattggcccaagtccctggct

SEQ ID NO: 18783 - DNA, 122 bp, Homo sapiens
  misc_feature (61)..(62): /note="This region represents a CpG dinucleotide"
  misc_feature (61)..(61): /note="Nucleotide may be methylated to form 5-methylcytosine"
tttattcgttcacaacaaccacacatactctatttttctttgcttgcggaagaatgtcatcgtgaggcagaacaaatatgacaatttaaatgcgtaccccggggcttaagtagcacaatgcc

SEQ ID NO: 18784 - DNA, 122 bp, Homo sapiens
  misc_feature (61)..(62): /note="This region represents a CpG dinucleotide"
  misc_feature (61)..(61): /note="Nucleotide may be methylated to form 5-methylcytosine"
ggcgggtggcgggtggcgggcggcgggcagtggccgggcgctgaggccagaggggcggagcggccgagctgctggggcggggcggggcagggcaggccggacccagcctctgggtgcctcca

SEQ ID NO: 18785 - DNA, 122 bp, Homo sapiens
  misc_feature (61)..(62): /note="This region represents a CpG dinucleotide"
  misc_feature (61)..(61): /note="Nucleotide may be methylated to form 5-methylcytosine"
cggctgctcaccacatgtgtctgtgtcagcatcctggtttgcgtggccacagtgctttcacgccaggccctgccgagatgccggggggacagacttgtgagagggccctttgcccttgaatt

SEQ ID NO: 18786 - DNA, 122 bp, Homo sapiens
  misc_feature (61)..(62): /note="This region represents a CpG dinucleotide"
  misc_feature (61)..(61): /note="Nucleotide may be methylated to form 5-methylcytosine"
catctccctaatttacaaagaggaaactgagccacattcccaaggtcacataactagcaacgagtgaagaagccaagattagtgtccagactgaatcattccagacacctgtgacatagtca

SEQ ID NO: 18787 - DNA, 122 bp, Homo sapiens
  misc_feature (61)..(62): /note="This region represents a CpG dinucleotide"
  misc_feature (61)..(61): /note="Nucleotide may be methylated to form 5-methylcytosine"
acagcgctggaggcctggggactggactctgagaggagcttgggcagacacagcagcctccggccccaacactgccctgggttggcaggcccagccctggtcctgacaggcaggtccttgag

SEQ ID NO: 18788 - DNA, 122 bp, Homo sapiens
  misc_feature (61)..(62): /note="This region represents a CpG dinucleotide"
  misc_feature (61)..(61): /note="Nucleotide may be methylated to form 5-methylcytosine"
tatgcatggagtgcattcttgtctcgcggaactctgcacacatagtaaatattttgctgtcggtttatcttggcttccacatgtctctctgtctcagctgcccttggtctgtggtatgtggc

SEQ ID NO: 18789 - DNA, 122 bp, Homo sapiens
  misc_feature (61)..(62): /note="This region represents a CpG dinucleotide"
  misc_feature (61)..(61): /note="Nucleotide may be methylated to form 5-methylcytosine"
gagcaaaactcaagaaagccaaataaaagcatattcagcaaaaacaagaaactccacaaccgccaataccggagggtggagtcaccaccagtgtcggcctgagaaatgcagacacactaccc

SEQ ID NO: 18790 - DNA, 122 bp, Homo sapiens
  misc_feature (61)..(62): /note="This region represents a CpG dinucleotide"
  misc_feature (61)..(61): /note="Nucleotide may be methylated to form 5-methylcytosine"
ctgtctcttctgttcatttcactgtcctgcatggggttatgcttttttctttcaatgaagcgtaggaagtctccttgggaatcatctgtgctgatctctgtgtgtgtgttttaaattgcaat

SEQ ID NO: 18791 - DNA, 122 bp, Homo sapiens
  misc_feature (61)..(62): /note="This region represents a CpG dinucleotide"
  misc_feature (61)..(61): /note="Nucleotide may be methylated to form 5-methylcytosine"
gagtcaggtatcccagggatctgtgacgagggagctggggcatgggtgtcggaccaaagacgcctaagtttgaatcccagctgtgagcttgggcaagctcctcaacctctctgagcccatgc

SEQ ID NO: 18792 - DNA, 122 bp, Homo sapiens
  misc_feature (61)..(62): /note="This region represents a CpG dinucleotide"
  misc_feature (61)..(61): /note="Nucleotide may be methylated to form 5-methylcytosine"
gactgactggatgggaatatcctatttcctttttgttcttacaagtatagtgttcactcacggattcttaatttttccttattctaatcagtcaactcttttttaacattcactaagttcag

SEQ ID NO: 18793 - DNA, 122 bp, Homo sapiens
  misc_feature (61)..(62): /note="This region represents a CpG dinucleotide"
  misc_feature (61)..(61): /note="Nucleotide may be methylated to form 5-methylcytosine"
cacgcccggcacaagccatctcctgcactgccaaagttatgggattacaagtgtgacttacggcttctgcattttgtgttgtagtaagagatgcttttacattctgaggtttttaaataatt

SEQ ID NO: 18794 - DNA, 122 bp, Homo sapiens
  misc_feature (61)..(62): /note="This region represents a CpG dinucleotide"
  misc_feature (61)..(61): /note="Nucleotide may be methylated to form 5-methylcytosine"
acacctaaagaacagtatagatttgatcggtagaattcgtgtgggtctgtatttcccttgcggccacagtgatatatgtgatcgcaaatgtatctagtcggaaactgagtgacactccctca

SEQ ID NO: 18795 - DNA, 122 bp, Homo sapiens
  misc_feature (61)..(62): /note="This region represents a CpG dinucleotide"
  misc_feature (61)..(61): /note="Nucleotide may be methylated to form 5-methylcytosine"
gtggggacttttctaatgagaccttgactataaagtaccccctacaggcatttaatagggcgatggtgagtcttatatgagctaatgtccatgaatcacttagcatttgttcctggcacaag

SEQ ID NO: 18796 - DNA, 122 bp, Homo sapiens
  misc_feature (61)..(62): /note="This region represents a CpG dinucleotide"
  misc_feature (61)..(61): /note="Nucleotide may be methylated to form 5-methylcytosine"
agttgttgcgtaaaactgctttataaatcaaacagtgctattcaagctccacaatcgctacgttggaagggtctttagatatcacctagcactacttattttatacataagaaagctgaagt

SEQ ID NO: 18797 - DNA, 122 bp, Homo sapiens
  misc_feature (61)..(62): /note="This region represents a CpG dinucleotide"
  misc_feature (61)..(61): /note="Nucleotide may be methylated to form 5-methylcytosine"
ttgctttgtggtgatgcaggcagctatcccatgtcactttactttgactttgtgaagcaccgtgtgttttgcaagatttgccttttcactttgtgttgcaagaccagtagggctagaatcta

SEQ ID NO: 18798 - DNA, 122 bp, Homo sapiens
  misc_feature (61)..(62): /note="This region represents a CpG dinucleotide"
  misc_feature (61)..(61): /note="Nucleotide may be methylated to form 5-methylcytosine"
gtgggaaacttacagcatattaacagacagttatcaatgacaaaaacattaaaattatgacgagtgctaagaaggaagcactctaaccaaatacttagcttattattatagtaatatttgaa

SEQ ID NO: 18799 - DNA, 122 bp, Homo sapiens
  misc_feature (61)..(62): /note="This region represents a CpG dinucleotide"
  misc_feature (61)..(61): /note="Nucleotide may be methylated to form 5-methylcytosine"
ttgttcattcaacaaatatttatttagcatcatttataagtctggaccagtgctcagtggcgggttacaagggtgagcaaaagaggctctctgatacctggagagcaaagactcaactgggg

SEQ ID NO: 18800 - DNA, 122 bp, Homo sapiens
  misc_feature (61)..(62): /note="This region represents a CpG dinucleotide"
  misc_feature (61)..(61): /note="Nucleotide may be methylated to form 5-methylcytosine"
attctgacacccagacagggccattgttttccaggtgcaagcttgatcacctatgcaacccgtgtgtgtattcacctcaggaattcatgttgaagaatttaatcttgcagccactccaacaa

SEQ ID NO: 18801 - DNA, 122 bp, Homo sapiens
  misc_feature (61)..(62): /note="This region represents a CpG dinucleotide"
  misc_feature (61)..(61): /note="Nucleotide may be methylated to form 5-methylcytosine"
ctgcccattcatttttaagtaaaggctttctcccttatgataatatcacaataattgccacgtaatgtgtgcattctgtcagaaaataatggtgagaaagttaaaacttggcccttcatgca

SEQ ID NO: 18802 - DNA, 122 bp, Homo sapiens
  misc_feature (61)..(62): /note="This region represents a CpG dinucleotide"
  misc_feature (61)..(61): /note="Nucleotide may be methylated to form 5-methylcytosine"
tcccagtgggagagtttacataactaccagcctcttgcacaggattaaataatttatagacgtgaggtgctcattaggaacagtgactagcacagagtaagtgttcaatagaatcctaatga

SEQ ID NO: 18803 - DNA, 122 bp, Homo sapiens
  misc_feature (61)..(62): /note="This region represents a CpG dinucleotide"
  misc_feature (61)..(61): /note="Nucleotide may be methylated to form 5-methylcytosine"
cagatgagttctgatttacaagtctgccaggctggcctgtgagcctctgggcagagttcccgtcccatgcattgctgtagcctcagttcctccacatagtaaatgcccaagtacctatagaa

SEQ ID NO: 18804 - DNA, 122 bp, Homo sapiens
  misc_feature (61)..(62): /note="This region represents a CpG dinucleotide"
  misc_feature (61)..(61): /note="Nucleotide may be methylated to form 5-methylcytosine"
ctgtgctttgctttccaggaaaacctgagcaggaagcaaaacccagttcagaaataactgcgtggtttatgcaaatcaggacttagctcagagtctcctatggcccagtgtggaccaggaga

SEQ ID NO: 18805 - DNA, 122 bp, Homo sapiens
  misc_feature (61)..(62): /note="This region represents a CpG dinucleotide"
  misc_feature (61)..(61): /note="Nucleotide may be methylated to form 5-methylcytosine"
gcagatgttcttgttccaaaaggttcactagccatgcagctccccgtctcttcaaagctgcggagagagtgactctccgatgagtcacagctgcttctttgctgattggtatggccacaagg

SEQ ID NO: 18806 - DNA, 122 bp, Homo sapiens
  misc_feature (61)..(62): /note="This region represents a CpG dinucleotide"
  misc_feature (61)..(61): /note="Nucleotide may be methylated to form 5-methylcytosine"
cccatgaagtctaatgttccattcgctgccatggtccaggggactcccaccagcttccaccggcttcaacaggatctccactagagagcccagacttatctagtcctgtcggggaaaaggga

SEQ ID NO: 18807 - DNA, 122 bp, Homo sapiens
  misc_feature (61)..(62): /note="This region represents a CpG dinucleotide"
  misc_feature (61)..(61): /note="Nucleotide may be methylated to form 5-methylcytosine"
aacaaaaagatgtcggtgcacgtgtcactgatgattaagttaacattgcattatctctgacggcattccgaatggcacagggctacagaagaggaacattttacacagccacgctcctgatc

SEQ ID NO: 18808 - DNA, 122 bp, Homo sapiens
  misc_feature (61)..(62): /note="This region represents a CpG dinucleotide"
  misc_feature (61)..(61): /note="Nucleotide may be methylated to form 5-methylcytosine"
tgaggattcttaaaatatgcttctggactacatttggtcatgtttgtgtgtccacatattcgttgtcttaatgagtagttaggtaatttgaactacattgcttgattgctgaactgtagttt

SEQ ID NO: 18809 - DNA, 122 bp, Homo sapiens
  misc_feature (61)..(62): /note="This region represents a CpG dinucleotide"
  misc_feature (61)..(61): /note="Nucleotide may be methylated to form 5-methylcytosine"
gccttttcctgacagtggatgaactcggaagtggtccaccctagagggcacctggggtgacggaaccttctgctgggggacaatgaggcaggaggcatgggaaattctgctcggttttctct

SEQ ID NO: 18810 - DNA, 122 bp, Homo sapiens
  misc_feature (61)..(62): /note="This region represents a CpG dinucleotide"
  misc_feature (61)..(61): /note="Nucleotide may be methylated to form 5-methylcytosine"
gttagaatcatcaccaccaacactttacgaggcaatctgctttccagaacatctagctgccggattaacttcacagccaccagattccacaggcaggtgctcagggggacacagctttctca

SEQ ID NO: 18811 - DNA, 122 bp, Homo sapiens
  misc_feature (61)..(62): /note="This region represents a CpG dinucleotide"
  misc_feature (61)..(61): /note="Nucleotide may be methylated to form 5-methylcytosine"
ggcacacaggtgtctttgtacacagctgtaactgattcatagtggctgcctggaggaccacgctggggaaaattctgaagcgacatctcagttcagacacaaagagtgctacaatgagtgat

SEQ ID NO: 18812 - DNA, 122 bp, Homo sapiens
  misc_feature (61)..(62): /note="This region represents a CpG dinucleotide"
  misc_feature (61)..(61): /note="Nucleotide may be methylated to form 5-methylcytosine"
tgcagtctggaatggcaggagacaagcctggagagaggcttcaggcaagattgggaaggacgttttgtttcaagctgcatacacatgatttggaactagcagaaatggattcttgtaaaaat

SEQ ID NO: 18813 - DNA, 122 bp, Homo sapiens
  misc_feature (61)..(62): /note="This region represents a CpG dinucleotide"
  misc_feature (61)..(61): /note="Nucleotide may be methylated to form 5-methylcytosine"
tgcagctttgttcattaacacagggcctgtttggaaatcctacttttagtcattaaaccacgcctacccaggacttcttcacagaagtgctggattccgcctgtagtactgagtcacaggca

SEQ ID NO: 18814 - DNA, 122 bp, Homo sapiens
  misc_feature (61)..(62): /note="This region represents a CpG dinucleotide"
  misc_feature (61)..(61): /note="Nucleotide may be methylated to form 5-methylcytosine"
cctgcaccagccttgtcttactaaatgttggagtagtttaactttggctccctcttctggcgggttgtaggattctgcacttttggagagaaaatacctaagattactgctatttcccaatt

SEQ ID NO: 18815 - DNA, 122 bp, Homo sapiens
  misc_feature (61)..(62): /note="This region represents a CpG dinucleotide"
  misc_feature (61)..(61): /note="Nucleotide may be methylated to form 5-methylcytosine"
gtcaccctccctttatcctctttgcccaaagcttcatgtgacagattaaattcttgtaatcgcttttcctgtgtcattcctctaatccttttaccattctattttgcctttgtggtgtttat

SEQ ID NO: 18816 - DNA, 122 bp, Homo sapiens
  misc_feature (61)..(62): /note="This region represents a CpG dinucleotide"
  misc_feature (61)..(61): /note="Nucleotide may be methylated to form 5-methylcytosine"
ggaaggccagcatttgagtgacagagatgcttgccctatcctgttgctggcttctttctccgtccctgtgtcaagctgtggctagatttctcaatgagggcaaagggcgagaggagtgagaa

SEQ ID NO: 18817 - DNA, 122 bp, Homo sapiens
  misc_feature (61)..(62): /note="This region represents a CpG dinucleotide"
  misc_feature (61)..(61): /note="Nucleotide may be methylated to form 5-methylcytosine"
tatgcagacagtccttcaaaaggtaagcagtccacagcccagcagaatgctttctttgagcgtcttggcctgaaaattttctattattctctcctttggcgctaacttcccaaaacttaatc

SEQ ID NO: 18818 - DNA, 122 bp, Homo sapiens
  misc_feature (61)..(62): /note="This region represents a CpG dinucleotide"
  misc_feature (61)..(61): /note="Nucleotide may be methylated to form 5-methylcytosine"
cggaggtggcggcagctccacgagggccggcgcaggcggcggtggcggccctgcgggcggcgacctggcggccaacacgttccccatggtctctggcagaggcgcctgctcccggcctgggc

SEQ ID NO: 18819 - DNA, 122 bp, Homo sapiens
  misc_feature (61)..(62): /note="This region represents a CpG dinucleotide"
  misc_feature (61)..(61): /note="Nucleotide may be methylated to form 5-methylcytosine"
gagttggagttggaacttgcagtattaaaactctttctgtttcacttaacatgaagccaacgtatactggcctaagcaaagaagagatttatataacagaaacagaaaagttcacagggctt

SEQ ID NO: 18820 - DNA, 122 bp, Homo sapiens
  misc_feature (61)..(62): /note="This region represents a CpG dinucleotide"
  misc_feature (61)..(61): /note="Nucleotide may be methylated to form 5-methylcytosine"
atcccgttatgactgcctatgactactaggttatatggctgaaaccatgaaatgtggacacgtgatttcattcagccaaggatgtggactaacatgcccatcaatctcatttgtctttttcc

SEQ ID NO: 18821 - DNA, 122 bp, Homo sapiens
  misc_feature (61)..(62): /note="This region represents a CpG dinucleotide"
  misc_feature (61)..(61): /note="Nucleotide may be methylated to form 5-methylcytosine"
aaattgctcaagtccctcactgaatcagagctccacatgtgtgaacacatggtagaatggcgctgtggttaagaaatccgtactaacttaacaaaggacatcatactaccttctcataggtg

SEQ ID NO: 18822 - DNA, 122 bp, Homo sapiens
  misc_feature (61)..(62): /note="This region represents a CpG dinucleotide"
  misc_feature (61)..(61): /note="Nucleotide may be methylated to form 5-methylcytosine"
gctggctcccgccctctggaggacagtgcctggttcctcagcctggttccagcccctaaacgctcgtgcatgggaactcactggcaataaggaaacacacacagagtattaacaagatgcca

SEQ ID NO: 18823 - DNA, 122 bp, Homo sapiens
  misc_feature (61)..(62): /note="This region represents a CpG dinucleotide"
  misc_feature (61)..(61): /note="Nucleotide may be methylated to form 5-methylcytosine"
cattttggtttaataaaaatatttatttcttaccacattattctcaggtctagcatatcacgtgatacatggaagtggttggtatgtatttattgaatgttaaaataaacaaacaaacaagc

SEQ ID NO: 18824 - DNA, 122 bp, Homo sapiens
  misc_feature (61)..(62): /note="This region represents a CpG dinucleotide"
  misc_feature (61)..(61): /note="Nucleotide may be methylated to form 5-methylcytosine"
tactgcagcaacataccaggaaagccaagagaattcacagaccctttgaaggaactgtatcgccactgcagtttctctgagatgccaaaaagaaaagtcatgagtctgcttgctttctcagc

SEQ ID NO: 18825 - DNA, 122 bp, Homo sapiens
  misc_feature (61)..(62): /note="This region represents a CpG dinucleotide"
  misc_feature (61)..(61): /note="Nucleotide may be methylated to form 5-methylcytosine"
ctctcaggctgggcacatgccaaaacagatccagggctaaattctaaagtattgttgctgcgctgcagtggtttcctgaagggttatccccctcctagctcccagcactttggggtagagat

SEQ ID NO: 18826 - DNA, 122 bp, Homo sapiens
  misc_feature (61)..(62): /note="This region represents a CpG dinucleotide"
  misc_feature (61)..(61): /note="Nucleotide may be methylated to form 5-methylcytosine"
ctaatccagctatttgaaaagagatgtactcttggtcaccaactggagactctgagcaggcgatgaaatgtggttttcagaataggttttgtataattagcaaaaaaggaagtagaatagtg

SEQ ID NO: 18827 - DNA, 122 bp, Homo sapiens
  misc_feature (61)..(62): /note="This region represents a CpG dinucleotide"
  misc_feature (61)..(61): /note="Nucleotide may be methylated to form 5-methylcytosine"
ataacagcagctaccatttaccgagaatatattatatgccaggctctggtctaagcattacgttctttattcttcaaagcaacctcatgaggtgggagctatcacaaccctgttttaaaact

SEQ ID NO: 18828 - DNA, 122 bp, Homo sapiens
  misc_feature (61)..(62): /note="This region represents a CpG dinucleotide"
  misc_feature (61)..(61): /note="Nucleotide may be methylated to form 5-methylcytosine"
actgaggcccagagaggttactcagcttgccctaggcaatacagccaagagtggcagaaccggaatttgagtccagactgtctcaccccagggtgcatgagcaccacacaccagtatggctg

SEQ ID NO: 18829 - DNA, 122 bp, Homo sapiens
  misc_feature (61)..(62): /note="This region represents a CpG dinucleotide"
  misc_feature (61)..(61): /note="Nucleotide may be methylated to form 5-methylcytosine"
agagctatgttcatatttttaattaggtgattaaaaatatttgaaacggcagcaagacaacggtcagcttttggtaatccaaaggaaaaggtgacatgattagcactggcaagcttaagttt

SEQ ID NO: 18830 - DNA, 122 bp, Homo sapiens
  misc_feature (61)..(62): /note="This region represents a CpG dinucleotide"
  misc_feature (61)..(61): /note="Nucleotide may be methylated to form 5-methylcytosine"
ttggttaagatatggctgagggaggcatagggattttttttcaatggtagtcaccacagacggttgagggtaaattggcgttgttctcaataagggttattgtgaccatggtccaaagtctg

SEQ ID NO: 18831 - DNA, 122 bp, Homo sapiens
  misc_feature (61)..(62): /note="This region represents a CpG dinucleotide"
  misc_feature (61)..(61): /note="Nucleotide may be methylated to form 5-methylcytosine"
agaggttaagaacttgcctgaggccgtgtggctgggacagcctgcttagccacctaaatacgcaggaaacggcagctgttctcctccactagctctgagtggggccacaggaccactacgct

SEQ ID NO: 18832 - DNA, 122 bp, Homo sapiens
  misc_feature (61)..(62): /note="This region represents a CpG dinucleotide"
  misc_feature (61)..(61): /note="Nucleotide may be methylated to form 5-methylcytosine"
aggggagaaaggcaacaggaaatgagcactttttcactgttgctacatacccttcggtttcgcaaagtatgagagacagctgctacatcatgttttggtggatcatgaaattcagtaccagg

SEQ ID NO: 18833 - DNA, 122 bp, Homo sapiens
  misc_feature (61)..(62): /note="This region represents a CpG dinucleotide"
  misc_feature (61)..(61): /note="Nucleotide may be methylated to form 5-methylcytosine"
ttatactgcccgggaacgaggctgaaggacccggatggaaacggagcttagaatttgaaacgcaaagggaggggggaagtagttcccagtctccccattggctggctcctctgtcattcacc

SEQ ID NO: 18834 - DNA, 122 bp, Homo sapiens
  misc_feature (61)..(62): /note="This region represents a CpG dinucleotide"
  misc_feature (61)..(61): /note="Nucleotide may be methylated to form 5-methylcytosine"
agcgcaacagcacaaatgctgggagtcaagctctgacaccaccagctcctagttgtgtaacgctgggcaaggtccttaacctctcggtttctccatgtgcaagtgaagagtcacttcctcag

SEQ ID NO: 18835 - DNA, 122 bp, Homo sapiens
  misc_feature (61)..(62): /note="This region represents a CpG dinucleotide"
  misc_feature (61)..(61): /note="Nucleotide may be methylated to form 5-methylcytosine"
aaagcagtagcagccttgcaggaattttgctatgaaaaaagtaaaatgaactggacttcacgatcaaccagaaacaagcgtgaacagacctgttctcagaccaaatcaacatctactcctgc

SEQ ID NO: 18836 - DNA, 122 bp, Homo sapiens
  misc_feature (61)..(62): /note="This region represents a CpG dinucleotide"
  misc_feature (61)..(61): /note="Nucleotide may be methylated to form 5-methylcytosine"
aatagagtcacgtgacctggtttccctgttctgggtcccgcagcttcctgagctgacctgcgggcaaactctgcctcagcagccccccaactacgtggcaccatggccccgactgtacacaa

SEQ ID NO: 18837 - DNA, 122 bp, Homo sapiens
  misc_feature (61)..(62): /note="This region represents a CpG dinucleotide"
  misc_feature (61)..(61): /note="Nucleotide may be methylated to form 5-methylcytosine"
ttcacaggttactgccctgttcccactcccaactaaattgtaagcttctaagggcagggacgtagtccacctctgccatgtggttggtttttttagtgtctgacacagcactttgctcaaca

SEQ ID NO: 18838 - DNA, 122 bp, Homo sapiens
  misc_feature (61)..(62): /note="This region represents a CpG dinucleotide"
  misc_feature (61)..(61): /note="Nucleotide may be methylated to form 5-methylcytosine"
cctactggaaccataaaatttttgtccaagctctgaacaaaagcatctattctaccaactcgagccccctggaatcaatatgatattacatattagttgctaggaaaacagacaactgctat

SEQ ID NO: 18839 - DNA, 122 bp, Homo sapiens
  misc_feature (61)..(62): /note="This region represents a CpG dinucleotide"
  misc_feature (61)..(61): /note="Nucleotide may be methylated to form 5-methylcytosine"
gaggggcgggtgctgtcctggcactgactcagcttttcacagcgcaaggccgagcccgaacgacgcgctggctttaatggagatctgtcgcagccgttccatcccatctgcacatccactta

SEQ ID NO: 18840 - DNA, 122 bp, Homo sapiens
  misc_feature (61)..(62): /note="This region represents a CpG dinucleotide"
  misc_feature (61)..(61): /note="Nucleotide may be methylated to form 5-methylcytosine"
gccaagagtggaccttagtgcaagccagggacattagtcagtaataatgttccacgctgacgcacaaatgaaagttattttatttgtgtgaacaggagagctgacatggtctgtattgatat

SEQ ID NO: 18841 - DNA, 122 bp, Homo sapiens
  misc_feature (61)..(62): /note="This region represents a CpG dinucleotide"
  misc_feature (61)..(61): /note="Nucleotide may be methylated to form 5-methylcytosine"
ccctacttcccagtgtgattgtatttggagatttatttggagatggtaattaggttatgacggtagagccttaaatgggattagtgccctcatgagagacacaagagctctctctctctctc

SEQ ID NO: 18842 - DNA, 122 bp, Homo sapiens
  misc_feature (61)..(62): /note="This region represents a CpG dinucleotide"
  misc_feature (61)..(61): /note="Nucleotide may be methylated to form 5-methylcytosine"
aaaagtcagaagaatttaactctccagccgagatgttcaagctttctggcatttgactaacgttttatgctctcttgtctattgatcattgagccactgttgagatgaccagatgaccaggt

SEQ ID NO: 18843 - DNA, 122 bp, Homo sapiens
  misc_feature (61)..(62): /note="This region represents a CpG dinucleotide"
  misc_feature (61)..(61): /note="Nucleotide may be methylated to form 5-methylcytosine"
cttaccagtgataacatctgaccaagataccaggcatttaccctatgcagaaaagtcctgcgtagatggagctgccacttcctcatttgtagtctgctctaatatttcacaatctgtgtagt

SEQ ID NO: 18844 - DNA, 122 bp, Homo sapiens
  misc_feature (61)..(62): /note="This region represents a CpG dinucleotide"
  misc_feature (61)..(61): /note="Nucleotide may be methylated to form 5-methylcytosine"
cggaagacacagaagtaccttgtgtgcagccttcatggacagaactgcagaaccactctgcggtcagtggtcacttatcaggaaggaatgccttgtcagttgtcgtgtggaaactgcaggag

SEQ ID NO: 18845 - DNA, 122 bp, Homo sapiens
  misc_feature (61)..(62): /note="This region represents a CpG dinucleotide"
  misc_feature (61)..(61): /note="Nucleotide may be methylated to form 5-methylcytosine"
cacaggggagcggctggatggggaggcggggcggcgcactcgtgggccagaggccgagctcgtggtcatgcggcggctgcacctgtccgagcgccgagactccttcaagaagcaggaggccg

SEQ ID NO: 18846 - DNA, 122 bp, Homo sapiens
  misc_feature (61)..(62): /note="This region represents a CpG dinucleotide"
  misc_feature (61)..(61): /note="Nucleotide may be methylated to form 5-methylcytosine"
gtatcttcaacaatgtttacagactttttatagctcttctcacatgaagtgtttaccctccgtttgtggcttatcatgaactgaccagcaatatgttctgatgaacaaataaagtttttctt

SEQ ID NO: 18847 - DNA, 122 bp, Homo sapiens
  misc_feature (61)..(62): /note="This region represents a CpG dinucleotide"
  misc_feature (61)..(61): /note="Nucleotide may be methylated to form 5-methylcytosine"
aattgcaacctccggcataaatggcttaaggccctaagcacagtcacttataccagggctcgtgtatatatccagtgtgggtcatgagtaatgccagggatttttaggcctccggatatcac

SEQ ID NO: 18848 - DNA, 122 bp, Homo sapiens
  misc_feature (61)..(62): /note="This region represents a CpG dinucleotide"
  misc_feature (61)..(61): /note="Nucleotide may be methylated to form 5-methylcytosine"
accgacattcctaaacttaagtgtttctttcttccttctcctcttattaatatttcagcacgcgtgttcagtaacaccaaacggtggttccctttcaagaggaagtgagaaagaggaaatgt

SEQ ID NO: 18849 - DNA, 122 bp, Homo sapiens
  misc_feature (61)..(62): /note="This region represents a CpG dinucleotide"
  misc_feature (61)..(61): /note="Nucleotide may be methylated to form 5-methylcytosine"
ttgcccttgcttttggagcacccaagtgagacagctgaagggcctggaaatttacatcaccgacccacaccatgcctcaaggacctggtccttaatgactgacaggtggcaggagtatttaa

SEQ ID NO: 18850 - DNA, 122 bp, Homo sapiens
  misc_feature (61)..(62): /note="This region represents a CpG dinucleotide"
  misc_feature (61)..(61): /note="Nucleotide may be methylated to form 5-methylcytosine"
caaagaggaagcaggcatatgagtgcgcacgccttcacgtgtgtgtatgctgtgtgtgcccgggacccccgtctccaggggtgccccagacccagagattagcctcccacttcggcgcagaa

SEQ ID NO: 18851 - DNA, 122 bp, Homo sapiens
  misc_feature (61)..(62): /note="This region represents a CpG dinucleotide"
  misc_feature (61)..(61): /note="Nucleotide may be methylated to form 5-methylcytosine"
gggaagtgttggagccgggattcaattcaagctgttggcttcagattcccagttcatactcgctccctctatgaaacctccacccatccatttggaaaatgttgctagctagcttcaccttc

SEQ ID NO: 18852 - DNA, 122 bp, Homo sapiens
  misc_feature (61)..(62): /note="This region represents a CpG dinucleotide"
  misc_feature (61)..(61): /note="Nucleotide may be methylated to form 5-methylcytosine"
gacagcggcggacatgaggaaaggccagaggcagcagccagcccatctcaggcccgtcaccgtggaagcagcggccggaggagccacagaaagcaaaactcccaaagccgcccacgtacttc

SEQ ID NO: 18853 - DNA, 122 bp, Homo sapiens
  misc_feature (61)..(62): /note="This region represents a CpG dinucleotide"
  misc_feature (61)..(61): /note="Nucleotide may be methylated to form 5-methylcytosine"
cttaattgtgaacctttttttcacaagatgcacagtcttctagagattttgctagtggaacgggtgtgtgagctgatcattatatggaattgagacacatcaaatgccattaaaatttacat

SEQ ID NO: 18854 - DNA, 122 bp, Homo sapiens
  misc_feature (61)..(62): /note="This region represents a CpG dinucleotide"
  misc_feature (61)..(61): /note="Nucleotide may be methylated to form 5-methylcytosine"
attcaatcagaaactctacatatacactttggaatttacacatttgatagctgcaaagctcgcaagcaagctctccagccaacatgcctgcctgtctccgcccaggtgtggcaagccccaca

SEQ ID NO: 18855 - DNA, 122 bp, Homo sapiens
  misc_feature (61)..(62): /note="This region represents a CpG dinucleotide"
  misc_feature (61)..(61): /note="Nucleotide may be methylated to form 5-methylcytosine"
aaggaggaggcttgtcggctgagagagctaagggagggagctgaatgtgaattgagtagacgtcagtatgcagaacaggaattggaacaggtatttacattaaaaaaaaaatcacttgtaaa

SEQ ID NO: 18856 - DNA, 122 bp, Homo sapiens
  misc_feature (61)..(62): /note="This region represents a CpG dinucleotide"
  misc_feature (61)..(61): /note="Nucleotide may be methylated to form 5-methylcytosine"
agttaggtttcctaatcccttatagagggagccagacatgacatcagtacttacacaaaacgttttcaattataactgaggcaagtactacaaggaaaatcatagcacatggtctaatggag

SEQ ID NO: 18857 - DNA, 122 bp, Homo sapiens
  misc_feature (61)..(62): /note="This region represents a CpG dinucleotide"
  misc_feature (61)..(61): /note="Nucleotide may be methylated to form 5-methylcytosine"
tgataagcgaagaacagaggcctatgagaacatagagcagggagttcttaaactgatctacgatctagagaaggattcaataaagaggaaatatttaatgagacttgaagattgagtaggct

SEQ ID NO: 18858 - DNA, 122 bp, Homo sapiens
  misc_feature (61)..(62): /note="This region represents a CpG dinucleotide"
  misc_feature (61)..(61): /note="Nucleotide may be methylated to form 5-methylcytosine"
tcatccaagcgatggttcggggaaatggaaatagatctggtcagatcggtgcaggccaagcgggtgcctaacatgtgtttaccgacaacgacctagtacacgtttattaggaacattttcta

SEQ ID NO: 18859 - DNA, 122 bp, Homo sapiens
  misc_feature (61)..(62): /note="This region represents a CpG dinucleotide"
  misc_feature (61)..(61): /note="Nucleotide may be methylated to form 5-methylcytosine"
aatattatataatcagaaatcaatctcatacagctccctatcaagaatggataacaatgacgttaagtattccttccatgatttactttggcataattaataataactttattagacattag

SEQ ID NO: 18860 - DNA, 122 bp, Homo sapiens
  misc_feature (61)..(62): /note="This region represents a CpG dinucleotide"
  misc_feature (61)..(61): /note="Nucleotide may be methylated to form 5-methylcytosine"
aatggtcacgttagattggcctcagacaaccacaaaagttaacaagcagtcccaaagtaccgtgaggtttaaccactggaaatgtaaactgccggtcctgtctttgcccttctacttcctcg

SEQ ID NO: 18861 - DNA, 122 bp, Homo sapiens
  misc_feature (61)..(62): /note="This region represents a CpG dinucleotide"
  misc_feature (61)..(61): /note="Nucleotide may be methylated to form 5-methylcytosine"
catccagttaatgtgtaacttctatgcaaatgacttcaataccctatcagtacacctgaccgcattccagatctctgactcaggatttttatcttgcatgcatgacatacttacttgaatgc

SEQ ID NO: 18862 - DNA, 122 bp, Homo sapiens
  misc_feature (61)..(62): /note="This region represents a CpG dinucleotide"
  misc_feature (61)..(61): /note="Nucleotide may be methylated to form 5-methylcytosine"
aagaccagtgctggatgagcctctagtaatgacaacattttagttgttagtggtataatacggaagagatattttgcacaggctgctttggagaactttcaaattatcctttgtttggtaac

SEQ ID NO: 18863 - DNA, 122 bp, Homo sapiens
  misc_feature (61)..(62): /note="This region represents a CpG dinucleotide"
  misc_feature (61)..(61): /note="Nucleotide may be methylated to form 5-methylcytosine"
ggggggtagagaggctatgggacaaatgataatctggtggcactaaacataaaggacacacgctggctcagcccctgattcaccagtgagtcactgtctgtgagcagaaagtatggccctga

SEQ ID NO: 18864 - DNA, 122 bp, Homo sapiens
  misc_feature (61)..(62): /note="This region represents a CpG dinucleotide"
  misc_feature (61)..(61): /note="Nucleotide may be methylated to form 5-methylcytosine"
ttgagaagcaaaggaaactaggtcaggtatcgggggtcagtcactcaccccttccagtgtcgggtgtggggtggttgggagtaatgagagctctgagcagggaaccccacagtcttccccca

SEQ ID NO: 18865 - DNA, 122 bp, Homo sapiens
  misc_feature (61)..(62): /note="This region represents a CpG dinucleotide"
  misc_feature (61)..(61): /note="Nucleotide may be methylated to form 5-methylcytosine"
ctctttttgtaagcagaggtggctggctctgcagccttaaggccattttttaagtcaccacgtctagaagtcacatgaactctgctcagcaataatctgttctcagaacagacttttcaacc

SEQ ID NO: 18866 - DNA, 122 bp, Homo sapiens
  misc_feature (61)..(62): /note="This region represents a CpG dinucleotide"
  misc_feature (61)..(61): /note="Nucleotide may be methylated to form 5-methylcytosine"
tgtatgtttcattatgtgacatatcacatgtgttgtatttaacttttccccagtcatgggcgtagacagttggcagcttgtgcctgtcctaagtcatgacctcgtacatgaatcatatctgg

SEQ ID NO: 18867 - DNA, 122 bp, Homo sapiens
  misc_feature (61)..(62): /note="This region represents a CpG dinucleotide"
  misc_feature (61)..(61): /note="Nucleotide may be methylated to form 5-methylcytosine"
atgcatcccctggcgttcccggatacctgcctgcatcacacagtccctgcctgtccatctcgcagctttacagcccaggaaggcccaggcccggctcctcccgacctctcccgaagtccctt

SEQ ID NO: 18868 - DNA, 122 bp, Homo sapiens
  misc_feature (61)..(62): /note="This region represents a CpG dinucleotide"
  misc_feature (61)..(61): /note="Nucleotide may be methylated to form 5-methylcytosine"
gtgtaatgtgggatgtgagaggaggtgagtggctacagaaggtgaggagtggaaggtgcacgcaagcttcaagggattagtaaactaacactgaaaagaggaagtggtttctgtagctactg

SEQ ID NO: 18869 - DNA, 122 bp, Homo sapiens
  misc_feature (61)..(62): /note="This region represents a CpG dinucleotide"
  misc_feature (61)..(61): /note="Nucleotide may be methylated to form 5-methylcytosine"
taacaatctcagcaaaatggacttgcatgccacaatagaggtgttctctatgcatgggtacgccagtgcatctatcctgtgctaaccatatttagtggcgctcttgggagacaatcatctgt

SEQ ID NO: 18870 - DNA, 122 bp, Homo sapiens
  misc_feature (61)..(62): /note="This region represents a CpG dinucleotide"
  misc_feature (61)..(61): /note="Nucleotide may be methylated to form 5-methylcytosine"
atgtgtgagctcagctgaagtaaacaccttccacgtactgagaacagggctggctcctggcgatctaacatcttacagtctacaggggcccctgatcagtaagggctgaggattgcagatag

SEQ ID NO: 18871 - DNA, 122 bp, Homo sapiens
  misc_feature (61)..(62): /note="This region represents a CpG dinucleotide"
  misc_feature (61)..(61): /note="Nucleotide may be methylated to form 5-methylcytosine"
ggtcagcatctgggcccagggcagctgcctcattcaggtggtggcagtgtaaggaggagtcgtgtaacgcgtgtcatcagattccagttcagttcctgggcatacaaatatgaagacttcat

SEQ ID NO: 18872 - DNA, 122 bp, Homo sapiens
  misc_feature (61)..(62): /note="This region represents a CpG dinucleotide"
  misc_feature (61)..(61): /note="Nucleotide may be methylated to form 5-methylcytosine"
agctcctcccatatggtggacatggaaagttgtttagtctgtctaatatgatgatgatgccgattaccatgagcatcactgaaggtactgtgtgtacagagcctagcctgcagtctgggtgt

SEQ ID NO: 18873 - DNA, 122 bp, Homo sapiens
  misc_feature (61)..(62): /note="This region represents a CpG dinucleotide"
  misc_feature (61)..(61): /note="Nucleotide may be methylated to form 5-methylcytosine"
cactcctgctgcaccaggcctatgaccttcagtcccagctgtggagtgtgccaatgtggtcgccaggtgagcagggccagggctttgcactgctccaggggcagggccttgttgcctggcag

SEQ ID NO: 18874 - DNA, 122 bp, Homo sapiens
  misc_feature (61)..(62): /note="This region represents a CpG dinucleotide"
  misc_feature (61)..(61): /note="Nucleotide may be methylated to form 5-methylcytosine"
tccagatgccccagaccacacccaccctgacaaatcaagagaccaagaactcaatctctgcggcccaggccctaaggacagcagtccagcacagggatgacatcattccgaaggacaggcag

SEQ ID NO: 18875 - DNA, 122 bp, Homo sapiens
  misc_feature (61)..(62): /note="This region represents a CpG dinucleotide"
  misc_feature (61)..(61): /note="Nucleotide may be methylated to form 5-methylcytosine"
ggttgatgtcttgtgtttgccatgttccgctgggaggctaaatctgtaagaaaacaaatacgcttggagggaggagactgcccttaagccccactcaatcacaagtcagctggcccattgtg

SEQ ID NO: 18876 - DNA, 122 bp, Homo sapiens
  misc_feature (61)..(62): /note="This region represents a CpG dinucleotide"
  misc_feature (61)..(61): /note="Nucleotide may be methylated to form 5-methylcytosine"
agccactgtgcctggccaaaatttaccatcttaaccatttctaagtatagagttaagtaccgttagttaaattcgcattgttatggaagagctctccggaatttttttagcttgcaaaagtg

SEQ ID NO: 18877 - DNA, 122 bp, Homo sapiens
  misc_feature (61)..(62): /note="This region represents a CpG dinucleotide"
  misc_feature (61)..(61): /note="Nucleotide may be methylated to form 5-methylcytosine"
caccaacttcctgtatttctaaccttacttccttttctctgcccatatttaccacacatacgtccatatttccctgtttctgatctcagcatgctatcttaaccatagtgattagtctcttt

SEQ ID NO: 18878 - DNA, 122 bp, Homo sapiens
  misc_feature (61)..(62): /note="This region represents a CpG dinucleotide"
  misc_feature (61)..(61): /note="Nucleotide may be methylated to form 5-methylcytosine"
gcatcactcgattcccacaacactcatcacccacaagtgcagctttcaatcggagctgaacgagagctaactaagaatgagcccgacaagcaccgggaacaccaagcacagctcactcgcgg

SEQ ID NO: 18879 - DNA, 122 bp, Homo sapiens
  misc_feature (61)..(62): /note="This region represents a CpG dinucleotide"
  misc_feature (61)..(61): /note="Nucleotide may be methylated to form 5-methylcytosine"
gagtttcatcatcagagatgataaagaaacatgactattcagcctttctcgtacatctaccgaatacctaactaatgatgttctcaccatattgaaaaaaaaaaaaaaaaccatccaggatg

SEQ ID NO: 18880 - DNA, 122 bp, Homo sapiens
  misc_feature (61)..(62): /note="This region represents a CpG dinucleotide"
  misc_feature (61)..(61): /note="Nucleotide may be methylated to form 5-methylcytosine"
ctccgttgcacgtaccctaacaaccacccaaggagggggtgttgtctttgtatcccagaacggttaagcagcttacttgggatcacacagtaagtagcgtggcaagaacttgcactcaagct

SEQ ID NO: 18881 - DNA, 122 bp, Homo sapiens
  misc_feature (61)..(62): /note="This region represents a CpG dinucleotide"
  misc_feature (61)..(61): /note="Nucleotide may be methylated to form 5-methylcytosine"
aatagggtttggcaatctagctggatagcatccctgccccttgaagagatgtttttgtggcgccacactactgacttaggcataatgcctagagatggattagaactgcacaatgaactagt

SEQ ID NO: 18882 - DNA, 122 bp, Homo sapiens
  misc_feature (61)..(62): /note="This region represents a CpG dinucleotide"
  misc_feature (61)..(61): /note="Nucleotide may be methylated to form 5-methylcytosine"
aagttttaaatacccaagaataacaaattacttccaagcactctacagcatttcagaatacgtttccatacaaatgaaatgttaattacaaaatgtagcctggtaaaagaataaacagtaaa

SEQ ID NO: 18883 - DNA, 122 bp, Homo sapiens
  misc_feature (61)..(62): /note="This region represents a CpG dinucleotide"
  misc_feature (61)..(61): /note="Nucleotide may be methylated to form 5-methylcytosine"
gcacctaccttggatttcttcttagcttccttctgctttaagctcttggtctcttgtttccgcttatttctggcctgtaaaccataagggaagtcatttctcctcaaactctgaaagcatct

SEQ ID NO: 18884 - DNA, 122 bp, Homo sapiens
  misc_feature (61)..(62): /note="This region represents a CpG dinucleotide"
  misc_feature (61)..(61): /note="Nucleotide may be methylated to form 5-methylcytosine"
tagtggcttcaggagtcccaaggagtagaaatatctatgtggacactaccttccggatcccgctgcctccgcccccaggcaagattaatgaacatcgtcttagactgaaagagaagtggaaa

SEQ ID NO: 18885 - DNA, 122 bp, Homo sapiens
  misc_feature (61)..(62): /note="This region represents a CpG dinucleotide"
  misc_feature (61)..(61): /note="Nucleotide may be methylated to form 5-methylcytosine"
aaaaaaaaaaaaaaaaaaaaaaaagatactggtgaggaagaaaggagaggattattcctacggttttgacttaagctatcagttaaatggtggtgccatatactgagatggaaaatactcag

SEQ ID NO: 18886 - DNA, 122 bp, Homo sapiens
  misc_feature (61)..(62): /note="This region represents a CpG dinucleotide"
  misc_feature (61)..(61): /note="Nucleotide may be methylated to form 5-methylcytosine"
atgctctgacatgtatgcttcctaattcttcgcttgcttaggatctgcttgaatctggcccgtaaaagtactgtatttatccacattctgtactggttttcatggtgacttaaatgcttgtg

SEQ ID NO: 18887 - DNA, 122 bp, Homo sapiens
  misc_feature (61)..(62): /note="This region represents a CpG dinucleotide"
  misc_feature (61)..(61): /note="Nucleotide may be methylated to form 5-methylcytosine"
cagcttctttcatggcctatttttattatctccttctcttaaatctgggctcagaatccacgatccctatgattgtaacaagaacaatcaagctttgaagatagtggacttttcctacagtg

SEQ ID NO: 18888 - DNA, 122 bp, Homo sapiens
  misc_feature (61)..(62): /note="This region represents a CpG dinucleotide"
  misc_feature (61)..(61): /note="Nucleotide may be methylated to form 5-methylcytosine"
agaaatttaaatggaaacaggaaggaagtaaattgggtaggaggagactagtctgtttgccgggtgctgaacctgggaaatgtgtgtgagagaagcacattgtcctgtagtcaagagacctg

SEQ ID NO: 18889 - DNA, 122 bp, Homo sapiens
  misc_feature (61)..(62): /note="This region represents a CpG dinucleotide"
  misc_feature (61)..(61): /note="Nucleotide may be methylated to form 5-methylcytosine"
gtgtgatacaagggccctgactcatcttgagctcaacttagcatttagatatatctggagcgggatagaggcagggctctggggaaagaactcaccttcagggaagaaggaatagagactgg

SEQ ID NO: 18890 - DNA, 122 bp, Homo sapiens
  misc_feature (61)..(62): /note="This region represents a CpG dinucleotide"
  misc_feature (61)..(61): /note="Nucleotide may be methylated to form 5-methylcytosine"
tagctgcctaaggactgagggaggatctgtgctcagtgaaaaaaaggctgtttgatttgccgtgtttgtcatggacgtggaagagccacctgtcagaaccaggactatattttagctattct

SEQ ID NO: 18891 - DNA, 122 bp, Homo sapiens
  misc_feature (61)..(62): /note="This region represents a CpG dinucleotide"
  misc_feature (61)..(61): /note="Nucleotide may be methylated to form 5-methylcytosine"
aatttctagccacttcttgttgctgttttggtgagctttactgttgcaggtatctgcttacgacaacgtgtgatgtgaatcatctcagcatgagcagttcaactctccagtaaattgtatat

SEQ ID NO: 18892 - DNA, 122 bp, Homo sapiens
  misc_feature (61)..(62): /note="This region represents a CpG dinucleotide"
  misc_feature (61)..(61): /note="Nucleotide may be methylated to form 5-methylcytosine"
atgtcttaaatgtatttaattgaagtctcacgtctccctaaaatgtatacatctaggtgacgccccaatcaccttggggtcatgttctcaggatctcctgaaggttatgtcatgggccatta

SEQ ID NO: 18893 - DNA, 122 bp, Homo sapiens
  misc_feature (61)..(62): /note="This region represents a CpG dinucleotide"
  misc_feature (61)..(61): /note="Nucleotide may be methylated to form 5-methylcytosine"
ttcccaaatctgccggatttcgaatttagggagctttctaaatgatgtaacttaactgcccggccccgcctggaccgtgatttcggtcgtcatccaaaactcatgtctgggttgactgtcac

SEQ ID NO: 18894 - DNA, 122 bp, Homo sapiens
  misc_feature (61)..(62): /note="This region represents a CpG dinucleotide"
  misc_feature (61)..(61): /note="Nucleotide may be methylated to form 5-methylcytosine"
gctgttttttaaacatgcactatgctcttaatgtcaattgtcctatgatctatgaggccacgtgactcatgcttgctgacaggatgcaggcacaagtgttgcgcaggcacaccctcactttg

SEQ ID NO: 18895 - DNA, 122 bp, Homo sapiens
  misc_feature (61)..(62): /note="This region represents a CpG dinucleotide"
  misc_feature (61)..(61): /note="Nucleotide may be methylated to form 5-methylcytosine"
aagtttctgaaattttaacaattggttcccttgagctggtaggagccagctccagcacaacgctgcaaacccaattaatagttatttgttgagggctgttcctgaagactgttaagtctttg

SEQ ID NO: 18896 - DNA, 122 bp, Homo sapiens
  misc_feature (61)..(62): /note="This region represents a CpG dinucleotide"
  misc_feature (61)..(61): /note="Nucleotide may be methylated to form 5-methylcytosine"
tgtctttccaaggacgtttcagaggatgaaagcgcctcacttcttgtcccactaggacaccgaggtgatcgtctccgcagtgtcataaggaacagtgaggcctcgtgggcttgtgcccctca

SEQ ID NO: 18897 - DNA, 122 bp, Homo sapiens
  misc_feature (61)..(62): /note="This region represents a CpG dinucleotide"
  misc_feature (61)..(61): /note="Nucleotide may be methylated to form 5-methylcytosine"
tagaaacgaaagacacttgtttccactgcaagaatgagcctgatcaagttttctggtatccgcacctgtgttagttctgtattaaaagctgtttacacagctgagtcaggaattgtccttca

SEQ ID NO: 18898 - DNA, 122 bp, Homo sapiens
  misc_feature (61)..(62): /note="This region represents a CpG dinucleotide"
  misc_feature (61)..(61): /note="Nucleotide may be methylated to form 5-methylcytosine"
taattaaatgggctatattttcatcatagtatctgtttcgtatgtgggaaatttgagacacgaagaaagtgtgagtcataccagacagaccataggtgaactgttaaggagggagaagccgc

SEQ ID NO: 18899 - DNA, 122 bp, Homo sapiens
  misc_feature (61)..(62): /note="This region represents a CpG dinucleotide"
  misc_feature (61)..(61): /note="Nucleotide may be methylated to form 5-methylcytosine"
ctttaatgacttcggcagttgtttcattctgcaaaaacaggaagatcccacacaataaggcgcctgtctcacagctgggctcctgcgtagacggccacccacaagagtaactaactgctggg

SEQ ID NO: 18900 - DNA, 122 bp, Homo sapiens
  misc_feature (61)..(62): /note="This region represents a CpG dinucleotide"
  misc_feature (61)..(61): /note="Nucleotide may be methylated to form 5-methylcytosine"
aggctttgagtcctggagatagatcctgctctgctggttgaggaccttaatcataaggcacggtattaacagcaaggttccaggataactgtctgcagtgtcacagtgtaaaaggagaaatg

SEQ ID NO: 18901 - DNA, 122 bp, Homo sapiens
  misc_feature (61)..(62): /note="This region represents a CpG dinucleotide"
  misc_feature (61)..(61): /note="Nucleotide may be methylated to form 5-methylcytosine"
gcttgaagagagaaccagccctgcaggggctccatcaggtctgtttgtggcagagaaagccggacttatgaatagagagctggctagggaaagaaaaacaactcatttgagggctagtccat

SEQ ID NO: 18902 - DNA, 122 bp, Homo sapiens
  misc_feature (61)..(62): /note="This region represents a CpG dinucleotide"
  misc_feature (61)..(61): /note="Nucleotide may be methylated to form 5-methylcytosine"
tggccccttcatggcacagcgacagctttgccatcagccggcaagcatgcggggtgtggacgacacagccggagagagcagaggccaggctcatgaatcggacaacgagctcgagttttcaa

SEQ ID NO: 18903 - DNA, 122 bp, Homo sapiens
  misc_feature (61)..(62): /note="This region represents a CpG dinucleotide"
  misc_feature (61)..(61): /note="Nucleotide may be methylated to form 5-methylcytosine"
tgttttctttgatgcaggaagggttgtatttgaatggttctattaagttgatggattttacgctatcagtaagattctccagtgctggatgaaacgtgaaaaagtatatatagcaccgcttc

SEQ ID NO: 18904 - DNA, 122 bp, Homo sapiens
  misc_feature (61)..(62): /note="This region represents a CpG dinucleotide"
  misc_feature (61)..(61): /note="Nucleotide may be methylated to form 5-methylcytosine"
atagcatggtagtccataactggattcttcaataacagtaaatctagctatttcccccagcggaatgggaattgtgtccaacatttcaaacatctggaaaagtatcatctatacgcagtgta

SEQ ID NO: 18905 - DNA, 122 bp, Homo sapiens
  misc_feature (61)..(62): /note="This region represents a CpG dinucleotide"
  misc_feature (61)..(61): /note="Nucleotide may be methylated to form 5-methylcytosine"
gctggagaaattcccattagaagaatcacaatgaagtctcctaagaatctgacagaaaaccgcatcctctttggtatgtagctgtcattcttttggaaaacagtagtttgattgccactggg

SEQ ID NO: 18906 - DNA, 122 bp, Homo sapiens
  misc_feature (61)..(62): /note="This region represents a CpG dinucleotide"
  misc_feature (61)..(61): /note="Nucleotide may be methylated to form 5-methylcytosine"
gtatgttggggaacttcacggaaggggctttgttacaggaacccaagtcaccatcctccccggtcctgtggcaggaagcggtgctaggcgcagctggagtggttttagagcagcctgaaata

SEQ ID NO: 18907 - DNA, 122 bp, Homo sapiens
  misc_feature (61)..(62): /note="This region represents a CpG dinucleotide"
  misc_feature (61)..(61): /note="Nucleotide may be methylated to form 5-methylcytosine"
gtgtttagtttgggcagttttcaagtctgcgtggccttttgttgttattgttggccctcacgtctccaccattcatgcacacaggctcccaggcagccaggcatgtgtggaatgtttatcaa

SEQ ID NO: 18908 - DNA, 122 bp, Homo sapiens
  misc_feature (61)..(62): /note="This region represents a CpG dinucleotide"
  misc_feature (61)..(61): /note="Nucleotide may be methylated to form 5-methylcytosine"
caccagtaagtctttgctctcagaggtgaggtacgtggcatgggtaacacacatttcccacgtcgttagacatgtctgtgtgatgaatcaatacaggttcttccagttccaaatgtataggc

SEQ ID NO: 18909 - DNA, 122 bp, Homo sapiens
  misc_feature (61)..(62): /note="This region represents a CpG dinucleotide"
  misc_feature (61)..(61): /note="Nucleotide may be methylated to form 5-methylcytosine"
ttgagtgtatctgcacaagacttctctagcttcattaccaaaccttgagtcacctgaatccgaacaggccaactgatgttttaagtggaacaaaattccctgcctaccttttctttttccat

SEQ ID NO: 18910 - DNA, 122 bp, Homo sapiens
  misc_feature (61)..(62): /note="This region represents a CpG dinucleotide"
  misc_feature (61)..(61): /note="Nucleotide may be methylated to form 5-methylcytosine"
attactcattctctcactgactcacacagagcaacttcccgtcctgaaaagttcatttatcgtaagtaccctgtaaagatgtaccattttttatcttttataccatgttttactgtacgttt

SEQ ID NO: 18911 - DNA, 122 bp, Homo sapiens
  misc_feature (61)..(62): /note="This region represents a CpG dinucleotide"
  misc_feature (61)..(61): /note="Nucleotide may be methylated to form 5-methylcytosine"
cctcagctggccagcaggacttgactgcaacctgatttaaagtattaacatacctagggccgggctcagtggtttggtggctcatgcctgtaatcccaacactttcggaggctgacgtgggc

SEQ ID NO: 18912 - DNA, 122 bp, Homo sapiens
  misc_feature (61)..(62): /note="This region represents a CpG dinucleotide"
  misc_feature (61)..(61): /note="Nucleotide may be methylated to form 5-methylcytosine"
gattaggtcaggcacggtgactcatgtctgtaacccagctctctgagaggccaaggtggacggatcacttgaggtcaggagttcatgatcagcctggctaacatggtgaaaccccgtctcta

SEQ ID NO: 18913 - DNA, 122 bp, Homo sapiens
  misc_feature (61)..(62): /note="This region represents a CpG dinucleotide"
  misc_feature (61)..(61): /note="Nucleotide may be methylated to form 5-methylcytosine"
taaatggagtggggtctgggcctcccagagagacgagtgcttaaatcccgagagtccccacgggatggtggggaggaaggctgtggggagagtgtaccctgccatggggggcaggtgctcca

SEQ ID NO: 18914 - DNA, 122 bp, Homo sapiens
  misc_feature (61)..(62): /note="This region represents a CpG dinucleotide"
  misc_feature (61)..(61): /note="Nucleotide may be methylated to form 5-methylcytosine"
ggatattaatgacataaaagataatgcacccagattaaaacacacaatactggtgtcacccgctacacaccctaaccaacagagctaacctacagaaagtatttaaggtaagcagtaaagaa

SEQ ID NO: 18915 - DNA, 122 bp, Homo sapiens
  misc_feature (61)..(62): /note="This region represents a CpG dinucleotide"
  misc_feature (61)..(61): /note="Nucleotide may be methylated to form 5-methylcytosine"
acaatcttctgaagcaaccctttgaggcatagggattttctgagtaaatgagtcaggtctcggtattgagcaatggctgctacaaggaaaccttgaggccccattgcaaatgtcatgctcct

SEQ ID NO: 18916 - DNA, 122 bp, Homo sapiens
  misc_feature (61)..(62): /note="This region represents a CpG dinucleotide"
  misc_feature (61)..(61): /note="Nucleotide may be methylated to form 5-methylcytosine"
gagtgtgtgatatgcttttgtgagtcatctgtccagcatacaattaatgagtgactatttcgtactgagtgcagtgaacattgcaacagtaatgattgctgtcacttgctgagattttatta

SEQ ID NO: 18917 - DNA, 122 bp, Homo sapiens
  misc_feature (61)..(62): /note="This region represents a CpG dinucleotide"
  misc_feature (61)..(61): /note="Nucleotide may be methylated to form 5-methylcytosine"
aagagaagagttagcccaggaagtcatccccatccatgtcacccatcaaggcctaagtgacgaacggttacagagactgacctaacctcacctcagtagatataggcaggctccttaagccc

SEQ ID NO: 18918 - DNA, 122 bp, Homo sapiens
  misc_feature (61)..(62): /note="This region represents a CpG dinucleotide"
  misc_feature (61)..(61): /note="Nucleotide may be methylated to form 5-methylcytosine"
ggcctgagaatgaagctgaggcagtgccaaaatatgccagtgatactgagacccagatcccgccatgcctggtcttttccattacatgagctcatacagtttctactggcacaagccaggct

SEQ ID NO: 18919 - DNA, 122 bp, Homo sapiens
  misc_feature (61)..(62): /note="This region represents a CpG dinucleotide"
  misc_feature (61)..(61): /note="Nucleotide may be methylated to form 5-methylcytosine"
aacctgaagtaagctaagttaaacaatcagttttcttcttccactgttctgtttccttgtcgccaacttacaaacatcactgttctgccactgcccagagggagctctcattctattttgta

SEQ ID NO: 18920 - DNA, 122 bp, Homo sapiens
  misc_feature (61)..(62): /note="This region represents a CpG dinucleotide"
  misc_feature (61)..(61): /note="Nucleotide may be methylated to form 5-methylcytosine"
tgtggctccccaagtcccgcctctcttctcagagctcacctgtgtccctccttaggatggcgccgccttttcaagggctgagcactggctcccctccaggccccgcccccggtcccctggcc

SEQ ID NO: 18921 - DNA, 122 bp, Homo sapiens
  misc_feature (61)..(62): /note="This region represents a CpG dinucleotide"
  misc_feature (61)..(61): /note="Nucleotide may be methylated to form 5-methylcytosine"
ctcatgaaatccttatgaaataccatctgaagcaggttctgcctggaacgtgcttctcctcgtcttcatgtggctggtttgttcccaccattcatgcatcagctcaattatttcttctaacg

SEQ ID NO: 18922 - DNA, 122 bp, Homo sapiens
  misc_feature (61)..(62): /note="This region represents a CpG dinucleotide"
  misc_feature (61)..(61): /note="Nucleotide may be methylated to form 5-methylcytosine"
aaaaaactatgtacaggtaagcttttaggaaagattgccaagttactcttcaagggttctcgcagatttatgcttctaccccagggaggagagcgcctgctggtgtcctccgcttcttcaca

SEQ ID NO: 18923 - DNA, 122 bp, Homo sapiens
  misc_feature (61)..(62): /note="This region represents a CpG dinucleotide"
  misc_feature (61)..(61): /note="Nucleotide may be methylated to form 5-methylcytosine"
acagctgatacatttcagggctgggattcaaattcaagacttctgactccagagccctaccgttcaaccaggaagtaccttatacagtcttttccacagatggtttcttcctcagtggggga

SEQ ID NO: 18924 - DNA, 122 bp, Homo sapiens
  misc_feature (61)..(62): /note="This region represents a CpG dinucleotide"
  misc_feature (61)..(61): /note="Nucleotide may be methylated to form 5-methylcytosine"
actcaaaacacaaactttcaaaaagggaaagtcataaccctctagtcatcagggcaattacggaataacattgctggagtaaggttttctcaatgcccaagagatgagctggcaatgccaca

SEQ ID NO: 18925 - DNA, 122 bp, Homo sapiens
  misc_feature (61)..(62): /note="This region represents a CpG dinucleotide"
  misc_feature (61)..(61): /note="Nucleotide may be methylated to form 5-methylcytosine"
cccaaattgctcaaagaaatgaaccctgaggtctccctctgactcaacactcccagatggcgcctacctcttcagaggcctctctctccccaactcagctataagcctcataaagccagaga

SEQ ID NO: 18926 - DNA, 122 bp, Homo sapiens
  misc_feature (61)..(62): /note="This region represents a CpG dinucleotide"
  misc_feature (61)..(61): /note="Nucleotide may be methylated to form 5-methylcytosine"
tcatctgaaatgaccaatgatgcgggaagtaccctttccagatgctggctcagccagggccgagtgacctgttgcagagtccatgagaaaacatgtttgatggcagggttattcttccagga

SEQ ID NO: 18927 - DNA, 122 bp, Homo sapiens
  misc_feature (61)..(62): /note="This region represents a CpG dinucleotide"
  misc_feature (61)..(61): /note="Nucleotide may be methylated to form 5-methylcytosine"
agtacaaacagacaaagcaatccagattctaacaacacaatgaacaaacttgccttattacgtagaacgctgtactcaatgaagatgataaacaaacaaaaagtattcagtctcggtcgttg

SEQ ID NO: 18928 - DNA, 122 bp, Homo sapiens
  misc_feature (61)..(62): /note="This region represents a CpG dinucleotide"
  misc_feature (61)..(61): /note="Nucleotide may be methylated to form 5-methylcytosine"
aattagttgaaaggcaattaactagaagagttattgttgtgtatgacctcaaatgatagacgggaactggcagagatgaaattaggctaaatatacataagaacttgttaattattttagct

SEQ ID NO: 18929 - DNA, 122 bp, Homo sapiens
  misc_feature (61)..(62): /note="This region represents a CpG dinucleotide"
  misc_feature (61)..(61): /note="Nucleotide may be methylated to form 5-methylcytosine"
tggtagagttaggggagagggcacgagggagacaggaggccctgggcaagaatccagttgcgctggttgtattgacatgcatggacttgagagttatcctgaaaccctatccctccttatct

SEQ ID NO: 18930 - DNA, 122 bp, Homo sapiens
  misc_feature (61)..(62): /note="This region represents a CpG dinucleotide"
  misc_feature (61)..(61): /note="Nucleotide may be methylated to form 5-methylcytosine"
caacagagtgagaccctgtctctacaaaaatttttttaaaaaagatcattctgggccgggcgcggtggctcatgcctgtaatcccagcactttgggaggccaaggcgagtggatcacgaggt

SEQ ID NO: 18931 - DNA, 122 bp, Homo sapiens
  misc_feature (61)..(62): /note="This region represents a CpG dinucleotide"
  misc_feature (61)..(61): /note="Nucleotide may be methylated to form 5-methylcytosine"
ggcggctggcaccgggtgggttctagacccaaggtttgtctgcagaaggggaccagtagacggggtggattcgaggtggggacatgggacgcagcggtcggagccgcctggaggggtacccg

SEQ ID NO: 18932 - DNA, 122 bp, Homo sapiens
  misc_feature (61)..(62): /note="This region represents a CpG dinucleotide"
  misc_feature (61)..(61): /note="Nucleotide may be methylated to form 5-methylcytosine"
agtgccctggaaggaagttgctcaatctaagtggaaaccaaaccctagctttggtttcctcgggaaattttgcagtaactacttctctataattagtgagcgtgggtttgaccaagccctta

SEQ ID NO: 18933 - DNA, 122 bp, Homo sapiens
  misc_feature (61)..(62): /note="This region represents a CpG dinucleotide"
  misc_feature (61)..(61): /note="Nucleotide may be methylated to form 5-methylcytosine"
aactaagagacctgggttcacatcctgtttctgcaattcacgagctgtacacaagtgaaccgtgtaacctgagtcacagctttctcctgtgtatgattgggagatcatttatgctttcctca

SEQ ID NO: 18934 - DNA, 122 bp, Homo sapiens
  misc_feature (61)..(62): /note="This region represents a CpG dinucleotide"
  misc_feature (61)..(61): /note="Nucleotide may be methylated to form 5-methylcytosine"
atgctgcaggaggagaacaagtctctgcgggaggagaacaaggccctgcgcgaggagaaccggatgctcagcaaggagaacaagatcctacaggtcttctgggaggagcacaaggcctcgct

SEQ ID NO: 18935 - DNA, 122 bp, Homo sapiens
  misc_feature (61)..(62): /note="This region represents a CpG dinucleotide"
  misc_feature (61)..(61): /note="Nucleotide may be methylated to form 5-methylcytosine"
gggattacaggcatgagccactgtgctgggccatggctaatttctgtattcttataaggacggggtttcaccttgttggccaggctggtctctgactcctgacctcagttgatccgcctgcc

SEQ ID NO: 18936 - DNA, 122 bp, Homo sapiens
  misc_feature (61)..(62): /note="This region represents a CpG dinucleotide"
  misc_feature (61)..(61): /note="Nucleotide may be methylated to form 5-methylcytosine"
ccgcactctaggaaactattgcaccagcttctactcctgcaccacttagcaacaggaaaacgatggggaaacactaccaaactaacgagtgggtcacctcagatttgatttaaccctaaact

SEQ ID NO: 18937 - DNA, 122 bp, Homo sapiens
  misc_feature (61)..(62): /note="This region represents a CpG dinucleotide"
  misc_feature (61)..(61): /note="Nucleotide may be methylated to form 5-methylcytosine"
cagccagatcccatctgcaaacacaccaaagctttattcaacaggcgtggcttcctgaagcgtaaagccacttcacagacggtggccacagcggcacctcggccagagccatgcggccatca

SEQ ID NO: 18938 - DNA, 122 bp, Homo sapiens
  misc_feature (61)..(62): /note="This region represents a CpG dinucleotide"
  misc_feature (61)..(61): /note="Nucleotide may be methylated to form 5-methylcytosine"
ttctttctttcaactattgaacttccactgttaaacccagtttttgtgtgtccatgtcttcgatttcctgtgtctgtgacttcaatttccttagcataagacaatgaatcttgggtatttcc

SEQ ID NO: 18939 - DNA, 122 bp, Homo sapiens
  misc_feature (61)..(62): /note="This region represents a CpG dinucleotide"
  misc_feature (61)..(61): /note="Nucleotide may be methylated to form 5-methylcytosine"
caaactcctgggatcaagtgatctgcctgccttggccttccaaagtactgggattacaggcgtgagccactgcattgagccatcttaagcaatttgtttctgtttgtttaagacagagtctc

SEQ ID NO: 18940 - DNA, 122 bp, Homo sapiens
  misc_feature (61)..(62): /note="This region represents a CpG dinucleotide"
  misc_feature (61)..(61): /note="Nucleotide may be methylated to form 5-methylcytosine"
aacacttcctgcttcactgggtggttgagaggatcaaataagatagaaaaggaattgctacgtaacacctaaagcaaggcccaactgctagttgtggctgctgctgttacttggagagaaga

SEQ ID NO: 18941 - DNA, 122 bp, Homo sapiens
  misc_feature (61)..(62): /note="This region represents a CpG dinucleotide"
  misc_feature (61)..(61): /note="Nucleotide may be methylated to form 5-methylcytosine"
acacagattgctcagcttccctgagaattagttgctttatccataaaataggcataataacgtattgctgggtcatgaagaattaaattaaccaatgaatagagagagacttgtggactaca

SEQ ID NO: 18942 - DNA, 122 bp, Homo sapiens
  misc_feature (61)..(62): /note="This region represents a CpG dinucleotide"
  misc_feature (61)..(61): /note="Nucleotide may be methylated to form 5-methylcytosine"
cttgtgtggctctgtccttcttttcaagtttgagggggttgtggaccatgtgaggctggacggctcacatgtcagccgccaggctcttagttacagacatggcaaacttccatcatttaagc

SEQ ID NO: 18943 - DNA, 122 bp, Homo sapiens
  misc_feature (61)..(62): /note="This region represents a CpG dinucleotide"
  misc_feature (61)..(61): /note="Nucleotide may be methylated to form 5-methylcytosine"
tcatcaagtcatagctatagaatgtacattattaccatgaaattgcgtcatttcctatgccgtaatgataaagtagaagtccacagttacgtaaggcaataatctgccagggcagttaaact

SEQ ID NO: 18944 - DNA, 122 bp, Homo sapiens
  misc_feature (61)..(62): /note="This region represents a CpG dinucleotide"
  misc_feature (61)..(61): /note="Nucleotide may be methylated to form 5-methylcytosine"
acagccatatccatttgtctgaatgggaccagtaactgttatattgcacccaccttgctacgttactatacatcttttgaaaaccaaagttcttagctgggcgtggtgactcatgcctgtaa

SEQ ID NO: 18945 - DNA, 122 bp, Homo sapiens
  misc_feature (61)..(62): /note="This region represents a CpG dinucleotide"
  misc_feature (61)..(61): /note="Nucleotide may be methylated to form 5-methylcytosine"
tcagggtgctcctgaggctatgagcagctggcagttccctgtctgagaggtccttcgtaccgcaggagaggcagctctcacctgaaggcctccctggacaccggtctcaactttgtgtgtta

SEQ ID NO: 18946 - DNA, 122 bp, Homo sapiens
  misc_feature (61)..(62): /note="This region represents a CpG dinucleotide"
  misc_feature (61)..(61): /note="Nucleotide may be methylated to form 5-methylcytosine"
aatcctttgcggtggttctttccccaggctcaggcaggttccccttacgcacgtactgatcggttctcggctgaacactcgtgggaaccttctgcagacctccggctccctctgtgcagcgc

SEQ ID NO: 18947 - DNA, 122 bp, Homo sapiens
  misc_feature (61)..(62): /note="This region represents a CpG dinucleotide"
  misc_feature (61)..(61): /note="Nucleotide may be methylated to form 5-methylcytosine"
tctcacctgctgccttgtaacatttgcctacttcctctttcactgtgattgtaagtttcccgaggcctccccagccatgcagaactgtgagtcaattaaaactcttgcctttataaattacc

SEQ ID NO: 18948 - DNA, 122 bp, Homo sapiens
  misc_feature (61)..(62): /note="This region represents a CpG dinucleotide"
  misc_feature (61)..(61): /note="Nucleotide may be methylated to form 5-methylcytosine"
gaagagcccaatcaagcagtcaaacgtgtttacaggtcagctctgctcctggccaagtggcgttggctggggcacgtggtgagtgggtggtggcggaccaggctcctgtgtcagctgcaggt

SEQ ID NO: 18949 - DNA, 122 bp, Homo sapiens
  misc_feature (61)..(62): /note="This region represents a CpG dinucleotide"
  misc_feature (61)..(61): /note="Nucleotide may be methylated to form 5-methylcytosine"
ggtgattgtgatatagggcttctctaagccttagttctctaaaaggtgatatcggactggcgatatctgagtcttgggattgttgtgtgaattggtggtttattagaaatagcatgatttta

SEQ ID NO: 18950 - DNA, 122 bp, Homo sapiens
  misc_feature (61)..(62): /note="This region represents a CpG dinucleotide"
  misc_feature (61)..(61): /note="Nucleotide may be methylated to form 5-methylcytosine"
cgtccattgtactgtcctaccccttggcacttgtttcagagatcagctgcggagatggggcgagtcacccaggaacagacagacacacttgctacagactaaagagaacaagtggttctaac

SEQ ID NO: 18951 - DNA, 122 bp, Homo sapiens
  misc_feature (61)..(62): /note="This region represents a CpG dinucleotide"
  misc_feature (61)..(61): /note="Nucleotide may be methylated to form 5-methylcytosine"
gtttgggatataaggcccctctgtgggtgtttaaggcacaatatttcaggcctaaaccaccgaatgacacatgcctaaacccagaatcctgtattctccaccaggactccagggtatgtgag

SEQ ID NO: 18952 - DNA, 122 bp, Homo sapiens
  misc_feature (61)..(62): /note="This region represents a CpG dinucleotide"
  misc_feature (61)..(61): /note="Nucleotide may be methylated to form 5-methylcytosine"
tataggttaaatagatttctgtgggccggcctaggaatcgctgtttaagacttctgacatcgtgattattaagatttcagaaaaaggctttagctttctgttgtgtttactttatttgattt

SEQ ID NO: 18953 - DNA, 122 bp, Homo sapiens
  misc_feature (61)..(62): /note="This region represents a CpG dinucleotide"
  misc_feature (61)..(61): /note="Nucleotide may be methylated to form 5-methylcytosine"
tatgatgtatatccttatgccaagaacaccaggaagtcaccaacactgatcctaacccagcgtaattgctactagaaggtgaccttggccagctgcgtacatttccaggtctcaaccacgtt

SEQ ID NO: 18954 - DNA, 122 bp, Homo sapiens
  misc_feature (61)..(62): /note="This region represents a CpG dinucleotide"
  misc_feature (61)..(61): /note="Nucleotide may be methylated to form 5-methylcytosine"
ccagaggcctgaggttaaaagattatccccccactctaaccacatgtgctctcaacctaccgcgaccctttcacgtggaaccccttagatttgtaagcccttaaaaagggccagggaatctg

SEQ ID NO: 18955 - DNA, 122 bp, Homo sapiens
  misc_feature (61)..(62): /note="This region represents a CpG dinucleotide"
  misc_feature (61)..(61): /note="Nucleotide may be methylated to form 5-methylcytosine"
gtgttgccctggtccagaaggattccttgaacccttgtgcctgcaggacagccaacacaccgctgctccagccctgagtgtaaaacccctcattatggcactagacacatggtacttttcag

SEQ ID NO: 18956 - DNA, 122 bp, Homo sapiens
  misc_feature (61)..(62): /note="This region represents a CpG dinucleotide"
  misc_feature (61)..(61): /note="Nucleotide may be methylated to form 5-methylcytosine"
gctacttccttccaaagccaacagctgtagtcctttccttggacagtgcaggtcatcattcgttgccctgagccttacccataaagaaagtccagactgcaaaacaaaagtggcagagcctg

SEQ ID NO: 18957 - DNA, 122 bp, Homo sapiens
  misc_feature (61)..(62): /note="This region represents a CpG dinucleotide"
  misc_feature (61)..(61): /note="Nucleotide may be methylated to form 5-methylcytosine"
acaaatgaatggacgcgcgcacacatgctgtagggagcccttcttggctcgctcacgtaacgcacctatgcaacaactggccaatacgctttccaaagctcctgactcccactccgtacatt

SEQ ID NO: 18958 - DNA, 122 bp, Homo sapiens
  misc_feature (61)..(62): /note="This region represents a CpG dinucleotide"
  misc_feature (61)..(61): /note="Nucleotide may be methylated to form 5-methylcytosine"
gcagggccagcccagggcagcgtcacgaataggagcttcccaggccgaatcggagctccccgaaggctccatcctcgtaaatcagcctggcctccgcttctcgctggcacttcccgctccgg

SEQ ID NO: 18959 - DNA, 122 bp, Homo sapiens
  misc_feature (61)..(62): /note="This region represents a CpG dinucleotide"
  misc_feature (61)..(61): /note="Nucleotide may be methylated to form 5-methylcytosine"
tggagggcgaaggtggcacctagatcctgcagtcacatggggctaatcaattttcctgcccgccagggttccatttgagtcatctgggttttattttgattcagcctctttaactggctgct

SEQ ID NO: 18960 - DNA, 122 bp, Homo sapiens
  misc_feature (61)..(62): /note="This region represents a CpG dinucleotide"
  misc_feature (61)..(61): /note="Nucleotide may be methylated to form 5-methylcytosine"
ccaaaggattgtaaatatgagcctggggtggggcccaagtcttccagatgtggctgctttcgcattttcagtgtgaattcaagggacctaccctactctctgacggagataacaagtgtcaa

SEQ ID NO: 18961 - DNA, 122 bp, Homo sapiens
  misc_feature (61)..(62): /note="This region represents a CpG dinucleotide"
  misc_feature (61)..(61): /note="Nucleotide may be methylated to form 5-methylcytosine"
ccacccgcctcagcctcccaaagtgctaggattaaaggcgtgagccactgcacccagccacgatttttgttgagattaggaaacaaaaccaagtcagaaggagccaaattaggactgtaagg

SEQ ID NO: 18962 - DNA, 122 bp, Homo sapiens
  misc_feature (61)..(62): /note="This region represents a CpG dinucleotide"
  misc_feature (61)..(61): /note="Nucleotide may be methylated to form 5-methylcytosine"
cctgctgacagtagctggtacctgttacctactcagagtgtcacatgccacaagccagagcgtcttggcagttctcagcaccttgacatcacttccttgctaccactcagagcggcagtgac

SEQ ID NO: 18963 - DNA, 122 bp, Homo sapiens
  misc_feature (61)..(62): /note="This region represents a CpG dinucleotide"
  misc_feature (61)..(61): /note="Nucleotide may be methylated to form 5-methylcytosine"
ctgggaggtagcaccacggtttctcagcagtgttcgtgcaaattatcactataatgcacccgtgcaggcccagcagcctgtgcaagtatcacagcaccatacagacatgaattcatgtgtct

SEQ ID NO: 18964 - DNA, 122 bp, Homo sapiens
  misc_feature (61)..(62): /note="This region represents a CpG dinucleotide"
  misc_feature (61)..(61): /note="Nucleotide may be methylated to form 5-methylcytosine"
aagttgagaattgttagagaggttggttagagcaatgtaggtgtgaggccgttgcagctgcgtagagagaatagagcctttagagttggccaagggagttctaatataatcacttactggct

SEQ ID NO: 18965 - DNA, 122 bp, Homo sapiens
  misc_feature (61)..(62): /note="This region represents a CpG dinucleotide"
  misc_feature (61)..(61): /note="Nucleotide may be methylated to form 5-methylcytosine"
ggaattttactccaccttctagctatacgactttggggatacttaacctctttgaggcttcgtttcctcctctgtaaaacatgatcacaatgtctgcttcatagggttgttatgagactcca

SEQ ID NO: 18966 - DNA, 122 bp, Homo sapiens
  misc_feature (61)..(62): /note="This region represents a CpG dinucleotide"
  misc_feature (61)..(61): /note="Nucleotide may be methylated to form 5-methylcytosine"
gcagtgctctccccagaaagcctcattatgtgagtagtaaatcccttcaaaccctcctgacgtgtgaggtccatctcacctatgaaggacatctacaaaagaaacaaatcagtttcatgggc

SEQ ID NO: 18967 - DNA, 122 bp, Homo sapiens
  misc_feature (61)..(62): /note="This region represents a CpG dinucleotide"
  misc_feature (61)..(61): /note="Nucleotide may be methylated to form 5-methylcytosine"
agctcttgaaaaaaacagttgaggtatttcacataaaaaactgaacaatcaggttagccacgcccaaaatgatgatgaaaacgtggaagattaatttaggccatgtcagacgctcttcttgg

SEQ ID NO: 18968 - DNA, 122 bp, Homo sapiens
  misc_feature (61)..(62): /note="This region represents a CpG dinucleotide"
  misc_feature (61)..(61): /note="Nucleotide may be methylated to form 5-methylcytosine"
ctatttaccaaaatttaaaatgttgaaaacagttccacctctgtccgtagctcactgtagcgtgaagagaaggaagcacttgtgtgttgaagattcagaagggaggaggtgtcggggtgccc

SEQ ID NO: 18969 - DNA, 122 bp, Homo sapiens
  misc_feature (61)..(62): /note="This region represents a CpG dinucleotide"
  misc_feature (61)..(61): /note="Nucleotide may be methylated to form 5-methylcytosine"
tgtttaatcagacacttcagctgcatatacctcccacagctcattgatgatacaacagttcgcacagggcctggcacacatgctaaaggctcagcagtattgataatcacccacacttacaa

SEQ ID NO: 18970 - DNA, 122 bp, Homo sapiens
  misc_feature (61)..(62): /note="This region represents a CpG dinucleotide"
  misc_feature (61)..(61): /note="Nucleotide may be methylated to form 5-methylcytosine"
ttgacactttcatagtaaaacaaaaagttaatttcatggacaccttcttcatcaggcccacgtaaccacattggcagctgcactgaggctccgggtagaagaacagtgtcaggaaggggaac

SEQ ID NO: 18971 - DNA, 122 bp, Homo sapiens
  misc_feature (61)..(62): /note="This region represents a CpG dinucleotide"
  misc_feature (61)..(61): /note="Nucleotide may be methylated to form 5-methylcytosine"
agctggctctctgcagacacacctggagggagggtttgggaggaagggggctggggcctccggtctgaccacctctgaaacaccatcccaggctgtctctgaggttcatgtggtttgggtca

SEQ ID NO: 18972 - DNA, 122 bp, Homo sapiens
  misc_feature (61)..(62): /note="This region represents a CpG dinucleotide"
  misc_feature (61)..(61): /note="Nucleotide may be methylated to form 5-methylcytosine"
agaagagtctacttctttaattcaagatcaagtttctcttcataatgaccttgtagccctcgctcctcagacttgctggctgactggacccacaagaaatacaggtaccaaattgtgggctt

SEQ ID NO: 18973 - DNA, 122 bp, Homo sapiens
  misc_feature (61)..(62): /note="This region represents a CpG dinucleotide"
  misc_feature (61)..(61): /note="Nucleotide may be methylated to form 5-methylcytosine"
aaacaataatatataaatacatggattgcagcaggcactgacaggttgtcattgtttttgcgccttcctggtgttcatgaacatcacctccttggatgttcatgtcacttctatgaggaaca

SEQ ID NO: 18974 - DNA, 122 bp, Homo sapiens
  misc_feature (61)..(62): /note="This region represents a CpG dinucleotide"
  misc_feature (61)..(61): /note="Nucleotide may be methylated to form 5-methylcytosine"
tttgctgactttactctgtatcctttcactgtaataagagataatggtgagtataacagccgcttctgagacctatgagttattctagtgaatcatggagcctgagctggatcttggagaca

SEQ ID NO: 18975 - DNA, 122 bp, Homo sapiens
  misc_feature (61)..(62): /note="This region represents a CpG dinucleotide"
  misc_feature (61)..(61): /note="Nucleotide may be methylated to form 5-methylcytosine"
agcactaagaaagcactcaaaatatagtggcagctattattatttatccttcttcctctccgttttctcctccagatttatgagtgatagggacagaaaatttcttatcagagtgcccttta

SEQ ID NO: 18976 - DNA, 122 bp, Homo sapiens
  misc_feature (61)..(62): /note="This region represents a CpG dinucleotide"
  misc_feature (61)..(61): /note="Nucleotide may be methylated to form 5-methylcytosine"
ccggagcccgcgccccttaaagtgatctccagttgtccgaaaggcccgccagggatctggcgaaacgggggcgggggagggctcagggaagaggagaagctgagcccgggccccagaagctc

SEQ ID NO: 18977 - DNA, 122 bp, Homo sapiens
  misc_feature (61)..(62): /note="This region represents a CpG dinucleotide"
  misc_feature (61)..(61): /note="Nucleotide may be methylated to form 5-methylcytosine"
cctgctttccttctggacactaaatcattaacgagattccctggtagacaatacttcacacgcttgtcatgatttgatgctaaaggaattaagtgaatctactgtgactcctctgggagagg

SEQ ID NO: 18978 - DNA, 122 bp, Homo sapiens
  misc_feature (61)..(62): /note="This region represents a CpG dinucleotide"
  misc_feature (61)..(61): /note="Nucleotide may be methylated to form 5-methylcytosine"
ctggggctggaaagggcccagtgcacagccaggcaggtggggtggcccacacttgcctgtcgctgttgctcagctccggatcagcactgtcttccgaacccaaagaggctgggagatatttt

SEQ ID NO: 18979 - DNA, 122 bp, Homo sapiens
  misc_feature (61)..(62): /note="This region represents a CpG dinucleotide"
  misc_feature (61)..(61): /note="Nucleotide may be methylated to form 5-methylcytosine"
ctccagatccaacaatcttattacacattcataagaatggtggaaaggaagaaaaaaagccggcacagttctgtctgtttatctgtttatctagcttgaactcaccttacaaaaaggttgtt

SEQ ID NO: 18980 - DNA, 122 bp, Homo sapiens
  misc_feature (61)..(62): /note="This region represents a CpG dinucleotide"
  misc_feature (61)..(61): /note="Nucleotide may be methylated to form 5-methylcytosine"
gcaacattgtcttctgacctttccctagggtcttgcatactttgatatggcagaagcaggcgttgctctgaagttataaataactaagcaacttgagagttacactctagggccccaagtta

SEQ ID NO: 18981 - DNA, 122 bp, Homo sapiens
  misc_feature (61)..(62): /note="This region represents a CpG dinucleotide"
  misc_feature (61)..(61): /note="Nucleotide may be methylated to form 5-methylcytosine"
cacccagccaatatcttgcatttgaatcaagtagtggacatttattggatcccttggggccgatgccatttctaaaagtgattgagtaaatatcacaggtgggcaaatcaaagagaaggata

SEQ ID NO: 18982 - DNA, 122 bp, Homo sapiens
  misc_feature (61)..(62): /note="This region represents a CpG dinucleotide"
  misc_feature (61)..(61): /note="Nucleotide may be methylated to form 5-methylcytosine"
tgaactcctgacctcaggtgatccacccgcctcggcctcccaaagtgctgggattacaggcgtgagctactgcaccaggccttaaaaatggaaaataaagcctttgctattactcagtgtac

SEQ ID NO: 18983 - DNA, 122 bp, Homo sapiens
  misc_feature (61)..(62): /note="This region represents a CpG dinucleotide"
  misc_feature (61)..(61): /note="Nucleotide may be methylated to form 5-methylcytosine"
ttcacagggctgggagttggtgcttgtgtgccttgcagactctgtccctcagggtgacaccgccaacttaatgcttgcagagcatttgtggtttatcaagcactgcactttctctttctcat

SEQ ID NO: 18984 - DNA, 122 bp, Homo sapiens
  misc_feature (61)..(62): /note="This region represents a CpG dinucleotide"
  misc_feature (61)..(61): /note="Nucleotide may be methylated to form 5-methylcytosine"
tcgttttttctcttgctaggaaagccgggttagtaaagcagttgaagtgatgattcagcacgtagaaaacttgaagaggatgtatgccaaagagcacgctgaattagaagaactgaaacagg

SEQ ID NO: 18985 - DNA, 122 bp, Homo sapiens
  misc_feature (61)..(62): /note="This region represents a CpG dinucleotide"
  misc_feature (61)..(61): /note="Nucleotide may be methylated to form 5-methylcytosine"
tgcaagaattcaaaagcacataacaacaaccaatcctaggaacagttcaacagtttaactcgcttcaacagcctgattctataagcacttgaagtgttcctggtttgcagtgatgaaagttc

SEQ ID NO: 18986 - DNA, 122 bp, Homo sapiens
  misc_feature (61)..(62): /note="This region represents a CpG dinucleotide"
  misc_feature (61)..(61): /note="Nucleotide may be methylated to form 5-methylcytosine"
gcaagaatgtgggaatattttagcattagaatcagctaatcttctacttgaattagacaacggcattttccattaagtggtagatggattaaatggaatccttggcctgagggcttcttcaa

SEQ ID NO: 18987 - DNA, 122 bp, Homo sapiens
  misc_feature (61)..(62): /note="This region represents a CpG dinucleotide"
  misc_feature (61)..(61): /note="Nucleotide may be methylated to form 5-methylcytosine"
aactctctcttcctggtatctaacaggatgatctcattcatagcatggtgaaactggaggcgccctgaagattcctcttcaagggaggactgaatgccccagcaaccagcagaggcctccag

SEQ ID NO: 18988 - DNA, 122 bp, Homo sapiens
  misc_feature (61)..(62): /note="This region represents a CpG dinucleotide"
  misc_feature (61)..(61): /note="Nucleotide may be methylated to form 5-methylcytosine"
aagacacccaggaaatatttcacaacctatctcagtaacattccaatgtgttacaatcctcgcttttaggaaatccttcattatttccaaagatactgctactgctctacatcctttgtgaa

SEQ ID NO: 18989 - DNA, 122 bp, Homo sapiens
  misc_feature (61)..(62): /note="This region represents a CpG dinucleotide"
  misc_feature (61)..(61): /note="Nucleotide may be methylated to form 5-methylcytosine"
gctaagtgctgcaataaagcaataaacacagtaggcatagtgactacccatgcaaattcccgtggcaatgggaaggacaggaaataaaagaggtgtcatggggacaggaaaggctggcaaaa

SEQ ID NO: 18990 - DNA, 122 bp, Homo sapiens
  misc_feature (61)..(62): /note="This region represents a CpG dinucleotide"
  misc_feature (61)..(61): /note="Nucleotide may be methylated to form 5-methylcytosine"
ctgaaaagtaaaagaacaaaactgtgctctctccaaaaagcattagtgacagttagaaggcggaaggggagagatctgctgacttgacaaaccatgattactttttacagctcatgaaactg

SEQ ID NO: 18991 - DNA, 122 bp, Homo sapiens
  misc_feature (61)..(62): /note="This region represents a CpG dinucleotide"
  misc_feature (61)..(61): /note="Nucleotide may be methylated to form 5-methylcytosine"
tctagtaaggccactcaagggtatgctgactaagaacaagaatgtgtgtgttcttcaccacgagcctgtaggaccagacaggatcaaggtattggctgtgacaaaccttacacaaggcttgg

SEQ ID NO: 18992 - DNA, 122 bp, Homo sapiens
  misc_feature (61)..(62): /note="This region represents a CpG dinucleotide"
  misc_feature (61)..(61): /note="Nucleotide may be methylated to form 5-methylcytosine"
aatcagcaggaggtaggggcacacccgtgcataactttctggtgaagccttccctgcaatcgcaagagaagggttacgaaatctcggatctcatcagtgagggggtcaagtcaagagaaatt

SEQ ID NO: 18993 - DNA, 122 bp, Homo sapiens
  misc_feature (61)..(62): /note="This region represents a CpG dinucleotide"
  misc_feature (61)..(61): /note="Nucleotide may be methylated to form 5-methylcytosine"
gttcgggaggcggaaaaagatgagcgcgctctgaagcaggagattcacgagctgcgagggcgcctggagcggctggagcaggtgagccaagcctgctgggtggggcgaggccagacgtcact

SEQ ID NO: 18994 - DNA, 122 bp, Homo sapiens
  misc_feature (61)..(62): /note="This region represents a CpG dinucleotide"
  misc_feature (61)..(61): /note="Nucleotide may be methylated to form 5-methylcytosine"
cttctaaaccatagtgtattcacaggccacattccagcaagctcacaagtgccagcctgacgtgagtagtgctaatatcaaatctgacaacttccgttcggagtcaggcaggcagaatggta

SEQ ID NO: 18995 - DNA, 122 bp, Homo sapiens
  misc_feature (61)..(62): /note="This region represents a CpG dinucleotide"
  misc_feature (61)..(61): /note="Nucleotide may be methylated to form 5-methylcytosine"
attgcagtacctggaagctaagtggagccattcttagcatttcctgtcgcctcttggtggcgaaacctgccaggatgtgctgtgcaatctttcttggcatggcctgagtcccacgtgagaaa

SEQ ID NO: 18996 - DNA, 122 bp, Homo sapiens
  misc_feature (61)..(62): /note="This region represents a CpG dinucleotide"
  misc_feature (61)..(61): /note="Nucleotide may be methylated to form 5-methylcytosine"
tttagggcaaaatgtaaacaaatagtgaacatttcctgcacgcgggctccacagtggctgcgtctgagtcaccttcgtttctcggggcaccccggtgtctgtccttggtgtgggtgaggaca

SEQ ID NO: 18997 - DNA, 122 bp, Homo sapiens
  misc_feature (61)..(62): /note="This region represents a CpG dinucleotide"
  misc_feature (61)..(61): /note="Nucleotide may be methylated to form 5-methylcytosine"
taccttccagtgacccctacaggggttgttacctgggaggtgtatttctcaataccgaggcgaatgcactagatgccatcacaggctcatctataggagccaacgggtatgtggtgagttac

SEQ ID NO: 18998 - DNA, 122 bp, Homo sapiens
  misc_feature (61)..(62): /note="This region represents a CpG dinucleotide"
  misc_feature (61)..(61): /note="Nucleotide may be methylated to form 5-methylcytosine"
ctgagtatcagagtgaaggcggtactagctattgtgccacgtagcattgcccaaggtatgcgtgcaattcagatccttcaatgtgcttcacataaatgaatttccttgagcagatatgtttg

SEQ ID NO: 18999 - DNA, 122 bp, Homo sapiens
  misc_feature (61)..(62): /note="This region represents a CpG dinucleotide"
  misc_feature (61)..(61): /note="Nucleotide may be methylated to form 5-methylcytosine"
caaactgttatcccacagggttgggtctctttacaacagtcagaaaactggcatagacaccgaggaacccaggccccctctgactcatcacaaaatttgcctatgtgagtcaccggcgtcag

SEQ ID NO: 19000 - DNA, 122 bp, Homo sapiens
  misc_feature (61)..(62): /note="This region represents a CpG dinucleotide"
  misc_feature (61)..(61): /note="Nucleotide may be methylated to form 5-methylcytosine"
cataacaaccctatgaggtcagaagtattgttatccccactttacagatgaagaagatggcgtgcaagaggattaaataagatgcccatggttacgcaaatcattagtggctgagattagga

SEQ ID NO: 19001 - DNA, 122 bp, Homo sapiens
  misc_feature (61)..(62): /note="This region represents a CpG dinucleotide"
  misc_feature (61)..(61): /note="Nucleotide may be methylated to form 5-methylcytosine"
aaatgtctttgccttcactgggaatggcatcaggagggctccctgagagctctttgctgacgccctgcaggtttataaaatgatgcttccccagatcataaccagtaactcatgtgtacaca

SEQ ID NO: 19002 - DNA, 122 bp, Homo sapiens
  misc_feature (61)..(62): /note="This region represents a CpG dinucleotide"
  misc_feature (61)..(61): /note="Nucleotide may be methylated to form 5-methylcytosine"
tccagccctccccaccgcctggccaccgaagacagaggacagaggcgtggttggcagccacgcgcccttgaggagaccacacacctaggtaaacactggctggaaagacccaaggttgtcaa

SEQ ID NO: 19003 - DNA, 122 bp, Homo sapiens
  misc_feature (61)..(62): /note="This region represents a CpG dinucleotide"
  misc_feature (61)..(61): /note="Nucleotide may be methylated to form 5-methylcytosine"
ggctccactgttggagatctagttgttttagtcactctgttgtctcatgctggagagaagcgacctttcacatgagagttagtcacttgtctatggtgagtcagatgctatcagctgccctt

SEQ ID NO: 19004 - DNA, 122 bp, Homo sapiens
  misc_feature (61)..(62): /note="This region represents a CpG dinucleotide"
  misc_feature (61)..(61): /note="Nucleotide may be methylated to form 5-methylcytosine"
cctggagagaagagcctgcccagcgtggggaacatgggaatgtggagatggagggcatcccggaacctcagggctgacgggcccctgccccagccctggaaacacctcagggacaagagagt

SEQ ID NO: 19005 - DNA, 122 bp, Homo sapiens
  misc_feature (61)..(62): /note="This region represents a CpG dinucleotide"
  misc_feature (61)..(61): /note="Nucleotide may be methylated to form 5-methylcytosine"
gttgttatgttttcatcatcatcattaagatacccacttgtcatcactaagaactagatacgtgttttctatctgaaacttaagataacacataaatatccctgagctattttcttggcctt

SEQ ID NO: 19006 - DNA, 122 bp, Homo sapiens
  misc_feature (61)..(62): /note="This region represents a CpG dinucleotide"
  misc_feature (61)..(61): /note="Nucleotide may be methylated to form 5-methylcytosine"
acaaataagagatagaaacaccacaggaattacaaacaaaccataaatctatttattggacggaaatcataaacaaaaaaaaagcatacgtgagctggcataggccctgctaggtaaaagag

SEQ ID NO: 19007 - DNA, 122 bp, Homo sapiens
  misc_feature (61)..(62): /note="This region represents a CpG dinucleotide"
  misc_feature (61)..(61): /note="Nucleotide may be methylated to form 5-methylcytosine"
ggtgagaagcccttctatacaggttccctccccgagctaagcaaaagcgttgaggtgacacgtgtcacctgttcctagaggatctgcactgaaggcggggcaagcaggacctgctgtacaca

SEQ ID NO: 19008 - DNA, 122 bp, Homo sapiens
  misc_feature (61)..(62): /note="This region represents a CpG dinucleotide"
  misc_feature (61)..(61): /note="Nucleotide may be methylated to form 5-methylcytosine"
aatatactatagtgtcactggagccacaactggattatggatgtgactcacctagtgatgcgccatccttttcaataacatctgataattgcagagatgactacatcagactagttgagcca

SEQ ID NO: 19009 - DNA, 122 bp, Homo sapiens
  misc_feature (61)..(62): /note="This region represents a CpG dinucleotide"
  misc_feature (61)..(61): /note="Nucleotide may be methylated to form 5-methylcytosine"
aaattcggataacgttaattgtgccactgtggtggcagtgcaagaaattcctgttcatcccgctgcaatgatgattaaggtaacaaacacccagtcgggaagtcaggctccggccctggaga

SEQ ID NO: 19010 - DNA, 122 bp, Homo sapiens
  misc_feature (61)..(62): /note="This region represents a CpG dinucleotide"
  misc_feature (61)..(61): /note="Nucleotide may be methylated to form 5-methylcytosine"
ggacattaggaagagcctgcctgggtgttagattcaagccatctgagttcttttctttgtcgggagatttagctgtgataattcggtaggttgctgaacttcctccaagcctcagtttcctc

SEQ ID NO: 19011 - DNA, 122 bp, Homo sapiens
  misc_feature (61)..(62): /note="This region represents a CpG dinucleotide"
  misc_feature (61)..(61): /note="Nucleotide may be methylated to form 5-methylcytosine"
ttgtccttaagatagtagtcacagctaagtagagtaatcttaagattgaacagaaaagatcgaacaaacattatctttgcttgatgatagacattaattagtagatgggcattagtcaccac

SEQ ID NO: 19012 - DNA, 122 bp, Homo sapiens
  misc_feature (61)..(62): /note="This region represents a CpG dinucleotide"
  misc_feature (61)..(61): /note="Nucleotide may be methylated to form 5-methylcytosine"
aataactgttacttctaccaccagaatgcgtcttatttttagtctcacttctgctgttgtcgtttagtatctcagcatatcccatttctgctattagaggtatcttcccaaaacccattttg

SEQ ID NO: 19013 - DNA, 122 bp, Homo sapiens
  misc_feature (61)..(62): /note="This region represents a CpG dinucleotide"
  misc_feature (61)..(61): /note="Nucleotide may be methylated to form 5-methylcytosine"
gaaggtggcaaatccccagctgggccagactgagaggggtggtgagacaccaaccagatgcggtgcaggccctcaaggatttgttaagcaatagaatagcccagttgatgtcaacagagggt

SEQ ID NO: 19014 - DNA, 122 bp, Homo sapiens
  misc_feature (61)..(62): /note="This region represents a CpG dinucleotide"
  misc_feature (61)..(61): /note="Nucleotide may be methylated to form 5-methylcytosine"
ttctatagaaaaaatgaaagccaaaggtttacattccaagactggaagactcctaatttacggtatgttcagaacaaaggctgatgtctttatagggaatagaagtaggattagtacagcaa

SEQ ID NO: 19015 - DNA, 122 bp, Homo sapiens
  misc_feature (61)..(62): /note="This region represents a CpG dinucleotide"
  misc_feature (61)..(61): /note="Nucleotide may be methylated to form 5-methylcytosine"
aagctgtgatgttcagtattaaatttaaatgcatttttaacttacagtattttcaacttacgatgtgtttatcaggaagtaaccccatcataagcagaggagcatctgtattgcgtaatttg

SEQ ID NO: 19016 - DNA, 122 bp, Homo sapiens
  misc_feature (61)..(62): /note="This region represents a CpG dinucleotide"
  misc_feature (61)..(61): /note="Nucleotide may be methylated to form 5-methylcytosine"
tagcgtgctgactgatctatttgctgattaaattcttaacctgtacctatttgatgcttacgtcagttttgcgtctttgaaccctaattttgcagtgctttagtgaccaatttatttttttc

SEQ ID NO: 19017 - DNA, 122 bp, Homo sapiens
  misc_feature (61)..(62): /note="This region represents a CpG dinucleotide"
  misc_feature (61)..(61): /note="Nucleotide may be methylated to form 5-methylcytosine"
ggcattgactaagtcttcctcagcaagccttacatctgaatctttaagaccagtggctagcgtttgtgactcattaatcagctgacaaatgccaggatttttgatagttctttgagagaata

SEQ ID NO: 19018 - DNA, 122 bp, Homo sapiens
  misc_feature (61)..(62): /note="This region represents a CpG dinucleotide"
  misc_feature (61)..(61): /note="Nucleotide may be methylated to form 5-methylcytosine"
agagcagcccatctaatagagtgtcccggaggccagcgccagcgggtgctgtaaggagcccggcggcggcaggtgggaattgattgagctggctgcacttgtgtaccaggatgcagagttct

SEQ ID NO: 19019 - DNA, 122 bp, Homo sapiens
  misc_feature (61)..(62): /note="This region represents a CpG dinucleotide"
  misc_feature (61)..(61): /note="Nucleotide may be methylated to form 5-methylcytosine"
cttcagagggtgattttcaacaatgattaaaaacactctgacacacactcttcaggcatacgcattaatcccacacctttgcatgcatgagtatcatgtgaataatgctacaagtattggac

SEQ ID NO: 19020 - DNA, 122 bp, Homo sapiens
  misc_feature (61)..(62): /note="This region represents a CpG dinucleotide"
  misc_feature (61)..(61): /note="Nucleotide may be methylated to form 5-methylcytosine"
tatcagcctgacctaaagcgctctcgtgcattgggtcagaagtttggcaagcttaaacagcgtaagtagaaccggtttgggaatctttgaatgaggaagactgtttcttcctctcctacttg

SEQ ID NO: 19021 - DNA, 122 bp, Homo sapiens
  misc_feature (61)..(62): /note="This region represents a CpG dinucleotide"
  misc_feature (61)..(61): /note="Nucleotide may be methylated to form 5-methylcytosine"
ttgctccatgccttctgtctgaaacactaacattgcaacatgtctcattaaaaatcattacgattttttttcaaataaatgtcatagatcccattttacagatgtgaagaatgcaggtcact

SEQ ID NO: 19022 - DNA, 122 bp, Homo sapiens
  misc_feature (61)..(62): /note="This region represents a CpG dinucleotide"
  misc_feature (61)..(61): /note="Nucleotide may be methylated to form 5-methylcytosine"
ctcccgtgactcagtgacatcaggttggtccacatcctagcagttctcttggtgttcctgcgtgatcaaaggatgactgccacaccccagcctgctgacctcagccctggcgtgggcatagg

SEQ ID NO: 19023 - DNA, 122 bp, Homo sapiens
  misc_feature (61)..(62): /note="This region represents a CpG dinucleotide"
  misc_feature (61)..(61): /note="Nucleotide may be methylated to form 5-methylcytosine"
attttgtttaaagtgcctatcgacagtacatagtgaaatgctcggttccagctaattaagcgctcagctgtacggtgtggaaactaagagatcatgtatatggaactgtgaaatggagtttc

SEQ ID NO: 19024 - DNA, 122 bp, Homo sapiens
  misc_feature (61)..(62): /note="This region represents a CpG dinucleotide"
  misc_feature (61)..(61): /note="Nucleotide may be methylated to form 5-methylcytosine"
ctccctcaggtgtcacaaaggctgagtgagagcctggacttccaccccacctgcctgtagcgaggtgcacaccccgcttgacctgcaggagttgcgtcagccacaacaggatgctgaaatta

SEQ ID NO: 19025 - DNA, 122 bp, Homo sapiens
  misc_feature (61)..(62): /note="This region represents a CpG dinucleotide"
  misc_feature (61)..(61): /note="Nucleotide may be methylated to form 5-methylcytosine"
attctgatgagacagttatgattctaggaatattcccaggataggagtccaataagtaagcggttttactattaacaagctgtgtgactttgggcaagtgagttattctctataaacctcaa

SEQ ID NO: 19026 - DNA, 122 bp, Homo sapiens
  misc_feature (61)..(62): /note="This region represents a CpG dinucleotide"
  misc_feature (61)..(61): /note="Nucleotide may be methylated to form 5-methylcytosine"
cctcaaagagttactcgcatttctacctacaagtaattttttgtttgtggttttacagcacgtaaagggtttggaagtcctctggaaaggtaaacttcgtgtacagttaatcatttcctgga

SEQ ID NO: 19027 - DNA, 122 bp, Homo sapiens
  misc_feature (61)..(62): /note="This region represents a CpG dinucleotide"
  misc_feature (61)..(61): /note="Nucleotide may be methylated to form 5-methylcytosine"
aatgagagtagttttaaatttcagaacagcagaaggttctttgaagttggtcactcagcacgtaatgtattgcctttgtatgcagcgagggttcatttattgatatctgatgaaatgctcct

SEQ ID NO: 19028 - DNA, 122 bp, Homo sapiens
  misc_feature (61)..(62): /note="This region represents a CpG dinucleotide"
  misc_feature (61)..(61): /note="Nucleotide may be methylated to form 5-methylcytosine"
ttgaacatttccatagtgcacccgacacgtcgggcccggtcatagcccggcgcagcccctcgctcactcaggaacatctgctacagcatttaccacgttaatagattagctttgagaatcgg

SEQ ID NO: 19029 - DNA, 122 bp, Homo sapiens
  misc_feature (61)..(62): /note="This region represents a CpG dinucleotide"
  misc_feature (61)..(61): /note="Nucleotide may be methylated to form 5-methylcytosine"
cttctgggctcaagtgatcatcctaccttagcctctcagttagctgggacttcaggttcacgtcaccatgcccagctaatttttttcttttttttgagaaggagtcttgctctgtcatccag

SEQ ID NO: 19030 - DNA, 122 bp, Homo sapiens
  misc_feature (61)..(62): /note="This region represents a CpG dinucleotide"
  misc_feature (61)..(61): /note="Nucleotide may be methylated to form 5-methylcytosine"
cgagttgtatgtgttaaatatgtacggcttcttgtatgtaaccacccaacaggttcaccacgcccactgcctagacagggccaattgatcaagatagggccaattgatcaagacaggggaaa

SEQ ID NO: 19031 - DNA, 122 bp, Homo sapiens
  misc_feature (61)..(62): /note="This region represents a CpG dinucleotide"
  misc_feature (61)..(61): /note="Nucleotide may be methylated to form 5-methylcytosine"
tcttttctgttttcctccatttttcctataacttgagacagattttctcaggcaagaacacgtgtcattgccctaatgggattctaagcctgggcatggcgttaaaggtggcttgtccaaat

SEQ ID NO: 19032 - DNA, 122 bp, Homo sapiens
  misc_feature (61)..(62): /note="This region represents a CpG dinucleotide"
  misc_feature (61)..(61): /note="Nucleotide may be methylated to form 5-methylcytosine"
tatttctttttgggggctggatgtgttcctggcagggccgatgatggatgcgcccgccgccgcccgcctgcccgccagctttccctcccgctcattcccgctccgcttcaacgcagccctga

SEQ ID NO: 19033 - DNA, 122 bp, Homo sapiens
  misc_feature (61)..(62): /note="This region represents a CpG dinucleotide"
  misc_feature (61)..(61): /note="Nucleotide may be methylated to form 5-methylcytosine"
tactgcttcctattgtattaaatttctttttttaaaaaattattgctctgtaatctaggacggtgatgaatcatctccaattttaacaagttttgaattagtgaaagttcctgacccccaga

SEQ ID NO: 19034 - DNA, 122 bp, Homo sapiens
  misc_feature (61)..(62): /note="This region represents a CpG dinucleotide"
  misc_feature (61)..(61): /note="Nucleotide may be methylated to form 5-methylcytosine"
gggagctccacttacgggcagccttggctggtttctgttgagcgtcttcaccgttatctacgagtccagaaacatccagcagagggattgtgcatcgatattgccatcaagatgaaaagaca

SEQ ID NO: 19035 - DNA, 122 bp, Homo sapiens
  misc_feature (61)..(62): /note="This region represents a CpG dinucleotide"
  misc_feature (61)..(61): /note="Nucleotide may be methylated to form 5-methylcytosine"
ttggaagtccctcctaatcctttgcttatatctcatagctagaacttaatcacaagaccacgcttaggtacaaggaaggcaggaatgagcagtccttagctgagcggttaggtcctcaacta

SEQ ID NO: 19036 - DNA, 122 bp, Homo sapiens
  misc_feature (61)..(62): /note="This region represents a CpG dinucleotide"
  misc_feature (61)..(61): /note="Nucleotide may be methylated to form 5-methylcytosine"
gtggccaggggcattgctcacaccctggcaggaggccttccctgctaacagtgttaataacgatgtcatttttccactccatgctgaagatggctttgtcaataaaatcaggcagttgatga

SEQ ID NO: 19037 - DNA, 122 bp, Homo sapiens
  misc_feature (61)..(62): /note="This region represents a CpG dinucleotide"
  misc_feature (61)..(61): /note="Nucleotide may be methylated to form 5-methylcytosine"
tctgcagcacccagcacaaagcctgagcaaggcagatgcagggaatgcttgcagcatgaacgagccaatgagtaaggcagcttcccagcagagcacatgtgaatcagcagtatttcccactc

SEQ ID NO: 19038 - DNA, 122 bp, Homo sapiens
  misc_feature (61)..(62): /note="This region represents a CpG dinucleotide"
  misc_feature (61)..(61): /note="Nucleotide may be methylated to form 5-methylcytosine"
gcaggttatgacccctcttggtctggggtccatatgtccttggctatagagggtactgaccgctgggcacactcagctggtggggcagctggggcaagggaagggtgaagcctcaggcagtc

SEQ ID NO: 19039 - DNA, 122 bp, Homo sapiens
  misc_feature (61)..(62): /note="This region represents a CpG dinucleotide"
  misc_feature (61)..(61): /note="Nucleotide may be methylated to form 5-methylcytosine"
tggtctggctttagggaaaagtccatttgctcacttgattccgtggtgtttccacgtgagcgcagctgtgtgtgtcagctgatgtgtgtgatctgagtggtttctataccgtcgtggaaacc

SEQ ID NO: 19040 - DNA, 122 bp, Homo sapiens
  misc_feature (61)..(62): /note="This region represents a CpG dinucleotide"
  misc_feature (61)..(61): /note="Nucleotide may be methylated to form 5-methylcytosine"
ccgctctgctcgcaggtttgggctagtctggggcggggacttgggagcgcctaaaacttgcgaggagggcggggccgcagaccggtcctttaaaggttggaagtggccccgaggcgccggca

SEQ ID NO: 19041 - DNA, 122 bp, Homo sapiens
  misc_feature (61)..(62): /note="This region represents a CpG dinucleotide"
  misc_feature (61)..(61): /note="Nucleotide may be methylated to form 5-methylcytosine"
gcccagtttgcaaagagtctagccatgcttgggagctctgaggacaacacggcattgtcacgggcactctcccagctggctgaggtggaagaaaaaattgagcagctccaccaggaacaggc

SEQ ID NO: 19042 - DNA, 122 bp, Homo sapiens
  misc_feature (61)..(62): /note="This region represents a CpG dinucleotide"
  misc_feature (61)..(61): /note="Nucleotide may be methylated to form 5-methylcytosine"
aagagctgggataccagttgaggccatctgactcaaaagccctggtcatagtcatatggccgcctccaccttttttataggcttgagaaagtgaggctccaaaaagtgccttgcccaatggc

SEQ ID NO: 19043 - DNA, 122 bp, Homo sapiens
  misc_feature (61)..(62): /note="This region represents a CpG dinucleotide"
  misc_feature (61)..(61): /note="Nucleotide may be methylated to form 5-methylcytosine"
ttctgaatagtataaaaatctaattccctgtgcttatcggcttcaactgtgcttacacaacgtttgtttctaattcgtactcttgcctcttggtttctgtagtttttcaacccatttctgtc

SEQ ID NO: 19044 - DNA, 122 bp, Homo sapiens
  misc_feature (61)..(62): /note="This region represents a CpG dinucleotide"
  misc_feature (61)..(61): /note="Nucleotide may be methylated to form 5-methylcytosine"
tgatgtctcactgcgtgccaggctgtcctggagtttcgttgatgtataccacataggcaccgtttgtctttccaaggccctagaaatctgcttgttctgttccagccctgcgggccaggcgc

SEQ ID NO: 19045 - DNA, 122 bp, Homo sapiens
  misc_feature (61)..(62): /note="This region represents a CpG dinucleotide"
  misc_feature (61)..(61): /note="Nucleotide may be methylated to form 5-methylcytosine"
cttgttttgatattagataacatacagaagaaaggatttcaggaggactttgtcattttccgattactaaagtaggctagagctgtttttacaatacccctgagttaccacatgctgatgta

SEQ ID NO: 19046 - DNA, 122 bp, Homo sapiens
  misc_feature (61)..(62): /note="This region represents a CpG dinucleotide"
  misc_feature (61)..(61): /note="Nucleotide may be methylated to form 5-methylcytosine"
ttcagcaggcctggattgctcaaatcctcagattttccaaataaagatctgtcttcaggacgggtctgaagcaggcttctagaagataacctctgatagcttagactatttggcctgataag

SEQ ID NO: 19047 - DNA, 122 bp, Homo sapiens
  misc_feature (61)..(62): /note="This region represents a CpG dinucleotide"
  misc_feature (61)..(61): /note="Nucleotide may be methylated to form 5-methylcytosine"
actcatggcaggaagcaggtgaatggaagaaagaactggccccaaactctgtatccatgccggattccagttgggcctcttggcttaacaatacttggagcgggataggctgttcactgaaa

SEQ ID NO: 19048 - DNA, 122 bp, Homo sapiens
  misc_feature (61)..(62): /note="This region represents a CpG dinucleotide"
  misc_feature (61)..(61): /note="Nucleotide may be methylated to form 5-methylcytosine"
tttgtattttttgttgagacgggctctccctatgtttccttggctgattttgaattccagcgctcaagcgatccgcccatcttggcctcccaaagagctgggattacaggcatgagccatga

SEQ ID NO: 19049 - DNA, 122 bp, Homo sapiens
  misc_feature (61)..(62): /note="This region represents a CpG dinucleotide"
  misc_feature (61)..(61): /note="Nucleotide may be methylated to form 5-methylcytosine"
atgcagagctgactcaatacgatacagagctgactcaatacgatgtgtgggatcttccatcgtgaagcagctgggagcaccaggaggcaggttttcccgtgcttatggaaagcaccacattg

SEQ ID NO: 19050 - DNA, 122 bp, Homo sapiens
  misc_feature (61)..(62): /note="This region represents a CpG dinucleotide"
  misc_feature (61)..(61): /note="Nucleotide may be methylated to form 5-methylcytosine"
gtgatgatgataataataataatatagcaactctcagcttttctacagcactctgctttccgctgtttccaactcattttgtgactggaggccaggaatctcacttctgaacctgctttttt

SEQ ID NO: 19051 - DNA, 122 bp, Homo sapiens
  misc_feature (61)..(62): /note="This region represents a CpG dinucleotide"
  misc_feature (61)..(61): /note="Nucleotide may be methylated to form 5-methylcytosine"
gccctaaggtctgaagttccagccttcaaacaggatgtgggcagaggcctccccttgcttcggtaataaagtagatggatggctgatagggagggcccagcagtccctgacggggaaatagt

SEQ ID NO: 19052 - DNA, 122 bp, Homo sapiens
  misc_feature (61)..(62): /note="This region represents a CpG dinucleotide"
  misc_feature (61)..(61): /note="Nucleotide may be methylated to form 5-methylcytosine"
tggagtgttctcatcaacaaagcagctaagaggtctgccagggctagaatattcggatgccggtctattgaaaattaacaaggaaaagatgttatcaatttagatatcaaaagtagagttct

SEQ ID NO: 19053 - DNA, 122 bp, Homo sapiens
  misc_feature (61)..(62): /note="This region represents a CpG dinucleotide"
  misc_feature (61)..(61): /note="Nucleotide may be methylated to form 5-methylcytosine"
cctaaaacaaacccacggttacagaaacaagagaagcggagctttgtgcttgcctaaagacgtacccacaactacatagataacggagagttatgcagatagctttacagataagatactca

SEQ ID NO: 19054 - DNA, 122 bp, Homo sapiens
  misc_feature (61)..(62): /note="This region represents a CpG dinucleotide"
  misc_feature (61)..(61): /note="Nucleotide may be methylated to form 5-methylcytosine"
gtgactttattctcagttgtggcatttcccagacgtctctttgtttgtcttttgtctgaccgcagttgcttgtggtctttgcagcacaggttgcacaaagaaggctctttctattcccttca

SEQ ID NO: 19055 - DNA, 122 bp, Homo sapiens
  misc_feature (61)..(62): /note="This region represents a CpG dinucleotide"
  misc_feature (61)..(61): /note="Nucleotide may be methylated to form 5-methylcytosine"
taggacaagagaatggtaatgtggcattctagtgagaggaaatggcataagaaaaggcaacgctgtgtgggaaaaggcgacattctgaaggttaaaagaaatgaacaatttgggccgggcgc

SEQ ID NO: 19056 - DNA, 122 bp, Homo sapiens
  misc_feature (61)..(62): /note="This region represents a CpG dinucleotide"
  misc_feature (61)..(61): /note="Nucleotide may be methylated to form 5-methylcytosine"
accacactgtcaggtgggaaggctgatgtggcagagggagaatcagacaggagaatgttacgtaaccaaggattcagggaggtgatcgtttcacctgcttgcacctatcctaggtgtgttca

SEQ ID NO: 19057 - DNA, 122 bp, Homo sapiens
  misc_feature (61)..(62): /note="This region represents a CpG dinucleotide"
  misc_feature (61)..(61): /note="Nucleotide may be methylated to form 5-methylcytosine"
taaaggaggatcactcttttcctcctctccattttccaaattgtatcctgatggtggttacgttactgctctaattgaggggatataaaggtgactaagaaagccaccacaggccgggtgtg

SEQ ID NO: 19058 - DNA, 122 bp, Homo sapiens
  misc_feature (61)..(62): /note="This region represents a CpG dinucleotide"
  misc_feature (61)..(61): /note="Nucleotide may be methylated to form 5-methylcytosine"
cccagctcaaaactagagtatttctatcctcctgacagaatgactaagttagaactgcctcgtactctatatggctgagatgcagaaaatgccaaaacaattggtcacgactcaattcaggt

SEQ ID NO: 19059 - DNA, 122 bp, Homo sapiens
  misc_feature (61)..(62): /note="This region represents a CpG dinucleotide"
  misc_feature (61)..(61): /note="Nucleotide may be methylated to form 5-methylcytosine"
ctagcaaaaatgaagtcagaagtgagcgagttccttgagaatttatagaatttgtatacacgggagtctttcccataaatgaatttagtttgatacttaaaacatctgtgatagtttccttt

SEQ ID NO: 19060 - DNA, 122 bp, Homo sapiens
  misc_feature (61)..(62): /note="This region represents a CpG dinucleotide"
  misc_feature (61)..(61): /note="Nucleotide may be methylated to form 5-methylcytosine"
attcattgtgcctttcctttcctgtgagtcacggcctacctaagagaaagcttagtaacacgcaaggaaaattcaaaacacattgaggctctttaatgtacgtgatacttcagctgagataa

SEQ ID NO: 19061 - DNA, 122 bp, Homo sapiens
  misc_feature (61)..(62): /note="This region represents a CpG dinucleotide"
  misc_feature (61)..(61): /note="Nucleotide may be methylated to form 5-methylcytosine"
tgcaattggtcacaactattcatgcttcctgtgatttcatccaactacttaccttgcctacgatatcccctttatctctaatcagtttattttctttcaaataaaaaataactatgagcaac

SEQ ID NO: 19062 - DNA, 122 bp, Homo sapiens
  misc_feature (61)..(62): /note="This region represents a CpG dinucleotide"
  misc_feature (61)..(61): /note="Nucleotide may be methylated to form 5-methylcytosine"
ctgagatttttatgtaattagttataggcaaaatactttcatatttttagattagacagacgaaagaccaagaggaaatgactgtgcctggaacaggatgaaatagacaagtagagatttaa

SEQ ID NO: 19063 - DNA, 122 bp, Homo sapiens
  misc_feature (61)..(62): /note="This region represents a CpG dinucleotide"
  misc_feature (61)..(61): /note="Nucleotide may be methylated to form 5-methylcytosine"
gtgtgctgatggtgtatgtgttggtgggagtctgttgtgcgatacgcagatacattgtggcgggaccaacatctgctgaagttctggggctctagacgcttacccagcaagctgcagagact

SEQ ID NO: 19064 - DNA, 122 bp, Homo sapiens
  misc_feature (61)..(62): /note="This region represents a CpG dinucleotide"
  misc_feature (61)..(61): /note="Nucleotide may be methylated to form 5-methylcytosine"
ctcaagtgatccacccgcctcagcctcccaaagtgctgggattacaggtgtgagccactgcgcccgtcctgactcatgcaacttctgcttcaggtaagcagatttaggctgtttattctgtg

SEQ ID NO: 19065 - DNA, 122 bp, Homo sapiens
  misc_feature (61)..(62): /note="This region represents a CpG dinucleotide"
  misc_feature (61)..(61): /note="Nucleotide may be methylated to form 5-methylcytosine"
aggatttgtcactgaactgtggtaaaaacagcctccctgaagccttgggttggaataatacgtgtgagggaattggcaacaaaaggaagccggaaaggctggttgttcagggctctgtggct

SEQ ID NO: 19066 - DNA, 122 bp, Homo sapiens
  misc_feature (61)..(62): /note="This region represents a CpG dinucleotide"
  misc_feature (61)..(61): /note="Nucleotide may be methylated to form 5-methylcytosine"
tgttgtaggcagaagggaaggcaagagaaaagacccagacctgattcctaggatctccctcggggcactgtcccaggtgctgggaacacagctgtgatccagacaaccaaaagccctcactc

SEQ ID NO: 19067 - DNA, 122 bp, Homo sapiens
  misc_feature (61)..(62): /note="This region represents a CpG dinucleotide"
  misc_feature (61)..(61): /note="Nucleotide may be methylated to form 5-methylcytosine"
cggccacaggcctcagaagcagcaggagtgagctgtgggcacagctgtggggcagccaggcgcgtcaggcctcacatgtctgggagatgtaggctgcctgggctggtggcccctgagccgca

SEQ ID NO: 19068 - DNA, 122 bp, Homo sapiens
  misc_feature (61)..(62): /note="This region represents a CpG dinucleotide"
  misc_feature (61)..(61): /note="Nucleotide may be methylated to form 5-methylcytosine"
gagctgattatgggcaatatcataacctcatttattcagacaagctacccaaatcacagacgttctttaactggccacttttaagaaaatacttgccaaataatgggcttgttaaatagcaa

SEQ ID NO: 19069 - DNA, 122 bp, Homo sapiens
  misc_feature (61)..(62): /note="This region represents a CpG dinucleotide"
  misc_feature (61)..(61): /note="Nucleotide may be methylated to form 5-methylcytosine"
aaatcctctccataaggaaatccatctactccttggctaatactcttacttatctagcaacgggccattttttacccaggcgtggtggctcacacctataatcccagcactttgtggggcca

SEQ ID NO: 19070 - DNA, 122 bp, Homo sapiens
  misc_feature (61)..(62): /note="This region represents a CpG dinucleotide"
  misc_feature (61)..(61): /note="Nucleotide may be methylated to form 5-methylcytosine"
ggcggaagttacctctgactggaggagatacccggcccgtgttaccagcactggtgtgctcgttctaaaactggaaaaaatttgttcttaattttaacaacagtcatacatcacaacagtga

SEQ ID NO: 19071 - DNA, 122 bp, Homo sapiens
  misc_feature (61)..(62): /note="This region represents a CpG dinucleotide"
  misc_feature (61)..(61): /note="Nucleotide may be methylated to form 5-methylcytosine"
cacagctccggctacacagggcggcccccttccctttgatggctggttttacaggaagtgcgtctcccttcccgagtgttccgtccttcaaggtgtgtcacacatagctgtgtgcagttaga

SEQ ID NO: 19072 - DNA, 122 bp, Homo sapiens
  misc_feature (61)..(62): /note="This region represents a CpG dinucleotide"
  misc_feature (61)..(61): /note="Nucleotide may be methylated to form 5-methylcytosine"
ctgaacaatgagaacacatggtcacatggcggcgatcaacacacactggtgcctgttgagcggggtgctggggagggagagtaccaggaagaatagctaagggatactgggcttaatacctg

SEQ ID NO: 19073 - DNA, 122 bp, Homo sapiens
  misc_feature (61)..(62): /note="This region represents a CpG dinucleotide"
  misc_feature (61)..(61): /note="Nucleotide may be methylated to form 5-methylcytosine"
tcaacagtttgtaagaattgtactgtgcctagtgaaccaaatgcagacctctccaaagctcgctcagaacatttacaagatgaggaaaattcaaattaagagtcaaaggcatttcagggctg

SEQ ID NO: 19074 - DNA, 122 bp, Homo sapiens
  misc_feature (61)..(62): /note="This region represents a CpG dinucleotide"
  misc_feature (61)..(61): /note="Nucleotide may be methylated to form 5-methylcytosine"
atggttatttatagctcatgattcatccaaggactgagttattctccccatgaggctaaccggcctctttcccaacacttaatcatggcagccaggatgggtgaatgatgaaagctcttctg

SEQ ID NO: 19075 - DNA, 122 bp, Homo sapiens
  misc_feature (61)..(62): /note="This region represents a CpG dinucleotide"
  misc_feature (61)..(61): /note="Nucleotide may be methylated to form 5-methylcytosine"
cacggccaaactcatgtacagtaaagaaagatgttcaaatgctgtaatgggtgagaagagcgaactagaacacttggagctggcaccacaccttacttgcaagctgcacagacttgttgcac

SEQ ID NO: 19076 - DNA, 122 bp, Homo sapiens
  misc_feature (61)..(62): /note="This region represents a CpG dinucleotide"
  misc_feature (61)..(61): /note="Nucleotide may be methylated to form 5-methylcytosine"
gactacctaaaagttgtctgagggaggctgtgcactgggtgatcttgtgaggcaggtggacgtctattctgccaagatcttgtgggcccagtttgagaatgggttttaagttttagtccttt

SEQ ID NO: 19077 - DNA, 122 bp, Homo sapiens
  misc_feature (61)..(62): /note="This region represents a CpG dinucleotide"
  misc_feature (61)..(61): /note="Nucleotide may be methylated to form 5-methylcytosine"
tcgggacctggagggctgggggctgcccgggcgttaggggtaaagctccctacccaactgcgcagaaggcctcagaggcctgggggctgggcttcccctttcacatcgccctttagaggccc

SEQ ID NO: 19078 - DNA, 122 bp, Homo sapiens
  misc_feature (61)..(62): /note="This region represents a CpG dinucleotide"
  misc_feature (61)..(61): /note="Nucleotide may be methylated to form 5-methylcytosine"
tctggaatattattgacttcattcagaatattcccattacaagaaagtggccagtctctccgaggaacaaactgttttccttttccaccatgaaatagatcttatcttttcattagttaata

SEQ ID NO: 19079 - DNA, 122 bp, Homo sapiens
  misc_feature (61)..(62): /note="This region represents a CpG dinucleotide"
  misc_feature (61)..(61): /note="Nucleotide may be methylated to form 5-methylcytosine"
tctgttctttcactggtcttggccacacagatcacattataacaatccctgcccccaaaacgtacatcagggatgttgctatttcatttgtaaggttttaggtgagccactcttacatcatc

SEQ ID NO: 19080 - DNA, 122 bp, Homo sapiens
  misc_feature (61)..(62): /note="This region represents a CpG dinucleotide"
  misc_feature (61)..(61): /note="Nucleotide may be methylated to form 5-methylcytosine"
aggcccccacttcgcaggtcagatgtgtggttcacctcctgtccagccttcccaggcctgcgcaggagcctaccacctgctcactggtttgtaagtcattcaggggctgggcgcttatagag

SEQ ID NO: 19081 - DNA, 122 bp, Homo sapiens
  misc_feature (61)..(62): /note="This region represents a CpG dinucleotide"
  misc_feature (61)..(61): /note="Nucleotide may be methylated to form 5-methylcytosine"
tgaaacaaatgagaaaacaaaaacaaaaacaaatctcagttttaaaaggttatttaaggccgggagccttaaatacgacagaattgtaacaggaaaatctctaaataggtggaaattaaaat

SEQ ID NO: 19082 - DNA, 122 bp, Homo sapiens
  misc_feature (61)..(62): /note="This region represents a CpG dinucleotide"
  misc_feature (61)..(61): /note="Nucleotide may be methylated to form 5-methylcytosine"
tcatagttcactttgctttattctgccctttaagaagatattcacagtctttgggaacaacgaatagagttctggtcaatttggctttagttaagaaggtgactctgttatcctctccctag

SEQ ID NO: 19083 - DNA, 122 bp, Homo sapiens
  misc_feature (61)..(62): /note="This region represents a CpG dinucleotide"
  misc_feature (61)..(61): /note="Nucleotide may be methylated to form 5-methylcytosine"
ctcttagcatcaagagtaaactgggagttgtttttgtcaccaattctaatagacatgtttcgggttaaaggataccagttagttgactcattctggatattagtcagaatgtgaagtatcat

SEQ ID NO: 19084 - DNA, 122 bp, Homo sapiens
  misc_feature (61)..(62): /note="This region represents a CpG dinucleotide"
  misc_feature (61)..(61): /note="Nucleotide may be methylated to form 5-methylcytosine"
tctcctggacagacaggccatgctggttggccaacacacgtattttaactatgtggccgacgtgtttgccactcactctgtggttaaaatgtaaacagaaggtcaaaaggtaggatcacagg

SEQ ID NO: 19085 - DNA, 122 bp, Homo sapiens
  misc_feature (61)..(62): /note="This region represents a CpG dinucleotide"
  misc_feature (61)..(61): /note="Nucleotide may be methylated to form 5-methylcytosine"
gcttccgggaaagccctggaggtcagttttgctgcagatatgacggtgcagaatcactgacgtgtgaagtgaaagttttggttttagaagctccagcccctgctacaagtctctggggcaac

SEQ ID NO: 19086 - DNA, 122 bp, Homo sapiens
  misc_feature (61)..(62): /note="This region represents a CpG dinucleotide"
  misc_feature (61)..(61): /note="Nucleotide may be methylated to form 5-methylcytosine"
gaatgcaccgttgagctggcaaattggtgctggtattgctttggacctcacctcatgccacggaggctactcctcacagagcaagtgaggcaagaaaagaaaacataagccacgatgtctta

SEQ ID NO: 19087 - DNA, 122 bp, Homo sapiens
  misc_feature (61)..(62): /note="This region represents a CpG dinucleotide"
  misc_feature (61)..(61): /note="Nucleotide may be methylated to form 5-methylcytosine"
aggtttgttcctttttgaaattaggacacaagtccccaggcaggcttgttgggactccagcgaggtagcttttccatcactgaaggaaacgtagcaggcagcgtcaccggagcagggcacgg

SEQ ID NO: 19088 - DNA, 122 bp, Homo sapiens
  misc_feature (61)..(62): /note="This region represents a CpG dinucleotide"
  misc_feature (61)..(61): /note="Nucleotide may be methylated to form 5-methylcytosine"
ctgggaatgacaggggtgtaggccaggaaatggctctgtgaaggctgcctagaactgaatcgaacatgaggatgagtcagtgtcaagactcccagtggggccatcggatcattactgcatga

SEQ ID NO: 19089 - DNA, 122 bp, Homo sapiens
  misc_feature (61)..(62): /note="This region represents a CpG dinucleotide"
  misc_feature (61)..(61): /note="Nucleotide may be methylated to form 5-methylcytosine"
gcttgttttcttcttaatcttcttgtgttcatctagcctcacattgcatttgtcacacttcgttgaaaacctactgtttgtcaaagtgtctttctagtaatccagatatctcttcccccatg

SEQ ID NO: 19090 - DNA, 122 bp, Homo sapiens
  misc_feature (61)..(62): /note="This region represents a CpG dinucleotide"
  misc_feature (61)..(61): /note="Nucleotide may be methylated to form 5-methylcytosine"
ctgtctacaacatctctatgaccagaagggaatgggacacggagccagtggggtggagggcgggggcagtgacaaataagctgtgatgaacaggcaaagaattccaagtgccagcagggtaa

SEQ ID NO: 19091 - DNA, 122 bp, Homo sapiens
  misc_feature (61)..(62): /note="This region represents a CpG dinucleotide"
  misc_feature (61)..(61): /note="Nucleotide may be methylated to form 5-methylcytosine"
gcgggactggagggcacagttgaggaaggagggtggttaagaaatacagtggggccctctcgctgtcccttgcccagggcacttgcattccagcctcgctgcatttgctctctcgattcccc

SEQ ID NO: 19092 - DNA, 122 bp, Homo sapiens
  misc_feature (61)..(62): /note="This region represents a CpG dinucleotide"
  misc_feature (61)..(61): /note="Nucleotide may be methylated to form 5-methylcytosine"
ccctggaggggcctcggctgccgacttctgcctcataaaccctaccctccctttcagactcgcgccaagcaaagccctcagtgaagtctgctctcacccaagaagaataagctgttctgtgc

SEQ ID NO: 19093 - DNA, 122 bp, Homo sapiens
  misc_feature (61)..(62): /note="This region represents a CpG dinucleotide"
  misc_feature (61)..(61): /note="Nucleotide may be methylated to form 5-methylcytosine"
ttttcaccctcctccttattatcagagtaatagtatgtttattgtaggacccttgaaaaacgcagaagagctgaaaggaaaaacagttgtttgtaacctacaactcagagataaccactgat

SEQ ID NO: 19094 - DNA, 122 bp, Homo sapiens
  misc_feature (61)..(62): /note="This region represents a CpG dinucleotide"
  misc_feature (61)..(61): /note="Nucleotide may be methylated to form 5-methylcytosine"
ttaatgccatttcattattattctaattaatgagcaactttactgtctgcattagtgacacggtagaacagctaaaaagaaggaagtttgagtaagttcagcttctctgtgaatttgctttc

SEQ ID NO: 19095 - DNA, 122 bp, Homo sapiens
  misc_feature (61)..(62): /note="This region represents a CpG dinucleotide"
  misc_feature (61)..(61): /note="Nucleotide may be methylated to form 5-methylcytosine"
cctcctagagccactcttcctggtgctggactaagaggtgcaggcttggagggtgcagggcggtccgcctctcagacgtagaggcccggcctcggatgaaggcggaagggagggcaccgcct

SEQ ID NO: 19096 - DNA, 122 bp, Homo sapiens
  misc_feature (61)..(62): /note="This region represents a CpG dinucleotide"
  misc_feature (61)..(61): /note="Nucleotide may be methylated to form 5-methylcytosine"
ccacgcctggcctaaaaataactcatttagtcttgtccttatccagctctttcacaactccgtaaaacagctttgatttttctctccttctactggctctatcttctctgccttcaaacgta

SEQ ID NO: 19097 - DNA, 122 bp, Homo sapiens
  misc_feature (61)..(62): /note="This region represents a CpG dinucleotide"
  misc_feature (61)..(61): /note="Nucleotide may be methylated to form 5-methylcytosine"
aaggagagcttttaaaaaaaatatgtggtggtgatggtggagtgcgtgtgcgtgtatgcgcgcaggctgaggactgccacacttcccaaggtgctagctctatagatcatctattatataaa

SEQ ID NO: 19098 - DNA, 122 bp, Homo sapiens
  misc_feature (61)..(62): /note="This region represents a CpG dinucleotide"
  misc_feature (61)..(61): /note="Nucleotide may be methylated to form 5-methylcytosine"
tctaaaacctgttccacctgcagccctctctatttcacttgatggcagttttatccttctcgttattcaggataaaaacctgagactcattcttgtttttcctctttctcttatatcccaca

SEQ ID NO: 19099 - DNA, 122 bp, Homo sapiens
  misc_feature (61)..(62): /note="This region represents a CpG dinucleotide"
  misc_feature (61)..(61): /note="Nucleotide may be methylated to form 5-methylcytosine"
ttttgatatgtaatggctacatttccctctatagaaattgtggaagcttgttctctgagccgggggtgtggttaacacctgaaatcccagcactttgggaggtcgaggcaggcggatcactt

SEQ ID NO: 19100 - DNA, 122 bp, Homo sapiens
  misc_feature (61)..(62): /note="This region represents a CpG dinucleotide"
  misc_feature (61)..(61): /note="Nucleotide may be methylated to form 5-methylcytosine"
aagggaaggccatgaagagaaatattcgcatgcataaatgcctaataacaaaaactaccacggcagactatgaaaactgcaaccttgcacaaaaaatgcttctaggaggacagctgcccagt

SEQ ID NO: 19101 - DNA, 122 bp, Homo sapiens
  misc_feature (61)..(62): /note="This region represents a CpG dinucleotide"
  misc_feature (61)..(61): /note="Nucleotide may be methylated to form 5-methylcytosine"
acattggaagccttagataacctctctgagcctctttcttcatctgtagaatgttgtatacgtattagtaccaacttctttggggtgtgagtgtgaacttagataatgcatgcctataatgt

SEQ ID NO: 19102 - DNA, 122 bp, Homo sapiens
  misc_feature (61)..(62): /note="This region represents a CpG dinucleotide"
  misc_feature (61)..(61): /note="Nucleotide may be methylated to form 5-methylcytosine"
tttgtctggaagatttagactgatttaagggtgacacacagcagagttctagtggacattcgtgttaaccgtttggtgctcagaatggagatggccaaataccaagtgcttagtgacagaaa

SEQ ID NO: 19103 - DNA, 122 bp, Homo sapiens
  misc_feature (61)..(62): /note="This region represents a CpG dinucleotide"
  misc_feature (61)..(61): /note="Nucleotide may be methylated to form 5-methylcytosine"
gcttaataaaaccaagacagccagcacctcctgcaaactaaatccacgttctgttcgatgcgtagacgttattctgggtcggctccaggtgtccaagagttgttcagtgtgtgttcattagg

SEQ ID NO: 19104 - DNA, 122 bp, Homo sapiens
  misc_feature (61)..(62): /note="This region represents a CpG dinucleotide"
  misc_feature (61)..(61): /note="Nucleotide may be methylated to form 5-methylcytosine"
taattactgggcaggaagtgtcctctaagcctctaagcagggcagatgggcaggaggatgcggagatgaacatgactcaggccttgctctcaaggccctaacagcctggcagggagcgagat

SEQ ID NO: 19105 - DNA, 122 bp, Homo sapiens
  misc_feature (61)..(62): /note="This region represents a CpG dinucleotide"
  misc_feature (61)..(61): /note="Nucleotide may be methylated to form 5-methylcytosine"
gctcctgttgcaagtttctagaactcacaggtggagaatgaaatttcagtttccaaaccacgttcgtgctcctccaggcatgactgtgagcagtattctgatttgccatgaggcctggggat

SEQ ID NO: 19106 - DNA, 122 bp, Homo sapiens
  misc_feature (61)..(62): /note="This region represents a CpG dinucleotide"
  misc_feature (61)..(61): /note="Nucleotide may be methylated to form 5-methylcytosine"
aacagaacaaaggcaaaaaataaaataaaataaaatagaagaaactgaaatgaatgagtgcgctgccaaaggagcaagaattcagctcattcaggtatatttcaagatcaggttgataggcg

SEQ ID NO: 19107 - DNA, 122 bp, Homo sapiens
  misc_feature (61)..(62): /note="This region represents a CpG dinucleotide"
  misc_feature (61)..(61): /note="Nucleotide may be methylated to form 5-methylcytosine"
gtttttatcttgaccgactagttaattgccaaaggattattttagataagtagcccttaacgtatgttgtgtggaacagcagcatcagcattacctgggaacttgcaagacatgaaacttcc

SEQ ID NO: 19108 - DNA, 122 bp, Homo sapiens
  misc_feature (61)..(62): /note="This region represents a CpG dinucleotide"
  misc_feature (61)..(61): /note="Nucleotide may be methylated to form 5-methylcytosine"
gattatgatattccagaattccaagccatggagtcattgatgagtaagtagtgtcagtagcggctacatggtttcaagattaacctttggctgagcaatgaggagtcattgccaatgttgtc

SEQ ID NO: 19109 - DNA, 122 bp, Homo sapiens
  misc_feature (61)..(62): /note="This region represents a CpG dinucleotide"
  misc_feature (61)..(61): /note="Nucleotide may be methylated to form 5-methylcytosine"
aggaatctttactttctcaagaactttgttacatccagataacaactgaacagtccttggcgtagaaataacaggaggaagtgatacatgcagtagtaagaggaaggaaagtgctttgtccc

SEQ ID NO: 19110 - DNA, 122 bp, Homo sapiens
  misc_feature (61)..(62): /note="This region represents a CpG dinucleotide"
  misc_feature (61)..(61): /note="Nucleotide may be methylated to form 5-methylcytosine"
tctaaggtgatcacataaatgagtgcaggattcaaacaatgtttgttgttactgatgttgcgagactggcttcaaggttatttacagaagtggttctaggaagagtcatctttagtcagatg

SEQ ID NO: 19111 - DNA, 122 bp, Homo sapiens
  misc_feature (61)..(62): /note="This region represents a CpG dinucleotide"
  misc_feature (61)..(61): /note="Nucleotide may be methylated to form 5-methylcytosine"
tcaatggatccatgagtcacatgcttaatctcctcaaagaactctctgggcgagaacctacgcacaccttttggtctttctgagacactgggtaatagttgtttaaccacacccttgacttt

SEQ ID NO: 19112 - DNA, 122 bp, Homo sapiens
  misc_feature (61)..(62): /note="This region represents a CpG dinucleotide"
  misc_feature (61)..(61): /note="Nucleotide may be methylated to form 5-methylcytosine"
cgtgagacccctggctcgctccacacacaacctaagtgccagatggatgagacgcctacgcgtgagtaaatgccaggaacatgagactcgaacgtggcaggatatccttctgcccacgaatc

SEQ ID NO: 19113 - DNA, 122 bp, Homo sapiens
  misc_feature (61)..(62): /note="This region represents a CpG dinucleotide"
  misc_feature (61)..(61): /note="Nucleotide may be methylated to form 5-methylcytosine"
acagccatctcagtcagcagtgtgtcctttgctctctgaaagtgaaagctctatgagatccgaatgagcagcatccggcctcagagctaatctgtcagattttgcgtctgagtcagaactta

SEQ ID NO: 19114 - DNA, 122 bp, Homo sapiens
  misc_feature (61)..(62): /note="This region represents a CpG dinucleotide"
  misc_feature (61)..(61): /note="Nucleotide may be methylated to form 5-methylcytosine"
tgctggagacctttcagaacctggcctcagtaggtaaggatgacatcattccttccttcacgtagttattgagagaacaagtatttcttacacatcagacctgttccaaggcttggaatgtg

SEQ ID NO: 19115 - DNA, 122 bp, Homo sapiens
  misc_feature (61)..(62): /note="This region represents a CpG dinucleotide"
  misc_feature (61)..(61): /note="Nucleotide may be methylated to form 5-methylcytosine"
acccatgtacaaggtaggaacagagctcatcacttcatccactgataagtcagagacaggcgtgtaaaatgcaattcacaggagcagttctcacccaaatgaaaccaaagtattcctcccta

SEQ ID NO: 19116 - DNA, 122 bp, Homo sapiens
  misc_feature (61)..(62): /note="This region represents a CpG dinucleotide"
  misc_feature (61)..(61): /note="Nucleotide may be methylated to form 5-methylcytosine"
attactatattatgtatcctacacttggaccagtgtctgtttcctgaacccagtcatggccgtagctcactgctgttactataatgacctcgttcctcctttctaactgtaaaattctattc

SEQ ID NO: 19117 - DNA, 122 bp, Homo sapiens
  misc_feature (61)..(62): /note="This region represents a CpG dinucleotide"
  misc_feature (61)..(61): /note="Nucleotide may be methylated to form 5-methylcytosine"
gtcacggaatccttaacctagaagtaaccttaaatgtaatctcacagaacttcctcatgacggatatggaaactgatgttaccaaatgtcaaatgacttcggaagggtcagaaagttagcta

SEQ ID NO: 19118 - DNA, 122 bp, Homo sapiens
  misc_feature (61)..(62): /note="This region represents a CpG dinucleotide"
  misc_feature (61)..(61): /note="Nucleotide may be methylated to form 5-methylcytosine"
tgtcctgctgctcctgttaagagggtagaggaggctgggcccagaagggcctgctcttttcgtcttctggtcctggagttgttgaaactcttattgatgcagacacagattatcaattgtcc

SEQ ID NO: 19119 - DNA, 122 bp, Homo sapiens
  misc_feature (61)..(62): /note="This region represents a CpG dinucleotide"
  misc_feature (61)..(61): /note="Nucleotide may be methylated to form 5-methylcytosine"
ggaacactgcaaaactgttcccaaaactgcaccctaagtgtggttatttcacacccatggcggcgggcttagaacgaggttttatttcttctcctcctttctctgtggcaccaattgtgttg

SEQ ID NO: 19120 - DNA, 122 bp, Homo sapiens
  misc_feature (61)..(62): /note="This region represents a CpG dinucleotide"
  misc_feature (61)..(61): /note="Nucleotide may be methylated to form 5-methylcytosine"
tttgttagaatcttaatcacctaggactccttcacagttcctcttcctgtatacatagcacgatgactaaaacataaccatatttagaaaccacattatatctatacttttttttttttttt

SEQ ID NO: 19121 - DNA, 122 bp, Homo sapiens
  misc_feature (61)..(62): /note="This region represents a CpG dinucleotide"
  misc_feature (61)..(61): /note="Nucleotide may be methylated to form 5-methylcytosine"
tgacttggtgtgtgtgtcgagcagccaatgcaaacccctagcacactctacttcaagagtcgccagttcaaaagggtactactatacaaactggtacaagacttctgtgtgctttcctgtgt

SEQ ID NO: 19122 - DNA, 122 bp, Homo sapiens
  misc_feature (61)..(62): /note="This region represents a CpG dinucleotide"
  misc_feature (61)..(61): /note="Nucleotide may be methylated to form 5-methylcytosine"
taggattagatccctggggaaggaacaagatacactaaagtggggctgtgccccagttaccgttctatgaggacacagggtaggaacagtttgacaagcacttcaagaatttacactgtcac

SEQ ID NO: 19123 - DNA, 122 bp, Homo sapiens
  misc_feature (61)..(62): /note="This region represents a CpG dinucleotide"
  misc_feature (61)..(61): /note="Nucleotide may be methylated to form 5-methylcytosine"
gctgcaatgttcacttcccttgttattgcatgccttacaattgcaccaactgaatgatgacgaggaaggcatgcaaatatatgttcacagtgggattcagtctattttagaccatgaattct

SEQ ID NO: 19124 - DNA, 122 bp, Homo sapiens
  misc_feature (61)..(62): /note="This region represents a CpG dinucleotide"
  misc_feature (61)..(61): /note="Nucleotide may be methylated to form 5-methylcytosine"
gttactctaattataattaaacaagtcaactgtatcataccaggcatggcagctcatgcccgtaatcccagcactttgggaggctgaggcgagcagatcacttgagcccaggagttctagac

SEQ ID NO: 19125 - DNA, 122 bp, Homo sapiens
  misc_feature (61)..(62): /note="This region represents a CpG dinucleotide"
  misc_feature (61)..(61): /note="Nucleotide may be methylated to form 5-methylcytosine"
aggtctctagccacagtcggttttatgttccaggcatcaatccacactcatgattgttaccgtacacctgtatgtcattcggaggttcacccagctcaagcaaattatattttaaaactgca

SEQ ID NO: 19126 - DNA, 122 bp, Homo sapiens
  misc_feature (61)..(62): /note="This region represents a CpG dinucleotide"
  misc_feature (61)..(61): /note="Nucleotide may be methylated to form 5-methylcytosine"
atgctgttacccttagggtagtttctgtgacctgcctagtctcagccttctaggcctgctcgttctctctgctaaactgagagataagccagtgctggatgtcaaaggtggaggcagcaaag

SEQ ID NO: 19127 - DNA, 122 bp, Homo sapiens
  misc_feature (61)..(62): /note="This region represents a CpG dinucleotide"
  misc_feature (61)..(61): /note="Nucleotide may be methylated to form 5-methylcytosine"
gccacactcatttgttcatccatgattgcttttgcactacagtggcagagttgaataccacgcagactatggtagcccacaaagcctaattactatctgatcctatacagaaaaagtttgct

SEQ ID NO: 19128 - DNA, 122 bp, Homo sapiens
  misc_feature (61)..(62): /note="This region represents a CpG dinucleotide"
  misc_feature (61)..(61): /note="Nucleotide may be methylated to form 5-methylcytosine"
gctctacttatatccacattgtcttgtgcaaggtagagagcaggcctagcaacctgggtgcggcaggattaattaagggcagctgaaaggcctatctgcacctatatatcttacttagctat

SEQ ID NO: 19129 - DNA, 122 bp, Homo sapiens
  misc_feature (61)..(62): /note="This region represents a CpG dinucleotide"
  misc_feature (61)..(61): /note="Nucleotide may be methylated to form 5-methylcytosine"
ggccggttcttgtttacttccctttttcttccccacactgtttgctcaaaagagttcaagcgccttctgagtttttcttcaggagacagagccaggcttgaatataatgccaggcaggaaca

SEQ ID NO: 19130 - DNA, 122 bp, Homo sapiens
  misc_feature (61)..(62): /note="This region represents a CpG dinucleotide"
  misc_feature (61)..(61): /note="Nucleotide may be methylated to form 5-methylcytosine"
ttggcaaggtcaccagagaaggatccaagcccccgcggttgctcccgtagacaagcgggtcgggcccagattcccggctctcagcaaagaagcttgccggggtctcccacctgtctcctgct

SEQ ID NO: 19131 - DNA, 122 bp, Homo sapiens
  misc_feature (61)..(62): /note="This region represents a CpG dinucleotide"
  misc_feature (61)..(61): /note="Nucleotide may be methylated to form 5-methylcytosine"
tgaatgttttacttcctgtgttgactgtgtttctctctgaaaccctttggtaaaaatctacgtttacctggttatatctgatgataactaaaaagggaaagaaatggtagatcttaaaagat

SEQ ID NO: 19132 - DNA, 122 bp, Homo sapiens
  misc_feature (61)..(62): /note="This region represents a CpG dinucleotide"
  misc_feature (61)..(61): /note="Nucleotide may be methylated to form 5-methylcytosine"
ctcatagcataaatgtctccatacagcaaatgacagagaatttttatctgctgctaataccgccaaatgcaacagaagagtgaaactcagaaaagcctagattagataaagaccgtgacagg

SEQ ID NO: 19133 - DNA, 122 bp, Homo sapiens
  misc_feature (61)..(62): /note="This region represents a CpG dinucleotide"
  misc_feature (61)..(61): /note="Nucleotide may be methylated to form 5-methylcytosine"
cagcagcagaggcattcattctccaagggtgttctatgagccttattggtcctccctgtacgatcagctgcgaaagaactgccagtgcaatcttgagactagatgaggagttacactgacag

SEQ ID NO: 19134 - DNA, 122 bp, Homo sapiens
  misc_feature (61)..(62): /note="This region represents a CpG dinucleotide"
  misc_feature (61)..(61): /note="Nucleotide may be methylated to form 5-methylcytosine"
caatttcctctggttcccacaagagaggaagccattcatacatgtaagttcatatttatgcggtgacaggcagcctaaggtgcagtcacacttactaattgggtctgactcagtcaagagca

SEQ ID NO: 19135 - DNA, 122 bp, Homo sapiens
  misc_feature (61)..(62): /note="This region represents a CpG dinucleotide"
  misc_feature (61)..(61): /note="Nucleotide may be methylated to form 5-methylcytosine"
gctttggtgaaagacatgattgagtgttgtctcttttagttggtggccagtagggccactcggtattgggagaaagtgaggcacctacaggctaaacctgtggccaaacagtttcagcagaa

SEQ ID NO: 19136 - DNA, 122 bp, Homo sapiens
  misc_feature (61)..(62): /note="This region represents a CpG dinucleotide"
  misc_feature (61)..(61): /note="Nucleotide may be methylated to form 5-methylcytosine"
gctggcctacgagtctgacgggatcgtggtttccaacgacacataccgtgacctccaaggcgagcggcaggagtggaagcgcttcatcgaggagcggctgctcatgtactccttcgtcaatg

SEQ ID NO: 19137 - DNA, 122 bp, Homo sapiens
  misc_feature (61)..(62): /note="This region represents a CpG dinucleotide"
  misc_feature (61)..(61): /note="Nucleotide may be methylated to form 5-methylcytosine"
gtcagttttgcttctcccctcacccctttaactccatcatgggaggcatagcagaggaaacggcaggtcagtgatgtaagaattagaagcccaacaactgaagaactggaaacagcatcatt

SEQ ID NO: 19138 - DNA, 122 bp, Homo sapiens
  misc_feature (61)..(62): /note="This region represents a CpG dinucleotide"
  misc_feature (61)..(61): /note="Nucleotide may be methylated to form 5-methylcytosine"
cacaagccatccccctccttcaactggaagtcaccccaaccctttcacttcccttgcttacggcacctgcccagaccacagccacagctgggctcaggtttcaattcttgtttcctccacac

SEQ ID NO: 19139 - DNA, 122 bp, Homo sapiens
  misc_feature (61)..(62): /note="This region represents a CpG dinucleotide"
  misc_feature (61)..(61): /note="Nucleotide may be methylated to form 5-methylcytosine"
agaaaaattgtcatttaaagttgtcaccttggggacaagcttttattctaatgatgctgacgttattccagatatttctagaacatttttagaattgccttaggagtttgaatcataacatt

SEQ ID NO: 19140 - DNA, 122 bp, Homo sapiens
  misc_feature (61)..(62): /note="This region represents a CpG dinucleotide"
  misc_feature (61)..(61): /note="Nucleotide may be methylated to form 5-methylcytosine"
gattaggagtacagctcatatctgacactggtatgatctggagcatgatttcatcatcatcgtgttcataggtggccctagttttgctttgatgaatcatccttggtggtagcattgggctc

SEQ ID NO: 19141 - DNA, 122 bp, Homo sapiens
  misc_feature (61)..(62): /note="This region represents a CpG dinucleotide"
  misc_feature (61)..(61): /note="Nucleotide may be methylated to form 5-methylcytosine"
aattgaagtccgctggtctccagacaggcacggtaacgtgcacgcatcggatgtggttcccggggaatggtgggtgattgtccatcttcctaacagtcctcaaatgaggactcagttccagc

SEQ ID NO: 19142 - DNA, 122 bp, Homo sapiens
  misc_feature (61)..(62): /note="This region represents a CpG dinucleotide"
  misc_feature (61)..(61): /note="Nucleotide may be methylated to form 5-methylcytosine"
ttacatcccagtcattaccatggcttacaaggctccacacagtctgatccctgcctacagcgttggtctcacttcctacaattctctccctcgcttgctccacttactcatctcagccacat

SEQ ID NO: 19143 - DNA, 122 bp, Homo sapiens
  misc_feature (61)..(62): /note="This region represents a CpG dinucleotide"
  misc_feature (61)..(61): /note="Nucleotide may be methylated to form 5-methylcytosine"
atcttagagccatgagtgcacgtgtgcacacacacacacgcacacctgcacacactcacacgcacacctgcatgtggacacatgcatggggaggtgtggagcccctcccaccagggagaccc

SEQ ID NO: 19144 - DNA, 122 bp, Homo sapiens
  misc_feature (61)..(62): /note="This region represents a CpG dinucleotide"
  misc_feature (61)..(61): /note="Nucleotide may be methylated to form 5-methylcytosine"
agctgaacggggtcatgcccatcgccatgagcatcaaggcaggcacggtggatgaggactcgtcaggctccgagtgagtgtggccgggtgggcgggacggggtgcagcccctcggaggcctc

SEQ ID NO: 19145 - DNA, 122 bp, Homo sapiens
  misc_feature (61)..(62): /note="This region represents a CpG dinucleotide"
  misc_feature (61)..(61): /note="Nucleotide may be methylated to form 5-methylcytosine"
cagaggacaccaagcagcctggtcttggacagggtgttctgcagatggccattacctgagcgtgctggcctatgggctggccctgagcacccacagccacagctcccacacccaaccttaca

SEQ ID NO: 19146 - DNA, 122 bp, Homo sapiens
  misc_feature (61)..(62): /note="This region represents a CpG dinucleotide"
  misc_feature (61)..(61): /note="Nucleotide may be methylated to form 5-methylcytosine"
acagtgtctgggaagtaggtattcaatgaacaatagataatcttcataattacttaatttcgcctcacagcactgtgtgggaagtcagaattctccattttcaaggctagaagtgaggcaca

SEQ ID NO: 19147 - DNA, 122 bp, Homo sapiens
  misc_feature (61)..(62): /note="This region represents a CpG dinucleotide"
  misc_feature (61)..(61): /note="Nucleotide may be methylated to form 5-methylcytosine"
attatactgattccatgggagccatcccatgtattctctgaatctgttccctttttattacgtaatttctaacctacttagtctgattcatatatacagatgtagcaagaggtataaattaa

SEQ ID NO: 19148 - DNA, 122 bp, Homo sapiens
  misc_feature (61)..(62): /note="This region represents a CpG dinucleotide"
  misc_feature (61)..(61): /note="Nucleotide may be methylated to form 5-methylcytosine"
aaagcggtcaacacaccccatcgtaccttccacttcctgggtggcctctgttgcagtccacgccaaggggccatctctgggtcagcaccttttgacagatgaaaaaactgaggctcagagga

SEQ ID NO: 19149 - DNA, 122 bp, Homo sapiens
  misc_feature (61)..(62): /note="This region represents a CpG dinucleotide"
  misc_feature (61)..(61): /note="Nucleotide may be methylated to form 5-methylcytosine"
tttactttaaaaatttggaaaagtaagcaccatgagttcattgatatgagtaggaacctgcgtcatcctgtggtatttgtgaatattgtgggctcttttatcaatttcatttgtttctaagt

SEQ ID NO: 19150 - DNA, 122 bp, Homo sapiens
  misc_feature (61)..(62): /note="This region represents a CpG dinucleotide"
  misc_feature (61)..(61): /note="Nucleotide may be methylated to form 5-methylcytosine"
cgcccagcctgatgacacaactttggctttcttctgttagcttctttgtccggaaagcaccgctgatattgtcaggttacacactgaatggagggtgactaataagcgatgccagttgcctg

SEQ ID NO: 19151 - DNA, 122 bp, Homo sapiens
  misc_feature (61)..(62): /note="This region represents a CpG dinucleotide"
  misc_feature (61)..(61): /note="Nucleotide may be methylated to form 5-methylcytosine"
atctacctgcttcatgggacctaatgggatgcttatgacagccttttacaaactataaaacgttccaaaaaggtaggaatcactaccatttactcaattttatcctggccaacttttttttt

SEQ ID NO: 19152 - DNA, 122 bp, Homo sapiens
  misc_feature (61)..(62): /note="This region represents a CpG dinucleotide"
  misc_feature (61)..(61): /note="Nucleotide may be methylated to form 5-methylcytosine"
aatgatgacaccagaaccaggctctgtccccagaccctgtggtcattcctgtggggagaacgacacacaacacacaactgaatgcagttaggataatgtcgagtggccagtgctgtgtggaa

SEQ ID NO: 19153 - DNA, 122 bp, Homo sapiens
  misc_feature (61)..(62): /note="This region represents a CpG dinucleotide"
  misc_feature (61)..(61): /note="Nucleotide may be methylated to form 5-methylcytosine"
tgccttcagtaacatgagagggaaagcagaacaaatgggcaggacaggcaaggaggggcacgggctaacaccaactctgaaggacacagagaacatgttgggattcaacacccactctaagg

SEQ ID NO: 19154 - DNA, 122 bp, Homo sapiens
  misc_feature (61)..(62): /note="This region represents a CpG dinucleotide"
  misc_feature (61)..(61): /note="Nucleotide may be methylated to form 5-methylcytosine"
gatcttggtctcaccacttggtgtctccttgggtggataactgtgagccacagtctcattcgtaaaaggagcctaatagcatagttgtggatataaaacaggatgacacagtaaacacttga

SEQ ID NO: 19155 - DNA, 122 bp, Homo sapiens
  misc_feature (61)..(62): /note="This region represents a CpG dinucleotide"
  misc_feature (61)..(61): /note="Nucleotide may be methylated to form 5-methylcytosine"
cttcaataggtctactttttccaggccaagatcgtgggtgagtcatttcacacagctgagcgtttctgtggcagtgagtgcacttcacaatcattaactctcatagcatccctgagaagttg

SEQ ID NO: 19156 - DNA, 122 bp, Homo sapiens
  misc_feature (61)..(62): /note="This region represents a CpG dinucleotide"
  misc_feature (61)..(61): /note="Nucleotide may be methylated to form 5-methylcytosine"
agctgtaccagctcatactctgaagccactgcagagtcacgattgtttttcttaaggacacgactgatgacacttggagccttgtcctggcttgtcacctggcagaacaggagaccaaaaga

SEQ ID NO: 19157 - DNA, 122 bp, Homo sapiens
  misc_feature (61)..(62): /note="This region represents a CpG dinucleotide"
  misc_feature (61)..(61): /note="Nucleotide may be methylated to form 5-methylcytosine"
gtaagggtcagcactgaaccagcttgtcaagatgagcactgagttaaaaatcctctctgccgcttctgtgggctcgcaagtggatctgactgtgacaggctgaagaacagcagtccctggcc

SEQ ID NO: 19158 - DNA, 122 bp, Homo sapiens
  misc_feature (61)..(62): /note="This region represents a CpG dinucleotide"
  misc_feature (61)..(61): /note="Nucleotide may be methylated to form 5-methylcytosine"
ggaactaatgttatgttatcttttagagcttcctgttcttttcttttctagtgcttcccccgctcccagctctcaacctctatccgatataaagactgttttcttgtcaaggtcacagttag

SEQ ID NO: 19159 - DNA, 122 bp, Homo sapiens
  misc_feature (61)..(62): /note="This region represents a CpG dinucleotide"
  misc_feature (61)..(61): /note="Nucleotide may be methylated to form 5-methylcytosine"
catgtgttgacagggggcagggagccgagctcgggcagcagctcagggtgtgggtccaggcgggccagacggctctgctccagggcaatggcttcggctgagtgcttgcacttctcagagcc

SEQ ID NO: 19160 - DNA, 122 bp, Homo sapiens
  misc_feature (61)..(62): /note="This region represents a CpG dinucleotide"
  misc_feature (61)..(61): /note="Nucleotide may be methylated to form 5-methylcytosine"
atccatatttgctgagcatctatgataggctaggttctgtgcttcatgcttcacaaacaccgtctcactaatggtagttaatagtaataaaggcagttattattattacaaagatcatgtat

SEQ ID NO: 19161 - DNA, 122 bp, Homo sapiens
  misc_feature (61)..(62): /note="This region represents a CpG dinucleotide"
  misc_feature (61)..(61): /note="Nucleotide may be methylated to form 5-methylcytosine"
ggagtggtgtgaaatctgctccaggatgtgtcacagccagctggggacccaactgctaaacgggatttgaatgaactcaacccagacgaggctggatttgccagtcatgccactctccatct

SEQ ID NO: 19162 - DNA, 122 bp, Homo sapiens
  misc_feature (61)..(62): /note="This region represents a CpG dinucleotide"
  misc_feature (61)..(61): /note="Nucleotide may be methylated to form 5-methylcytosine"
ttagatcagcattacttccccaattttgattttgcactgtagttatggaaaatgaggaagcgggggtgaggatacacagggaccctgtaccctttgcaactttctgtgaatctatacttatt

SEQ ID NO: 19163 - DNA, 122 bp, Homo sapiens
  misc_feature (61)..(62): /note="This region represents a CpG dinucleotide"
  misc_feature (61)..(61): /note="Nucleotide may be methylated to form 5-methylcytosine"
attcttagtcctctgccagtttttcagcatcaagtcacttcatgtttgtctaatgatccacgaggtgaatgccactcatgctcagccgcaaccctaactctgccgcgttgggatttctcatg

SEQ ID NO: 19164 - DNA, 122 bp, Homo sapiens
  misc_feature (61)..(62): /note="This region represents a CpG dinucleotide"
  misc_feature (61)..(61): /note="Nucleotide may be methylated to form 5-methylcytosine"
cagtcatgaaaaggcactggaaaatacaaggtaaaaaactagtgtgaaaacagttgaatccgaagacagtctgtggtttactgaatattagtgtaccaatgttaatttctaagctgtgataa

SEQ ID NO: 19165 - DNA, 122 bp, Homo sapiens
  misc_feature (61)..(62): /note="This region represents a CpG dinucleotide"
  misc_feature (61)..(61): /note="Nucleotide may be methylated to form 5-methylcytosine"
gggttgtcgttttctgatacatccacgttgcacccgggtgtagctgggctggggctgcaacgtttctcagcattctgtgtctggaatgctcaccaggccccacagtctggccttagcaggaa

SEQ ID NO: 19166 - DNA, 122 bp, Homo sapiens
  misc_feature (61)..(62): /note="This region represents a CpG dinucleotide"
  misc_feature (61)..(61): /note="Nucleotide may be methylated to form 5-methylcytosine"
ccatcttctttaccacatcctgttatcctgttgagatacaggttgttatgacctgtatctcgtgacttcctatctcatcctgtgactatgaatgcctgacctcgtggaaatgcagcccagtg

SEQ ID NO: 19167 - DNA, 122 bp, Homo sapiens
  misc_feature (61)..(62): /note="This region represents a CpG dinucleotide"
  misc_feature (61)..(61): /note="Nucleotide may be methylated to form 5-methylcytosine"
ataggcactagtgggaggagaataaaagggagatgcattaattcctggtatgacaaactacgtgatagaactagagcagtggtctgaaaactttttctgtgaaaggccacatagtaaatatt

SEQ ID NO: 19168 - DNA, 122 bp, Homo sapiens
  misc_feature (61)..(62): /note="This region represents a CpG dinucleotide"
  misc_feature (61)..(61): /note="Nucleotide may be methylated to form 5-methylcytosine"
taagagttacaggaaattactgtgttctcaggcatctcttgtatctggaagcaggatgtacgtcactttctaataggcttatcttttgggtgaggtggagtaaagggtattaagggagatgc

SEQ ID NO: 19169 - DNA, 122 bp, Homo sapiens
  misc_feature (61)..(62): /note="This region represents a CpG dinucleotide"
  misc_feature (61)..(61): /note="Nucleotide may be methylated to form 5-methylcytosine"
aggaataagtgaatagctattcatccttagaccctgtccaaacagagcaacagtcatatacgccaccatagataaagagatccagagaactctcaaaccctttttccataattggaaattat

SEQ ID NO: 19170 - DNA, 122 bp, Homo sapiens
  misc_feature (61)..(62): /note="This region represents a CpG dinucleotide"
  misc_feature (61)..(61): /note="Nucleotide may be methylated to form 5-methylcytosine"
tttaaaaaaggaattttaaaaattaatttctaggttttctaggattaagaagttgtaggacgggctaaagaaaacattgtgtcagataagtgttagccatcagactgcacttcaaagagttc

SEQ ID NO: 19171 - DNA, 122 bp, Homo sapiens
  misc_feature (61)..(62): /note="This region represents a CpG dinucleotide"
  misc_feature (61)..(61): /note="Nucleotide may be methylated to form 5-methylcytosine"
ggccttccctaggggaggaggtgaatgcagacacaagtgcactgggtgtgctgtgtgcctcgtgctgtgctaggtcccaaggacatggaaggcccagccctccggcatcctgcaatctggct

SEQ ID NO: 19172 - DNA, 122 bp, Homo sapiens
  misc_feature (61)..(62): /note="This region represents a CpG dinucleotide"
  misc_feature (61)..(61): /note="Nucleotide may be methylated to form 5-methylcytosine"
acatggctcaaagggggctccccacaggcagccagggctacagaatcagaaaacatctggcgactctggaaggctcagctggccgccaaacacacaggcctccagttatggacaccagccag

SEQ ID NO: 19173 - DNA, 122 bp, Homo sapiens
  misc_feature (61)..(62): /note="This region represents a CpG dinucleotide"
  misc_feature (61)..(61): /note="Nucleotide may be methylated to form 5-methylcytosine"
gcataattcaaccagtgacaccagctaacaatgacagggcagggtttcaatccagcagcccggccccagccttttagtctccaccttacactgccttattcgtgtttggttgaaccacatgc

SEQ ID NO: 19174 - DNA, 122 bp, Homo sapiens
  misc_feature (61)..(62): /note="This region represents a CpG dinucleotide"
  misc_feature (61)..(61): /note="Nucleotide may be methylated to form 5-methylcytosine"
ggctctggggctgtccaggcaggaggggaggggttatggttcaatgactctgaaggccaacgtccaagttgacctagctttgccatgtgttagccatggggcctggaaaaaatgcatgtccc

SEQ ID NO: 19175 - DNA, 122 bp, Homo sapiens
  misc_feature (61)..(62): /note="This region represents a CpG dinucleotide"
  misc_feature (61)..(61): /note="Nucleotide may be methylated to form 5-methylcytosine"
tcccaatcactgacaaagaagtaaaatacattatcaggtgaccaggcaagaatatacttacgacttggtctaaatcttaaggaagacaattaattaactgggaagcatagagcaacaatgag

SEQ ID NO: 19176 - DNA, 122 bp, Homo sapiens
  misc_feature (61)..(62): /note="This region represents a CpG dinucleotide"
  misc_feature (61)..(61): /note="Nucleotide may be methylated to form 5-methylcytosine"
gcagagtgtcttgtcatttccagagaaaccagacagcaggtttgatgtgggtgagaaatgcgcatgcctgcttttgtaattggtaaggctgtctaaggatttgattccttgtgagccacatg

SEQ ID NO: 19177 - DNA, 122 bp, Homo sapiens
  misc_feature (61)..(62): /note="This region represents a CpG dinucleotide"
  misc_feature (61)..(61): /note="Nucleotide may be methylated to form 5-methylcytosine"
aggagggttacggtaagccatgtgcctttacactctatcaataacatctattactctactcggcaattctattgaagaatgtctgtgagggttgtgtccaccagggggagctgagatgcagt

SEQ ID NO: 19178 - DNA, 122 bp, Homo sapiens
  misc_feature (61)..(62): /note="This region represents a CpG dinucleotide"
  misc_feature (61)..(61): /note="Nucleotide may be methylated to form 5-methylcytosine"
gtgatggcttattatcatggttaaccagtctgtcttgaatttgcagcctgagctgaccagcgcttatcctcatgtgaccttgggtgaattaatggacatctctgaacctccattttctcctg

SEQ ID NO: 19179 - DNA, 122 bp, Homo sapiens
  misc_feature (61)..(62): /note="This region represents a CpG dinucleotide"
  misc_feature (61)..(61): /note="Nucleotide may be methylated to form 5-methylcytosine"
tatattcctgtcagccccactaaaatgtcagttcagtggccgggtgtggtagctcacgaccgtaatcccagcactttgggaggccgaggcagatggatcacctgagaggtcagaagttcgag

SEQ ID NO: 19180 - DNA, 122 bp, Homo sapiens
  misc_feature (61)..(62): /note="This region represents a CpG dinucleotide"
  misc_feature (61)..(61): /note="Nucleotide may be methylated to form 5-methylcytosine"
gggccccagatcaccgcgggaggcggagccgcaggcctggggtggggctgggagtgtgggcgtgggaaggggtcggtgggaggggctccgcgcgggatggggcatctggcgcccactcacca

SEQ ID NO: 19181 - DNA, 122 bp, Homo sapiens
  misc_feature (61)..(62): /note="This region represents a CpG dinucleotide"
  misc_feature (61)..(61): /note="Nucleotide may be methylated to form 5-methylcytosine"
atataagatgacggtataaacactctctctttcatgtcacagtcacatacaccttagtgacgtgaatcccaagagaaattgttgagcagccacagggcgtgtgtgcttagggaatgagttca

SEQ ID NO: 19182 - DNA, 122 bp, Homo sapiens
  misc_feature (61)..(62): /note="This region represents a CpG dinucleotide"
  misc_feature (61)..(61): /note="Nucleotide may be methylated to form 5-methylcytosine"
gcttatgattgctttcatatttcatttgatctttattcaaacctatgaagtggctagacccgacagtaaaatcattgctattttacagtctcagaggtattgagtgaccagcctcatgcctc

SEQ ID NO: 19183 - DNA, 122 bp, Homo sapiens
  misc_feature (61)..(62): /note="This region represents a CpG dinucleotide"
  misc_feature (61)..(61): /note="Nucleotide may be methylated to form 5-methylcytosine"
cactttgagttaggaaagtggcccattcatcatttcaatggggctttctgaaccccagcacgacgccatggatttagggctctggctgctacagctttagatccagcctcctcttcctaagt

SEQ ID NO: 19184 - DNA, 122 bp, Homo sapiens
  misc_feature (61)..(62): /note="This region represents a CpG dinucleotide"
  misc_feature (61)..(61): /note="Nucleotide may be methylated to form 5-methylcytosine"
tgtgagtcatacagatccagcaagcacttatcacttcttatcatcagcctatgtggactccgagcttggagaaaacaagcataagggtctaaagcctgaaatgattaataacatagttgaaa

SEQ ID NO: 19185 - DNA, 122 bp, Homo sapiens
  misc_feature (61)..(62): /note="This region represents a CpG dinucleotide"
  misc_feature (61)..(61): /note="Nucleotide may be methylated to form 5-methylcytosine"
caattaattatataacttacacatatgatgagcaatttcttagatgggcagagagagccacggagccagggcccagaccaggcagcatctcaatgctcagatcatacccactgaagggtgaa

SEQ ID NO: 19186 - DNA, 122 bp, Homo sapiens
  misc_feature (61)..(62): /note="This region represents a CpG dinucleotide"
  misc_feature (61)..(61): /note="Nucleotide may be methylated to form 5-methylcytosine"
aacatgtgaaaggagaccttaggtctgttaaggaagaggatgacactacgtgacaacttccgattccagaaacagtctggacttcagggattatatctggggggataaaaagcgcatgcaag

SEQ ID NO: 19187 - DNA, 122 bp, Homo sapiens
  misc_feature (61)..(62): /note="This region represents a CpG dinucleotide"
  misc_feature (61)..(61): /note="Nucleotide may be methylated to form 5-methylcytosine"
tctgtcattatctttccagtcttgtccaaggcagagggcgttcttgccagacagcatgtgcgttccagggtgcttggcagactctctcagtgaaggagcttcggcatgaaaaagtccccatc

SEQ ID NO: 19188 - DNA, 122 bp, Homo sapiens
  misc_feature (61)..(62): /note="This region represents a CpG dinucleotide"
  misc_feature (61)..(61): /note="Nucleotide may be methylated to form 5-methylcytosine"
ttctacccagaatacaaagtgacctttttaaaaatgtaaatcagatcatgtaataccctccggtcccaatttacccttaagaaccagttccttatcaaggcctagaaggtactgcataatcc

SEQ ID NO: 19189 - DNA, 122 bp, Homo sapiens
  misc_feature (61)..(62): /note="This region represents a CpG dinucleotide"
  misc_feature (61)..(61): /note="Nucleotide may be methylated to form 5-methylcytosine"
tcatttcatcttttccagagtttgtgtgtccaatgcatctgagtttgagaataaaccgcacgtattattacaggaagctgtcagtgctgattagaggaaactaacaaagagaaggaggaact

SEQ ID NO: 19190 - DNA, 122 bp, Homo sapiens
  misc_feature (61)..(62): /note="This region represents a CpG dinucleotide"
  misc_feature (61)..(61): /note="Nucleotide may be methylated to form 5-methylcytosine"
gacaaacggaaaatggggcatggcattttgagccctttgccttgagtctctccctagtcacgtgaccacattctgtggactggtgagtgtttcttccccaaccacagggataagaatacaaa

SEQ ID NO: 19191 - DNA, 122 bp, Homo sapiens
  misc_feature (61)..(62): /note="This region represents a CpG dinucleotide"
  misc_feature (61)..(61): /note="Nucleotide may be methylated to form 5-methylcytosine"
gtaacattactctcagtgcatgtttctcttactaccccctattgttggatgtctaaattgcgtctgatttttctctgttccataaaattgaaataaatatctttgtggtgaaagtttttgca

SEQ ID NO: 19192 - DNA, 122 bp, Homo sapiens
  misc_feature (61)..(62): /note="This region represents a CpG dinucleotide"
  misc_feature (61)..(61): /note="Nucleotide may be methylated to form 5-methylcytosine"
tcccctggccctggccctggcctctgcgccctccctgcagagctggtccgggtgggctggcggcctccacccgccacaagcgcacagggctctgcccactccccgccccttttctgctgatc

SEQ ID NO: 19193 - DNA, 122 bp, Homo sapiens
  misc_feature (61)..(62): /note="This region represents a CpG dinucleotide"
  misc_feature (61)..(61): /note="Nucleotide may be methylated to form 5-methylcytosine"
gatgtgtcactgtgtgagatgacaacaggatttgctggaaatgtgggccactattgtatccgccttacgtaaccacatggagtgatggaaatgggtgagcagcccggaatgtaggcggtggc

SEQ ID NO: 19194 - DNA, 122 bp, Homo sapiens
  misc_feature (61)..(62): /note="This region represents a CpG dinucleotide"
  misc_feature (61)..(61): /note="Nucleotide may be methylated to form 5-methylcytosine"
ggagtgataaacaatcatttgggataattgcccgagagcagcctccactctcccagaggccgtggggcagaaattccaagtccctgcctctgagaagggggtcctttggccacctccctccg

SEQ ID NO: 19195 - DNA, 122 bp, Homo sapiens
  misc_feature (61)..(62): /note="This region represents a CpG dinucleotide"
  misc_feature (61)..(61): /note="Nucleotide may be methylated to form 5-methylcytosine"
tctcaataaagctgttacaacaaagaggaagatcaagtgtgtcaaatgccgctgacagggcgaataatgaaatctgagaactgaccactgaatttggcaatgtgctgtttcattttgtagta

SEQ ID NO: 19196 - DNA, 122 bp, Homo sapiens
  misc_feature (61)..(62): /note="This region represents a CpG dinucleotide"
  misc_feature (61)..(61): /note="Nucleotide may be methylated to form 5-methylcytosine"
ttctctctttatgattaagaagtgactgccacttccatgcacatcctaggggttacctaacgtggctctaaaatgtccttggcaaatgttcttactgcttctccaattacattaaactatgg

SEQ ID NO: 19197 - DNA, 122 bp, Homo sapiens
  misc_feature (61)..(62): /note="This region represents a CpG dinucleotide"
  misc_feature (61)..(61): /note="Nucleotide may be methylated to form 5-methylcytosine"
acacttgaacctgggaggtggaagttgcagtgagattgtgccactgcactccagcctgggcggcagagccagactgtctcaaaaacaaccaaccaaccaaaagaacaaaaaacaaaaaacac

SEQ ID NO: 19198 - DNA, 122 bp, Homo sapiens
  misc_feature (61)..(62): /note="This region represents a CpG dinucleotide"
  misc_feature (61)..(61): /note="Nucleotide may be methylated to form 5-methylcytosine"
caaccctgtcctacgcacagcacctactactcatgatacaaatgtggtattaggtcatcacgctttggaagctgtgtcccaccctccacccatcctgtccacagaaaaaaatgtgattataa

SEQ ID NO: 19199 - DNA, 122 bp, Homo sapiens
  misc_feature (61)..(62): /note="This region represents a CpG dinucleotide"
  misc_feature (61)..(61): /note="Nucleotide may be methylated to form 5-methylcytosine"
acccaaagccactcacagatgactgaaggatatttctggtctcattgcccttcatcagtacgatgggaagcagacattgttcaccaccgcatccttaatgaagtatagagattaaatccaaa

SEQ ID NO: 19200 - DNA, 122 bp, Homo sapiens
  misc_feature (61)..(62): /note="This region represents a CpG dinucleotide"
  misc_feature (61)..(61): /note="Nucleotide may be methylated to form 5-methylcytosine"
tcgtcacggtgaccttggaaagcttcccggtgtctgaatcatttccagcaggtgctggtgcgctcacaacatcagaaggggaaggacgtgaagtcatctgagggcagggtgaaatcagcgag

SEQ ID NO: 19201 - DNA, 122 bp, Homo sapiens
  misc_feature (61)..(62): /note="This region represents a CpG dinucleotide"
  misc_feature (61)..(61): /note="Nucleotide may be methylated to form 5-methylcytosine"
ggggacatattgattttctgggttttgctggggttccaccccagagggtctgccttaccccggggagtgggttgggttatgggcagtgctcggaaacctctgggagttgtggctggctcaga

SEQ ID NO: 19202 - DNA, 122 bp, Homo sapiens
  misc_feature (61)..(62): /note="This region represents a CpG dinucleotide"
  misc_feature (61)..(61): /note="Nucleotide may be methylated to form 5-methylcytosine"
acctcaggtgatctgcctgcgtcggcctcccaaagtgtggagatgacaggtgtgagccaccggcctggccagaactaaccacaaatcttgagtttaggatttgggtgtcatagagagaaggt

SEQ ID NO: 19203 - DNA, 122 bp, Homo sapiens
  misc_feature (61)..(62): /note="This region represents a CpG dinucleotide"
  misc_feature (61)..(61): /note="Nucleotide may be methylated to form 5-methylcytosine"
ccccagcaacgttcccgccacctgcccaggccagtgccccgtgcccaaccccagagggtgcgggatgacagactctgacaatcattaaaccagccgggcctgatttcccagcactgcctgct

SEQ ID NO: 19204 - DNA, 122 bp, Homo sapiens
  misc_feature (61)..(62): /note="This region represents a CpG dinucleotide"
  misc_feature (61)..(61): /note="Nucleotide may be methylated to form 5-methylcytosine"
gagactgtttctgtttgagttgcaaaagctgcaaactggattcaactgttgttcctggaacgacctgccactgcaggatgaaagagtgcttccagagagacataggaataacaagcagaaaa

SEQ ID NO: 19205 - DNA, 122 bp, Homo sapiens
  misc_feature (61)..(62): /note="This region represents a CpG dinucleotide"
  misc_feature (61)..(61): /note="Nucleotide may be methylated to form 5-methylcytosine"
tgttctcagacagggatttaagccttctggtctgactcatttttaccctggctgcaaacacgtagctcctccctggccatctcaaactctgagcactgagagagaaaaccagcatcaagaat

SEQ ID NO: 19206 - DNA, 122 bp, Homo sapiens
  misc_feature (61)..(62): /note="This region represents a CpG dinucleotide"
  misc_feature (61)..(61): /note="Nucleotide may be methylated to form 5-methylcytosine"
gaatgggaatagatattttaggaaatgcttcataggtagcgatgcctgagctgggtcttacgaaagtatggatatttgccagggagacaagaagtaaaggtagcttacagaaagagagaagg

SEQ ID NO: 19207 - DNA, 122 bp, Homo sapiens
  misc_feature (61)..(62): /note="This region represents a CpG dinucleotide"
  misc_feature (61)..(61): /note="Nucleotide may be methylated to form 5-methylcytosine"
tggaaaggcttcataaatctcacagggaattcctttcaacaaggactgtcagcaaaaatccgtaaataaccttctgccagcctctagcaatcacctccaccacgttctttttccttcctgct

SEQ ID NO: 19208 - DNA, 122 bp, Homo sapiens
  misc_feature (61)..(62): /note="This region represents a CpG dinucleotide"
  misc_feature (61)..(61): /note="Nucleotide may be methylated to form 5-methylcytosine"
tccttacacacaaaaggctcagtgcattaaatatttgcctatcacctgtgtgctgtgtaccgtggccatgcctcgctctgcactatgaacaactcagacctgtcccttcacggtctgattag

SEQ ID NO: 19209 - DNA, 122 bp, Homo sapiens
  misc_feature (61)..(62): /note="This region represents a CpG dinucleotide"
  misc_feature (61)..(61): /note="Nucleotide may be methylated to form 5-methylcytosine"
actacgtccgagacagcgattttggggagcacacagggaggggacttcatctgggaggaacgcattattaggctgctgtgacaggtgtgtgggcgtggaccatctctgtacctttgtatatg

SEQ ID NO: 19210 - DNA, 122 bp, Homo sapiens
  misc_feature (61)..(62): /note="This region represents a CpG dinucleotide"
  misc_feature (61)..(61): /note="Nucleotide may be methylated to form 5-methylcytosine"
ctttgtattgcactctagtgaaaaccagccggaccagcagggggtggcacagaaaagaggcgagaatgtgagattaatagagtgctagcaagacaacagaaaatcccaggcagcagtttcac

SEQ ID NO: 19211 - DNA, 122 bp, Homo sapiens
  misc_feature (61)..(62): /note="This region represents a CpG dinucleotide"
  misc_feature (61)..(61): /note="Nucleotide may be methylated to form 5-methylcytosine"
ttgcctcatttttctcctaactggaagtgacaaggcaggcagctctagcctcatgacaagcgtggtggctcacgcctgtaatcccagcactttgggaggccgaagcaggtggattacctgag

SEQ ID NO: 19212 - DNA, 122 bp, Homo sapiens
  misc_feature (61)..(62): /note="This region represents a CpG dinucleotide"
  misc_feature (61)..(61): /note="Nucleotide may be methylated to form 5-methylcytosine"
atgtggcctggctttgttgttttcagtatgtcacatccacagttttgttttcaatggaaacgtgttaacactgagttgaaagttagggacctgggttttaagtcatggctctgacactaact

SEQ ID NO: 19213 - DNA, 122 bp, Homo sapiens
  misc_feature (61)..(62): /note="This region represents a CpG dinucleotide"
  misc_feature (61)..(61): /note="Nucleotide may be methylated to form 5-methylcytosine"
tggagccaggaaggcttctcctggaggcagccccaggccaccagacatgggcggccacaccgtggtagcaggctgcagtcaccctggccagagctgacaaagtggctggaaaatgaggggag

SEQ ID NO: 19214 - DNA, 122 bp, Homo sapiens
  misc_feature (61)..(62): /note="This region represents a CpG dinucleotide"
  misc_feature (61)..(61): /note="Nucleotide may be methylated to form 5-methylcytosine"
agctgagttcacacctgtaactgtttggaacggctcctgcagcaaggcagggctcggtaacggtcgctcattatttctgtagcatggtccgctggcttagtgcaggcaaacgggtctgggtc

SEQ ID NO: 19215 - DNA, 122 bp, Homo sapiens
  misc_feature (61)..(62): /note="This region represents a CpG dinucleotide"
  misc_feature (61)..(61): /note="Nucleotide may be methylated to form 5-methylcytosine"
ttgccctggtttccttttgtcactgtgtggtagaatgctgactcaccaacttacaggatacggcaattttccattgcagaatccattatgttgcaatagtaaacgctgaaagatttcataga

SEQ ID NO: 19216 - DNA, 122 bp, Homo sapiens
  misc_feature (61)..(62): /note="This region represents a CpG dinucleotide"
  misc_feature (61)..(61): /note="Nucleotide may be methylated to form 5-methylcytosine"
gggctccacgcacctggagcagagccagacacgcacaggaaactctccctgaagtgctcacgaggtgaggtgcgtgagggcaccgcagagagcaggacggcctgactcacgggacttctgtg

SEQ ID NO: 19217 - DNA, 122 bp, Homo sapiens
  misc_feature (61)..(62): /note="This region represents a CpG dinucleotide"
  misc_feature (61)..(61): /note="Nucleotide may be methylated to form 5-methylcytosine"
caacacttgtaactgttcagaatgcacagtaccaaactgaattctaataagcaatcttaacgcaggataggtattattataagcattttacagaagaggaaactgaggttcagagtgattta

SEQ ID NO: 19218 - DNA, 122 bp, Homo sapiens
  misc_feature (61)..(62): /note="This region represents a CpG dinucleotide"
  misc_feature (61)..(61): /note="Nucleotide may be methylated to form 5-methylcytosine"
gaaattggggttatctaatgttaacctaaaagcaactcaagagacacaggctcggccaggcgcagtggctcatgcctgtaatcccagtactttgggaggctgaggcagatggatcacttgag

SEQ ID NO: 19219 - DNA, 122 bp, Homo sapiens
  misc_feature (61)..(62): /note="This region represents a CpG dinucleotide"
  misc_feature (61)..(61): /note="Nucleotide may be methylated to form 5-methylcytosine"
aaagtctggaagtcacaactagcccccagtgtgcagcatgtgaaaacagtgaggcagggccggctctttttctttctctgtttatgcaaatacctggctcagcttctgtggggttaatgggc

SEQ ID NO: 19220 - DNA, 122 bp, Homo sapiens
  misc_feature (61)..(62): /note="This region represents a CpG dinucleotide"
  misc_feature (61)..(61): /note="Nucleotide may be methylated to form 5-methylcytosine"
cctgacctctccttccaggtggacttacacactgggctgtcggagttctcggtgacgcagcgccggctggcccatggctggaatgagtttgttgctgacaacagcgaacctgtgtggaagaa

SEQ ID NO: 19221 - DNA, 122 bp, Homo sapiens
  misc_feature (61)..(62): /note="This region represents a CpG dinucleotide"
  misc_feature (61)..(61): /note="Nucleotide may be methylated to form 5-methylcytosine"
tacggtctgagcactgcactctcagctacttcatggaaagcacacatttctactgagactcgcacacgaatgttcacggcagctgcaagtgtgctggtcagaaaggagagaacctgcacacc

SEQ ID NO: 19222 - DNA, 122 bp, Homo sapiens
  misc_feature (61)..(62): /note="This region represents a CpG dinucleotide"
  misc_feature (61)..(61): /note="Nucleotide may be methylated to form 5-methylcytosine"
ctttcctgttcattttatatgagtatttcaaaattgttagttaccacgaatgactaagtgcggggatagggtatttttgctggaattgttgcactgcacagcctgtaacaacacagggggtc

SEQ ID NO: 19223 - DNA, 122 bp, Homo sapiens
  misc_feature (61)..(62): /note="This region represents a CpG dinucleotide"
  misc_feature (61)..(61): /note="Nucleotide may be methylated to form 5-methylcytosine"
gggtcccagtagtgaacctgttacctgcttttccatctcccgtatctgttccaggcaagccgcctgcttctcctccagcttctcctggtgcctctccaagttctccgtcatctgggtgggag

SEQ ID NO: 19224 - DNA, 122 bp, Homo sapiens
  misc_feature (61)..(62): /note="This region represents a CpG dinucleotide"
  misc_feature (61)..(61): /note="Nucleotide may be methylated to form 5-methylcytosine"
ccaatcgtgttttcccgaattaaaaagcttttgctggctgtacatcttcacagaatataccgaatgaaattataggttctgaccctgctgaccttccagcctttactttcaccacttgcctc

SEQ ID NO: 19225 - DNA, 122 bp, Homo sapiens
  misc_feature (61)..(62): /note="This region represents a CpG dinucleotide"
  misc_feature (61)..(61): /note="Nucleotide may be methylated to form 5-methylcytosine"
aaagattaactccatacctttctgaaacttttcacaaatgaaaagagtcatttccttagtcgtgtgaggacatattgtcatgttgaaacccagggaaagcatatgctaccttaggaagagga

SEQ ID NO: 19226 - DNA, 122 bp, Homo sapiens
  misc_feature (61)..(62): /note="This region represents a CpG dinucleotide"
  misc_feature (61)..(61): /note="Nucleotide may be methylated to form 5-methylcytosine"
acgtcatagcccatgccttcaggctatttgcattgcatatgggggaatgaaagaagtaaacgtctatgatacagtagaatgtatcacattatgagcacaaggcaggaaataatgataaatga

SEQ ID NO: 19227 - DNA, 122 bp, Homo sapiens
  misc_feature (61)..(62): /note="This region represents a CpG dinucleotide"
  misc_feature (61)..(61): /note="Nucleotide may be methylated to form 5-methylcytosine"
acctcccccaggatccatagggacaggaagttgctaaaaatacccccaaactcaggtggacgaggctccaccagaaacgtgatctggagagcagtcccacagccacaggacaggtggcactg

SEQ ID NO: 19228 - DNA, 122 bp, Homo sapiens
  misc_feature (61)..(62): /note="This region represents a CpG dinucleotide"
  misc_feature (61)..(61): /note="Nucleotide may be methylated to form 5-methylcytosine"
tgattataaaacattgcgcttctcatttcctttcccttcctgctactctcaactaacccacgctatcacttgacaggcatgtgaataggataaagtaaatctgggcagcaccacaggcagga

SEQ ID NO: 19229 - DNA, 122 bp, Homo sapiens
  misc_feature (61)..(62): /note="This region represents a CpG dinucleotide"
  misc_feature (61)..(61): /note="Nucleotide may be methylated to form 5-methylcytosine"
ctcactctcaaaatgattcattctatcccttcttcagactgcagtagcccttatgaagtacgtttcataggagtccatgtttggtgaaaaatggttcactataacttttacctgttgatcct

SEQ ID NO: 19230 - DNA, 122 bp, Homo sapiens
  misc_feature (61)..(62): /note="This region represents a CpG dinucleotide"
  misc_feature (61)..(61): /note="Nucleotide may be methylated to form 5-methylcytosine"
gtaatatcagatgtaacctcttgagagagttgtaattgagaagatgtgttgttagtgacacgtcacggaaaatgactcaactgtggcaaaggtgagtctcaagacatgatgcaaacaaaagg

SEQ ID NO: 19231 - DNA, 122 bp, Homo sapiens
  misc_feature (61)..(62): /note="This region represents a CpG dinucleotide"
  misc_feature (61)..(61): /note="Nucleotide may be methylated to form 5-methylcytosine"
gcaagagcagctgtcattgcttttttcctggtcttagagggatcatgtgcaattaggatccgtcaagtatgatgctagctgtagagttgttcgatgtgctttctgtcagattgaggaaattc

SEQ ID NO: 19232 - DNA, 122 bp, Homo sapiens
  misc_feature (61)..(62): /note="This region represents a CpG dinucleotide"
  misc_feature (61)..(61): /note="Nucleotide may be methylated to form 5-methylcytosine"
atgagctgtgtggtcctgggaaagccttggtgtcctcttttacctgcacagtgagggtgacggtcgtgttacctcctgaggccacctttcagctttgccattctgtcatttgacaaagactg

SEQ ID NO: 19233 - DNA, 122 bp, Homo sapiens
  misc_feature (61)..(62): /note="This region represents a CpG dinucleotide"
  misc_feature (61)..(61): /note="Nucleotide may be methylated to form 5-methylcytosine"
tccaattgtgacaaccggaaatgtctctaagaattgccaaatgcctagtgaaatcatcctcgctccacttttggcaaccactgtttcacatgatacctgtttttttgaggtgctttagtatt

SEQ ID NO: 19234 - DNA, 122 bp, Homo sapiens
  misc_feature (61)..(62): /note="This region represents a CpG dinucleotide"
  misc_feature (61)..(61): /note="Nucleotide may be methylated to form 5-methylcytosine"
aaatactctgttacatcacaaacagcataagacagagtgaaaaagcagttccaaaattaacgtaaagaaatagcaatcgagagccatgcaaaagctgaaagagcagcacaaatttaataagc

SEQ ID NO: 19235 - DNA, 122 bp, Homo sapiens
  misc_feature (61)..(62): /note="This region represents a CpG dinucleotide"
  misc_feature (61)..(61): /note="Nucleotide may be methylated to form 5-methylcytosine"
ttcaggggatttcagcccgactcagcactgttgatgttgttatgtgaatttgttctatgacggttttgatggtcttgggattagccactaaacacacctggtgttctgtttactctggcaag

SEQ ID NO: 19236 - DNA, 122 bp, Homo sapiens
  misc_feature (61)..(62): /note="This region represents a CpG dinucleotide"
  misc_feature (61)..(61): /note="Nucleotide may be methylated to form 5-methylcytosine"
tccacactaagtctgggaagaagctcgcagagtcagcaggatcttcaaccctgtcaaggtcgggtgagtttcttgccttgagcagatctgtcagttctgtcacattgctgagatgcaattaa

SEQ ID NO: 19237 - DNA, 122 bp, Homo sapiens
  misc_feature (61)..(62): /note="This region represents a CpG dinucleotide"
  misc_feature (61)..(61): /note="Nucleotide may be methylated to form 5-methylcytosine"
actatgatcatggctctagttgccaggcctaactccacaacacctctgtcatgtaacaggcggccctgatgtggcacacacaagagaactccgcccccgcaactcccagagcctcaactctc

SEQ ID NO: 19238 - DNA, 122 bp, Homo sapiens
  misc_feature (61)..(62): /note="This region represents a CpG dinucleotide"
  misc_feature (61)..(61): /note="Nucleotide may be methylated to form 5-methylcytosine"
cacaccatgtgcacacacacagtcctgtctatgagaccttggacaagtcatttaaccttccggagcctactaaaaacaatcattttctcatgagtttgacttgaggagatcccacaggaagt

SEQ ID NO: 19239 - DNA, 122 bp, Homo sapiens
  misc_feature (61)..(62): /note="This region represents a CpG dinucleotide"
  misc_feature (61)..(61): /note="Nucleotide may be methylated to form 5-methylcytosine"
cagaatctctacctgcaggccacacccagctccacctcagatatgtagtgagtgaccacacgtgtgggttggagtcccacccaaagctccctggaccctagaaggcatagggtgggggcagt

SEQ ID NO: 19240 - DNA, 122 bp, Homo sapiens
  misc_feature (61)..(62): /note="This region represents a CpG dinucleotide"
  misc_feature (61)..(61): /note="Nucleotide may be methylated to form 5-methylcytosine"
cgctcagatcagtaatttgtctcctctgatcttgtgggccccacccaggaactgagtcagcgcaagaagacaggttcgactccctatgatttcatccctgaccagtcaccactcctggccca

SEQ ID NO: 19241 - DNA, 122 bp, Homo sapiens
  misc_feature (61)..(62): /note="This region represents a CpG dinucleotide"
  misc_feature (61)..(61): /note="Nucleotide may be methylated to form 5-methylcytosine"
agctgtgccttttaatatttaatgccattgctgcaaacgccgctccacgctgactgcatccgtgccaggctcattcctctcagggcgccaattcccggcttggagaccagctgacaaatctt

SEQ ID NO: 19242 - DNA, 122 bp, Homo sapiens
  misc_feature (61)..(62): /note="This region represents a CpG dinucleotide"
  misc_feature (61)..(61): /note="Nucleotide may be methylated to form 5-methylcytosine"
gccccaggactgcagtggggagtctttctttgccgatggacttcgaaaatcatcaccccccgcattttttgtggttaaccacagctagccaggaactcagggcttctcatcagcagaggcct

SEQ ID NO: 19243 - DNA, 122 bp, Homo sapiens
  misc_feature (61)..(62): /note="This region represents a CpG dinucleotide"
  misc_feature (61)..(61): /note="Nucleotide may be methylated to form 5-methylcytosine"
aaggccccgtattccgaggtgggctcagggccatggccagggctgcgtattcagatgtggcgtttggatttcccgttacgagctaaagtatttttgtggttttagtgctgacatcaaatggc

SEQ ID NO: 19244 - DNA, 122 bp, Homo sapiens
  misc_feature (61)..(62): /note="This region represents a CpG dinucleotide"
  misc_feature (61)..(61): /note="Nucleotide may be methylated to form 5-methylcytosine"
ggaaagttattgttcatagagcttttgcgagcttgccacctctgccattgataccaggcacgccatattttgtagagccagctttatttttattttgaagtggcttccccctttctgaaaag

SEQ ID NO: 19245 - DNA, 122 bp, Homo sapiens
  misc_feature (61)..(62): /note="This region represents a CpG dinucleotide"
  misc_feature (61)..(61): /note="Nucleotide may be methylated to form 5-methylcytosine"
tcccttcccatgctcattactcagcagccttctaaagtaaataatcatgggcttttactgcgtaatcagattagcacagtaaatggtggaaaaataacattattgattgaaaagttggttaa

SEQ ID NO: 19246 - DNA, 122 bp, Homo sapiens
  misc_feature (61)..(62): /note="This region represents a CpG dinucleotide"
  misc_feature (61)..(61): /note="Nucleotide may be methylated to form 5-methylcytosine"
atatcttttaagcagagactcaaacactcaactctatactgaaaagcgacatctagatgacgtgactcaactctgtactgaaaagcgacatctggatgatgtgacacacagggatctgaaac

SEQ ID NO: 19247 - DNA, 122 bp, Homo sapiens
  misc_feature (61)..(62): /note="This region represents a CpG dinucleotide"
  misc_feature (61)..(61): /note="Nucleotide may be methylated to form 5-methylcytosine"
aaaaacagacttgcattcattaaggaacagagcgcccctgtgctcttgggggccgccctccggccaggcctgctaagtgagggggcctgcagacaggctgagccgctcagacgcccccactc

SEQ ID NO: 19248 - DNA, 122 bp, Homo sapiens
  misc_feature (61)..(62): /note="This region represents a CpG dinucleotide"
  misc_feature (61)..(61): /note="Nucleotide may be methylated to form 5-methylcytosine"
acaaggggatttttctgtttagctcactgctgtagctccagtgcctatgacagtgcttggcgcatagtaggtactcaataaacacttttgaataaataacccccgaattcatttctatggta

SEQ ID NO: 19249 - DNA, 122 bp, Homo sapiens
  misc_feature (61)..(62): /note="This region represents a CpG dinucleotide"
  misc_feature (61)..(61): /note="Nucleotide may be methylated to form 5-methylcytosine"
tggaggccggtgtgagagcggcggcggggcctacctgtgcgtctgcccagagagcttcttcggctaccactgcgagacaggtagggcggcaggcctgcctgctccccgccctctgcccgcct

SEQ ID NO: 19250 - DNA, 122 bp, Homo sapiens
  misc_feature (61)..(62): /note="This region represents a CpG dinucleotide"
  misc_feature (61)..(61): /note="Nucleotide may be methylated to form 5-methylcytosine"
aaagatagatttctagatatttaaatgatgaattctagatatttttctgccttgcatagacgcagaggtagcttttaaccatctggaaatgttacataacacactgtggtcagtgacatttt

SEQ ID NO: 19251 - DNA, 122 bp, Homo sapiens
  misc_feature (61)..(62): /note="This region represents a CpG dinucleotide"
  misc_feature (61)..(61): /note="Nucleotide may be methylated to form 5-methylcytosine"
tgaggatctggaaagggcaggcattgtggtagcaagaaagaggaaacctggaactaaacacgcaaaagcctaggccatcccctgggaccatcctgcacagggccttttcatctttgtggttc

SEQ ID NO: 19252 - DNA, 122 bp, Homo sapiens
  misc_feature (61)..(62): /note="This region represents a CpG dinucleotide"
  misc_feature (61)..(61): /note="Nucleotide may be methylated to form 5-methylcytosine"
tgctggttaacaaggaaatcctatgtcaattatcgccaacaacttcctgctgcgaagcagcggggaatcaaagcgtttgagagccttttcacacccgagagtggtgcagggcctaattaaat

SEQ ID NO: 19253 - DNA, 122 bp, Homo sapiens
  misc_feature (61)..(62): /note="This region represents a CpG dinucleotide"
  misc_feature (61)..(61): /note="Nucleotide may be methylated to form 5-methylcytosine"
agtgctggagacacacgtgatcgttggactcctgggcaatcctaattgcctcctgcagggcgagctctgcctgttgactaatgacagactaaacattaatatcccattaataatcacaaaca

SEQ ID NO: 19254 - DNA, 122 bp, Homo sapiens
  misc_feature (61)..(62): /note="This region represents a CpG dinucleotide"
  misc_feature (61)..(61): /note="Nucleotide may be methylated to form 5-methylcytosine"
tgtgatgagtgtgcagagcagggggtgggaagactgtgactgcagcctaaggcttggaagcgggtgactagactcaagactctgcatgtatgagatgttttggaattccaaccgttcttttt

SEQ ID NO: 19255 - DNA, 122 bp, Homo sapiens
  misc_feature (61)..(62): /note="This region represents a CpG dinucleotide"
  misc_feature (61)..(61): /note="Nucleotide may be methylated to form 5-methylcytosine"
tattaacgttattattaggatgattaattgaagcgccttccactcccccccatcccccaccgatatcttacaagatggagcagttatgcaatttctgggcagactgatgtaagcattgaaac

SEQ ID NO: 19256 - DNA, 122 bp, Homo sapiens
  misc_feature (61)..(62): /note="This region represents a CpG dinucleotide"
  misc_feature (61)..(61): /note="Nucleotide may be methylated to form 5-methylcytosine"
tcacgaatgggttgtgagtttcagtgcagacttccttatagactcttgggctgggcctaccggtcctctataacctggtcctgtcagcttctgccctcatctccaaaccctgcaataaaagg

SEQ ID NO: 19257 - DNA, 122 bp, Homo sapiens
  misc_feature (61)..(62): /note="This region represents a CpG dinucleotide"
  misc_feature (61)..(61): /note="Nucleotide may be methylated to form 5-methylcytosine"
tcctctgaaggctgagacgtgcggccttgcctcggctttgcctgcttgtaagacacagtccgcactctctacctccaaggaaccccggggttcctcctgcccggcttcaccctcctatttcc

SEQ ID NO: 19258 - DNA, 122 bp, Homo sapiens
  misc_feature (61)..(62): /note="This region represents a CpG dinucleotide"
  misc_feature (61)..(61): /note="Nucleotide may be methylated to form 5-methylcytosine"
ccggagtgatggatgcggcaggagtgttcaagcagtgcctctcccatctgcagcttcgtccggtttccagtcaagcactactgcacgcccagcaccccagctcctccaccattcctctgcct

SEQ ID NO: 19259 - DNA, 122 bp, Homo sapiens
  misc_feature (61)..(62): /note="This region represents a CpG dinucleotide"
  misc_feature (61)..(61): /note="Nucleotide may be methylated to form 5-methylcytosine"
tgggctgggagaacactgggaatgtggtgcctccacttcctcacatcatcttctcctccccgagtcccctccactgacactcatttgaagacaggttatgaacaggaaacaggaaccaatgc

SEQ ID NO: 19260 - DNA, 122 bp, Homo sapiens
  misc_feature (61)..(62): /note="This region represents a CpG dinucleotide"
  misc_feature (61)..(61): /note="Nucleotide may be methylated to form 5-methylcytosine"
ttctcaggagcagcaccaatacatatttgctgagtaaacagactcaggttttgtgtattacgccaagcacccagccagctgcgtggcagagcttcctgtttatgtccctgtggctggcagat

SEQ ID NO: 19261 - DNA, 122 bp, Homo sapiens
  misc_feature (61)..(62): /note="This region represents a CpG dinucleotide"
  misc_feature (61)..(61): /note="Nucleotide may be methylated to form 5-methylcytosine"
acttggcccaggactatccagagtctcatgtttagtcacaagaggggctggggcaatccacgagctccacttcaagttgtcaaaggaagtttcttggaaatcacagattattagtcatccaa

SEQ ID NO: 19262 - DNA, 122 bp, Homo sapiens
  misc_feature (61)..(62): /note="This region represents a CpG dinucleotide"
  misc_feature (61)..(61): /note="Nucleotide may be methylated to form 5-methylcytosine"
agcagaatacatatatattgacacctttctgttcctctatttcatcactcagaaaaggcacgcatttgcttttcacagaaacctggaaaacagcattcctggaaaaacgattctttgtgtac

SEQ ID NO: 19263 - DNA, 122 bp, Homo sapiens
  misc_feature (61)..(62): /note="This region represents a CpG dinucleotide"
  misc_feature (61)..(61): /note="Nucleotide may be methylated to form 5-methylcytosine"
agagaaacctattaatgggtctgacttgatttaaattagccacagcaagatcaaaccaatcggaagatcacattccttccattaagtactgatgactaactcccaagacaaaacacttctaa

SEQ ID NO: 19264 - DNA, 122 bp, Homo sapiens
  misc_feature (61)..(62): /note="This region represents a CpG dinucleotide"
  misc_feature (61)..(61): /note="Nucleotide may be methylated to form 5-methylcytosine"
tccacacccgctcaacactgcagtgcagccattgctgtgtgcttctgatctcggtgagttcgcatgctcaagaagtctttggcacagagtttacgacctcaggctctccagttcaatgggcc

SEQ ID NO: 19265 - DNA, 122 bp, Homo sapiens
  misc_feature (61)..(62): /note="This region represents a CpG dinucleotide"
  misc_feature (61)..(61): /note="Nucleotide may be methylated to form 5-methylcytosine"
tgcaatgccggccaacttccaaattctgattttaaaaaaaaaaaaagccaaagcctgcatcgctaagcctaacagtcaacaaaaagaaagcagaatgaagacaagaaagcggtaagaaatgg

SEQ ID NO: 19266 - DNA, 122 bp, Homo sapiens
  misc_feature (61)..(62): /note="This region represents a CpG dinucleotide"
  misc_feature (61)..(61): /note="Nucleotide may be methylated to form 5-methylcytosine"
ggtccccaagacttggggctcctctgctctcttgtgagtgttggagtctgaggcggggcccgtggacaaggcagtttctgcgtctcttggccacagctgcttggggaagtgttttcattgca

SEQ ID NO: 19267 - DNA, 122 bp, Homo sapiens
  misc_feature (61)..(62): /note="This region represents a CpG dinucleotide"
  misc_feature (61)..(61): /note="Nucleotide may be methylated to form 5-methylcytosine"
tcctactagggaaaccaaggaccaattcttaagaaattgcatactggctacattctccatcgtgtcatcccttcggttaaaaagacttctgattgaaactccacctcttgagttcatgactc

SEQ ID NO: 19268 - DNA, 122 bp, Homo sapiens
  misc_feature (61)..(62): /note="This region represents a CpG dinucleotide"
  misc_feature (61)..(61): /note="Nucleotide may be methylated to form 5-methylcytosine"
gtggtttctctcgtcctctaagaacactcctgttggacgagtgggaagaatgactaacatcggtcacaatctttgagcacttaatgctgtgcatgtcacactctgacctgctgacaaatgtg

SEQ ID NO: 19269 - DNA, 122 bp, Homo sapiens
  misc_feature (61)..(62): /note="This region represents a CpG dinucleotide"
  misc_feature (61)..(61): /note="Nucleotide may be methylated to form 5-methylcytosine"
atggcgctgcagtacacactaatcaaccatgaccatgagtgtgagtgtaagcgtgcctggcgctgcagtacacactaatcaaccatgacgctgccatcataaggggtggctgagagtttgtc

SEQ ID NO: 19270 - DNA, 122 bp, Homo sapiens
  misc_feature (61)..(62): /note="This region represents a CpG dinucleotide"
  misc_feature (61)..(61): /note="Nucleotide may be methylated to form 5-methylcytosine"
tatctagttaccagttgcatctggctcagcctctgtgagctggtctgggagagagggtggcggtcaaaagtgagtaaaagtggaaagagcagtttccttaaagactctgttgagggcagtgt

SEQ ID NO: 19271 - DNA, 122 bp, Homo sapiens
  misc_feature (61)..(62): /note="This region represents a CpG dinucleotide"
  misc_feature (61)..(61): /note="Nucleotide may be methylated to form 5-methylcytosine"
aagacatgttgaagttctaactcccagtaccttagaatgcacccttttcggagatagggtcgttacagaggtgatcaaatgaagatgaggctatcagggtgtgtcctaatcttctatgatga

SEQ ID NO: 19272 - DNA, 122 bp, Homo sapiens
  misc_feature (61)..(62): /note="This region represents a CpG dinucleotide"
  misc_feature (61)..(61): /note="Nucleotide may be methylated to form 5-methylcytosine"
atctttaaaaggtggatgaaatattatttacagcatgaagccttctataaatagggtggacggccttaccacataaaaacccaggacacacagctgaatttgaatttcagataaacagtgct

SEQ ID NO: 19273 - DNA, 122 bp, Homo sapiens
  misc_feature (61)..(62): /note="This region represents a CpG dinucleotide"
  misc_feature (61)..(61): /note="Nucleotide may be methylated to form 5-methylcytosine"
tggctgctggaaggggaagagaagcagctggggttaggtgggaggaactaagtttagagacgctaaaagtgtatgtagcaggagtcacctgatcaggttgaactgcagcaggaacaaggaag

SEQ ID NO: 19274 - DNA, 122 bp, Homo sapiens
  misc_feature (61)..(62): /note="This region represents a CpG dinucleotide"
  misc_feature (61)..(61): /note="Nucleotide may be methylated to form 5-methylcytosine"
cttctagtcagagaaccagagtgatcatccactggtacataagcgccttcggagagcgagcgtgtcttttcctcttttcttctttttttccttcaaagtatgcttgactggggaggtagggt

SEQ ID NO: 19275 - DNA, 122 bp, Homo sapiens
  misc_feature (61)..(62): /note="This region represents a CpG dinucleotide"
  misc_feature (61)..(61): /note="Nucleotide may be methylated to form 5-methylcytosine"
cagttatcttttctccaaccactcatttatttcctcatctccctcccctcctttcagctacgattacgatgatgagtaagatggactaaatactcagtatttacaatctagtcgaggctgag

SEQ ID NO: 19276 - DNA, 122 bp, Homo sapiens
  misc_feature (61)..(62): /note="This region represents a CpG dinucleotide"
  misc_feature (61)..(61): /note="Nucleotide may be methylated to form 5-methylcytosine"
cttgttagaaatgcaaattcttgcgccctatcccagacctactatatcagcaactcttagcgggtggggagggtagggctgagctctgtaagtcatactgaagttgagacccactggtctat

SEQ ID NO: 19277 - DNA, 122 bp, Homo sapiens
  misc_feature (61)..(62): /note="This region represents a CpG dinucleotide"
  misc_feature (61)..(61): /note="Nucleotide may be methylated to form 5-methylcytosine"
ttatctaggttttttttttgtttgcttgttttttttttttacaggagtgtcaggcagatgcgtttgttttggtaatggttgcacaactctgtgccggtagctaaaagccattaaattatgta

SEQ ID NO: 19278 - DNA, 122 bp, Homo sapiens
  misc_feature (61)..(62): /note="This region represents a CpG dinucleotide"
  misc_feature (61)..(61): /note="Nucleotide may be methylated to form 5-methylcytosine"
aggatgcatctgttggtaccatcttcctccccttccctcctccactcacacccccctccccgccaataactgcttcatgcagtagctcagatccctgtttggcttgacctattaaggtcaaa

SEQ ID NO: 19279 - DNA, 122 bp, Homo sapiens
  misc_feature (61)..(62): /note="This region represents a CpG dinucleotide"
  misc_feature (61)..(61): /note="Nucleotide may be methylated to form 5-methylcytosine"
cctcttaattggacttacagttccacattgctggggaggcctcagaatcacggtgggaggcgaaaggctttctcacatggcagtggcaagagaaaataaggaagatgcaaaagcggagcccc

SEQ ID NO: 19280 - DNA, 122 bp, Homo sapiens
  misc_feature (61)..(62): /note="This region represents a CpG dinucleotide"
  misc_feature (61)..(61): /note="Nucleotide may be methylated to form 5-methylcytosine"
cattgacttcaggagtccagcttcactaatttatctagggcttcctggttttccagttcccgtcatcaaagcactcagggcaccctacaaccgaaatttcccttcccaagggaattctcctg

SEQ ID NO: 19281 - DNA, 122 bp, Homo sapiens
  misc_feature (61)..(62): /note="This region represents a CpG dinucleotide"
  misc_feature (61)..(61): /note="Nucleotide may be methylated to form 5-methylcytosine"
tgcacttaacctctgtgaactttaagattccttatctacaaaataggttaatagtactaacgactccagtggatttatgtgcaagtcacctcaattctgtaaggtaaggagtatcactccct

SEQ ID NO: 19282 - DNA, 122 bp, Homo sapiens
  misc_feature (61)..(62): /note="This region represents a CpG dinucleotide"
  misc_feature (61)..(61): /note="Nucleotide may be methylated to form 5-methylcytosine"
cctggccaggaaagcccttctcctcctgattttctcagggctgaaaatatgaggtctccccgcaaggggccttccctgaagcccagctcatgtcccacccagtttctcagtccctcttgagg

SEQ ID NO: 19283 - DNA, 122 bp, Homo sapiens
  misc_feature (61)..(62): /note="This region represents a CpG dinucleotide"
  misc_feature (61)..(61): /note="Nucleotide may be methylated to form 5-methylcytosine"
aaaaaatgtgataataaaaaatgtaacacaaatgttataggagctcagatgtagggtaaacgaggtgacaaggaaatcggctctgctgaattttctgagaaaaaaattgtcccctatcaatg

SEQ ID NO: 19284 - DNA, 122 bp, Homo sapiens
  misc_feature (61)..(62): /note="This region represents a CpG dinucleotide"
  misc_feature (61)..(61): /note="Nucleotide may be methylated to form 5-methylcytosine"
ttacttgcttatgtatcccgactcctgacgaggtacctgaaatatagtaagctagttgagcgaatggtgatagctgtcaccattgccagtgattaacagagcaagtttccctagttatgtga

SEQ ID NO: 19285 - DNA, 122 bp, Homo sapiens
  misc_feature (61)..(62): /note="This region represents a CpG dinucleotide"
  misc_feature (61)..(61): /note="Nucleotide may be methylated to form 5-methylcytosine"
tggcttttttaaatgaaaacagtttctactccttccttccctcccacacacactttctcacgagcagatacatacttacatgaaactctctgacctcttgtggatccacatattttgggcat

SEQ ID NO: 19286 - DNA, 122 bp, Homo sapiens
  misc_feature (61)..(62): /note="This region represents a CpG dinucleotide"
  misc_feature (61)..(61): /note="Nucleotide may be methylated to form 5-methylcytosine"
catctcaactcttatgataaattagtacagtgcctagaacaagaaaaagcacttaataagcggtatctaattttactaggatgtgaacgtcagcaaggttaaaggatgatttaagggatgtt

SEQ ID NO: 19287 - DNA, 122 bp, Homo sapiens
  misc_feature (61)..(62): /note="This region represents a CpG dinucleotide"
  misc_feature (61)..(61): /note="Nucleotide may be methylated to form 5-methylcytosine"
ggagggaaggaaagttgcaaccctcaagcccagaggcttaatttgtatgatgctagttaacgatgttctctggcctgacatttgctgctgcttggaagccaaccagaaaggtatggggttgc

SEQ ID NO: 19288 - DNA, 122 bp, Homo sapiens
  misc_feature (61)..(62): /note="This region represents a CpG dinucleotide"
  misc_feature (61)..(61): /note="Nucleotide may be methylated to form 5-methylcytosine"
tgttttggtggcaggcaagtgtctgtggtcaggagccatggagactcgtgccacggactgcgaagccacccagccatctggcccaagctcctgtgaccggaagagcttgttttgccctgttc

SEQ ID NO: 19289 - DNA, 122 bp, Homo sapiens
  misc_feature (61)..(62): /note="This region represents a CpG dinucleotide"
  misc_feature (61)..(61): /note="Nucleotide may be methylated to form 5-methylcytosine"
acaaaagaaaatttgcatctgactgctcttaactacacaagggaatcaggcttaacaacacgctcagcagctgtgtgactatggccaatttgcttaagctctgtgcttcagtttcctactgc

SEQ ID NO: 19290 - DNA, 122 bp, Homo sapiens
  misc_feature (61)..(62): /note="This region represents a CpG dinucleotide"
  misc_feature (61)..(61): /note="Nucleotide may be methylated to form 5-methylcytosine"
aaattagagaaaagagtcttggtgaggacgtcggtgctgagacgaaatcgcgccagtgaacgtgtttcatgaggaaagcagcttctgccgacatctatgcagcgattttcctgctgacccta

SEQ ID NO: 19291 - DNA, 122 bp, Homo sapiens
  misc_feature (61)..(62): /note="This region represents a CpG dinucleotide"
  misc_feature (61)..(61): /note="Nucleotide may be methylated to form 5-methylcytosine"
ccagtgtggtggtgaagtatgcgagttgctgcctgtaaagtgctgttcgcaacacctggccgttcatttgccgactgctgctgctgctggaacaatggccagggaacaaaacctgtcacagc

SEQ ID NO: 19292 - DNA, 122 bp, Homo sapiens
  misc_feature (61)..(62): /note="This region represents a CpG dinucleotide"
  misc_feature (61)..(61): /note="Nucleotide may be methylated to form 5-methylcytosine"
cctgtttcatagacggtgccttctgattataacctcatgtggtgctagcaaggagctctccgtgggctctgttataataagggcactaagcccattcacaaaggcttcacccccatgaccta

SEQ ID NO: 19293 - DNA, 122 bp, Homo sapiens
  misc_feature (61)..(62): /note="This region represents a CpG dinucleotide"
  misc_feature (61)..(61): /note="Nucleotide may be methylated to form 5-methylcytosine"
tcttcatctctactatgaataattgattttgcctacaggtgtgattctacttaatgttatcgtgtactctttaaaaatatacatttttgaaattttcacttatgttatgatgatatggtaca

SEQ ID NO: 19294 - DNA, 122 bp, Homo sapiens
  misc_feature (61)..(62): /note="This region represents a CpG dinucleotide"
  misc_feature (61)..(61): /note="Nucleotide may be methylated to form 5-methylcytosine"
tagttgccaaggagcagaagttaccattgtctaaccattgtccatccaggcttagggcaccgacgagcatggaagggaggctgacagggggcttagggctgctcagctgaggcctacaggtc

SEQ ID NO: 19295 - DNA, 122 bp, Homo sapiens
  misc_feature (61)..(62): /note="This region represents a CpG dinucleotide"
  misc_feature (61)..(61): /note="Nucleotide may be methylated to form 5-methylcytosine"
cacaacaataattgtggtttagactctttacagcacactgatattggcatctcatttcaacgtaattttgaccacatagctccctaacaaataggtcagccagtttcaggagtttagatgct

SEQ ID NO: 19296 - DNA, 122 bp, Homo sapiens
  misc_feature (61)..(62): /note="This region represents a CpG dinucleotide"
  misc_feature (61)..(61): /note="Nucleotide may be methylated to form 5-methylcytosine"
ttcctgtatctattttggcagggaaaccatgcagccaagctagccaggtactcctgagagcgacagccaacccaaaccacgtaagggtgaaagaatggtttaagtagtaaatacagttgcca

SEQ ID NO: 19297 - DNA, 122 bp, Homo sapiens
  misc_feature (61)..(62): /note="This region represents a CpG dinucleotide"
  misc_feature (61)..(61): /note="Nucleotide may be methylated to form 5-methylcytosine"
gcgctttattctgtagttctcctagcaatctggtgagctccactctacagataaggaaatcgaggccaaggacagctaaagaagcgaggtgcgcaaggtgcccaggtccgaagtgtttccgc

SEQ ID NO: 19298 - DNA, 122 bp, Homo sapiens
  misc_feature (61)..(62): /note="This region represents a CpG dinucleotide"
  misc_feature (61)..(61): /note="Nucleotide may be methylated to form 5-methylcytosine"
tcatgtgagtcagctttgaagcgaatcctccagcccagtcaggttttcagacaactccagcgttggccaaaatcttgactacaacctcaggagaaaccctggccagaactacccagataagc

SEQ ID NO: 19299 - DNA, 122 bp, Homo sapiens
  misc_feature (61)..(62): /note="This region represents a CpG dinucleotide"
  misc_feature (61)..(61): /note="Nucleotide may be methylated to form 5-methylcytosine"
aataccactttcttccttcttttcaagaacgacttcttgcataagtcatctgcccttaggcgctctttccttataaatcaattctccttcattactatcatgatctggcctctgttcacatc

SEQ ID NO: 19300 - DNA, 122 bp, Homo sapiens
  misc_feature (61)..(62): /note="This region represents a CpG dinucleotide"
  misc_feature (61)..(61): /note="Nucleotide may be methylated to form 5-methylcytosine"
ttgtttttcaaaataaaccaggctctttctgatgtgcaaaacttccctctcagctcacagcgacaaatcctcaagcagcagcaatggggagacaatcaacagctgcctgatgttacaagcag

SEQ ID NO: 19301 - DNA, 122 bp, Homo sapiens
  misc_feature (61)..(62): /note="This region represents a CpG dinucleotide"
  misc_feature (61)..(61): /note="Nucleotide may be methylated to form 5-methylcytosine"
gagagcgcctcgcactccacactgcccagcctcacatgttctcaacgtcttcactctttccgagtctaacgggccccagttacgtccctgttattgctgtttgcagttccctatttaactgc

SEQ ID NO: 19302 - DNA, 122 bp, Homo sapiens
  misc_feature (61)..(62): /note="This region represents a CpG dinucleotide"
  misc_feature (61)..(61): /note="Nucleotide may be methylated to form 5-methylcytosine"
aaatcaatggaagatgaaaatgatccaaaccccaaaaataaatacatatgggaaaagttacgatctggaccaactgcattcaaaggaaatgcagttttattagtttcaaggacatacagtaa

SEQ ID NO: 19303 - DNA, 122 bp, Homo sapiens
  misc_feature (61)..(62): /note="This region represents a CpG dinucleotide"
  misc_feature (61)..(61): /note="Nucleotide may be methylated to form 5-methylcytosine"
caaagagcactgggctgggagtctgaaccctgccggcaggtgaggctccttcttagcagacgtgactcatttgtggagtagttgcattagtcaggggaggctaggccatgccaaggtgacaa

SEQ ID NO: 19304 - DNA, 122 bp, Homo sapiens
  misc_feature (61)..(62): /note="This region represents a CpG dinucleotide"
  misc_feature (61)..(61): /note="Nucleotide may be methylated to form 5-methylcytosine"
gatggcttcagaaggcaagacggaggcagcagtttggcgcctgtctcaaagcctcctccccgcgccaaggacaggtcggaggaggggggcgtggggacaggtagagcggaggctccagcgtt

SEQ ID NO: 19305 - DNA, 122 bp, Homo sapiens
  misc_feature (61)..(62): /note="This region represents a CpG dinucleotide"
  misc_feature (61)..(61): /note="Nucleotide may be methylated to form 5-methylcytosine"
accaccacttacctcctgctctcgttgaaatattacaacccgaccccccttgtcccctgtcgctagtaattctcccgtgtggttgaattctaccgtagagataatgtcagctgcaaagaaga

SEQ ID NO: 19306 - DNA, 122 bp, Homo sapiens
  misc_feature (61)..(62): /note="This region represents a CpG dinucleotide"
  misc_feature (61)..(61): /note="Nucleotide may be methylated to form 5-methylcytosine"
tcttggttcaattaagcaaatcatggcccaacatcagggtagcaagcctgcagtgttccacgtaatgagctgtgactcatggatgatttgggggttttgggtgccaggctagcacatcatgt

SEQ ID NO: 19307 - DNA, 122 bp, Homo sapiens
  misc_feature (61)..(62): /note="This region represents a CpG dinucleotide"
  misc_feature (61)..(61): /note="Nucleotide may be methylated to form 5-methylcytosine"
atatatgaaatcccaattacctgtacttatccatcgctagttcacttcgctgcagtccttcgtaaaccaaagagcaggtagaacgagttcaccctgaacacagcatccctttaaatgaccct

SEQ ID NO: 19308 - DNA, 122 bp, Homo sapiens
  misc_feature (61)..(62): /note="This region represents a CpG dinucleotide"
  misc_feature (61)..(61): /note="Nucleotide may be methylated to form 5-methylcytosine"
gttgggctggagcccaaaagtgctcatcgaagccctggcacccgcttgcctgcgtgctcccgctcccacagagagtttgagcatggtggtggccaagtaagtaggccacacccctgtcgcaa

SEQ ID NO: 19309 - DNA, 122 bp, Homo sapiens
  misc_feature (61)..(62): /note="This region represents a CpG dinucleotide"
  misc_feature (61)..(61): /note="Nucleotide may be methylated to form 5-methylcytosine"
ggttctgtagcacagcgcgcttgagtgactaaaaacctgggttgggtgcaggtccgattacgcagcagaggttgatgtcatgggcagatttggaagacttgaggggttctttgtaagccccg

SEQ ID NO: 19310 - DNA, 122 bp, Homo sapiens
  misc_feature (61)..(62): /note="This region represents a CpG dinucleotide"
  misc_feature (61)..(61): /note="Nucleotide may be methylated to form 5-methylcytosine"
ttcacgtcttcttcaattgtctccttttcaaagtccttcaccctggccatcctataagtacgtaaccccacctcttagcacttcctgtttccatttcctgtcttttctccttggcacttgtc

SEQ ID NO: 19311 - DNA, 122 bp, Homo sapiens
  misc_feature (61)..(62): /note="This region represents a CpG dinucleotide"
  misc_feature (61)..(61): /note="Nucleotide may be methylated to form 5-methylcytosine"
cccttcccctaaaggttgtttgagcaggaatccaaccagcaattactatatttccatttgcgattagaaaagaagaggtttttcttatctgcaaacatttggccaccaaatcccaggagtat

SEQ ID NO: 19312 - DNA, 122 bp, Homo sapiens
  misc_feature (61)..(62): /note="This region represents a CpG dinucleotide"
  misc_feature (61)..(61): /note="Nucleotide may be methylated to form 5-methylcytosine"
aggtacttctcattccatgtcactgtcattcactgccctctcattctctccctctctgcacgcgcagaaccacagagcacagactcgagcaagctaaatcgctatttgcagagcctgtggct

SEQ ID NO: 19313 - DNA, 122 bp, Homo sapiens
  misc_feature (61)..(62): /note="This region represents a CpG dinucleotide"
  misc_feature (61)..(61): /note="Nucleotide may be methylated to form 5-methylcytosine"
aatgaagtcagatgaccgagacactgattcttatcctcagaaaccacagctgtcacagagcgctttaatttattcattgattggctgtgaaaaccacagctaaatgtctgaggtgcaacttc

SEQ ID NO: 19314 - DNA, 122 bp, Homo sapiens
  misc_feature (61)..(62): /note="This region represents a CpG dinucleotide"
  misc_feature (61)..(61): /note="Nucleotide may be methylated to form 5-methylcytosine"
cacctgcactatccatagctggctgcttatatattcttatcacattgttatgataaatggcgcagagtgaagctgtgctacccatgtggcagggagcctcctccccagcccctcctccctgt

SEQ ID NO: 19315 - DNA, 122 bp, Homo sapiens
  misc_feature (61)..(62): /note="This region represents a CpG dinucleotide"
  misc_feature (61)..(61): /note="Nucleotide may be methylated to form 5-methylcytosine"
ctctaaagattctggtatatccagcccaaccagcccattttaattgaaaatttactgctacgtaataaaagacgttaataacatgtacaatatagatacaggaaaaaaaagtttgagtttaa

SEQ ID NO: 19316 - DNA, 122 bp, Homo sapiens
  misc_feature (61)..(62): /note="This region represents a CpG dinucleotide"
  misc_feature (61)..(61): /note="Nucleotide may be methylated to form 5-methylcytosine"
cgtgatccgcccatctcggcctcccgaagtgctgggattacaggcgtgagccactgcacccggccgattggtgtttcttaactaggctggtttcggtcactgcatgacctctgagtacgatg

SEQ ID NO: 19317 - DNA, 122 bp, Homo sapiens
  misc_feature (61)..(62): /note="This region represents a CpG dinucleotide"
  misc_feature (61)..(61): /note="Nucleotide may be methylated to form 5-methylcytosine"
gatcctaaaagagacagttttcaagtggaattaaaatagacagaattcatggccaggtgccgtcactgacacttgtaatcccagcactttgggaggctgagacagtggattacttgagccca

SEQ ID NO: 19318 - DNA, 122 bp, Homo sapiens
  misc_feature (61)..(62): /note="This region represents a CpG dinucleotide"
  misc_feature (61)..(61): /note="Nucleotide may be methylated to form 5-methylcytosine"
gttcttcttcttatggaacctaaatccaccttcaatcttcctgacaatggtaattgtttgcgtgacaggatgagtgacagcatcggatacacagaggtggagggatcctgggagtggtgacg

SEQ ID NO: 19319 - DNA, 122 bp, Homo sapiens
  misc_feature (61)..(62): /note="This region represents a CpG dinucleotide"
  misc_feature (61)..(61): /note="Nucleotide may be methylated to form 5-methylcytosine"
gaggtaagttttagtaggaaactgaaagaaaccaaggcccaacaaaatgaggcaactagacggagtgactggggaagtttccagccaagtcagatataaaatttgtactgtgaaaaactgtt

SEQ ID NO: 19320 - DNA, 122 bp, Homo sapiens
  misc_feature (61)..(62): /note="This region represents a CpG dinucleotide"
  misc_feature (61)..(61): /note="Nucleotide may be methylated to form 5-methylcytosine"
aaaaacattcttgatctgtaaataatctaagcaaaccacactaaacattcctttttctatcgcatggatagaggatagtctctgtttctaaagtagattgggagccaataccttagtagtta

SEQ ID NO: 19321 - DNA, 122 bp, Homo sapiens
  misc_feature (61)..(62): /note="This region represents a CpG dinucleotide"
  misc_feature (61)..(61): /note="Nucleotide may be methylated to form 5-methylcytosine"
tagtggggaggagtttcttggttaagaagcagaaccttggagctgtgttgtaactacatgcgtaaaggcaggcttaggacatgtcagacgtctgaagcaggaagcaggcaaaggaagcaccg

SEQ ID NO: 19322 - DNA, 122 bp, Homo sapiens
  misc_feature (61)..(62): /note="This region represents a CpG dinucleotide"
  misc_feature (61)..(61): /note="Nucleotide may be methylated to form 5-methylcytosine"
tgagtaagggccacaggacctgatgagccagtttaccagactgggtggtggcaactggtccgtcagaatgcagggtatgaaaaacacctcaaacacaaatcttaagttttacaatagtggtg

SEQ ID NO: 19323 - DNA, 122 bp, Homo sapiens
  misc_feature (61)..(62): /note="This region represents a CpG dinucleotide"
  misc_feature (61)..(61): /note="Nucleotide may be methylated to form 5-methylcytosine"
cccaagcctttatatcaaacatcttcacagcagtcttatgaaaactggggctgggggaggcgggtggagaacacagaggaaaaaaacaggagaaaagactatgtggttaatcaaattttgaa

SEQ ID NO: 19324 - DNA, 122 bp, Homo sapiens
  misc_feature (61)..(62): /note="This region represents a CpG dinucleotide"
  misc_feature (61)..(61): /note="Nucleotide may be methylated to form 5-methylcytosine"
acagtaccagctgcctgcagagtagctgtgtgaccacaggtcagtttctcaacatctgtgcgccttagttccttgtttgtcaaacagaaatgaaaataacaccaatttgggggttatttctg

SEQ ID NO: 19325 - DNA, 122 bp, Homo sapiens
  misc_feature (61)..(62): /note="This region represents a CpG dinucleotide"
  misc_feature (61)..(61): /note="Nucleotide may be methylated to form 5-methylcytosine"
tatctttttattcagtacaagttgaaattacagttgtattaaaactgactgaaggctgggcgcagtggctcatgcctgtaatcccagcactttgggaggccaaggtaggtagatcacttgag

SEQ ID NO: 19326 - DNA, 122 bp, Homo sapiens
  misc_feature (61)..(62): /note="This region represents a CpG dinucleotide"
  misc_feature (61)..(61): /note="Nucleotide may be methylated to form 5-methylcytosine"
ctagtgaatggtatctgtggttgatttcctgagtgagcccttcccatgagagtgtctcctcgagtgtccccacaggccgatctttcatttgtttctgctttacctctggcttcctggaacag

SEQ ID NO: 19327 - DNA, 122 bp, Homo sapiens
  misc_feature (61)..(62): /note="This region represents a CpG dinucleotide"
  misc_feature (61)..(61): /note="Nucleotide may be methylated to form 5-methylcytosine"
tcagtaagaaaagaggaagaaaacctgtgagtgggcaagtcagtctttacatgctacagccgtcaagtgccagctatttggtcaggaaaggcaaaataatggctgtaggaactcctgaataa

SEQ ID NO: 19328 - DNA, 122 bp, Homo sapiens
  misc_feature (61)..(62): /note="This region represents a CpG dinucleotide"
  misc_feature (61)..(61): /note="Nucleotide may be methylated to form 5-methylcytosine"
ttagcagaggaaaaggaaagttttcacgttgagatcgagaaggaagatgattcatggtcacgaagggaaaggtcccctgaagtcttgagagatggctcaccactgctccactttcctttggg

SEQ ID NO: 19329 - DNA, 122 bp, Homo sapiens
  misc_feature (61)..(62): /note="This region represents a CpG dinucleotide"
  misc_feature (61)..(61): /note="Nucleotide may be methylated to form 5-methylcytosine"
aggttgttgatttactcagtcagcacttttaaaaagttttaatccatgcatcagcagcagcgggggatagcaaactatggcctgtgggtcaaacccagcctgctgcctgtttttgtatggcc

SEQ ID NO: 19330 - DNA, 122 bp, Homo sapiens
  misc_feature (61)..(62): /note="This region represents a CpG dinucleotide"
  misc_feature (61)..(61): /note="Nucleotide may be methylated to form 5-methylcytosine"
tcagtgcttccccattttttccccctgttatggctccttttggcttctggctgaacttcacgcccagtttctcattttggtcaggccccgtgtaagtgtccccttcacattaccctcagctc

SEQ ID NO: 19331 - DNA, 122 bp, Homo sapiens
  misc_feature (61)..(62): /note="This region represents a CpG dinucleotide"
  misc_feature (61)..(61): /note="Nucleotide may be methylated to form 5-methylcytosine"
ctgcaggtaggcggtgctgatggacttgtcggctgagatggtgacctggccttggaaggacgggctgtatctggtatcagagtcaccaggatagatgatccccatccactccaggcctttcc

SEQ ID NO: 19332 - DNA, 122 bp, Homo sapiens
  misc_feature (61)..(62): /note="This region represents a CpG dinucleotide"
  misc_feature (61)..(61): /note="Nucleotide may be methylated to form 5-methylcytosine"
aacaggagtttttaacaagtgctctagaatgactgcttcataggagagctgttacctagacgcaggagagaaatgaacatatgtaaagcaaggtaagtcattttaagcaactggatttgaaa

SEQ ID NO: 19333 - DNA, 122 bp, Homo sapiens
  misc_feature (61)..(62): /note="This region represents a CpG dinucleotide"
  misc_feature (61)..(61): /note="Nucleotide may be methylated to form 5-methylcytosine"
caaagaattttccaaaaatgttctcattgcatattttgcttatgtatatacactcttcagcgtgcatgccctccactcccatgccttagccacacctcatccctagtggacaggaacccatt

SEQ ID NO: 19334 - DNA, 122 bp, Homo sapiens
  misc_feature (61)..(62): /note="This region represents a CpG dinucleotide"
  misc_feature (61)..(61): /note="Nucleotide may be methylated to form 5-methylcytosine"
cccaacagggacatgtccgtcacggtggtgtgttacatcatgtcagatggcaattgaatgcgctgttaacataagctgacaggaaggctctagcaatctgcttatctggatgccacccttgc

SEQ ID NO: 19335 - DNA, 122 bp, Homo sapiens
  misc_feature (61)..(62): /note="This region represents a CpG dinucleotide"
  misc_feature (61)..(61): /note="Nucleotide may be methylated to form 5-methylcytosine"
tgagtacgtgtcacgcacgcataacagtcctgggcacatagcacacactgtggggccagccgctgtcagaattctcctgttcctcagtgtgcgggtgggtcggcctaaagagtgctgctttc

SEQ ID NO: 19336 - DNA, 122 bp, Homo sapiens
  misc_feature (61)..(62): /note="This region represents a CpG dinucleotide"
  misc_feature (61)..(61): /note="Nucleotide may be methylated to form 5-methylcytosine"
gtgagtcatcacttatggataggtttccacttcccagtcacttgaaggtaaacatgcttacgtggcgactttttcttttccctcccgagtgtggtttgtggtagaatttgagggaaatataa

SEQ ID NO: 19337 - DNA, 122 bp, Homo sapiens
  misc_feature (61)..(62): /note="This region represents a CpG dinucleotide"
  misc_feature (61)..(61): /note="Nucleotide may be methylated to form 5-methylcytosine"
tagcattgtttaaatggttccagtctcagccagtgtgagtgagtgtgcccgtgtgccctgcgatagaatagatcctgcccagggcagatttccgccttgtaacctaagctacccagaactgc

SEQ ID NO: 19338 - DNA, 122 bp, Homo sapiens
  misc_feature (61)..(62): /note="This region represents a CpG dinucleotide"
  misc_feature (61)..(61): /note="Nucleotide may be methylated to form 5-methylcytosine"
ctttggggccaggctcaaactgagaatttgtggacacctcagagtcccttgcctgatcgccggcctctgaccacagcctgtgcccagcacttcctgtcttctctcttgcagtctcagctcta

SEQ ID NO: 19339 - DNA, 122 bp, Homo sapiens
  misc_feature (61)..(62): /note="This region represents a CpG dinucleotide"
  misc_feature (61)..(61): /note="Nucleotide may be methylated to form 5-methylcytosine"
gatttctggacacacatcctggttgggctttctggagctttatgaatttgtagatttatacgtttcaccaagtttagaaaacatcccgttcatcccgttacgtcttacttcaaagctgtgag

SEQ ID NO: 19340 - DNA, 122 bp, Homo sapiens
  misc_feature (61)..(62): /note="This region represents a CpG dinucleotide"
  misc_feature (61)..(61): /note="Nucleotide may be methylated to form 5-methylcytosine"
ctcatccaccaaatctgaaggccttaaaattgtgtgttgggaggatgtgaattgggaggacggtgtcactagactgtggattagggatggtaaagtagggaggatgctattttgcaactata

SEQ ID NO: 19341 - DNA, 122 bp, Homo sapiens
  misc_feature (61)..(62): /note="This region represents a CpG dinucleotide"
  misc_feature (61)..(61): /note="Nucleotide may be methylated to form 5-methylcytosine"
gagaatctacccgtgacagagctgcgtggaagctgacaggaggcccctctcaggaggtgacgcagaaactgggaccgggaaaatgaggcagggcccacgtgcggagacccagggaaggggga

SEQ ID NO: 19342 - DNA, 122 bp, Homo sapiens
  misc_feature (61)..(62): /note="This region represents a CpG dinucleotide"
  misc_feature (61)..(61): /note="Nucleotide may be methylated to form 5-methylcytosine"
cagaacagttcacggcaaagacttggccctggggctcctaaatccaagctgcctccccggcgccccaagccccagcctcgctctgggagtcatgattcccgtggagactccttcaaccacat

SEQ ID NO: 19343 - DNA, 122 bp, Homo sapiens
  misc_feature (61)..(62): /note="This region represents a CpG dinucleotide"
  misc_feature (61)..(61): /note="Nucleotide may be methylated to form 5-methylcytosine"
tcagatagaatgtgtgggatggtgccctcagaaatgtgcaatggaaaagccataccaaatcggaatgcaaacacgggatgaaagggaatgtgaatcaacacaaaatatgtgtgtatacagac

SEQ ID NO: 19344 - DNA, 122 bp, Homo sapiens
  misc_feature (61)..(62): /note="This region represents a CpG dinucleotide"
  misc_feature (61)..(61): /note="Nucleotide may be methylated to form 5-methylcytosine"
caggtagtgctaaccacacccttcttctgtgacctcaccgtgacaggtacagatggctaccggtgccctggcactgccttgggaatgagtgtgttttaatgtctttgtcttccactgcaaga

SEQ ID NO: 19345 - DNA, 122 bp, Homo sapiens
  misc_feature (61)..(62): /note="This region represents a CpG dinucleotide"
  misc_feature (61)..(61): /note="Nucleotide may be methylated to form 5-methylcytosine"
ttcttggagccaagtgcccttaagtgtgataagcagagaaataaaaatcaaagtgagtcacggatgaatgagcacataatggagattgttttgttttagagatggggtctcactatattgcc

SEQ ID NO: 19346 - DNA, 122 bp, Homo sapiens
  misc_feature (61)..(62): /note="This region represents a CpG dinucleotide"
  misc_feature (61)..(61): /note="Nucleotide may be methylated to form 5-methylcytosine"
ccaggaattcacttactagctggacaaccttgcataagtcacttcacttctttgtgcctccgctttccttctataaaacgagcataatgtaatcacctcatatcattgtccagtgaattcag

SEQ ID NO: 19347 - DNA, 122 bp, Homo sapiens
  misc_feature (61)..(62): /note="This region represents a CpG dinucleotide"
  misc_feature (61)..(61): /note="Nucleotide may be methylated to form 5-methylcytosine"
agagccgagggctgggcaggagtctgggaaggagcgggtggggtccactttccccaggtgcgctggactctgtccctccatggctcatggacaatgattgacctgaagccgctccaggaagt

SEQ ID NO: 19348 - DNA, 122 bp, Homo sapiens
  misc_feature (61)..(62): /note="This region represents a CpG dinucleotide"
  misc_feature (61)..(61): /note="Nucleotide may be methylated to form 5-methylcytosine"
acagaagaatctaaagccagtaatctcctggactttccagttaagtctgtttgagtctatcgccacatccagtgcccagcatagggcttggcacagagcaggcactctgtgaatgttgaatg

SEQ ID NO: 19349 - DNA, 122 bp, Homo sapiens
  misc_feature (61)..(62): /note="This region represents a CpG dinucleotide"
  misc_feature (61)..(61): /note="Nucleotide may be methylated to form 5-methylcytosine"
atttgggtggcagacatggccgtgaatgggaaggagaagggcctgacctcactgcaaggccgtctgcattaaagaggccaatttctgagcacaaggcaggttgccaggaaatgcagcttgac

SEQ ID NO: 19350 - DNA, 122 bp, Homo sapiens
  misc_feature (61)..(62): /note="This region represents a CpG dinucleotide"
  misc_feature (61)..(61): /note="Nucleotide may be methylated to form 5-methylcytosine"
acggttttaacacttggattacaggttcatctctccatgccagaagagagcagcagggagcgaactctcatcacagcacagctaccaaggcctctgcctgtactgagagcagctcaggccaa

SEQ ID NO: 19351 - DNA, 122 bp, Homo sapiens
  misc_feature (61)..(62): /note="This region represents a CpG dinucleotide"
  misc_feature (61)..(61): /note="Nucleotide may be methylated to form 5-methylcytosine"
tggaaaattactgacttgttagaacaaagcagtgacagctgctggctctaaaattaggaacggagacaaggaattttcagagcaccaccaaacaaatcacaaaggcacaattcacccagcac

SEQ ID NO: 19352 - DNA, 122 bp, Homo sapiens
  misc_feature (61)..(62): /note="This region represents a CpG dinucleotide"
  misc_feature (61)..(61): /note="Nucleotide may be methylated to form 5-methylcytosine"
ctcattttccacacttcagccttcagcagtagtgaaacatgagtcactgttaagttctcacgatgaaattctcactattagttcagcactattaagtgactcatgttcgacacttcagtggt

SEQ ID NO: 19353 - DNA, 122 bp, Homo sapiens
  misc_feature (61)..(62): /note="This region represents a CpG dinucleotide"
  misc_feature (61)..(61): /note="Nucleotide may be methylated to form 5-methylcytosine"
tgacaagagactcctcttcaagagcaggccacatatcctttatttcccagggggtggaaacgggcaacctcacagaggaattgaatcataatgaattgaagaaagaaaaatctcctgaagtt

SEQ ID NO: 19354 - DNA, 122 bp, Homo sapiens
  misc_feature (61)..(62): /note="This region represents a CpG dinucleotide"
  misc_feature (61)..(61): /note="Nucleotide may be methylated to form 5-methylcytosine"
attggaaaggagcaaaccagaaatggctttattttctcccttggactaatttttaagtctcgattggaattcagtgagtaggttcataatgtgcatgacagaaataagctttatagtggttt

SEQ ID NO: 19355 - DNA, 122 bp, Homo sapiens
  misc_feature (61)..(62): /note="This region represents a CpG dinucleotide"
  misc_feature (61)..(61): /note="Nucleotide may be methylated to form 5-methylcytosine"
ctggcccctgtcaccaggtggctgcagcctagctatgacacaggcctctcttgcttatatcgataaggatctctggctactgtcccaatggtccagccctcctgggtcgaatgaagggcact

SEQ ID NO: 19356 - DNA, 122 bp, Homo sapiens
  misc_feature (61)..(62): /note="This region represents a CpG dinucleotide"
  misc_feature (61)..(61): /note="Nucleotide may be methylated to form 5-methylcytosine"
ctccctgggatatttaaagtcattgccttttctaactcttccattattgataacacgctacgtgaagaaagcccggcacagccagggtgatctcattcttactaaaattccctgaagcatgc

SEQ ID NO: 19357 - DNA, 122 bp, Homo sapiens
  misc_feature (61)..(62): /note="This region represents a CpG dinucleotide"
  misc_feature (61)..(61): /note="Nucleotide may be methylated to form 5-methylcytosine"
cttctcttgaaaaggaggagaatcaacactgggctcacaactcatcagagctgagtcatacgtacatcagcaggacctacgtgggaaccaaatagcaaactcaaattgggaaatttgaggaa

SEQ ID NO: 19358 - DNA, 122 bp, Homo sapiens
  misc_feature (61)..(62): /note="This region represents a CpG dinucleotide"
  misc_feature (61)..(61): /note="Nucleotide may be methylated to form 5-methylcytosine"
tggttgatgtgaatggtgacagctcctgtgaggggcttgtttcttctgaacgtgtgcccacgtgtgtatgcacgtgtgtgagtgtgcatgtgcccacgtgtgtatgcacgtgtgtgagtgtg

SEQ ID NO: 19359 - DNA, 122 bp, Homo sapiens
  misc_feature (61)..(62): /note="This region represents a CpG dinucleotide"
  misc_feature (61)..(61): /note="Nucleotide may be methylated to form 5-methylcytosine"
aaagagaagagttcctagagtacagggtatgagaggtatcatggaatggagggggaaacacgataaataagagaaggacacatgtccttagggaatagaagattcccctggtcctgaaggag

SEQ ID NO: 19360 - DNA, 122 bp, Homo sapiens
  misc_feature (61)..(62): /note="This region represents a CpG dinucleotide"
  misc_feature (61)..(61): /note="Nucleotide may be methylated to form 5-methylcytosine"
accccccaggctagcacagccctaatgcaggaggtctaggggcctactgcctgctgtgatcgtaaccatcagccctcgtgaacctcacccttctgtaattctccctttgaggatgggtggac

SEQ ID NO: 19361 - DNA, 122 bp, Homo sapiens
  misc_feature (61)..(62): /note="This region represents a CpG dinucleotide"
  misc_feature (61)..(61): /note="Nucleotide may be methylated to form 5-methylcytosine"
gagaggggtggattactgcatcagacctgaacttcctcaagttgaaaagtttgcaggctccggacctcagctggattcctaactgtgggccaatgcttcctgcttctgcaggccaagaggga

SEQ ID NO: 19362 - DNA, 122 bp, Homo sapiens
  misc_feature (61)..(62): /note="This region represents a CpG dinucleotide"
  misc_feature (61)..(61): /note="Nucleotide may be methylated to form 5-methylcytosine"
cggatgcctgaggtaggcgtcctccccgaagcacccctctcctcaatcgaggctgctgagcgcctgcaaggcctggctggaagccagctcgacctccagccttggaacccaacacccaccac

SEQ ID NO: 19363 - DNA, 122 bp, Homo sapiens
  misc_feature (61)..(62): /note="This region represents a CpG dinucleotide"
  misc_feature (61)..(61): /note="Nucleotide may be methylated to form 5-methylcytosine"
ctcctaacttttattactctttaccttgtgaagtcatataaggctctaagtcaagtaagacggaaggaataagattagcacacttcctggtacagtgggcagtacgtgatagctatctgaaa

SEQ ID NO: 19364 - DNA, 122 bp, Homo sapiens
  misc_feature (61)..(62): /note="This region represents a CpG dinucleotide"
  misc_feature (61)..(61): /note="Nucleotide may be methylated to form 5-methylcytosine"
tgccaacatgtgatgcctgggggtggctctgtggctaacatgtgcagctctctcttcagacgtgaagctctctgcatgatccccaagtagaaggaaccacacacagttcactgctccacact

SEQ ID NO: 19365 - DNA, 122 bp, Homo sapiens
  misc_feature (61)..(62): /note="This region represents a CpG dinucleotide"
  misc_feature (61)..(61): /note="Nucleotide may be methylated to form 5-methylcytosine"
gtattaattctcatagtagcaataataggaaatctgtttgtgttgtatatgagttaataacgatatgttcaaatgggtggactcagtagttgattcaggtggagagaaatagatcctttcag

SEQ ID NO: 19366 - DNA, 122 bp, Homo sapiens
  misc_feature (61)..(62): /note="This region represents a CpG dinucleotide"
  misc_feature (61)..(61): /note="Nucleotide may be methylated to form 5-methylcytosine"
gctatttcataacttcctgccttggcaaattttgttctctctgcctggaagttataaacgcgtctttctaaacttagttcaagagtctcccctggaaaatctcaaaaatagttaattaactt

SEQ ID NO: 19367 - DNA, 122 bp, Homo sapiens
  misc_feature (61)..(62): /note="This region represents a CpG dinucleotide"
  misc_feature (61)..(61): /note="Nucleotide may be methylated to form 5-methylcytosine"
tagtcatgcccgcccttgtagccaccgcttcacccaccttctccggcctgcccccagccccgccacttttcaagttgggcaacttaatggaaaaaaatgaaataaaaagaagagcgagacca

SEQ ID NO: 19368 - DNA, 122 bp, Homo sapiens
  misc_feature (61)..(62): /note="This region represents a CpG dinucleotide"
  misc_feature (61)..(61): /note="Nucleotide may be methylated to form 5-methylcytosine"
ttcccagccctcctgatctcaggtcttcagtagccagtcacaagcagatgtggtgctcctcgtccccacgctgtgtcatcaggaatagggcgttaatcttgagggatttggggccagcagac

SEQ ID NO: 19369 - DNA, 122 bp, Homo sapiens
  misc_feature (61)..(62): /note="This region represents a CpG dinucleotide"
  misc_feature (61)..(61): /note="Nucleotide may be methylated to form 5-methylcytosine"
gggccatgactcaatgcacccaaattctctagattgctatgtctctactcgctaagccttcgggaacaacaagcacagaacttttagggtgctgtctcactgatgtcggcgttagctctggt

SEQ ID NO: 19370 - DNA, 122 bp, Homo sapiens
  misc_feature (61)..(62): /note="This region represents a CpG dinucleotide"
  misc_feature (61)..(61): /note="Nucleotide may be methylated to form 5-methylcytosine"
aggcttgttaatctgtagcccattccatccattcaagttaaagtatttattgcataaacacgtatttgatttttcccccttgttccagctatggatcaagattaacatctctttgtgaacac

SEQ ID NO: 19371 - DNA, 122 bp, Homo sapiens
  misc_feature (61)..(62): /note="This region represents a CpG dinucleotide"
  misc_feature (61)..(61): /note="Nucleotide may be methylated to form 5-methylcytosine"
ctgcatgagatgagaggccaatggagaatgttgagtaaagaactgacctgatctagtttacgttttaaacagtctattctggaatttgtgttgagaaaagctacagagggataaagaggatc

SEQ ID NO: 19372 - DNA, 122 bp, Homo sapiens
  misc_feature (61)..(62): /note="This region represents a CpG dinucleotide"
  misc_feature (61)..(61): /note="Nucleotide may be methylated to form 5-methylcytosine"
ggcttttgtcctatgaactagaaaaacgtggcccttctcacagacacggcttggtgagcacgtagctgcttcggtgagaattcgaaaaacggtacaccttcctccatgcgatgaagcccatg

SEQ ID NO: 19373 - DNA, 122 bp, Homo sapiens
  misc_feature (61)..(62): /note="This region represents a CpG dinucleotide"
  misc_feature (61)..(61): /note="Nucleotide may be methylated to form 5-methylcytosine"
tgggctactgtgccaacccagggagtgcatgtggctctgcctgggatcagcaataaggctcgtggtcctcactgggtgccccagccccctacctttgaagccaccatgctctcttcaattgc

SEQ ID NO: 19374 - DNA, 122 bp, Homo sapiens
  misc_feature (61)..(62): /note="This region represents a CpG dinucleotide"
  misc_feature (61)..(61): /note="Nucleotide may be methylated to form 5-methylcytosine"
tacttcactcccactccatcctccccatccccctctccctgcctcgtgcaaatcccagcacgccgcccaccatatgcagcgatccctcactatcacacagagcccaacatctggcgggcgct

SEQ ID NO: 19375 - DNA, 122 bp, Homo sapiens
  misc_feature (61)..(62): /note="This region represents a CpG dinucleotide"
  misc_feature (61)..(61): /note="Nucleotide may be methylated to form 5-methylcytosine"
gcaggagctgtggtagctcacccacactgcaatccatctgctgactcaacttgctagtatcgggcagcagccaggaccacagctcctccagctcctttgtgaccttttccttcagcttcttc

SEQ ID NO: 19376 - DNA, 122 bp, Homo sapiens
  misc_feature (61)..(62): /note="This region represents a CpG dinucleotide"
  misc_feature (61)..(61): /note="Nucleotide may be methylated to form 5-methylcytosine"
atgaaaataaatgacagggtctgccagaccttgaatcttgccttaccagtaatggtgtggcgtaatattgtgactaaagaatgctttacagttgttcattccattcattttttctcctgtag
